United States Patent Application Publication US 2017/0114356 A1 - sequence listing, part 102

SEQ ID NO: 192689 - protein, 648 aa, Zea Mays
MALESVALSVGFPRGAAEHVAAEDKDILLRTADLVIYYSCLEEQLFPSVLVEAMSLEKLVIAPDLGIIRKHIDDGVNGLLFPRKNVGMLAQVLLQAVSNGKVSISGQKIASAGKAHAKNLMASETIEGYAVLLENVVKFPTDALHPLTVDEIPLALKKEWKWHLFEDVKHLHHMNTSLSSYKILKKLEQEWHRNQMENSSLSTTKISDTFSAIAWEEQRANEVMDIKRKMEEDELKDRNDQPHGTWEEVYRNVKRVDRLKNELHERDDKELERTGQPLCIYEPFFGEGTWPFLHQSSLYRGVGLSSKGRRPGADDIDASSRLPLLNNVYYRDILGEFGAFFALANRIDRIHKNSWIGFQSWRGTARKANLSNNAEFAILEAVQSQKHGDSFYFWVRMDQDPRNHTYKDFWSFCDAINAGNCRLAVLEAFQRMYGVHLDHDLDSLLHMPNDGDTWSVMQSWVLPTRSFLEFVMFSRMFVDALDAQMYDKHHQTGHCILSLHKDRHCYSRVLELIVNVWAFHSARRMVYVNPQTGAMQEQHHLSGRRGQMSVQFFSYTTLKSMDEELAEEFDLDHPDRRWLWPQTGEVFWQGLYQRERIMRQQEKERRKQQSREKIQRIKNRARQKTLGKYIKPPPDDTGGSNDTTSVDL

SEQ ID NO: 192690 - protein, 742 aa, Zea Mays
MYAAFDSGNYFVIPGPPSEAFSYHEDVRISLGLSPKDFLIAIVGTPFSYGDNLMEEALVLQAVSPLLRRYHSENSAQSELKVKIFTGNITEKHRMALESVALSVGFPRGAAEHVAAEDKDILLRTADLVIYYSCLEEQLFPSVLVEAMSLEKLVIAPDLGIIRKHIDDGVNGLLFPRKNVGMLAQVLLQAVSNGKVSISGQKIASAGKAHAKNLMASETIEGYAVLLENVVKFPTDALHPLTVDEIPLALKKEWKWHLFEDVKHLHHMNTSLSSYKILKKLEQEWHRNQMENSSLSTTKISDTFSAIAWEEQRANEVMDIKRKMEEDELKDRNDQPHGTWEEVYRNVKRVDRLKNELHERDDKELERTGQPLCIYEPFFGEGTWPFLHQSSLYRGVGLSSKGRRPGADDIDASSRLPLLNNVYYRDILGEFGAFFALANRIDRIHKNSWIGFQSWRGTARKANLSNNAEFAILEAVQSQKHGDSFYFWVRMDQDPRNHTYKDFWSFCDAINAGNCRLAVLEAFQRMYGVHLDHDLDSLLHMPNDGDTWSVMQSWVLPTRSFLEFVMFSRMFVDALDAQMYDKHHQTGHCILSLHKDRHCYSRVLELIVNVWAFHSARRMVYVNPQTGAMQEQHHLSGRRGQMSVQFFSYTTLKSMDEELAEEFDLDHPDRRWLWPQTGEVFWQGLYQRERIMRQQEKERRKQQSREKIQRIKNRARQKTLGKYIKPPPDDTGGSNDTTSVDL

SEQ ID NO: 192691 - protein, 182 aa, Zea Mays
MYGVHLDHDLDSLLHMPNDGDTWSVMQSWVLPTRSFLEFVMFSRMFVDALDAQMYDKHHQTGHCILSLHKEQHHLSGRRGQMSVQFFSYTTLKSMDEELAEEFDLDHPDRRWLWPQTGEVFWQGLYQRERIMRQQEKERRKQQSREKIQRIKNRARQKTLGKYIKPPPDDTGGSNDTTSVDL

SEQ ID NO: 192692 - protein, 78 aa, Zea Mays
MSSLQLLFPHNVLPLKFLIPSSSYPTLVKVLFFLASPSQAQPEHPEPINKHNLFTSYVTMHTQPNKNKNIVKNMYTNT

SEQ ID NO: 192693 - protein, 144 aa, Zea Mays
MVGKKRGVISPLDHLAGLLEVRVVRGVDLAIRDLRSSDPYVVLRIGKAQEVFDKDTFVDDAMGNAELDIRPLVEIVKMKLQGVADKTVVKKLVPNRQNCLAEESSIYISEGKVKQDLVVRLRNVECGEIELQLQWVHLPGSKGV

SEQ ID NO: 192694 - protein, 166 aa, Zea Mays
MAASDLESKAKEAFVDDDFELAAELYTQAIDAGPATADLYADRAQAHIKLGNYTEAVADANKAIGLDPTMHKAYYRKGAACIKLEEYQTAKAALELGSSYAPGDSRFTRLLKECDECIAEESSQAPAKNVEAPVAATVEDKEDVANMDNTPPVVEPPSKPKYRSVY

SEQ ID NO: 192695 - protein, 433 aa, Zea Mays
MDKPASQDVLRLMHHTYRNQGFQLYVSFFEIYGGKLFDLLNDRSKLCMREDGKQKVCIVGLQEYRVSDIETIKELIEKGSATRSTGTTGANEESSRSHAILQLAIKRRVDGNDSKPPRPVGKLSFIDLAGSERGADTTDNDKQTRIEGAEINKSLLALKECIRALDNDQTHIPFRGSKLTEVLRDSFIGDSRTVMISCISPSSGSCEHTLNTLRYADRVKSLSKGSNAKKDVSLAVPLRESNSSPLPSVVPSFSASEVMNDITGRSNFGWPKQQYVKEQPAPTFVERMPKAKDAVEFTSSNIAEVPDIMYQLGRQPSRKDVTLANNMRNSVAYPTRRVEPDDDDEHLNNLLQEEEELVSAHRKQVEETLDILKEEMNILGDADQPGFQLDDYITRLSSMLSQKAAVIVDLQARLEQFQRLLNENNVLLYAQSP

SEQ ID NO: 192696 - protein, 484 aa, Zea Mays
MNGGSRRQRYSSEQLLFDVPANAGAGRWAQQRGGVRRGDGEIFVSVEPATPARLCGGDAAAGDSPGQRQQLSPGLLDLHAFDTELIPDFQVPGIYDGAQKFGYGGGLDESDMRFTSNKMMSKSTIFPDGNYLKAFTEKEKAAPVAKIKVVVRKRPLNKKEVSKKEEDIVDIEQRSNSLTVHETKLKVDLTEYVEKHEFVFDAVLDEDVSNDEVYRETVEPVVPAIFNRTKATCFAYGQTGSGKTYTMRPLPLKASQDVLRLMHHTYRNQGFQLYVSFFEIYGGKLFDLLNDRSKLCMREDGKQKVCIVGLQEYRVSDIETIKELIEKGSATRSTGTTGANEESSRSHAILQLAIKRRVDGNDSKPPRPVGKLSFIDLAGSERGADTTDNDKQTRIEGAEINKSLLALKECIRALDNDQTHIPFRGSKLTEVLRDSFIGDSRTVMISCISPSSGSCEHTLNTLRYADRVCQKEATPRKTCLWQCL

SEQ ID NO: 192697 - protein, 501 aa, Zea Mays
MAPTVPSAAKSASPSQPSGKSEVADLKQQLRQLAGSRAPDADDQRRDVFKRVISCMTAGIDVSAAFGEMVLCSATSDVVTKKMCYLYVGSHARAHPDLALLTINFLQRDCRDQDPTIRGLALRSLCSLRVPNLVEYLVTPLTTGLKDPSAYVRTIAAVGAAKLYHISATACIDADLPASLKALMLSDPDAQVVANCLHALQEIWTLEAANSEAAAREIETLYSKPVVFYLLNKIKEFSEWAQCIVLELASKFLPSDNNEIFDIMNLLEDRLQHANGAVVLATIKVFLHLTMSMTDVHQQVYERIKAPLLTLVGAGSPEQSYSVLCHLHLLVMRAPMLFSSDYKSFYCQFSDPSYVKKLKLEMLTAIANESNTYEIVTELCEYAGNVDVPIARESIRAVGKIALQQYDVNAIVDRLLQFLEMDKDYVTAETLVLVKDLLRKYPQWSHDCIAVVGNISSKNIQEPKGKAALIWMLGEYSQDMHDAPYILESLVENWDEEHSPE

SEQ ID NO: 192698 - protein, 421 aa, Zea Mays
MDKDYVTAETLVLVKDLLRKYPQWSHDCIAVVGNISSKNIQEPKGKAALIWMLGEYSQDMHDAPYILESLVENWDEEHSPEVRLHLLTAVMKCFFKRPPETQKALGDTLAAGLSDTHQDVHDRALFYYRLLQYSPNVAERVVNPPKQAVSVFADTQSSEIKDRIFDEFNSLSVVYQKPSYMFTDKEHRGPFEYSEDLTGLTEDPENVISAQRYQENDNDLLLSTSDKEDNGTRASNGSSTSTYNAPSDLISPSLISSQAPAETSLVNTGGTYSSQSNFSLDDLLGLSVTEAPALPQPTLALNSKPVLDPGTFQRKWGQLALALSQECSLSPQGAVALMNPQSLIRHMQSNHIQCIASGGQPPNYKFFFYAQKDGAAAFFLVECIVNTASAKAQLKIKADDGTAAEAFSSLFQSALSKFGLS

SEQ ID NO: 192699 - protein, 584 aa, Zea Mays
MAPTVPSAAKSASPSQPSGKSEVADLKQQLRQLAGSRAPDADDQRRDVFKRVISCMTAGIDVSAAFGEMVLCSATSDVVTKKMCYLYVGSHARAHPDLALLTINFLQRDCRDQDPTIRGLALRSLCSLRVPNLVEYLVTPLTTGLKDPSAYVRTIAAVGAAKLYHISATACIDADLPASLKALMLSDPDAQVVANCLHALQEIWTLEAANSEAAAREIETLYSKPVVFYLLNKIKEFSEWAQCIVLELASKFLPSDNNEIFDIMNLLEDRLQHANGAVVLATIKVFLHLTMSMTDVHQQVYERIKAPLLTLVGAGSPEQSYSVLCHLHLLVMRAPMLFSSDYKSFYCQFSDPSYVKKLKLEMLTAIANESNTYEIVTELCEYAGNVDVPIARESIRAVGKIALQQYDVNAIVDRLLQFLEMDKDYVTAETLVLVKDLLRKYPQWSHDCIAVVGNISSKNIQEPKGKAALIWMLGEYSQDMHDAPYILESLVENWDEEHSPEVRLHLLTAVMKCFFKRPPETQKALGDTLAAGLSDTHQTHRAVKSKIGYSMSSTVYQLYIRSHRTCLQIRSIADHLSTQRILQA

SEQ ID NO: 192700 - protein, 502 aa, Zea Mays
MAPTVPSAAKSASPSQPSGKSEVADLKQQLRQLAGSRAPDADDQRRDVFKRVISCMTAGIDVSAAFGEMVLCSATSDVVTKKMCYLYVGSHARAHPDLALLTINFLQRDCRDQDPTIRGLALRSLCSLRVPNLVEYLVTPLTTGLKDPSAYVRTIAAVGAAKLYHISATACIDADLPASLKALMLSDPDAQVVANCLHALQEIWTLEAANSEAAAREIETLYSKPVVFYLLNKIKEFSEWAQCIVLELASKFLPSDNNEIFDIMNLLEDRLQHANGAVVLATIKVFLHLTMSMTDVHQQVYERIKAPLLTLVGAGSPEQSYSVLCHLHLLVMRAPMLFSSDYKSFYCQFSDPSYVKKLKLEMLTAIANESNTYEIVTELCEYAGNVDVPIARESIRAVGKIALQQYDVNAIVDRLLQFLEMDKDYVTAETLVLVKDLLRKYPQWSHDCIAVVGNISSKNIQEPKGKAALIWMLGEYSQDMHDAPYILESLVENWDEEHSPEQ

SEQ ID NO: 192701 - protein, 737 aa, Zea Mays
MAPTVPSAAKSASPSQPSGKSEVADLKQQLRQLAGSRAPDADDQRRDVFKRVISCMTAGIDVSAAFGEMVLCSATSDVVTKKMCYLYVVANCLHALQEIWTLEAANSEAAAREIETLYSKPVVFYLLNKIKEFSEWAQCIVLELASKFLPSDNNEIFDIMNLLEDRLQHANGAVVLATIKVFLHLTMSMTDVHQQVYERIKAPLLTLVGAGSPEQSYSVLCHLHLLVMRAPMLFSSDYKSFYCQFSDPSYVKKLKLEMLTAIANESNTYEIVTELCEYAGNVDVPIARESIRAVGKIALQQYDVNAIVDRLLQFLEMDKDYVTAETLVLVKDLLRKYPQWSHDCIAVVGNISSKNIQEPKGKAALIWMLGEYSQDMHDAPYILESLVENWDEEHSPEVRLHLLTAVMKCFFKRPPETQKALGDTLAAGLSDTHQDVHDRALFYYRLLQYSPNVAERVVNPPKQAVSVFADTQSSEIKDRIFDEFNSLSVVYQKPSYMFTDKEHRGPFEYSEDLTGLTEDPENVISAQRYQENDNDLLLSTSDKEDNGTRASNGSSTSTYNAPSDLISPSLISSQAPAETSLVNTGGTYSSQSNFSLDDLLGLSVTEAPALPQPTLALNSKPVLDPGTFQRKWGQLALALSQECSLSPQGAVALMNPQSLIRHMQSNHIQCIASGGQPPNYKFFFYAQKDGAAAFFLVECIVNTASAKAQLKIKADDGTAAEAFSSLFQSALSKFGLS

SEQ ID NO: 192702 - protein, 578 aa, Zea Mays
MNLLEDRLQHANGAVVLATIKVFLHLTMSMTDVHQQVYERIKAPLLTLVGAGSPEQSYSVLCHLHLLVMRAPMLFSSDYKSFYCQFSDPSYVKKLKLEMLTAIANESNTYEIVTELCEYAGNVDVPIARESIRAVGKIALQQYDVNAIVDRLLQFLEMDKDYVTAETLVLVKDLLRKYPQWSHDCIAVVGNISSKNIQEPKGKAALIWMLGEYSQDMHDAPYILESLVENWDEEHSPEVRLHLLTAVMKCFFKRPPETQKALGDTLAAGLSDTHQDVHDRALFYYRLLQYSPNVAERVVNPPKQAVSVFADTQSSEIKDRIFDEFNSLSVVYQKPSYMFTDKEHRGPFEYSEDLTGLTEDPENVISAQRYQENDNDLLLSTSDKEDNGTRASNGSSTSTYNAPSDLISPSLISSQAPAETSLVNTGGTYSSQSNFSLDDLLGLSVTEAPALPQPTLALNSKPVLDPGTFQRKWGQLALALSQECSLSPQGAVALMNPQSLIRHMQSNHIQCIASGGQPPNYKFFFYAQKDGAAAFFLVECIVNTASAKAQLKIKADDGTAAEAFSSLFQSALSKFGLS

SEQ ID NO: 192703 - protein, 241 aa, Zea Mays
MFTDKEHRGPFEYSEDLTGLTEDPENVISAQRYQENDNDLLLSTSDKEDNGTRASNGSSTSTYNAPSDLISPSLISSQAPAETSLVNTGGTYSSQSNFSLDDLLGLSVTEAPALPQPTLALNSKPVLDPGTFQRKWGQLALALSQECSLSPQGAVALMNPQSLIRHMQSNHIQCIASGGQPPNYKFFFYAQKDGAAAFFLVECIVNTASAKAQLKIKADDGTAAEAFSSLFQSALSKFGLS

SEQ ID NO: 192704 - protein, 263 aa, Zea Mays
MSSGVRSGGGGDHHGVHHQHGHGHLAGADDGAEYAFYSNDMESFFFNQPASADVNNGGSRTGADELTMPPYSSVTDYLQGFMDMDPSGLARHLDAPCLLAEDAPLKHELSVDVSYDSQGTSGAPGDGAAAMHTPNSSVSLSSSDREGEGQLRRCRKGRPKAEDDAEGDEKDQEDGENSTKANRSKKKAEKRQPRVAFLTKSEVDHLEDGYRWRKYGQKAVKNSPYPRSPQFHLFVPHIHGHYNCMLCITQHTSSYLIVYMLIN

SEQ ID NO: 192705 - protein, 296 aa, Zea Mays
MKKAEEFSYFRRSKLNALFNLSRQITSLASQNNRRMNEIDREVKTILRGIIEKRQKAAKNGEATKDDDLLGLLLESNMNYSDSDGKSSKGITVEEVIGECKVFYFAGMETTAVLLTWTVAVLSMHPEWQDRAREEVLQVFGENKPDFNGVARLKVVTMVLYEVLRLYPPVAAINRRTRQPTKLGGVTYPAGVMLTTPVMFIHRDPALWGSDADEFNPGRFADGVSKACRDPGAFAPFSWGPRVCIGQNFALLEAKLAVSMILQRFAFEVSPAYVHAPYTVLTLHPQHGAPVRLRRL

SEQ ID NO: 192706 - protein, 75 aa, Zea Mays
MEHMHTEPHPLKNERGRNGKKDDDLKNEALPFGDFSCGTISASSDFIGEAAPRLCKEHTADAESIWNRSVASVIG

SEQ ID NO: 192707 - protein, 434 aa, Zea Mays
MVVLEVSFAAAASSVVRWILMLGGLMAAAALLWQAGRLLRLLWWQPRRLERALRAQGVRGTSYRFPAGDLKEYGRLAKEAWSKPLPLRCHDTAPRVAPFLHRLVLEHGRTSMSWFGPSPKVTIVDPELAKDVLSNKFGHFEKLKVPALSKMLGSGVASHEGEKWVKHRRILNPAFHLEKLRLMLPTFSACCEELVGRWAARCLGPDGGSCELDVWPELQALTGDVISRTAFGSSYLEGRRIFELQSEQAERFVGAIQKIVIPGYMYLPTKNNRRMRQINKEVNSILRGVVGKRMRAMAMREGGESTTGADDLLGLLLESNNTRHEGETGHGQQSALGMTIEDVIEECKLFYFAGMETTSVLLTWAMVLLSMHREWQDRAREEVTGLFGRDDNKPEYEGLSRLKTVSLLFFSIARCTRQAGTNCFVLYIYPCVSR

SEQ ID NO: 192708 - protein, 351 aa, Zea Mays
MEISLLHNESDAGSTSLLPLPLLSYGPRSMVPIQVPPSSDFESILSPEPIYSDLQLKEMNYNAAAMDESTEFLHLILSGNDEGYNSTTELQVWDVVDFYVSENFSALQFDSLMGFTNEVSTSYNDCMNLVDMVERPVARLSLDDTPKPSNSDDAVPADNVTMDPDETSLYLQTKPTDSETESSSAAGDVETEYLDLKLLSRCMPDLMDVDSPNCLSKTPVKKKHVTLVLDLDETLVHSTLDHDNADFTLEVFFNMKNHTVYVRKRPYLKMFLEKVAQMFEVVIFTASQRVYAEQLIDKLDPDGKYISRRIYRESCVFSDGCYTKDLTILGIDLAKVAIVDNTPQVQSLSNM

SEQ ID NO: 192709 - protein, 231 aa, Zea Mays
MEISLLHNESDAGSTSLLPLPLLSYGPRSMVPIQVPPSSDFESILSPEPIYSDLQLKEMNYNAAETLVHSTLDHDNADFTLEVFFNMKNHTVYVRKRPYLKMFLEKVAQMFEVVIFTASQRVYAEQLIDKLDPDGKYISRRIYRESCVFSDGCYTKDLTILGIDLAKVAIVDNTPQVFQLQVDNGIPIKSWFDDPSDQELIELLPFLESLVDSEDVRPIISKTFHDKLEQN

SEQ ID NO: 192710 - protein, 368 aa, Zea Mays
MCSNDVCCIAELSGENTEIMEISLLHNESDAGSTSLLPLPLLSYGPRSMVPIQVPPSSDFESILSPEPIYSDLQLKEMNYNAAAMDESTEFLHLILSGNDEGYNSTTELQVWDVVDFYVSENFSALQFDSLMGFTNEVSTSYNDCMNLVDMVERPVARLSLDDTPKPSNSDDAVPADNVTMDPDETSLYLQTKPTDSETESSSAAGDVETEYLDLKLLSRCMPDLMDVDSPNCLSKTPVKKKHVTLVLDLDETLVHSTLDHDNADFTLEVFFNMKNHTVYVRKRPYLKMFLEKDLTILGIDLAKVAIVDNTPQVFQLQVDNGIPIKSWFDDPSDQELIELLPFLESLVDSEDVRPIISKTFHDKLEQN

SEQ ID NO: 192711 - protein, 265 aa, Zea Mays
MALAVRTPRFQPRPASISAPATPASNSLAAAAAANARPRTCAGAAVRASPFTEATSSSRYLRDAWSYATDCSSNSASRSSDAAAAAAALGRRDDEIALQLPELQRLLDALRASRRRGAEGGGGGGRGPGRVALVGTGPGDPELLTLKAVRAIEAADLVLYDRLVSNDVLDLVGEGSRLLYVGKTAGYHSRTQEEIHELLLSFAEAGANVVRLKGGDPLVFGRGGEEMDFLQQQGIKVEIIPGITSASGIAAELGIPLTHRGVATS

SEQ ID NO: 192712 - protein, 265 aa, Zea Mays
MALAVRTPRFQPRPASISAPATPASNSLAAAAAANARPRTCAGAAVRASPFTEATSSSRYLRDAWSYATDCSSNSASRSSDAAAAAAALGRRDDEIALQLPELQRLLDALRASRRRGAEGGGGGGRGPGRVALVGTGPGDPELLTLKAVRAIEAADLVLYDRLVSNDVLDLVGEGSRLLYVGKTAGYHSRTQEEIHELLLSFAEAGANVVRLKGGDPLVFGRGGEEMDFLQQQGIKVEIIPGITSASGIAAELGIPLTHRGVATR

SEQ ID NO: 192713 - protein, 211 aa, Zea Mays
MALAVRTPRFQPRPASISAPATPASNSLAAAAAANARPRTCAGAAVRASPFTEATSSSRYLRDAWSYATDCSSNSASRSSDAAAAAAALGRRDDEIALQLPELQRLLDALRASRRRGAEGGGGGGRGPGRVALVGTGPGDPELLTLKAVRAIEAADLVLYDRLVSNDVLDLVGEGSRLLYVGKTAGYHSRTQVWEHCSFVSIWKFTRDWKC

SEQ ID NO: 192714 - protein, 261 aa, Zea Mays
MALAVRTPRFQPRPASISAPATPASNSLAAAAAANARPRTCAGAAVRASPFTEATSSSRYLRDAWSYATDCSSNSASRSSDAAAAAAALGRRDDEIALQLPELQRLLDALRASRRRGAEGGGGGGRGPGRVALVGTGPGDPELLTLKAVRAIEAADLVLYDRLVSNDVLDLVGEGSRLLYVGKTAGYHSRTQEEIHELLLSFAEAGANVVRLKGGDPLVICCCLQNYLVLKDYCGTSICYPSSINNVRHFFASGSVINIVD

SEQ ID NO: 192715 - protein, 71 aa, Zea Mays
MQGEEGKTSGRKAKLVHLTKHREQPRLTAWWWYRWWLRCSLTSQPPQRRRSPCRLPRRRRRRYGRSATPRG

SEQ ID NO: 192716 - protein, 351 aa, Zea Mays
MKLRAKGIGLLLLLVLLALCSTIEVGEARRGKHWRSSRSSPGSSQLKKGKGKKSSSHRQYGANRPGPKPPVSSTPSSGAGKGNHQNPYQPSPSPSPNAPDIPPMPSPANGSRHSTPEPPAPSCGKGQQQPSQPPPATSQGAVFNVVDFGAKGDGVTDDTKAFEGAWAAACKKGACTVLVPPELEFLVGPISFSGPYCKSNIVFQLEGTILAPTSAKSWGSGLLQWLEFTKLNGMVIQGNGIINGRGQQWWTYSDTEDEDDDDTYDVEFERMPQIKPTALRFYGSFNVVVAGITIVNSSQCHLKFDNCQGVMVHDLTISSPENSLNTDGIHLVQESLLPVCNSDQCKYPTTT

SEQ ID NO: 192717 - protein, 369 aa, Zea Mays
MKLRAKGIGLLLLLVLLALCSTIEVGEARRGKHWRSSRSSPGSSQLKKGKGKKSSSHRQYGANRPGPKPPVSSTPSSGAGKGNHQNPYQPSPSPSPNAPDIPPMPSPANGSRHSTPEPPAPSCGKGQQQPSQPPPATSQGAVFNVVDFGAKGDGVTDDTKAFEGAWAAACKKGACTVLVPPELEFLVGPISFSGPYCKSNIVFQLEGTILAPTSAKSWGSGLLQWLEFTKLNGMVIQGNGIINGRGQQWWTYSDTEDEDDDDTYDVEFERMPQIKPTALRFYGSFNVVVAGITIVNSSQCHLKFDNCQGVMVHDLTISSPENSLNTDGIHLQNSKDVSIHHTNLACGNSLILTVCLRGCLNALELIFSG

SEQ ID NO: 192718 - protein, 2174 aa, Zea Mays
MFHLAPIVILLEGVFCPLKDQRTFVSSPKIRISPQGKYIATLDLTGFVNFFSLDGDLRTVPLQTLGKARHLIDVKDISWWTDNVLMLVRKDGSISMYSITEDKIVSNDDPVLSTPILEKAKATEGHAFVLQSRRYGTNTPVNKRMDSDSEPCLLSGSGEHQQTEGDEMSWSLISFSKVTVAEMYSVLIREKRYKDALDFASRYNLDKDEVLKACWLHSDANTHEIDSYLAKIKDQVFVLSECVNKVGPTEADLRALLSFGLCITDCYRFSELDNSSKGSTWDSRTIRLRLLRHIDMLETFLGINMGRYAAGEYSKFRSMPLVETAIALAESGKIGALNLIFKRHPYTVSSDILRVLSAIPETLAVQTYSQLLPGKSLPSVVILRAGDWVECEQMASYINNCPAELDKVEEIKTEILVKHSKGFSWPSVAELCEWYKNRARDIDCLSGQLENSLAMIELACQKGIVELQPFFDDIKCLYQVVYSNELNEFTMNLLTWEDLPDYEKFKIILKGVKEDTVVQRLEENAIRFMKKLYEHKQESYLVSWLKEVAAKNELLICLAVIENGCGESPIYGLFKDLAEMIETSVHCIYMCSATNQWNTMSSILSKSLYKTKREKSLVASEEDCNLKDAKHALGSSMVSYEEMQCVCADILSGLGNAPEDFYHYDSVPDKPNDVKYLDILEKRLKVAEGHVEVGRLFAYYQVPKSMHFFLSAHLDEKNVRQIIRLLLSKFGRRQPVRSDNEWANMWRDLKLFQEKAFPFLDSEYMLAEFIRGLLKAGKFSLARNYLGGTSAVSLSTEKAENLVIQAAREYFFSASTLSGNEIWKARECLNLLPNSKNVQAETDIIDALTVRLPYLGVTILPLQFRQVKDPMDIIRMVITCQAGAYLHFEEIIDVAKLLGLRSEEEVADVEEAIAREAVVNGDLQLALDICLNLTKKSHGAVWDLCAAIARGPPLDNLDTGTREKLLGFALSHCDDDSVGELLNAWKELHAQGTFEKLMITTATNPPNFLIDGSSITPLPVQSVQDILDLRDDNGHDRRSDLVGIVKDMLSKVCLDFSNGDTHNWESMLEENRKLLCFGALVLPWLLKLFSNEACDGEIMDHLTRRCRFSTKVKAATSIIYWLVINGLAPNDNIIMILAKSIMEPPIDEEFDVLGCSVLLNLMDPFNGVKIIEEELKRRESYQEISSIMSVGMLYSSLNNSKKECSTPEQRRNLLLHKFHEKFTSADTDDLDQVDMANTTFWREWKSKLEEDKQLADQARMLKQILPDIDTSRFLSGDVNYIKIVVYSFVNSVKMEKKHILKEAVRIAEAYGLQRTEVLLRFLACSLVSEYWDNNDILNEISEFREDIVSSAKGVIDMIYSDVYLEIDGYNKQRLSYIYGILSACHSYLKRTNEIELRYPVHVHTHKLEPFQYYKVLEEECKKVCFIDGLNFKNIAGLDNLNFEHFNDEVCKNIHASTVTAIADMVQSLVSMYVDVLAKGLISQQGVYKHYVLGLLASLEGRSEAQSNNTDYEKLQASLCEFELNYDSCREYIQALPATDISYIVRRYCTLCFPSNLARSHPQEPSWRKPLATLLEFWSKVVDDIPGDSIDACSYGRTDYLNSNRLSLCMRAFRQLLIIDEIALHQGWDAISMYVKDCLRNGKMMETPCFCRAMILSGCSFESVVEVYFGGQGQLGSENADPSNYLDLLELYNAATEKCLSDLSEESCEYRILLHNLLSSLSRSTGKHAGALEMVRSGVWGKLIRYSEDMQLESQLRVYALQLMQCITGRNLKSLPNEMVCQVEPWESWYEHGAGAAIADESINSSSSITGTLVALRSTQMVAAVLPDANITPENLATLDSAVSCFLKLSERASGVSVAVFEAVLEEWEQLFSPKEEHVAPHESPKETSDWSDGWDDGWEALPEELESPKNKQEGVLLSVHPLHSCWMEIIRKRVELGELHKVLELLDRASLKHSVFLEEEEAHSLVELVSALDCFMALKTVLLLPYESLRLQCLQMVEVKMREGIVSTSSNADDQELLALVLSSGTMQKIITEEAYSKFFSYICHLVGHLARSFQTDLLVQWNEATSKINRSLLFARVLFPCFVSELVLGGQYLLAGFVISRWMHTHPSLGLMDITETSVRCFLQGQVAQLDEVGGSDAALTDGEVCVRHTISTLQPKLVSLLQSALALSNKEL

SEQ ID NO: 192719 - protein, 2268 aa, Zea Mays
MVQAYLGFYIFTSDCLVHRFDYTEEPEACLCEVPISTKDAMSARTIQLPRSLSCIDYHQRHSLFVLVGDSNVSFSSNSYSGTYFMYLLHFNKNLELSLSFKSMQLEGVFCPLKDQRTFVSSPKIRISPQGKYIATLDLTGFVNFFSLDGDLRTVPLQTLGKARHLIDVKDISWWTDNVLMLVRKDGSISMYSITEDKIVSNDDPVLSTPILEKAKATEGHAFVLQSRRYGTNTPVNKRMDSDSEPCLLSGSGEHQQTEGDEMSWSLISFSKVTVAEMYSVLIREKRYKDALDFASRYNLDKDEVLKACWLHSDANTHEIDSYLAKIKDQVFVLSECVNKVGPTEADLRALLSFGLCITDCYRFSELDNSSKGSTWDSRTIRLRLLRHIDMLETFLGINMGRYAAGEYSKFRSMPLVETAIALAESGKIGALNLIFKRHPYTVSSDILRVLSAIPETLAVQTYSQLLPGKSLPSVVILRAGDWVECEQMASYINNCPAELDKVEEIKTEILVKHSKGFSWPSVAELCEWYKNRARDIDCLSGQLENSLAMIELACQKGIVELQPFFDDIKCLYQVVYSNELNEFTMNLLTWEDLPDYEKFKIILKGVKEDTVVQRLEENAIRFMKKLYEHKQESYLVSWLKEVAAKNELLICLAVIENGCGESPIYGLFKDLAEMIETSVHCIYMCSATNQWNTMSSILSKSLYKTKREKSLVASEEDCNLKDAKHALGSSMVSYEEMQCVCADILSGLGNAPEDFYHYDSVPDKPNDVKYLDILEKRLKVAEGHVEVGRLFAYYQVPKSMHFFLSAHLDEKNVRQIIRLLLSKFGRRQPVRSDNEWANMWRDLKLFQEKAFPFLDSEYMLAEFIRGLLKAGKFSLARNYLGGTSAVSLSTEKAENLVIQAAREYFFSASTLSGNEIWKARECLNLLPNSKNVQAETDIIDALTVRLPYLGVTILPLQFRQVKDPMDIIRMVITCQAGAYLHFEEIIDVAKLLGLRSEEEVADVEEAIAREAVVNGDLQLALDICLNLTKKSHGAVWDLCAAIARGPPLDNLDTGTREKLLGFALSHCDDDSVGELLNAWKELHAQGTFEKLMITTATNPPNFLIDGSSITPLPVQSVQDILDLRDDNGHDRRSDLVGIVKDMLSKVCLDFSNGDTHNWESMLEENRKLLCFGALVLPWLLKLFSNEACDGEIMDHLTRRCRFSTKVKAATSIIYWLVINGLAPNDNIIMILAKSIMEPPIDEEFDVLGCSVLLNLMDPFNGVKIIEEELKRRESYQEISSIMSVGMLYSSLNNSKKECSTPEQRRNLLLHKFHEKFTSADTDDLDQVDMANTTFWREWKSKLEEDKQLADQARMLKQILPDIDTSRFLSGDVNYIKIVVYSFVNSVKMEKKHILKEAVRIAEAYGLQRTEVLLRFLACSLVSEYWDNNDILNEISEFREDIVSSAKGVIDMIYSDVYLEIDGYNKQRLSYIYGILSACHSYLKRTNEIELRYPVHVHTHKLEPFQYYKVLEEECKKVCFIDGLNFKNIAGLDNLNFEHFNDEVCKNIHASTVTAIADMVQSLVSMYVDVLAKGLISQQGVYKHYVLGLLASLEGRSEAQSNNTDYEKLQASLCEFELNYDSCREYIQALPATDISYIVRRYCTLCFPSNLARSHPQEPSWRKPLATLLEFWSKVVDDIPGDSIDACSYGRTDYLNSNRLSLCMRAFRQLLIIDEIALHQGWDAISMYVKDCLRNGKMMETPCFCRAMILSGCSFESVVEVYFGGQGQLGSENADPSNYLDLLELYNAATEKCLSDLSEESCEYRILLHNLLSSLSRSTGKHAGALEMVRSGVWGKLIRYSEDMQLESQLRVYALQLMQCITGRNLKSLPNEMVCQVEPWESWYEHGAGAAIADESINSSSSITGTLVALRSTQMVAAVLPDANITPENLATLDSAVSCFLKLSERASGVSVAVFEAVLEEWEQLFSPKEEHVAPHESPKETSDWSDGWDDGWEALPEELESPKNKQEGVLLSVHPLHSCWMEIIRKRVELGELHKVLELLDRASLKHSVFLEEEEAHSLVELVSALDCFMALKTVLLLPYESLRLQCLQMVEVKMREGIVSTSSNADDQELLALVLSSGTMQKIITEEAYSKFFSYICHLVGHLARSFQTDLLVQWNEATSKINRSLLFARVLFPCFVSELVLGGQYLLAGFVISRWMHTHPSLGLMDITETSVRCFLQGQVAQLDEVGGSDAALTDGEVCVRHTISTLQPKLVSLLQSALALSNKEL

SEQ ID NO: 192720 - protein, 2228 aa, Zea Mays
MSARTIQLPRSLSCIDYHQRHSLFVLVGDSNVSFSSNSYSGTYFMYLLHFNKNLELSLSFKSMQLEGVFCPLKDQRTFVSSPKIRISPQGKYIATLDLTGFVNFFSLDGDLRTVPLQTLGKARHLIDVKDISWWTDNVLMLVRKDGSISMYSITEDKIVSNDDPVLSTPILEKAKATEGHAFVLQSRRYGTNTPVNKRMDSDSEPCLLSGSGEHQQTEGDEMSWSLISFSKVTVAEMYSVLIREKRYKDALDFASRYNLDKDEVLKACWLHSDANTHEIDSYLAKIKDQVFVLSECVNKVGPTEADLRALLSFGLCITDCYRFSELDNSSKGSTWDSRTIRLRLLRHIDMLETFLGINMGRYAAGEYSKFRSMPLVETAIALAESGKIGALNLIFKRHPYTVSSDILRVLSAIPETLAVQTYSQLLPGKSLPSVVILRAGDWVECEQMASYINNCPAELDKVEEIKTEILVKHSKGFSWPSVAELCEWYKNRARDIDCLSGQLENSLAMIELACQKGIVELQPFFDDIKCLYQVVYSNELNEFTMNLLTWEDLPDYEKFKIILKGVKEDTVVQRLEENAIRFMKKLYEHKQESYLVSWLKEVAAKNELLICLAVIENGCGESPIYGLFKDLAEMIETSVHCIYMCSATNQWNTMSSILSKSLYKTKREKSLVASEEDCNLKDAKHALGSSMVSYEEMQCVCADILSGLGNAPEDFYHYDSVPDKPNDVKYLDILEKRLKVAEGHVEVGRLFAYYQVPKSMHFFLSAHLDEKNVRQIIRLLLSKFGRRQPVRSDNEWANMWRDLKLFQEKAFPFLDSEYMLAEFIRGLLKAGKFSLARNYLGGTSAVSLSTEKAENLVIQAAREYFFSASTLSGNEIWKARECLNLLPNSKNVQAETDIIDALTVRLPYLGVTILPLQFRQVKDPMDIIRMVITCQAGAYLHFEEIIDVAKLLGLRSEEEVADVEEAIAREAVVNGDLQLALDICLNLTKKSHGAVWDLCAAIARGPPLDNLDTGTREKLLGFALSHCDDDSVGELLNAWKELHAQGTFEKLMITTATNPPNFLIDGSSITPLPVQSVQDILDLRDDNGHDRRSDLVGIVKDMLSKVCLDFSNGDTHNWESMLEENRKLLCFGALVLPWLLKLFSNEACDGEIMDHLTRRCRFSTKVKAATSIIYWLVINGLAPNDNIIMILAKSIMEPPIDEEFDVLGCSVLLNLMDPFNGVKIIEEELKRRESYQEISSIMSVGMLYSSLNNSKKECSTPEQRRNLLLHKFHEKFTSADTDDLDQVDMANTTFWREWKSKLEEDKQLADQARMLKQILPDIDTSRFLSGDVNYIKIVVYSFVNSVKMEKKHILKEAVRIAEAYGLQRTEVLLRFLACSLVSEYWDNNDILNEISEFREDIVSSAKGVIDMIYSDVYLEIDGYNKQRLSYIYGILSACHSYLKRTNEIELRYPVHVHTHKLEPFQYYKVLEEECKKVCFIDGLNFKNIAGLDNLNFEHFNDEVCKNIHASTVTAIADMVQSLVSMYVDVLAKGLISQQGVYKHYVLGLLASLEGRSEAQSNNTDYEKLQASLCEFELNYDSCREYIQALPATDISYIVRRYCTLCFPSNLARSHPQEPSWRKPLATLLEFWSKVVDDIPGDSIDACSYGRTDYLNSNRLSLCMRAFRQLLIIDEIALHQGWDAISMYVKDCLRNGKMMETPCFCRAMILSGCSFESVVEVYFGGQGQLGSENADPSNYLDLLELYNAATEKCLSDLSEESCEYRILLHNLLSSLSRSTGKHAGALEMVRSGVWGKLIRYSEDMQLESQLRVYALQLMQCITGRNLKSLPNEMVCQVEPWESWYEHGAGAAIADESINSSSSITGTLVALRSTQMVAAVLPDANITPENLATLDSAVSCFLKLSERASGVSVAVFEAVLEEWEQLFSPKEEHVAPHESPKETSDWSDGWDDGWEALPEELESPKNKQEGVLLSVHPLHSCWMEIIRKRVELGELHKVLELLDRASLKHSVFLEEEEAHSLVELVSALDCFMALKTVLLLPYESLRLQCLQMVEVKMREGIVSTSSNADDQELLALVLSSGTMQKIITEEAYSKFFSYICHLVGHLARSFQTDLLVQWNEATSKINRSLLFARVLFPCFVSELVLGGQYLLAGFVISRWMHTHPSLGLMDITETSVRCFLQGQVAQLDEVGGSDAALTDGEVCVRHTISTLQPKLVSLLQSALALSNKEL

SEQ ID NO: 192721 - protein, 379 aa, Zea Mays
MFLSLLIFLNYAAELLTNNKLSELACLALYLMYEKKQGKDSFWYPYIKELDRHRGRGQLAVESPLLWTESELDYLSGSPLKDEVVARDEAIRREYNELDTLWFMAGSLFQQYPFDIPTEAFPFEIFKQAFVAVQSCVVHLQKVSLARRFALVPLGPPLLTYKSNCKAMLTVDGESVRLVVDRPYKAGEPIIIWCGPQTNSRLVLNYGFVDENNPFDRISIEASLNTEDPQYQEKRMVAQRNGKHAIQNFNVYVGKEKQTVAEMLPYLRLGYISDPDEMQSILSSEGDTCPVSPCTERAVLDQLGGYLESRLAGYPTTLNEDEAMLADGSLEPKQEVATRLVRLEKKMLHACLQATNEFITDLPDHTVSPCPAQYAPEMK

SEQ ID NO: 192722 - protein, 157 aa, Zea Mays
MFLSLLIFLNYAAELLTNNKLSELACLALYLMYEKKQGKDSFWYPYIKELDRHRGRGQLAVESPLLWTESELDYLSGSPLKDEVVARDEAIRREYNELDTLWFMAGSLFQQYPFDIPTEAFPFEIFKQAFVAVQSCVVHLQCLIGRCKLMHCCHCKR

SEQ ID NO: 192723 - protein, 245 aa, Zea Mays
MLLIQEQKVSLARRFALVPLGPPLLTYKSNCKAMLTVDGESVRLVVDRPYKAGEPIIIWCGPQTNSRLVLNYGFVDENNPFDRISIEASLNTEDPQYQEKRMVAQRNGKHAIQNFNVYVGKEKQTVAEMLPYLRLGYISDPDEMQSILSSEGDTCPVSPCTERAVLDQLGGYLESRLAGYPTTLNEDEAMLADGSLEPKQEVATRLVRLEKKMLHACLQATNEFITDLPDHTVSPCPAQYAPEMK

SEQ ID NO: 192724 - protein, 232 aa, Zea Mays
MYEKKQGKDSFWYPYIKELDRHRGRGQLAVESPLLWTESELDYLSGSPLKDEVVARDEAIRREYNELDTLWFMAGSLFQQYPFDIPTEAFPFEIFKQAFVAVQSCVVHLQKVSLARRFALVPLGPPLLTYKSNCKAMLTVDGESVRLVVDRPYKAGEPIIIWCGPQTNSRLVLNYGFVDENNPFDRISIEASLNTEDPQYQEKRMVAQRNGKHAIQNFNAKRNKLLQKCFLI

SEQ ID NO: 192725 - protein, 258 aa, Zea Mays
MAGSLFQAFVAVQSCVVHLQKVSLARRFALVPLGPPLLTYKSNCKAMLTVDGESVRLVVDRPYKAGEPIIIWCGPQTNSRLVLNYGFVDENNPFDRISIEASLNTEDPQYQEKRMVAQRNGKHAIQNFNVYVGKEKQTVAEMLPYLRLGYISDPDEMQSILSSEGDTCPVSPCTERAVLDQLGGYLESRLAGYPTTLNEDEAMLADGSLEPKQEVATRLVRLEKKMLHACLQATNEFITDLPDHTVSPCPAQYAPEMK

SEQ ID NO: 192726 - protein, 207 aa, Zea Mays
MPAFPVRASASSSVVGSLTGTRRPRLIKNTTVIFATAPSTLVAMGDAVEHLKSGFQKFKTEVYDKKPELFEPLKAGQAPKYMVFACSDSRVCPSVTLGLQPGEAFTVRNIAAMVPAYDKTKYTGIGSAIEYAVCALKVEVLVVIGHSCCGGIRALLSLQDGAPDNFHFVENWVKIGFPAKVKVKKEHASVPFDDQCSILEKRGRSTL

SEQ ID NO: 192727 - protein, 164 aa, Zea Mays
MGDAVEHLKSGFQKFKTEVYDKKPELFEPLKAGQAPKYMVFACSDSRVCPSVTLGLQPGEAFTVRNIAAMVPAYDKTKYTGIGSAIEYAVCALKVEVLVVIGHSCCGGIRALLSLQDGAPDNFHFVENWVKIGFPAKVKVKKEHASVPFDDQCSILEKRGRSTL

SEQ ID NO: 192728 - protein, 225 aa, Zea Mays
MRQPTSAGGDAGFVRADQIDLKSLDEQLERHLGRRAERGVGLPSGTGSRGGESARLGPEELTPLRRCREDWEIDPTKLVIKGVIARGTFGTVHRGVYDGQDVAVKLLDWGEDGHRSEQEIAALRAAFAQEVVVWHKLEHPNVTKNRRRKLAFKVVVQIALDIARGLCYLHSEKIVHRDVKTENMLLDKTRTVKIADFGVARVEASNPSDMTGETGTLGYMAPEEV

SEQ ID NO: 192729 - protein, 248 aa, Zea Mays
MRQPTSAGGDAGFVRADQIDLKSLDEQLERHLGRRAERGVGLPSGTGSRGGESARLGPEELTPLRRCREDWEIDPTKLVIKGVIARGTFGTVHRGVYDGQDVAVKLLDWGEDGHRSEQEIAALRAAFAQEVVVWHKLEHPNVTKNRRRKLAFKVVVQIALDIARGLCYLHSEKIVHRDVKTENMLLDKTRTVKIADFGVARVEASNPSDMTGETGTLGYMAPEVFGFNHPSVPNSKHAHLEKLSFIYQ

SEQ ID NO: 192730 - protein, 188 aa, Zea Mays
MHIWRSYPLYINRYSFLEAASISIVFHTVVSSARQHDFPTDLRFVLVPFSALAFLFPISSKSGPAVCFAGIWLQVLNGHAYNRKCDVYSFGICLWEVYCCDMPYPDLSFSEVTSAVVRQNLRPEIPRCCPSSLANVMKRCWDANPDKRPEMAEVVSMLEVIDTSKGGGMIPKDQTQGWLSCFRRYRGP

SEQ ID NO: 192731 - protein, 235 aa, Zea Mays
MLVQATCVGVPGVWCLVRFARRGSGRVWSGLYSAPPARAAWLHAARRRWERASARALRAWRPAARGSAAPGEHSQQSAAARPPLPQPRAAGGWAPGALWQCPQQPRALVPPSVRRDVDMLESQSSRLRGTVGSWTLGSEAGPQPFFATLMQQKSRGKVVAAQRPEGRSLSGGILTRKMISGDLLEIYSTAKWDSRRCRLSGRGVMGACATRAVEWHGLGEAESGRTMLYIDLYFF

SEQ ID NO: 192732 - protein, 791 aa, Zea Mays
MTYLLEDDPKRIAWRYTTSWFVLDVASTIPSEFARKILPPDLRSYGFFNMLRLWRLRRVSSLFARLEKDRHFNYFWVRCAKLICVTLFAVHCSACFYYLLADMYPTPTDTWIGNSMPDFHQRGLWIRYVVSVYWSITTLTTVGYGDLHAENTREMIFNIFYMLFNLGLTAYLIGNMTNLVVHGTSRTRKYVSRFSPFCLVLADTNLYKGHIEVAPNTLLFLLCFGRKRDTIQAATSFALRNQLPSRLQDQMISHLCLKFRTDSEGLQQQETLDVLPKAIRSSISQYLFFNLVQKVYLFEGVSNDLIFQLVSEMKAEYFPPREDVILQNEAPTDFYILVTGSAMVGVAKAGDVVGEIGVLCYRPQLFTVRTKSLCQLLRMNRTAFLSLVQSNVADGTIIMNNLIRLLKQQNDNSVMMGVLKEIENMLARGRLDLPVTLCFAVNKGDDFMLHQLLKRGLDPNESDNNGHTALHIAASKGDEQCVKLLLEHGADPNARDSEGKVPLWEALCEKQNPVVELLVQSGAGLSSGDVALYACVAVEENDPELLENIIRYGGNVNSSMKDGTTPLHRAVCDGNVQMVELLLEHGADIDKQDNNGWSARALADQQGHDDIQSLFRSRKAHRQQHASKGRVAPVPIWRFNSEPTMPKMKHEEDAELRGKVVPQKLLRKRVSFQNSLFGVISSSHARQDTGRLLSKGLAGTGSPGCSHGSLVRVTIGCPEKGNAAGKLVLLPRSMTELLELGARKFGFKPTKVLTTGGAEIDEVELIRDGDHVVLVSDDWAPDVAQLRPNDK

SEQ ID NO: 192733 - protein, 602 aa, Zea Mays
MLRLRAFRPTSDKVVKIQLHPTHPWLVTADANDRVSVWNWEHRQVIYELKAGGVDERRLVGAKLEKLAEGDDSKGKPTEAIRGGSVKQVSFYDDDVRFWQHWRNCSAAAEAPTAVNQQSSMFSAPAPSTRGRHFVVICCENKVIFLDLVTMRGRDVPKQELDNRSLLCMEFLSRSSSSDAPLVAFGSSDGVIRVLSMLTWKLVRRYTGGHKGAIACLMTYMSAAGEVHLVSGGNDGLLILWSADHIHDSRELVPKISMKAHDGGVVAVELSRVMGSAPQLITIGADKTLAIWDTVTFKEIRRIKPVPKLACHSVASWCHPRAPNLDILTCVKDSHIWAIEHPTYSALTRPLCELSSLVPPQVLAQHKKLRVYCMVAHPLQPHLVATGTNIGVILSEFDPRALPAIAPLPTPTGSKEHSAVYIVERELKLLNFQLSNTANPSLGNAGVASDAGRSRNDSLEQLIVNQSKKHISTPAPHDSYSVLSVSSSGKYVAIVWPDIPSFAVCKASDWSVVDSGTGKLFAWDTCRDRYALVESALAPRMPLVVKGGSSKKAKEAAAAAAQAAAAAASAASAATVQVRILLDDGTAHVLQRSIDGRSEPIP

SEQ ID NO: 192734 - protein, 370 aa, Zea Mays
MFSAPAPSTRGRHFVVICCENKVIFLDLVTMRGRDVPKQELDNRSLLCMEFLSRSSSSDAPLVAFGSSDGVIRVLSMLTWKLVRRYTGGHKGAIACLMTYMSAAGEVHLVSGGNDGLLILWSADHIHDSRELVPKISMKAHDGGVVAVELSRVMGSAPQLITIGADKTLAIWDTVTFKEIRRIKPVPKLACHSVASWCHPRAPNLDILTCVKDSHIWAIEHPTYSALTRPLCELSSLVPPQVLAQHKKLRVYCMVAHPLQPHLVATGTNIGVILSEFDPRALPAIAPLPTPTGSKEHSAVYIVERELKLLNFQLSNTANPSLGNAGVASDAGRSRNDSLEQLIVNQSKKHISTPAPHDSYSVLSVSSSGK

SEQ ID NO: 192735 - protein, 325 aa, Zea Mays
METITSGQKYRDCRQGHYMSHQIAMTVATNPVSYEGCIQGYSIGSVKVDDTEVISFLLQTEIIPLCLRTMEMGSELSKTEFGDQGEDSNILSSRLKEISTPDRPATLRFLGTRITAIDMYTLKQEVDVIRGVLGTQTYLHQMLSFEVQDTGIEPVVSGWHGITTNASVFAQGLVSNLITAGHGREAAFAAAVLGDNALMEKAWQDTGMLAEAVLHAQVSSFEFSHAQSYFMSCKPLWFCVITLFLVFPFPSILCCYCIIRFFIYFTEIIYTLYDFDVLTGLMNSLGPWSSIIKELGYNVEQDATEGTGSHTNCKNRCGRSILGFS

SEQ ID NO: 192736 - protein, 619 aa, Zea Mays
MKYVLVTGGVVSGLGKGVTASSIGVVLKACGLRVTTIKIDPYLNTDAGTMSPFEHGEVFVLDDGGEVDLDLGNYERFLDIKLTRDNNITTGKIYQAVINKERRGDYLGKTVQVVPHITDEIQDWIERVAVIPVDGKEGPPDVCVIELGGTIGGKIFSPNNASGILGAGDIESMPFIEALGQFSYRVGPGNFCLVHVSLVPVINVVGEQKTKPTQHSVRGLRGLGLAPDVLACRSTEPLEEHVKIKLSQFCHVPISNIVNLHDVTNIWHIPLLLRDQKTHEAILKVLDLQYDGKVPREPELGMWTKRATKLDKLKTSVKIAMVGKYTGLSDSYLSVIKALLHASVAMERKLVVEWVPSCDLEDSSAKETPEAHKKAWKLLKGADGVLVPGGFGDRGVQGKILAAKYARENNVPYLGICLGMQIAVIEFARSVMKLRGANSTEFDPATTSPCVIFMPEGSKTQMGATMRLGSRRTYFHVSGCKSAKLYANASSVDERHRHRYEVNPDMVPDFERAGLQFVGKDESGKRMGIIELPSHKFFIGAQFHPEFKSRPGKPSPLFLGLIAAASGQLEPLLQRSNPTTKACPMSKVPKLKLYPTGPVNNPLNSLVNGYYPNGTGIHT

SEQ ID NO: 192737 - protein, 291 aa, Zea Mays
MKYVLVTGGVVSGLGKGVTASSIGVVLKACGLRVTTIKIDPYLNTDAGTMSPFEHGEVFVLDDGGEVDLDLGNYERFLDIKLTRDNNITTGKIYQAVINKERRGDYLGKTVQVVPHITDEIQDWIERVAVIPVDGKEGPPDVCVIELGGTIGDIESMPFIEALGQFSYRVGPGNFCLVHVSLVPVINVVGEQKTKPTQHSVRGLRGLGLAPDVLACRSTEPLEEHVKIKLSQFCHVPISNIVNLHDVTNIWHIPLLLRVGYFFSHGVFTINSKLNLFNHPQWNFFIGPEDP

SEQ ID NO: 192738 - protein, 583 aa, Zea Mays
MKFLEPNILSNERFRFLLSNPYLNTDAGTMSPFEHGEVFVLDDGGEVDLDLGNYERFLDIKLTRDNNITTGKIYQAVINKERRGDYLGKTVQVVPHITDEIQDWIERVAVIPVDGKEGPPDVCVIELGGTIGDIESMPFIEALGQFSYRVGPGNFCLVHVSLVPVINVVGEQKTKPTQHSVRGLRGLGLAPDVLACRSTEPLEEHVKIKLSQFCHVPISNIVNLHDVTNIWHIPLLLRDQKTHEAILKVLDLQYDGKVPREPELGMWTKRATKLDKLKTSVKIAMVGKYTGLSDSYLSVIKALLHASVAMERKLVVEWVPSCDLEDSSAKETPEAHKKAWKLLKGADGVLVPGGFGDRGVQGKILAAKYARENNVPYLGICLGMQIAVIEFARSVMKLRGANSTEFDPATTSPCVIFMPEGSKTQMGATMRLGSRRTYFHVSGCKSAKLYANASSVDERHRHRYEVNPDMVPDFERAGLQFVGKDESGKRMGIIELPSHKFFIGAQFHPEFKSRPGKPSPLFLGLIAAASGQLEPLLQRSNPTTKACPMSKVPKLKLYPTGPVNNPLNSLVNGYYPNGTGIHT

SEQ ID NO: 192739 - protein, 845 aa, Zea Mays
MIFKRSQRSEILAPRRCNAADSGGEDEGGGGPRPRKRRRGDEFFPVDLLGDVPASSIPYAAFGLRWSEAPEAPPEAAQPPPAARPPVVRSSRGRTLVLPSRFNDSVLTDPWKKEKPARPPPPVKTEHLARRNELLHKKGANFDSSVALSEVDDDDEEEAMVERYRARRSFGASRKHLASWSTLTSVHDEPYSNHHRKEVKLRHYYEEDEEEEEEKEDIFHCTEELVYGDIVWAKLGKRQPMWPGVVVDPTQQAAADAMPPQPRGVAVLCVMLFGWRTEFSGEKKYVWVRQGLIFPFSDYMNRFQGQTELSSCKPADFRRAVEEAFLADQGFSEVVVHCSTKGQSVQCRRVLQCESCGNCFPNKDTNKMVYVMEQLACRLCARILALKKYCGICLKNLQHKYGGRRVCCHGCESWVHAECDENCSNLKDLQDKKYHCPYCRVKMNSTLPGKNTKISDVRKDSSAQKGSKPDKVALVCFDMEGTYEPDLELISCHCGPCKGQKFLFNEWERHAGCRSKNWRSSIKLKGSLMPFGKWIDRHQPGVCPTNPPKRSSQKMKKQKLIDLLNDPYDPVNVKWTTERCAVCRWVEDWDYNKIVICNRCQIAVHQECYGVRGKQDFTSWVCRACEKPEQKRECCLCPVKGGALKPTNVDNLWVHVTCAWFQSQVAFASDELMEPAIGILNIQPLLFMKMCVICKQIHGSCTQCYRCSTYYHAICASRAGYRMELHCLEKNGRQTTKKISYCAQHRSPNPDNVLIIQTPAGTFSSKKLVHSNGKVAASRLIRKDIPLDLPSEVKISENLSAARCRVYVRKDLKDTNVWSFSKFHLSMHGSLNDRNNPLIFGPRMR

SEQ ID NO: 192740 - protein, 694 aa, Zea Mays
MIFKRSQRSEILAPRRCNAADSGGEDEGGGGPRPRKRRRGDEFFPVDLLGDVPASSIPYAAFGLRWSEAPEAPPEAAQPPPAARPPVVRSSRGRTLVLPSRFNDSVLTDPWKKEKPARPPPPVKTEHLARRNELLHKKGANFDSSVALSEVDDDDEEEAMVERYRARRSFGASRKHLASWSTLTSVHDEPYSNHHRKEVKLRHYYEEDEEEEEEKEDIFHCTEELVYGDIVWAKLGKRQPMWPGVVVDPTQQAAADAMPPQPRGVAVLCVMLFGWRTEFSGEKKYVWVRQGLIFPFSDYMNRFQGQTELSSCKPADFRRAVEEAFLADQGFSEVVVHCSTKGQSVVCHSFPDDLHEVTGSNELEYQPQIKQCRRVLQCESCGNCFPNKDTNKMVYVMEQLACRLCARILALKKYCGICLKNLQHKYGGRRVCCHGCESWVHAECDENCSNLKDLQDKKYHCPYCRVKMNSTLPGKNTKISDVRKDSSAQKGSKPDKVALVCFDMEGTYEPDLELISCHCGPCKGQKFLFNEWERHAGCRSKNWRSSIKLKGSLMPFGKWIDRHQPGVCPTNPPKRSSQKMKKQKLIDLLNDPYDPVNVKWTTERCAVCRWVEDWDYNKIVICNRCQIAVHQECYGVRGKQDFTSWVCRACEKPEQKRECCLCPVKGNPCAFDNCSVIPFFGNWVHLERKGNSIG

SEQ ID NO: 192741 - protein, 693 aa, Zea Mays
MIFKRSQRSEILAPRRCNAADSGGEDEGGGGPRPRKRRRGDEFFPVDLLGDVPASSIPYAAFGLRWSEAPEAPPEAAQPPPAARPPVVRSSRGRTLVLPSRFNDSVLTDPWKKEKPARPPPPVKTEHLARRNELLHKKGANFDSSVALSEVDDDDEEEAMVERYRARRSFGASRKHLASWSTLTSVHDEPYSNHHRKEVKLRHYYEEDEEEEEEKEDIFHCTEELVYGDIVWAKLGKRQPMWPGVVVDPTQQAAADAMPPQPRGVAVLCVMLFGWRTEFSGEKKYVWVRQGLIFPFSDYMNRFQGQTELSSCKPADFRRAVEEAFLADQGFSEVVVHCSTKGQSVVCHSFPDDLHEVTGSNELEYQPQIKCRRVLQCESCGNCFPNKDTNKMVYVMEQLACRLCARILALKKYCGICLKNLQHKYGGRRVCCHGCESWVHAECDENCSNLKDLQDKKYHCPYCRVKMNSTLPGKNTKISDVRKDSSAQKGSKPDKVALVCFDMEGTYEPDLELISCHCGPCKGQKFLFNEWERHAGCRSKNWRSSIKLKGSLMPFGKWIDRHQPGVCPTNPPKRSSQKMKKQKLIDLLNDPYDPVNVKWTTERCAVCRWVEDWDYNKIVICNRCQIAVHQECYGVRGKQDFTSWVCRACEKPEQKRECCLCPVKGNPCAFDNCSVIPFFGNWVHLERKGNSIG

SEQ ID NO: 192742 - protein, 671 aa, Zea Mays
MIFKRSQRSEILAPRRCNAADSGGEDEGGGGPRPRKRRRGDEFFPVDLLGDVPASSIPYAAFGLRWSEAPEAPPEAAQPPPAARPPVVRSSRGRTLVLPSRFNDSVLTDPWKKEKPARPPPPVKTEHLARRNELLHKKGANFDSSVALSEVDDDDEEEAMVERYRARRSFGASRKHLASWSTLTSVHDEPYSNHHRKEVKLRHYYEEDEEEEEEKEDIFHCTEELVYGDIVWAKLGKRQPMWPGVVVDPTQQAAADAMPPQPRGVAVLCVMLFGWRTEFSGEKKYVWVRQGLIFPFSDYMNRFQGQTELSSCKPADFRRAVEEAFLADQGFSEVVVHCSTKGQSVVCHSFPDDLHEVTGSNELEYQPQIKQCRRVLQCESCGNCFPNKDTNKMVYVMEQLACRLCARILALKKYCGICLKNLQHKYGGRRVCCHGCESWVHAECDENCSNLKDLQDKKYHCPYCRVKMNSTLPGKNTKISDVRKDSSAQKGSKPDKVALVCFDMEGTYEPDLELISCHCGPCKGQKFLFNEWERHAGCRSKNWRSSIKLKGSLMPFGKWIDRHQPGVCPTNPPKRSSQKMKKQKLIDLLNDPYDPVNVKWTTERCAVCRWVEDWDYNKIVICNRCQIAVHQECYGVRGKQDFTSWVCRACEKPEQKRECCLCPVKVTGCFC

SEQ ID NO: 192743 - protein, 483 aa, Zea Mays
MIFKRSQRSEILAPRRCNAADSGGEDEGGGGPRPRKRRRGDEFFPVDLLGDVPASSIPYAAFGLRWSEAPEAPPEAAQPPPAARPPVVRSSRGRTLVLPSRFNDSVLTDPWKKEKPARPPPPVKTEHLARRNELLHKKGANFDSSVALSEVDDDDEEEAMVERYRARRSFGASRKHLASWSTLTSVHDEPYSNHHRKEVKLRHYYEEDEEEEEEKEDIFHCTEELVYGDIVWAKLGKRQPMWPGVVVDPTQQAAADAMPPQPRGVAVLCVMLFGWRTEFSGEKKYVWVRQGLIFPFSDYMNRFQGQTELSSCKPADFRRAVEEAFLADQGFSEVVVHCSTKGQSVVCHSFPDDLHEVTGSNELEYQPQIKQCRRVLQCESCGNCFPNKDTNKMVYVMEQLACRLCARILALKKYCGICLKNLQHKYGGRRVCCHGCESWVHAECDENCSNLKDLQDKKYHCPYCRVKMNSTLPGKNTKISDVR

SEQ ID NO: 192744 - protein, 756 aa, Zea Mays
MIFKRSQRSEILAPRRCNAADSGGEDEGGGGPRPRKRRRGDEFFPVDLLGDVPASSIPYAAFGLRWSEAPEAPPEAAQPPPAARPPVVRSSRGRTLVLPSRFNDSVLTDPWKKEKPARPPPPVKTEHLARRNELLHKKGANFDSSVALSEVDDDDEEEAMVERYRARRSFGASRKHLASWSTLTSVHDEPYSNHHRKEVKLRHYYEEDEEEEEEKEDIFHCTEELVYGDIVWAKLGKRQPMWPGVVVDPTQQAAADAMPPQPRGVAVLCVMLFGWRTEFSGEKKYVWVRQGLIFPFSDYMNRFQGQTELSSCKPADFRRAVEEAFLADQGFSEVVVHCSTKGQSVVCHSFPDDLHEVTGSNELEYQPQIKQCRRVLQCESCGNCFPNKDTNKMVYVMEQLACRLCARILALKKYCGICLKNLQHKYGGRRVCCHGCESWVHAECDENCSNLKDLQDKKYHCPYCRVKMNSTLPGKNTKISDVRKDSSAQKGSKPDKVALVCFDMEGTYEPDLELISCHCGPCKGQKFLFNEWERHAGCRSKNWRSSIKLKGSLMPFGKWIDRHQPGVCPTNPPKRSSQKMKKQKLIDLLNDPYDPVNVKWTTERCAVCRWVEDWDYNKIVICNRCQIAVHQECYGVRGKQDFTSWVCRACEKPEQKRECCLCPVKGGALKPTNVDNLWVHVTCAWFQSQVAFASDELMEPAIGILNIQPLLFMKVLYLLPCHLCIKGRLSNGASLLGKKWQTDNKEDFLLCPTSEP

SEQ ID NO: 192745 - protein, 167 aa, Zea Mays
MVPRGRDERVRSRLPNWLDAKPDRPDELERVESAGGRVINWMGYRVLGVLATSRSIGDYYMKPFISAEPEVTVTERTHRDEFIILASDGLWDVMSNEVACRVAKSCLCGRAASKCPDTIHGSSASDAAAVLVEFAMSRGSTDNISVVVVELKRLKRWKGGSRQNGRT

SEQ ID NO: 192746 - protein, 65 aa, Zea Mays
MGYQMDPLLLPASGIYLHQQDLPNKIMLSPTRDATEFLSQGKSRSQTGLMPPYLTGICSVGNITN

SEQ ID NO: 192747 - protein, 185 aa, Zea Mays
MNDADVSKQIQQMVRFIRQEADEKANEISVSAEEEFNIEKLQLVEAEKKKIRQEYERKEKQVEVRKKIEYSMQLNASRIKVLQAQDDLVNKMKDDAMKELLLVSHNHHEYKNLLKDLIIQGLLRLKEPAVLLRCRKDDHHHVESVLHSAKHEYASKADVHEPEIFVDHDVYLPPAPSHHDAHGQF

SEQ ID NO: 192748 - protein, 200 aa, Zea Mays
MHIHEFNIEKLQLVEAEKKKIRQEYERKEKQVEVRKKIEYSMQLNASRIKVLQAQDDLVNKMKDDAMKELLLVSHNHHEYKNLLKDLIIQGLLRLKEPAVLLRCRKDDHHHVESVLHSAKHEYASKADVHEPEIFVDHDVYLPPAPSHHDAHGQFCSGGIVLASRDGKIVFESTLDARLEVVFRKKLPEIRKLLFGQTAA

SEQ ID NO: 192749 - protein, 182 aa, Zea Mays
MGSRRYDIDTRRCGIHSRPTKSMYLDAQQIVSCQTRVGDHDVGSCAVKHHFPSPIVSWIEDLSSFGNASFNPVSEYVDEQARASVGQSSASSNLHDMQISVRLTAEFMELAKENTSNNLETCGILGASFRDGTYFVTMLIIPKQEGTAHSCQAVSEEEIHAVLSEQSLYPAGWIHESCVSFH

SEQ ID NO: 192750 - protein, 181 aa, Zea Mays
MGSRRYDIDTRRCGIHSRPTKSMYLDAQQIVSCQTRVGDHDVGSCAVKHHFPSPIVSWIEDLSSFGNASFNPVSEYVDEQARASVGQSSASSNLHDMQISVRLTAEFMELAKENTSNNLETCGILGASFRDGTYFVTMLIIPKQEGTAHSCQAVSEEEIHAVLSEQSLYPAGWIHMHLPYP

SEQ ID NO: 192751 - protein, 198 aa, Zea Mays
MGSRRYDIDTRRCGIHSRPTKSMYLDAQQIVSCQTRVGDHDVGSCAVKHHFPSPIVSWIEDLSSFGNASFNPVSEYVDEQARASVGQSSASSNLHDMQISVRLTAEFMELAKENTSNNLETCGILGASFRDGTYFVTMLIIPKQEGTAHSAVSEEEIHAVLSEQSLYPAGWIHVYILAFPYFMKFLLNARTSYMLRII

SEQ ID NO: 192752 - protein, 376 aa, Zea Mays
MWPLSYLPPAPAQQLRAHPGPGSGRGPRPQPCGLPFPDALRTAAAAAAVSLSLIYGNGVGAAFAASAAQPTEVCRNGGAEMVEEVRAEAVTNEQLVEEAWEVVNESFLPDAASRPWSPEMWMQRKQDVLQGTIKSRARAHDIIRKMLASLGDPYTRFLSPSEFSKMSKYDMTGIGLNLREIPDENGSFKLMVLGLLLDGPAYSAGVRQGDELLSVNGIDVKGKSAFDASSMLQGPKETFVTIKVKHGDCGPVESMKVQRQLVTRTPVFYRLEKRENNDSSVGYIHITEFNAVAKKDLKSGASYFVLDLRDNLGGLVQAGIETAKLFLNKGDTVIYTAGRDRLVQKAIVAESGPMIATPLMVCLCCCGTAISSFKKP

SEQ ID NO: 192753 - protein, 384 aa, Zea Mays
MWPLSYLPPAPAQQLRAHPGPGSGRGPRPQPCGLPFPDALRTAAAAAAVSLSLIYGNGVGAAFAASAAQPTEVCRNGGAEMVEEVRAEAVTNEQLVEEAWEVVNESFLPDAASRPWSPEMWMQRKQDVLQGTIKSRARAHDIIRKMLASLGDPYTRFLSPSEFSKMSKYDMTGIGLNLREIPDENGSFKLMVLGLLLDGPAYSAGVRQGDELLSVNGIDVKGKSAFDASSMLQGPKETFVTIKVKHGDCGPVESMKVQRQLVTRTPVFYRLEKRENNDSSVGYIHITEFNAVAKKDLVSALKRLQKSGASYFVLDLRDNLGGLVQAGIETAKLFLNKGDTVIYTAGRDRLVQKAIVAESGPMIATPLMVCLCCCGTAISSFKKP

SEQ ID NO: 192754 - protein, 353 aa, Zea Mays
MWPLSYLPPAPAQQLRAHPGPGSGRGPRPQPCGLPFPDALRTAAAAAAVSLSLIYGNGVGAAFAASAAQPTEVCRNGGAEMVEEVRAEAVTNEQLVEEAWEVVNESFLPDAASRPWSPEMWMQRKQDVLQGTIKSRARAHDIIRKMLASLGDPYTRFLSPSEFSKMSKYDMTGIGLNLREIPDENGSFKLMVLGLLLDGPAYSAGVRQGDELLSVNGIDVKGKSAFDASSMLQGPKETFVTIKVKHGDCGPVESMKVQRQLVTRTPVFYRLEKRENNDSSVGYIHITEFNAVAKKDLVSALKRLQKSGASYFVLDLRDNLGGLVQVCHPFSSQLYIIAMLVFGLLYCMMCVED

SEQ ID NO: 192755 - protein, 215 aa, Zea Mays
MWPLSYLPPAPAQQLRAHPGPGSGRGPRPQPCGLPFPDALRTAAAAAAVSLSLIYGNGVGAAFAASAAQPTEVCRNGGAEMVEEVRAEAVTNEQLVEEAWEVVNESFLPDAASRPWSPEMWMQRKQDVLQGTIKSRARAHDIIRKMLASLGDPYTRFLSPSEFSKMSKYDMTGIGLNLREIPDENGSFKLMVLGLLLDGPAYSAGVRQGTLVWYI

SEQ ID NO: 192756 - protein, 403 aa, Zea Mays
MWPLSYLPPAPAQQLRAHPGPGSGRGPRPQPCGLPFPDALRTAAAAAAVSLSLIYGNGVGAAFAASAAQPTEVCRNGGAEMVEEVRAEAVTNEQLVEEAWEVVNESFLPDAASRPWSPEMWMQRKQDVLQGTIKSRARAHDIIRKMLASLGDPYTRFLSPSEFSKMSKYDMTGIGLNLREIPDENGSFKLMVLGLLLDGPAYSAGVRQGDELLSVNGIDVKGKSAFDASSMLQGPKETFVTIKVKHGDCGPVESMKVQRQLVTRTPVFYRLEKRENNDSSVGYIHITEFNAVAKKDLVSALKRLQKSGASYFVLDLRDNLGGLVQAGIETAKLFLNKGDTVIYTAGRDRLVQKAIVAESGPMIATPLMLLVNNRTARASEIVASALHDNCKAVLVGERTFGKV

SEQ ID NO: 192757 - protein, 247 aa, Zea Mays
MNGAEEEEPPHVSSMPKTQDGVTKPSLGKEPIPGSELWTDGLICAFELVKSHRKPVQHKSWLATEQIQEKGPTMCTRKHSRRNGHQITEPKVDESIVLENPQQTDFSNDPSVLKDRPLYAGEILDHKWVPIGWNRIAELVLRVQSDSSWENELMEMSDSEDDYTVADLAAPYWQRPVGPTWWCHVTAGHPSIDAWLNSAHWMHPAIRIALRDESKLISDRMKYLLYEFFRSQLELQEGCYLSFLASQ

SEQ ID NO: 192758 - protein, 592 aa, Zea Mays
MGKRKRPASDSILEAPHSNPLYMSHAQTRVPHRRLSRSEEEEPPHVSSMPKTQDGVTKPSLGKEPIPGSELWTDGLICAFELVKSHRKPVQHKSWLATEQIQEKGPTMCTRKHSRRNGHQITEPKVDESIVLENPQQTDFSNDPSVLKDRPLYAGEILDHKWVPIGWNRIAELVLRVQSDSSWENELMEMSDSEDDYTVADLAAPYWQRPVGPTWWCHVTAGHPSIDAWLNSAHWMHPAIRIALRDESKLISDRMKYLLYEVPVRVAGGLLFELLGQSIGDPNHEEEDIPIVLRSWQAQNFLVTTMHVKGPSSNINVLGVTEVQELLLAGGSQTPRSVHEVIAHLVSRLSRWDDRLFRKYVFGEADEIELKFVNRRNHEDLNLVSIILNQEIRRLATQVIRVKWSLHAREEILIELLRHLRGNATRAILESIRKCTRDMLEEQEAVRGRLFTIQDVMQSTVRAWLQDRSLRVTHNLAIFGGGGMVLSIITGLFGINVDGIPGAQNTPYAFGLFAGLLFFVGIVLIGMGMLYLGLQNPVNSEKVKVRKLELQHLVSMFQHEAEQHGKVREGVSRHGASPSSSTASDEGYILIS

SEQ ID NO: 192759 - protein, 287 aa, Zea Mays
MHVKGPSSNINVLGVTEVQELLLAGGSQTPRSVHEVIAHLVSRLSRWDDRLFRKYVFGEADEIELKFVNRRNHEDLNLVSIILNQEIRRLATQVIRVKWSLHAREEILIELLRHLRGNATRAILESIRKCTRDMLEEQEAVRGRLFTIQDVMQSTVRAWLQDRSLRVTHNLAIFGGGGMVLSIITGLFGINVDGIPGAQNTPYAFGLFAGLLFFVGIVLIGMGMLYLGLQNPVNSEKVKVRKLELQHLVSMFQHEAEQHGKVREGVSRHGASPSSSTASDEGYILIS

SEQ ID NO: 192760 - protein, 538 aa, Zea Mays
MNGAEEEEPPHVSSMPKTQDGVTKPSLGKEPIPGSELWTDGLICAFELVKSHRKPVQHKSWLATEQIQEKGPTMCTRKHSRRNGHQITEPKVDESIVLENPQQTDFSNDPSVLKDRPLYAGEILDHKWVPIGWNRIAELVLRVQSDSSWENELMEMSDSEDDYTVADLAAPYWQRPVGPTWWCHVTAGHPSIDAWLNSAHWMHPAIRIALRDESKLISDRMKYLLYEVPVRVAGGLLFELLGQSIGDPNHEEEDIPIVLRSWQAQNFLVTTMHVKGPSSNINVLGVTEVQELLLAGGSQTPRSVHEVIAHLVSRLSRWDDRRNHEDLNLVSIILNQEIRRLATQVIRVKWSLHAREEILIELLRHLRGNATRAILESIRKCTRDMLEEQEAVRGRLFTIQDVMQSTVRAWLQDRSLRVTHNLAIFGGGGMVLSIITGLFGINVDGIPGAQNTPYAFGLFAGLLFFVGIVLIGMGMLYLGLQNPVNSEKVKVRKLELQHLVSMFQHEAEQHGKVREGVSRHGASPSSSTASDEGYILIS

SEQ ID NO: 192761 - protein, 217 aa, Zea Mays
MCSSTLNSLPDVVLYSFLASQNNVIRVKWSLHAREEILIELLRHLRGNATRAILESIRKCTRDMLEEQEAVRGRLFTIQDVMQSTVRAWLQDRSLRVTHNLAIFGGGGMVLSIITGLFGINVDGIPGAQNTPYAFGLFAGLLFFVGIVLIGMGMLYLGLQNPVNSEKVKVRKLELQHLVSMFQHEAEQHGKVREGVSRHGASPSSSTASDEGYILIS

SEQ ID NO: 192762 - protein, 454 aa, Zea Mays
MQAPEQQQQHQQRQRKGSSEMDFFSEYGDANRYKIQEVIGKGSYGVVCSAVDQHTGDKVAIKKIHNIFEHLSDAARILREIKLLRLLRHPDIVEIKHIMLPPSRRDFKDIYVVFELMDTDLHQVIKANDDLTREHHQFFLYQMLRALKYIHTANVYHRDLKPKNILANANCKLKICDFGLARVAFNDTPTTVFWTDYVATRWYRAPELCGSFFSKYSPAIDIWSIGCIFAEVLTGKPLFPGKNVVHQLDLMTDLLGTPSLDTVSRIRNEKARRYLNSMRKKQPVSFPGRFPKADPAALKLLQRLLAFDPKDRPTPEEALADPYFKGLAKVEREPSCQPITKMEFEFERRKVTKEDVKELIFREILEYHPQLLKDYMNGTEKTNFIYPSAVDNFRRQFANLEENGGKSVAHTASSDRKHVSLPRTTTVHSNPIPPNGTSQVPRKIPTDQEEWLVQ

SEQ ID NO: 192763 - protein, 334 aa, Zea Mays
MTDLLGTPSLDTVSRARRYLNSMRKKQPVSFPGRFPKADPAALKLLQRLLAFDPKDRPTPEEALADPYFKGLAKVEREPSCQPITKMEFEFERRKVTKEDVKELIFREILEYHPQLLKDYMNGTEKTNFIYPSAVDNFRRQFANLEENGGKSVAHTASSDRKHVSLPRTTTVHSNPIPPNGTSQVPRKIPTGRPGRVVGSVIPFENATAVDPYSQRRVVRNPVLPPATSNLSAYTYHRKSDNSDGELQQELEKDRMKYQPAQRFMDSKLVSHMSPDLRSSYYIPKAFPKADAADRAALHSNMIHGIAPFSGIAAAGGGGYNKVNGVQYGVSRIY

SEQ ID NO: 192764 - protein, 471 aa, Zea Mays
MSSSVSIAAEWDLLSDRFYRRLTLYSPLPWSTPAAAGATSSSSGVSGAVIGRLDLSTHIVAAAPFGGPIAAVRDDSKIVQLHSEPSRRRVLLFSSSGHPIASAPWPPLLPRLHSLGFSSSLSLLALLSDGSLLRFRLPDLQPSPCSSPVPLLPPASGGVADALFWGGGVAILTEDNRVVVATDIEVDDPHPRHLADPGIGDEEHVLCMAVVEAQFVMSGSPEVLLAVGDRVIAVDEDGVQVLGEELEIGPVQKMAVSPNGKLLAAFAHDGRLLVIPTDFSRIIFEYECESALPPEQIAWCGLDSVLVYWPEVLLMVGPNGDPVQYNYDEPIKLIPECDGVRILSNSSMEFLHRVSDSTTSIFGIGSMSPAALLYDARDHYDRQSAKAYDNYQLISSSLPEAIEACIDAAGHEFDVSRQRTLLRAATYGLAFCSRFPHERFQEMCKMLRVLNAVRDPEIGMPLTIHQYKGHN

SEQ ID NO: 192765 - protein, 569 aa, Zea Mays
MSSSVSIAAEWDLLSDRFYRRLTLYSPLPWSTPAAAGATSSSSGVSGAVIGRLDLSTHIVAAAPFGGPIAAVRDDSKIVQLHSEPSRRRVLLFSSSGHPIASAPWPPLLPRLHSLGFSSSLSLLALLSDGSLLRFRLPDLQPSPCSSPVPLLPPASGGVADALFWGGGVAILTEDNRVVVATDIEVDDPHPRHLADPGIGDEEHVLCMAVVEAQFVMSGSPEVLLAVGDRVIAVDEDGVQVLGEELEIGPVQKMAVSPNGKLLAAFAHDGRLLVIPTDFSRIIFEYECESALPPEQIAWCGLDSVLVYWPEVLLMVGPNGDPVQYNYDEPIKLIPECDGVRILSNSSMEFLHRVSDSTTSIFGIGSMSPAALLYDARDHYDRQSAKAYDNYQLISSSLPEAIEACIDAAGHEFDVSRQRTLLRAATYGLAFCSRFPHERFQEMCKMLRVLNAVRDPEIGMPLTIHQYKLLTTSVLIGRLINANQHLLALRISEYLNLNPEVVIMHWACEKITASTTLPDTVLLDGLLDKLRLCKGISYAAVAAHADNSGRRRLAAMLVDHESQSSKQHR

SEQ ID NO: 192766 - protein, 531 aa, Zea Mays
MSSSVSIAAEWDLLSDRFYRRLTLYSPLPWSTPAAAGATSSSSGVSGAVIGRLDLSTHIVAAAPFGGPIAAVRDDSKIVQLHSEPSRRRVLLFSSSGHPIASAPWPPLLPRLHSLGFSSSLSLLALLSDGSLLRFRLPDLQPSPCSSPVPLLPPASGGVADALFWGGGVAILTEDNRVVVATDIEVDDPHPRHLADPGIGDEEHVLCMAVVEAQFVMSGSPEVLLAVGDRVIAVDEDGVQVLGEELEIGPVQKMAVSPNGKLLAAFAHDGRLLVIPTDFSRIIFEYECESALPPEQIAWCGLDSVLVYWPEVLLMVGPNGDPVQYNYDEPIKLIPECDGVRILSNSSMEFLHRVSDSTTSIFGIGSMSPAALLYDARDHYDRQSAKAYDNYQLISSSLPEAIEACIDAAGHEFDVSRQRTLLRAATYGLAFCSRFPHERFQEMCKMLRVLNAVRDPEIGMPLTIHQYKLLTTSVLIGRLINANQHLLALRISEYLNLNPEVVIMHWACEKITASTTLPDTVLLDGLLDKAM

SEQ ID NO: 192767 - protein, 441 aa, Zea Mays
MSSSVSIAAEWDLLSDRFYRRLTLYSPLPWSTPAAAGATSSSSGVSGAVIGRLDLSTHIVAAAPFGGPIAAVRDDSKIVQLHSEPSRRRVLLFSSSGHPIASAPWPPLLPRLHSLGFSSSLSLLALLSDGSLLRFRLPDLQPSPCSSPVPLLPPASGGVADALFWGGGVAILTEDNRVVVATDIEVDDPHPRHLADPGIGDEEHVLCMAVVEAQFVMSGSPEVLLAVGDRVIAVDEDGVQVLGEELEIGPVQKMAVSPNGKLLAAFAHDGRLLVIPTDFSRIIFEYECESALPPEQIAWCGLDSVLVYWPEVLLMVGPNGDPVQYNYDEPIKLIPECDGVRILSNSSMEFLHRVSDSTTSIFGIGSMSPAALLYDARDHYDRQSAKAYDNYQLISSSLPEAIEACIDAAGHEFDVSRQRTLLRAATYGLAFCSWLWQSIST

SEQ ID NO: 192768 - protein, 352 aa, Zea Mays
MVCLIRLCKGISYAAVAAHADNSGRRRLAAMLVDHESQSSKQIPLLLSIDEQDKALSKAIESGDTDLVYLVLFHIWQKVAVEKKAPLDFFGVINARPVARDLFMAYARHSKHEELKDFFLSTGRLQDAAFLLLKESWELEKNPMASKGSPLHGPQVRLIEQAHRLFAETKEHVFESKASEEHAKLLRSQHELEVSTKQPIFVGSSVSDTIKTCIAMGNERAALRVKSEFKVPDKRWYWLKTCALATVGNWDGLEKFSREKRPPGGYKPFVEACIDAGQKNEAVKYIPKLTDPRERSEAYARMGMAKEAQDAASQAKDSDELFGRLKITLAQSSAAASIFDTLRDRLSFQGAY

SEQ ID NO: 192769 - protein, 374 aa, Zea Mays
MHWACEKITASTTLPDTVLLDGLLDKLRLCKGISYAAVAAHADNSGRRRLAAMLVDHESQSSKQIPLLLSIDEQDKALSKAIESGDTDLVYLVLFHIWQKVAVEKKAPLDFFGVINARPVARDLFMAYARHSKHEELKDFFLSTGRLQDAAFLLLKESWELEKNPMASKGSPLHGPQVRLIEQAHRLFAETKEHVFESKASEEHAKLLRSQHELEVSTKQPIFVGSSVSDTIKTCIAMGNERAALRVKSEFKVPDKRWYWLKTCALATVGNWDGLEKFSREKRPPGGYKPFVEACIDAGQKNEAVKYIPKLTDPRERSEAYARMGMAKEAQDAASQAKDSDELFGRLKITLAQSSAAASIFDTLRDRLSFQGAY

SEQ ID NO: 192770 - protein, 200 aa, Zea Mays
MANTMMVKFDKYWNKSNIALIVASVLDPRYKRKIVEFYLKKVYPYTYQSELDKFNDVMKKMYQCYASTTPSTSHELDSYIFDGQGHGHDDCIDTSDLEKYLADPIFKVGKSNHHTFDILAWWKAHKEEYPILGQLARDVLAMQVSTIALESAFSAGDRVLDPFRTRLDPTMVEALVCTKDWITRARKGYIEVTYIYLQFN

SEQ ID NO: 192771 - protein, 181 aa, Zea Mays
MHTLLGRTYSNSASNISWFLPVITYSDTNQHKSSKIPWNGSKEEPNYKPKPPHAKATTWKRTDSNRPSFNNRNITLSDLVALGVVRRGGRVGLLRGWVDGIRRRRRLRVVLHPRRRRRLGEPDRRLRKLPGGSGWGTKGAVLVLRRRRRRVPVRGRGVRRAGLPVGVRHLATHGGSRGGKG

SEQ ID NO: 192772 - protein, 59 aa, Zea Mays
MAIPNPSRDPLLCRPLSPSPGALLHLQLAPDHSRTPTSPLVMEQQQPWNPFVSRPRCAR

SEQ ID NO: 192773 - protein, 69 aa, Zea Mays
MLTKWSSINNTNLVLSQASPGAFATTFCFKNFYHLPVALGDRSCVNKQLMHYHSLEFDYPPCYLFYKEN

SEQ ID NO: 192774 - protein, 542 aa, Zea Mays
MDNSGVSNDVEHYPSEAKRLELSAKIGLSDRQLQMWFCHRRLKDRKPPSKRQRRDEESALAPVMPPPPVLPAPVMPVASSDLMVGAPGPYDKLLQPVHLRRGAGRSSAVPRISMPDLGRRYYEPPPVMITPLMQLTQYELRVINSVESQLGEPLREDGPALGINFDPLPPGAFGAPIVPEQQKQPVQSYDTDIFSRHDQKLLKASAFLPTIESPFVPNSFTGKRKSTVGNSPVVQPHVGSRAVHEYQFLPEQPSDTYERASPHYYDTPVEASNSRIPSLTSGSQLLHGSEEAAPSYAFQGHTSGSSLLPPSSRPQVFPVAPTDYEMTQFNSNLSSVPVEGQFDTSQVAAFEDPPVSSERRAYHDEDTSRVERKRKHNEEAKIAKEVEAHERRIRKELEKQDFLNRKREEQRHKEMERLERERRKEEERLLRERQREEERFQREQRRENERMEKFLQKQSRREEKQRQKEQLRKEKEAARQKAANERAAARRIARDYMELVEDERLELMELAAQNKGLPSMLYLDSDTLQQLDSFREVIFHFK

SEQ ID NO: 192775 - protein, 217 aa, Zea Mays
MTQFNSNLSSVPVEGQFDTSQVAAFEDPPVSSERRAYHDEDTSRVERKRKHNEEAKIAKEVEAHERRIRKELEKQDFLNRKREEQRHKEMERLERERRKEEERLLRERQREEERFQREQRRENERMEKFLQKQSRREEKQRQKEQLRKEKEAARQKAANERAAARRIARDYMELVEDERLELMELAAQNKGLPSMLYLDSDTLQQLDSFREVIFHFK

SEQ ID NO: 192776 - protein, 1459 aa, Zea Mays
MTQFNSNLSSVPVEGQFDTSQVAAFEDPPVSSERRAYHDEDTSRVERKRKHNEEAKIAKEVEAHERRIRKELEKQDFLNRKREEQRHKEMERLERERRKEEERLLRERQREEERFQREQRRENERMEKFLQKQSRREEKQRQKEQLRKEKEAARQKAANERAAARRIARDYMELVEDERLELMELAAQNKGLPSMLYLDSDTLQQLDSFRGMVSQFPPATVKMKLPFSIKPWTGSEDNIGKLLMVWKFLITFTDVLGLCPVTLDEFVQSLHDYDSRLLGELHVALLKSIIKDIEDVARTPSIALGVNPGGGHPQIVEGAYSWGFDIRSWQRHLNLLTWPEILRQFALSAGSGPQLKKRTVEDSHYHYDNEGHDGENVILALRNGTAAVNAVAKMKERGYTNRRRSRHRLTPGTVKFAAFHVLSLEGSNGLTILDVAEKIQKSGLRDLTTSKTPEASIAAALSRDAKLFERTAPSTYCLKSPYRKDPADSEAVLSAAREKIRAFQNVLSDSEAEKEADEAERDDDSDCDDADDDPDGDDVNIEVEEDKDPLLAVKAQDEVPSTTTVIGIKTKLDSVGNALNSSSSFTKSAKGAPLPYLGRSSAADTSNDSPLGGPSANHEVTPGDSENTQIDESNQIEPWVCALAEGDYCDLSVEERLNALVALVGVATEGNSIRGVLEERLELANALKKQMWAEVQLDKRRFKEEFASRVQYNSGMSFKPDIYQENNMTEITSTRACDAYKENDGHVGTINNCEMLDQHSQGNAGGITYDRNVVGQEIHATPDTSYVQQYAYADKTRSQLKSYIGHRAEQLYVYRSLPLGQDRRRNRYWQFTTSASPNDPGSGRIFFESEDGCWRVIDSEDSFDSLVAALDTRGTREAQLRSMLQMIETTFKEAIKRRSASIELSATVYPKNGATDMIRANYHREVGSSSSTPFNDTSDSVTAYSDSFKVELGRNDFEKAAISKRADIFLKWMWRECYNQEETCAMRYGKKRCSELLHSCNCCYQIYLAEERHCSSCHKTFKSIYNFSDHTTQCEEKWRTDPYWKMQIADYSVPIGMVLLKLQLVLIEAYIPSEALQPFWTDVYRKSWSVKLYATKSIAETFQLLTVLEGAIIPDRLSSDFETTSECLNSQVIAPQNPVLPAGFASVLPWVPDTTSAVMLRVLDLDSAILYVQNQKMERDDGGFMKFPSRYTVVKSKQETIPLEPTGMDLYDGRWLPGSGRRGRGRGSRGGSRGGRGRSRGGRIPRGVSSSSRIEFKDGIAASGRAPRKNARRGRGRGRGRGRRTVRPRQPSVGRGRSIPKENLMGSFSMLTSSKAADIEESPRSSGADEWGLETRMTYTERDENSSGSRYEDNEENGQPMDEDYEEQVPDYSIDYSSGSRHHEMMSMMDHETDEEDEDAEGDENVEEDDADHAVDDADVEMDEGDDEIGDDGEDGGVGGEMTPDEDPDATSYSSDYSE

SEQ ID NO: 192777 - protein, 1632 aa, Zea Mays
MALIQSLLNHTTLETDTVLFKLVTAVPEQQKQPVQSYDTDIFSRHDQKLLKASAFLPTIESPFVPNSFTGKRKSTVGNSPVVQPHVGSRAVHEYQFLPEQPSDTYERASPHYYDTPVEASNSRIPSLTSGSQLLHGSEEAAPSYAFQGHTSGSSLLPPSSRPQVFPVAPTDYEMTQFNSNLSSVPVEGQFDTSQVAAFEDPPVSSERRAYHDEDTSRVERKRKHNEEAKIAKEVEAHERRIRKELEKQDFLNRKREEQRHKEMERLERERRKEEERLLRERQREEERFQREQRRENERMEKFLQKQSRREEKQRQKEQLRKEKEAARQKAANERAAARRIARDYMELVEDERLELMELAAQNKGLPSMLYLDSDTLQQLDSFRGMVSQFPPATVKMKLPFSIKPWTGSEDNIGKLLMVWKFLITFTDVLGLCPVTLDEFVQSLHDYDSRLLGELHVALLKSIIKDIEDVARTPSIALGVNPGGGHPQIVEGAYSWGFDIRSWQRHLNLLTWPEILRQFALSAGSGPQLKKRTVEDSHYHYDNEGHDGENVILALRNGTAAVNAVAKMKERGYTNRRRSRHRLTPGTVKFAAFHVLSLEGSNGLTILDVAEKIQKSGLRDLTTSKTPEASIAAALSRDAKLFERTAPSTYCLKSPYRKDPADSEAVLSAAREKIRAFQNVLSDSEAEKEADEAERDDDSDCDDADDDPDGDDVNIEVEEDKDPLLAVKAQDEVPSTTTVIGIKTKLDSVGNALNSSSSFTKSAKGAPLPYLGRSSAADTSNDSPLGGPSANHEVTPGDSENTQIDESNQIEPWVCALAEGDYCDLSVEERLNALVALVGVATEGNSIRGVLEERLELANALKKQMWAEVQLDKRRFKEEFASRVQYNSGMSFKPDIYQENNMTEITSTRACDAYKENDGHVGTINNCEMLDQHSQGNAGGITYDRNVVGQEIHATPDTSYVQQYAYADKTRSQLKSYIGHRAEQLYVYRSLPLGQDRRRNRYWQFTTSASPNDPGSGRIFFESEDGCWRVIDSEDSFDSLVAALDTRGTREAQLRSMLQMIETTFKEAIKRRSASIELSATVYPKNGATDMIRANYHREVGSSSSTPFNDTSDSVTAYSDSFKVELGRNDFEKAAISKRADIFLKWMWRECYNQEETCAMRYGKKRCSELLHSCNCCYQIYLAEERHCSSCHKTFKSIYNFSDHTTQCEEKWRTDPYWKMQIADYSVPIGMVLLKLQLVLIEAYIPSEALQPFWTDVYRKSWSVKLYATKSIAETFQLLTVLEGAIIPDRLSSDFETTSECLNSQVIAPQNPVLPAGFASVLPWVPDTTSAVMLRVLDLDSAILYVQNQKMERDDGGFMKFPSRYTVVKSKQETIPLEPTGMDLYDGRWLPGSGRRGRGRGSRGGSRGGRGRSRGGRIPRGVSSSSRIEFKDGIAASGRAPRKNARRGRGRGRGRGRRTVRPRQPSVGRGRSIPKENLMGSFSMLTSSKAADIEESPRSSGADEWGLETRMTYTERDENSSGSRYEDNEENGQPMDEDYEEQVPDYSIDYSSGSRHHEMMSMMDHETDEEDEDAEGDENVEEDDADHAVDDADVEMDEGDDEIGDDGEDGGVGGEMTPDEDPDATSYSSDYSE

SEQ ID NO: 192778 - protein, 896 aa, Zea Mays
MALIQSLLNHTTLETDTVLFKLVTAVPEQQKQPVQSYDTDIFSRHDQKLLKASAFLPTIESPFVPNSFTGKRKSTVGNSPVVQPHVGSRAVHEYQFLPEQPSDTYERASPHYYDTPVEASNSRIPSLTSGSQLLHGSEEAAPSYAFQGHTSGSSLLPPSSRPQVFPVAPTDYEMTQFNSNLSSVPVEGQFDTSQVAAFEDPPVSSERRAYHDEDTSRVERKRKHNEEAKIAKEVEAHERRIRKELEKQDFLNRKREEQRHKEMERLERERRKEEERLLRERQREEERFQREQRRENERMEKFLQKQSRREEKQRQKEQLRKEKEAARQKAANERAAARRIARDYMELVEDERLELMELAAQNKGLPSMLYLDSDTLQQLDSFRGMVSQFPPATVKMKLPFSIKPWTGSEDNIGKLLMVWKFLITFTDVLGLCPVTLDEFVQSLHDYDSRLLGELHVALLKSIIKDIEDVARTPSIALGVNPGGGHPQIVEGAYSWGFDIRSWQRHLNLLTWPEILRQFALSAGSGPQLKKRTVEDSHYHYDNEGHDGENVILALRNGTAAVNAVAKMKERGYTNRRRSRHRLTPGTVKFAAFHVLSLEGSNGLTILDVAEKIQKSGLRDLTTSKTPEASIAAALSRDAKLFERTAPSTYCLKSPYRKDPADSEAVLSAAREKIRAFQNVLSDSEAEKEADEAERDDDSDCDDADDDPDGDDVNIEVEEDKDPLLAVKAQDEVPSTTTVIGIKTKLDSVGNALNSSSSFTKSAKGAPLPYLGRSSAADTSNDSPLGGPSANHEVTPGDSENTQIDESNQIEPWVCALAEGDYCDLSVEERLNALVALVGVATEGNSIRGVLEVYIMILLNYSSILSFLIGKQLIKSLAGTFGISKCLKEANVGRSAT

SEQ ID NO: 192779 - protein, 683 aa, Zea Mays
MEQSVRGGRGGGLGMVSQFPPATVKMKLPFSIKPWTGSEDNIGKLLMVWKFLITFTDVLGLCPVTLDEFVQSLHDYDSRLLGELHVALLKSIIKDIEDVARTPSIALGVNPGGGHPQIVEGAYSWGFDIRSWQRHLNLLTWPEILRQFALSAGSGPQLKKRTVEDSHYHYDNEGHDGENVILALRNGTAAVNAVAKMKERGYTNRRRSRHRLTPGTVKFAAFHVLSLEGSNGLTILDVAEKIQKSGLRDLTTSKTPEASIAAALSRDAKLFERTAPSTYCLKSPYRKDPADSEAVLSAAREKIRAFQNVLSDSEAEKEADEAERDDDSDCDDADDDPDGDDVNIEVEEDKDPLLAVKAQDEVPSTTTVIGIKTKLDSVGNALNSSSSFTKSAKGAPLPYLGRSSAADTSNDSPLGGPSANHEVTPGDSENTQIDESNQIEPWVCALAEGDYCDLSVEERLNALVALVGVATEGNSIRGVLEERLELANALKKQMWAEVQLDKRRFKEEFASRVQYNSGMSFKPDIYQENNMTEITSTRACDAYKENDGHVGTINNCEMLDQHSQGNAGGITYDRNVVGQEIHATPDTSYVQQYAYADKTRSQLKSYIGHRAEQLYVYRSLPLGQDRRRNRYWQFTTSASPNDPGSGRIFFESEDGCWRVIDSEDGTCARERRQQTARRREGND

SEQ ID NO: 192780 - protein, 887 aa, Zea Mays
MEQSVRGGRGGGLGMVSQFPPATVKMKLPFSIKPWTGSEDNIGKLLMVWKFLITFTDVLGLCPVTLDEFVQSLHDYDSRLLGELHVALLKSIIKDIEDVARTPSIALGVNPGGGHPQIVEGAYSWGFDIRSWQRHLNLLTWPEILRQFALSAGSGPQLKKRTVEDSHYHYDNEGHDGENVILALRNGTAAVNAVAKMKERGYTNRRRSRHRLTPGTVKFAAFHVLSLEGSNGLTILDVAEKIQKSGLRDLTTSKTPEASIAAALSRDAKLFERTAPSTYCLKSPYRKDPADSEAVLSAAREKIRAFQNVLSDSEAEKEADEAERDDDSDCDDADDDPDGDDVNIEVEEDKDPLLAVKAQDEVPSTTTVIGIKTKLDSVGNALNSSSSFTKSAKGAPLPYLGRSSAADTSNDSPLGGPSANHEVTPGDSENTQIDESNQIEPWVCALAEGDYCDLSVEERLNALVALVGVATEGNSIRGVLEERLELANALKKQMWAEVQLDKRRFKEEFASRVQYNSGMSFKPDIYQENNMTEITSTRACDAYKENDGHVGTINNCEMLDQHSQGNAGGITYDRNVVGQEIHATPDTSYVQQYAYADKTRSQLKSYIGHRAEQLYVYRSLPLGQDRRRNRYWQFTTSASPNDPGSGRIFFESEDGCWRVIDSEDSFDSLVAALDTRGTREAQLRSMLQMIETTFKEAIKRRSASIELSATVYPKNGATDMIRANYHREVGSSSSTPFNDTSDSVTAYSDSFKVELGRNDFEKAAISKRADIFLKWMWRECYNQEETCAMRYGKKRCSELLHSCNCCYQIYLAEERHCSSCHKTFKSIYNFSDHTTQCEEKWRTDPYWKMQIADYSVPIGMVLLKLQLVLIEKHFNHFGLMCIGNLGV

SEQ ID NO: 192781 - protein, 997 aa, Zea Mays
MEQSVRGGRGGGLGMVSQFPPATVKMKLPFSIKPWTGSEDNIGKLLMVWKFLITFTDVLGLCPVTLDEFVQSLHDYDSRLLGELHVALLKSIIKDIEDVARTPSIALGVNPGGGHPQIVEGAYSWGFDIRSWQRHLNLLTWPEILRQFALSAGSGPQLKKRTVEDSHYHYDNEGHDGENVILALRNGTAAVNAVAKMKERGYTNRRRSRHRLTPGTVKFAAFHVLSLEGSNGLTILDVAEKIQKSGLRDLTTSKTPEASIAAALSRDAKLFERTAPSTYCLKSPYRKDPADSEAVLSAAREKIRAFQNVLSDSEAEKEADEAERDDDSDCDDADDDPDGDDVNIEVEEDKDPLLAVKAQDEVPSTTTVIGIKTKLDSVGNALNSSSSFTKSAKGAPLPYLGRSSAADTSNDSPLGGPSANHEVTPGDSENTQIDESNQIEPWVCALAEGDYCDLSVEERLNALVALVGVATEGNSIRGVLEERLELANALKKQMWAEVQLDKRRFKEEFASRVQYNSGMSFKPDIYQENNMTEITSTRACDAYKENDGHVGTINNCEMLDQHSQGNAGGITYDRNVVGQEIHATPDTSYVQQYAYADKTRSQLKSYIGHRAEQLYVYRSLPLGQDRRRNRYWQFTTSASPNDPGSGRIFFESEDGCWRVIDSEDSFDSLVAALDTRGTREAQLRSMLQMIETTFKEAIKRRSASIELSATVYPKNGATDMIRANYHREVGSSSSTPFNDTSDSVTAYSDSFKVELGRNDFEKAAISKRADIFLKWMWRECYNQEETCAMRYGKKRCSELLHSCNCCYQIYLAEERHCSSCHKTFKSIYNFSDHTTQCEEKWRTDPYWKMQIADYSVPIGMVLLKLQLVLIEAYIPSEALQPFWTDVYRKSWSVKLYATKSIAETFQLLTVLEGAIIPDRLSSDFETTSECLNSQVIAPQNPVLPAGFASVLPWVPDTTSAVMLRVLDLDSAILYVQNQKMERDDGGFMVHDASIYDC

SEQ ID NO: 192782 - protein, 1248 aa, Zea Mays
MVSQFPPATVKMKLPFSIKPWTGSEDNIGKLLMVWKFLITFTDVLGLCPVTLDEFVQSLHDYDSRLLGELHVALLKSIIKDIEDVARTPSIALGVNPGGGHPQIVEGAYSWGFDIRSWQRHLNLLTWPEILRQFALSAGSGPQLKKRTVEDSHYHYDNEGHDGENVILALRNGTAAVNAVAKMKERGYTNRRRSRHRLTPGTVKFAAFHVLSLEGSNGLTILDVAEKIQKSGLRDLTTSKTPEASIAAALSRDAKLFERTAPSTYCLKSPYRKDPADSEAVLSAAREKIRAFQNVLSDSEAEKEADEAERDDDSDCDDADDDPDGDDVNIEVEEDKDPLLAVKAQDEVPSTTTVIGIKTKLDSVGNALNSSSSFTKSAKGAPLPYLGRSSAADTSNDSPLGGPSANHEVTPGDSENTQIDESNQIEPWVCALAEGDYCDLSVEERLNALVALVGVATEGNSIRGVLEERLELANALKKQMWAEVQLDKRRFKEEFASRVQYNSGMSFKPDIYQENNMTEITSTRACDAYKENDGHVGTINNCEMLDQHSQGNAGGITYDRNVVGQEIHATPDTSYVQQYAYADKTRSQLKSYIGHRAEQLYVYRSLPLGQDRRRNRYWQFTTSASPNDPGSGRIFFESEDGCWRVIDSEDSFDSLVAALDTRGTREAQLRSMLQMIETTFKEAIKRRSASIELSATVYPKNGATDMIRANYHREVGSSSSTPFNDTSDSVTAYSDSFKVELGRNDFEKAAISKRADIFLKWMWRECYNQEETCAMRYGKKRCSELLHSCNCCYQIYLAEERHCSSCHKTFKSIYNFSDHTTQCEEKWRTDPYWKMQIADYSVPIGMVLLKLQLVLIEAYIPSEALQPFWTDVYRKSWSVKLYATKSIAETFQLLTVLEGAIIPDRLSSDFETTSECLNSQVIAPQNPVLPAGFASVLPWVPDTTSAVMLRVLDLDSAILYVQNQKMERDDGGFMKFPSRYTVVKSKQETIPLEPTGMDLYDGRWLPGSGRRGRGRGSRGGSRGGRGRSRGGRIPRGVSSSSRIEFKDGIAASGRAPRKNARRGRGRGRGRGRRTVRPRQPSVGRGRSIPKENLMGSFSMLTSSKAADIEESPRSSGADEWGLETRMTYTERDENSSGSRYEDNEENGQPMDEDYEEQVPDYSIDYSSGSRHHEMMSMMDHETDEEDEDAEGDENVEEDDADHAVDDADVEMDEGDDEIGDDGEDGGVGGEMTPDEDPDATSYSSDYSE

SEQ ID NO: 192783 - protein, 214 aa, Zea Mays
MDSEHWISRLAAAKRYYAAQLGHVDDVPGIGTEEVEMEIEDDGGLEMEMEMALGLGDATWPDVACPYCYEDHDVASLCVHLEEDHPYEPHSAPCPICSQRVTRDMLNHMTMQHGYLFKNGHRSRRYIIPESHAISALSRDLRGTHLRALLGGGHGHRSSNAVTTNISSDPLLSSFGLGFSPSDAPEPSKSASSIPDGASIRKETPVQPWESRYI

SEQ ID NO: 192784 - protein, 286 aa, Zea Mays
MDSEHWISRLAAAKRYYAAQLGHVDDVPGIGTEEVEMEIEDDGGLEMEMEMALGLGDATWPDVACPYCYEDHDVASLCVHLEEDHPYEPHSAPCPICSQRVTRDMLNHMTMQHGYLFKNGHRSRRYIIPESHAISALSRDLRGTHLRALLGGGHGHRSSNAVTTNISSDPLLSSFGLGFSPSDAPEPSKSASSIPDGASIRKETPVQPWESSSHDSKCLGLRHRRHRGKTPQKKTIEDSYKTFKYSAQVQNTLEESKRERLKKMKRAASGCTRPVCQRALFRHSTS

SEQ ID NO: 192785 - protein, 349 aa, Zea Mays
MARFRDSNGGGLARDDGGATAGESNQREKGREGTNLAPEASREVHEDGKDTEEQSHCSPSWSSEGMKKFSNWPTVPQLYCKGELLGGCDIVIAMHDSGELKDVFEEHNIPLKPQGSKNEEAGQPESATEKGGAVAEPIGLTDAQKARLESLINSSPVMVFIKGTPEEPRCGFSGKLVHILKQENIPFSSFDILSDDEVRQGLKVLSNWPSYPQLYIKGELVGGSDIVMEMHKSGELKKVLSEKGVIPKESLEDRLKSLVSSAPVMLLMKGTPDAPRCGFSSKVVNALKKEGVSFGSFDILSDEEVRQGLKTYSNWPTFPQLYYKSELIGGCDIVLEMEKSGDLKSTLSE

SEQ ID NO: 192786 - protein, 528 aa, Zea Mays
MTAPPNASMGPLSLGGCGALLSTPQPNSWHCRGFSIPERSVFMLPLRRGLSRKRGWVLDSRSNGAVARDEVGAGSSELRHIEKELTFSPTFTDYVKIMESVKLDRSKNLHGADGQSLRRRFAGDGRQRNRRSGDARNKSFERNQGPQRDLAKDENQKDVTGFVDKRATGHVKSSNRRQGEVEDYAQRRIIRGGTRGNGDNGQFSSPVKAKDTRGSMSVHRLVTNKQTQSVAGNDLQGRATYTPSRTSALPNSSIPSKNAKVQMRKYDYTMTSSRIDLKYPRETFPNTEVNADSNVQRNQQRVETLGRNFVVRRFGEIGTDSKKSTVSKIYGSTQAMPEHDSHSSDNLESDERRTVQLHRGANVKMGKFVSRDAETTDFDDRAAFKTFEVFTDVRNRPRILRMEMEERIQKLASRLNATDVNTPEWKFSKMIHDAKIKFSDHSILRIVQMLGRYGNWKCVLQVVEWLQSHERFKSYKSRYIYTTVLDVLGKAKRPFEALNVFYTITNCHLILTWQLIIVLLLLLGKLVL

SEQ ID NO: 192787 - protein, 579 aa, Zea Mays
MTAPPNASMGPLSLGGCGALLSTPQPNSWHCRGFSIPERSVFMLPLRRGLSRKRGWVLDSRSNGAVARDEVGAGSSELRHIEKELTFSPTFTDYVKIMESVKLDRSKNLHGADGQSLRRRFAGDGRQRNRRSGDARNKSFERNQGPQRDLAKDENQKDVTGFVDKRATGHVKSSNRRQGEVEDYAQRRIIRGGTRGNGDNGQFSSPVKAKDTRGSMSVHRLVTNKQTQSVAGNDLQGRATYTPSRTSALPNSSIPSKNAKVQMRKYDYTMTSSRIDLKYPRETFPNTEVNADSNVQRNQQRVETLGRNFVVRRFGEIGTDSKKSTVSKIYGSTQAMPEHDSHSSDNLESDERRTVQLHRGANVKMGKFVSRDAETTDFDDRAAFKTFEVFTDVRNRPRILRMEMEERIQKLASRLNATDVNTPEWKFSKMIHDAKIKFSDHSILRIVQMLGRYGNWKCVLQVVEWLQSHERFKSYKSRYIYTTVLDVLGKAKRPFEALNVFYTMQEEVQIEPSSELGSSLGTRPYCIQCSFECLCATKAMGRGILGTATVEREEHLSNKFNIWSCYGGNACLWKVQFGL

SEQ ID NO: 192788 - protein, 954 aa, Zea Mays
MTAPPNASMGPLSLGGCGALLSTPQPNSWHCRGFSIPERSVFMLPLRRGLSRKRGWVLDSRSNGAVARDEVGAGSSELRHIEKELTFSPTFTDYVKIMESVKLDRSKNLHGADGQSLRRRFAGDGRQRNRRSGDARNKSFERNQGPQRDLAKDENQKDVTGFVDKRATGHVKSSNRRQGEVEDYAQRRIIRGGTRGNGDNGQFSSPVKAKDTRGSMSVHRLVTNKQTQSVAGNDLQGRATYTPSRTSALPNSSIPSKNAKVQMRKYDYTMTSSRIDLKYPRETFPNTEVNADSNVQRNQQRVETLGRNFVVRRFGEIGTDSKKSTVSKIYGSTQAMPEHDSHSSDNLESDERRTVQLHRGANVKMGKFVSRDAETTDFDDRAAFKTFEVFTDVRNRPRILRMEMEERIQKLASRLNATDVNTPEWKFSKMIHDAKIKFSDHSILRIVQMLGRYGNWKCVLQVVEWLQSHERFKSYKSRYIYTTVLDVLGKAKRPFEALNVFYTMQNQLSSYPDMAAYHCIAVTLGQAGLIKELFDVIDCMCSPPRKKFKLSPLQNWDPRLEPDLIVYNAVLNACVQQKQWEGAFWVLQQLKEKNICPTNSTYGLVMEVMLVCGKYNLVYEFFNKVDKSSIPGALNYKVLVNALWREGKIDEAVMAVKDMESRGIVGSASLYYDLARCLCSGGRCKEALLQVEKICKVANKPLVVTYTGLIQTCIDNGGMEDAKYIFNHMCNYCSPNSVTCNIMMKSYIKHGMLEDAKDLLHDILNCRIRSKADSNQVATADKFTFNTFMEACAAAKRWNDFEYAFREMLLNGYHFDERRHLRMVLDAFRHGKLLDDLWHYLCRHSRVPPSPVIMERFCLKLMQGDTLAAISCVSSFHEGKICNVSSMSWLNLLSRNADRLKEEHVTKLAHELNSLISLRSSSDSISLSLYQKIISSCTAFLSGATVVEKAPSGQ

SEQ ID NO: 192789 - protein, 555 aa, Zea Mays
MEMEERIQKLASRLNATDVNTPEWKFSKMIHDAKIKFSDHSILRIVQMLGRYGNWKCVLQVVEWLQSHERFKSYKSRYIYTTVLDVLGKAKRPFEALNVFYTMQNQLSSYPDMAAYHCIAVTLGQAGLIKELFDVIDCMCSPPRKKFKLSPLQNWDPRLEPDLIVYNAVLNACVQQKQWEGAFWVLQQLKEKNICPTNSTYGLVMEVMLVCGKYNLVYEFFNKVDKSSIPGALNYKVLVNALWREGKIDEAVMAVKDMESRGIVGSASLYYDLARCLCSGGRCKEALLQVEKICKVANKPLVVTYTGLIQTCIDNGGMEDAKYIFNHMCNYCSPNSVTCNIMMKSYIKHGMLEDAKDLLHDILNCRIRSKADSNQVATADKFTFNTFMEACAAAKRWNDFEYAFREMLLNGYHFDERRHLRMVLDAFRHGKEQLLDDLWHYLCRHSRVPPSPVIMERFCLKLMQGDTLAAISCVSSFHEGKICNVSSMSWLNLLSRNADRLKEEHVTKLAHELNSLISLRSSSDSISLSLYQKIISSCTAFLSGATVVEKAPSGQ

SEQ ID NO: 192790 - protein, 580 aa, Zea Mays
MDGSISSALALLVLALHLAVDGCSAVNFEGSVLLKFQSRVEEDLYGAMVSWSPGDGDPCSWNGVRCADGRVVMLNLKDLSLKGTLGPELGTLSHLRALELSNNFFSGAIPKELSALAMLEILDLSNNNLSGEVPQEIAEMPSLRQLSLSNNCFQWPLIQHSYGNFDQENGFNIYDNLGRGNMNQRAENGLESGSSSHENKKDTSNLSARLHSQYEAINPAAHLSQRRLLQDSNLAAPSSANDLVPAAVPVPSTGTGSFSAFSPNNAPAPAVNPPSRPPTVPSTTAGEVQERRSMKWLYFIVLPLVVLLIGIACMLLLCRTKSGTTIGPWKTGLSGQLQKAFVTGVPKLQRSELEGACEDFSNIVSSYPQYTVYKGTLSSGVEIAVVSTMVISSKDWSKHSEGRFRKKIDSLSRINHKNYINLLGYCEEEEPFTRMMVMEYAPNGTLYEHLHVEGFDPIDWNGRMRIIMGVAYCTLHMHELSPPVTHPDIKSSAILLSEDGAAKIVDMSVWHEVYFRGNMPKDGDLVDHQERVAADPAGNVYSFGLLMLEIISGKPPYSEEKGSLSDLLEGSQGKGPRNHM

SEQ ID NO: 192791 - protein, 360 aa, Zea Mays
MKWLYFIVLPLVVLLIGIACMLLLCRTKSGTTIGPWKTGLSGQLQKAFVTGVPKLQRSELEGACEDFSNIVSSYPQYTVYKGTLSSGVEIAVVSTMVISSKDWSKHSEGRFRKKIDSLSRINHKNYINLLGYCEEEEPFTRMMVMEYAPNGTLYEHLHVEGFDPIDWNGRMRIIMGVAYCTLHMHELSPPVTHPDIKSSAILLSEDGAAKIVDMSVWHEVYFRGNMPKDGDLVDHQERVAADPAGNVYSFGLLMLEIISGKPPYSEEKGSLSDLALECIRDNRSMSCLLDPSLKDHKEKDLETICDLVQDCIQSDPKKRPAMREVTTRLREVLSISPEAATPRLSPLWWAELEILSVEAS

SEQ ID NO: 192792 - protein, 116 aa, Zea Mays
MATTGRRPDSVKKRERQNDKHRIRNHARKAEMRTRMKKVLRALEKLRKKPDAQPEEIIEIEKLIAEAYKAIDKTVKVGAMHRNTANHRKSRLARRKKAIEILRGWYVPNAEPVAAT

SEQ ID NO: 192793 - protein, 70 aa, Zea Mays
MKQPNAIHLLGSVRVNGPVTDSRYPAHQQIPQAYGYRQMPARLDSTNPSQAMGGYTLQSQKETLFEELPF

SEQ ID NO: 192794 - protein, 106 aa, Zea Mays
MLLEPYNQIDHPECKSRPDSGLSAITELDPGYITGPLSSVWKEWVKWCVEFGIEANAIIAVPYDWRLPPSMLEERDLYFHKLKFVTLASTCYEATKCYTSVRISKS

SEQ ID NO: 192795 - protein, 71 aa, Zea Mays
MKQPNAIHLLAGSVRVNGPVTDSRYPAHQQIPQAYGYRQMPARLDSTNPSQAMGGYTLQSQKETLFEELPF

SEQ ID NO: 192796 - protein, 72 aa, Zea Mays
MVSAPPPSGPFPCLGRPAMDSPSGLWWRPAPSSCPPFPSTPSMSPRSRTMQWGSISNHLSFKLTSPLYYATL

SEQ ID NO: 192797 - protein, 57 aa, Zea Mays
MSVRHILFILTCLYTNLTQAFLSITWDSEFSELCVVEEEERPMSVELEPIASEQQLN

SEQ ID NO: 192798 - protein, 605 aa, Zea Mays
MEPKGESGQKPIEEAIDSLKTDASMKANNVNLPAKKDASSSDAVSCISSGDAASTVKDREMNQETSFGDQGMHYYGYYYPGAYGGWDENGYFVGYNGLEVVQADNGSYLCYPLGYENGYASYIPVVPGGIASVDGQYVSKEPYYSSALPIQDPSTPGIFAQPIAYGTELVPAYSWDPFVLLDGVQGHPVGVHHTNYAPRPKYSSNKHVVPSLKASHSAKSTADTVKGSSSALETVPNAANSSTSSKGANKAPGASITKGYLPSSKFVMHSNNQAKSSVYQSKGINLKESGRSWHSSEKLKARSKLNGHGDSESNENNHTDNSKYSLSSQSDVVGLSSVGDANASIPSPVVIRKTAYNLSDFVTKYEQALFFVIKSYSEDDIHKSIKYNVWASTPNGNKRLDNAYRLAQERMAEKGTKCPVFLFFSVNASGQFCGVAEMVGPVDFNRNMNFWQQDKWNGFFSVKWHIIKDVPNPQFRHIILENNENKPVTNSRDTQEVKFSQGTEMLNIFKNFTCKASILDDFDFYENRQKVMQDRRGKPLTSFGHPLPKAEKTAEVKRQTQLISATEVGRADTTKENEEKSSSVPEILNAACSNKEKPNKIATDG

SEQ ID NO: 192799 - protein, 384 aa, Zea Mays
MVHICVILWGMKMDMLLIFRLFLEALPVWMGHPVGVHHTNYAPRPKYSSNKHVVPSLKASHSAKSTADTVKGSSSALETVPNAANSSTSSKGANKAPGASITKGYLPSSKFVMHSNNQAKSSVYQSKGINLKESGRSWHSSEKLKARSKLNGHGDSESNENNHTDNSKYSLSSQSDVVGLSSVGDANASIPSPVVIRKTAYNLSDFVTKYEQALFFVIKSYSEDDIHKSIKYNVWASTPNGNKRLDNAYRLAQERMAEKGTKCPVFLFFSVNASGQFCGVAEMVGPVDFNRNMNFWQQDKWNGFFSVKWHIIKDVPNPQFRHIILENNENKPVTNSRDTQEVKFSQGTEMLNIFKNFTCKASILDDFDFYENRQKVMQDRRAKS

SEQ ID NO: 192800 - protein, 549 aa, Zea Mays
MNQETSFGDQGMHYYGYYYPGAYGGWDENGYFVGYNGLEVHPAVVQADNGSYLCYPLGYENGYASYIPVVPGGIASVDGQYVSKEPYYSSALPIQDPSTPGIFAQPIAYGTELVPAYSWDPFVLLDGVQGHPVGVHHTNYAPRPKYSSNKHVVPSLKASHSAKSTADTVKGSSSALETVPNAANSSTSSKGANKAPGASITKGYLPSSKFVMHSNNQAKSSVYQSKGINLKESGRSWHSSEKLKARSKLNGHGDSESNENNHTDNSKYSLSSQSDVVGLSSVGDANASIPSPVVIRKTAYNLSDFVTKYEQALFFVIKSYSEDDIHKSIKYNVWASTPNGNKRLDNAYRLAQERMAEKGTKCPVFLFFSVNASGQFCGVAEMVGPVDFNRNMNFWQQDKWNGFFSVKWHIIKDVPNPQFRHIILENNENKPVTNSRDTQEVKFSQGTEMLNIFKNFTCKASILDDFDFYENRQKVMQDRRGKPLTSFGHPLPKAEKTAEVKRQTQLISATEVGRADTTKENEEKSSSVPEILNAACSNKEKPNKIATDG

SEQ ID NO: 192801 - protein, 272 aa, Zea Mays
MHSNNQAKSSVYQSKGINLKESGRSWHSSEKLKARSKLNGHGDSESNENNHTDNSKYSLSSQSDVVGLSSVGDANASIPSPVVIRKTAYNLSDFVTKYEQALFFVIKSYSEDDIHKSIKYNVWASTPNGNKRLDNAYRLAQERMAEKGTKCPVFLFFSVNASGQFCGVAEMVGPVDFNRNMNFWQQDKWNGFFSVKWHIIKDVPNPQFRHIILENNENKPVTNSRDTQEVKFSQGTEMLNIFKNFTCKASILDDFDFYENRQKVMQDRRAKS

SEQ ID NO: 192802 - protein, 527 aa, Zea Mays
MEPKGESGQKPIEEAIDSLKTDASMKANNVNLPAKKDASSSDAVSCISSGDAASTVKDREMNQETSFGDQGMHYYGYYYPGAYGGWDENGYFVGYNGLEVHPAVVQADNGSYLCYPLGYENGYASYIPVVPGGIASVDGQYVSKEPYYSSALPIQDPSTPGIFAQPIAYGTELVPAYSWDPFVLLDGVQGHPVGVHHTNYAPRPKYSSNKHVVPSLKASHSAKSTADTVKGSSSALETVPNAANSSTSSKGANKAPGASITKGYLPSSKFVMHSNNQAKSSVYQSKGINLKESGRSWHSSEKLKARSKLNGHGDSESNENNHTDNSKYSLSSQSDVVGLSSVGDANASIPSPVVIRKTAYNLSDFVTKYEQALFFVIKSYSEDDIHKSIKYNVWASTPNGNKRLDNAYRLAQERMAEKGTKCPVFLFFSVNASGQFCGVAEMVGPVDFNRNMNFWQQDKWNGFFSVKWHIIKDVPNPQFRHIILENNENKPVTNSRDTQEVFLPIPSKSVCGIFYSKRSNFHKVQRC

SEQ ID NO: 192803 - protein, 483 aa, Zea Mays
MNQETSFGDQGMHYYGYYYPGAYGGWDENGYFVGYNGLEVHPAVVQADNGSYLCYPLGYENGYASYIPVVPGGIASVDGQYVSKEPYYSSALPIQDPSTPGIFAQPIAYGTELVPAYSWDPFVLLDGVQGHPVGVHHTNYAPRPKYSSNKHVVPSLKASHSAKSTADTVKGSSSALETVPNAANSSTSSKGANKAPGASITKGYLPSSKFVMHSNNQAKSSVYQSKGINLKESGRSWHSSEKLKARSKLNGHGDSESNENNHTDNSKYSLSSQSDVVGLSSVGDANASIPSPVVIRKTAYNLSDFVTKYEQALFFVIKSYSEDDIHKSIKYNVWASTPNGNKRLDNAYRLAQERMAEKGTKCPVFLFFSVNASGQFCGVAEMVGPVDFNRNMNFWQQDKWNGFFSVKWHIIKDVPNPQFRHIILENNENKPVTNSRDTQEVKFSQGTEMLNIFKNFTCKASILDDFDFYENRQKVMQDRRAKS

SEQ ID NO: 192804 - protein, 585 aa, Zea Mays
MKANNVNLPAKKDASSSDAVSCISSGDAASTVKDREMNQETSFGDQGMHYYGYYYPGAYGGWDENGYFVGYNGLEVHPAVVQADNGSYLCYPLGYENGYASYIPVVPGGIASVDGQYVSKEPYYSSALPIQDPSTPGIFAQPIAYGTELVPAYSWDPFVLLDGVQGHPVGVHHTNYAPRPKYSSNKHVVPSLKASHSAKSTADTVKGSSSALETVPNAANSSTSSKGANKAPGASITKGYLPSSKFVMHSNNQAKSSVYQSKGINLKESGRSWHSSEKLKARSKLNGHGDSESNENNHTDNSKYSLSSQSDVVGLSSVGDANASIPSPVVIRKTAYNLSDFVTKYEQALFFVIKSYSEDDIHKSIKYNVWASTPNGNKRLDNAYRLAQERMAEKGTKCPVFLFFSVNASGQFCGVAEMVGPVDFNRNMNFWQQDKWNGFFSVKWHIIKDVPNPQFRHIILENNENKPVTNSRDTQEVKFSQGTEMLNIFKNFTCKASILDDFDFYENRQKVMQDRRGKPLTSFGHPLPKAEKTAEVKRQTQLISATEVGRADTTKENEEKSSSVPEILNAACSNKEKPNKIATDG

SEQ ID NO: 192805 - protein, 225 aa, Zea Mays
MRKILNETKELQQITNDKQKNQVVRIQHFTFIFAEDVNKQNRQAAQTMEMMYTIIADEFKSMDNKDMRPEDYLNFFCLGNREEPPSNGSPESEKSTYKSAEIDIEFMKKKLEDLDKPMKRRNDKLLKIEHELCERITELEMQIDPAQCRGDWRLNLEVLLKDVTLSQRTIVLYSQPKSIVGTPAYIAHEVLLKKEYNGKVLCVVSLIILHLTYCFCLVCMLLFST

SEQ ID NO: 192806 - protein, 144 aa, Zea Mays
MYSSVLYSQPKSIVGTPAYIAHEVLLKKEYNGKVADVWSCGVMPYVMLTITIPEIRNHPWFLKNLLADQMDDNTMSKQYEEPEQPMQSMNEFMQILVEATIPAVGSRGLNQFLNDDIDLDDDMEDLDSDAGLDLESSGEIVYAI

SEQ ID NO: 192807 - protein, 212 aa, Zea Mays
MKKKLEDLDKPMKRRNDKLLKIEHELCERITELEMQIDPAQCRGDWRLNLEVLLKDVTLSQRTIVLYSQPKSIVGTPAYIAHEVLLKKEYNGKVADVWSCGVMPYVMLELLMLPIQTITIPEIRNHPWFLKNLLADQMDDNTMSKQYEEPEQPMQSMNEFMQILVEATIPAVGSRGLNQFLNDDIDLDDDMEDLDSDAGLDLESSGEIVYAI

SEQ ID NO: 192808 - protein, 130 aa, Zea Mays
MKDPFEADVEEQDSPPESPAPPEDEPGAAGPAEDPEDYDGGPPPRQPSAPASHAAGAKAKARVHREQQEDDDEDEDQIEVDLEKLPSSTGDPDKLAKMNCWQASLEVRRFLSLLQLWYRESPKYLLQEWS

SEQ ID NO: 192809 - protein, 193 aa, Zea Mays
MKDPFEADVEEQDSPPESPAPPEDEPGAAGPAEDPEDYDGGPPPRQPSAPASHAAGAKAKARVHREQQEDDDEDEDQIEVDLEKLPSSTGDPDKLAKMNAILSQFTQQQMNRYESFRRSGFQKSNMKRLLASITGSQKISIPTSIVVSGIAKIFVARVVMSERKDSGPIRPCHIREAYRRLKLERDDPTAICS

SEQ ID NO: 192810 - protein, 229 aa, Zea Mays
MDDEDSEDQESADAKSLVVDEGNCSNGSIKNEKLDLGSVSGSHSEGESSGEKSQPTTKSGAEGGDFESDGSAEPELGMVDHPIPVNNAVAAASEEVLKSDEVTADEDNTTSATSNQNNPVVPQVKEALKADEDNSASATSNQNNPEVPKVEEYADASKSYSEPLDLAKYSSAVELEVLGLEKLKIELQSRGLKCGGTLQERATRLFLLKTTPLDKLPKKLLAKAAIGGK

SEQ ID NO: 192811 - protein, 312 aa, Zea Mays
MANPLAGLQDHLKLARDYALEGLYDTSIIFFDGAIAQINKHLTTLDDALIRTKWMNCKKAISEEVEIVKQLDAQLKSLKEAPGTRRSSSPPIRSNKSFVFQPLDEYPTSSPAPFDDPDVWAPPRDTPTRRPTRGQSSARKSSQDGAWARGSSRTGTPSRSAKPNGIKGGAVKSTASNSSVRKGKQSSNKADSTSSDAEEGKSKKGQYEGPDMDLAAMLERDVLDSTPGVRWDDVAGLSEAKRLLEEAVVLPLWMPEYFQVIVYILLRCPLLVQTKHCKVSEKCLFVLGTNTFYRRISMGMIWHFWCSTMDIV

SEQ ID NO: 192812 - protein, 446 aa, Zea Mays
MQKLQDLASSMLELWNLMDTPLEEQQMFQNVTCNIAASEHEITEPNTLSIDFLSYVESEVLRLEQLKASKMKDLVLKKKTELEEHRRRAHLIGEEGYAAEFSDEAIEAGAVDPSLVLEQIEAHIATVKEEAFSRKDILEKVERWLNACEEEAWLEDYNKDDNRYNAGRGAHLTLKRAEKARILVNKIPGLVDVLTTKIVAWEAERGKEFTYDGVRLMSMLEEYMIVRQEKELQKKRQRDQKKIQDQLKAEQEALYGSKPSPSKPQSTKKAPRHSMGGANRRLSLGGATMQAPKTDILHSKTARAAKKAEDLGALSPSSRGLDIAGLPIKKLSFNASTLREAETPRKPFAQIMPGNNVSPMPTRPISSATEEENKTPRTFVGGLNAKTPATVTAPMQMAMTPAVANKVIATPATLFQEKADSPALPADIEYSFEERRLAVYLARQVA

SEQ ID NO: 192813 - protein, 171 aa, Zea Mays
MGALLAEYAGAVLGVLSAALYGRKSNIWKKIGGLAAMLAAYYLLSNGWSTRTHSPLYSFGSEPVEKAAQTIGVKAMMVPITAGILSALRRVLARRVSLKNQLKRRLHAITIASATCFLFPFAMWDTILGSASDSIVKLQLPSWAYFSTVLFGMVLIFYVDNVAEEKSQSEP

SEQ ID NO: 192814 - protein, 171 aa, Zea Mays
MMVPITAGILSALRRVLARRVSLKNQLKRRLHAITIASATCFLFPFAMWDTILGSASDSIVKLQLPSWAYFSTVLFGMVLIFYVDNVAEEKLHLVFSSPRHLMVSTGCIIVLETVYQMDFSLLGFLVCSVILGFGISEATSLERSKKSPLETHELSNGVFHNQLPISELPS

SEQ ID NO: 192815 - protein, 278 aa, Zea Mays
MSSSGPSPATGTHHTRSTPLQVIHVLGNFMRIWSVYSLYSYLSNSGDSIVGFIFSCLVPTSVIFLVLQKPWKGRPLPNSQVVPTVVNGGILAFYFVLWGKGLLACGPLVALLAEYAGAVLGVLSAALYGRKSNIWKKIGGLAAMLAAYYLLSNGWSTRTHSPLYSFGSEPVEKAAQTIGVKAMMVPITAGILSALRRVLARRVSLKNQLKRRLHAITIASATCFLFPFAMWDTILGSASDSIVKLQLPSWAYFSTVLFGMVLIFYVDNVAEEKSQSEP

SEQ ID NO: 192816 - protein, 102 aa, Zea Mays
MDLDLWISKVKEGQHLAEHELQSLCEYVKEILIEESNVQPVNSPVTVCGDIHGQFHDLMKLFATGGHVPETNYIFMGDFVDRGFNSLEVFTILLLLKARYLA

SEQ ID NO: 192817 - protein, 193 aa, Zea Mays
MGLTTRQQVYGFYDECQRKYGNANAWRYCTDVFDYLTLSAIINGQVLCVHGGLSPDVRTIDQIRTIDRNCEIPHEGPFCDLMWSDPEEIETWAVSPRGAGWLFGSRVTAEFNFVNGIELVCRAHQLVQEGLKYMFQEKGLVTVWSAPNYCYRCGNVASILSFDEKMERDVKFFTETEENNQMRGPRTAVPYFL

SEQ ID NO: 192818 - protein, 57 aa, Zea Mays
MSEERPPKQRHTHPPTWQMLSTSRYGLQLTTKSANRRGEGERKRAEDDGDKKKNVSN

SEQ ID NO: 192819 - protein, 281 aa, Zea Mays
MPAPAPPIRLGPPTPYISSHGSKVARLHMYDWIVLILLAVLDGVLNIIEPFHRFVGSEMMTDLRYPMKGNTVPFWAVPIIGIIGPMVIITVIYFKKRNVYDLHHAILGLLFSVLITAVLTDAIKDGVGRPRPDFFWRCFPDGKPEYNNFTTGAICHGQASVIKEGHKSFPSGHTSSLVAVSRVDDYWHHWQDVCTGGLLGFTVASICYLQFFPLPSDENGLWPHAYFRHILEPEGDSQAQPTYMSRRSSVQNGSFQYSPDAVEMRSTSQAMDSMEAGQRAQ

SEQ ID NO: 192820 - protein, 315 aa, Zea Mays
MPAPAPPIRLGPPTPYISSHGSKVARLHMYDWIVLILLAVLDGVLNIIEPFHRFVGSEMMTDLRYPMKGNTVPFWAVPIIGIIGPMVIITVIYFKKRNVYDLHHAILVLITAVLTDAIKDGVGRPRPDFFWRCFPDGKPEYNNFTTGAICHGQASVIKEGHKSFPSGHTSWSFAGLGFLSWYLAGKIKVFDRRGHVAKVCIVLSPLLLAALVAVSRVDDYWHHWQDVCTGGLLGFTVASICYLQFFPLPSDENGLWPHAYFRHILEPEGDSQAQPTYMSRRSSVQNGSFQYSPDAVEMRSTSQAMDSMEAGQRAQ

SEQ ID NO: 192821 - protein, 850 aa, Zea Mays
MSSLLGLYLSRNHLSGPVPDNQSFNLPLLERVYLSKNELTGTVPPGFGTCKYLQQLVLPYNRFTGGIPPWLSTLPELTWISLGGNDLSGEIPAVLSNITGLTVLDFTTSRLHGEIPPELGRLAQLQWLNLEMNNLTGTIPASIRNLSMLSILDVSFNSLTGPVPRKLFGESLTELYIDENKLSGDVGFMADLSGCRSLKYIVMNSNSFAGSFPSSTLANLSSLQIFRAFENQITGHIPNMPSSVSFVDLRDNRLNGEIPQSITELRNLRGLDLSSNRLSGTIPAHIGKLTELFGLGLANNELHGPIPDSIGNLSNLQVLELSNNHLTSVIPPGLWGLENIVGLDLSRNALRGSFPPEGTEILKAITFMDLSSNQLHGKIPPSLGALSTLTYLNLSKNLLQDRVPSALGNKLSSMKTLDLSYNSLSGTIPESLANLSYLTSLNLSFNRLHGRVPEGGVFSNITLQSLEGNAALCGLPRLGLPRCPTDEFDDDHRHRSGVLKIVLPSAAAAIVVGACLFILVRARAHVNKRAKKLPVAASEEANNRKTVSYLELARATNGFDDGNLLGAGSFGKVFRGVLDDGQTVAVKVLDMELERATVSFDAECRALRMARHRNLVRILTACSNLDFRALVLPYMPNGSLDEWLLCRDRRGLSLSRRVSIMSDVALAVAYLHHEHFEVVLHCDLKPSNVLLDQDMTACVADFGIARLLPGDDTSVVSRNMQGTIGYMAPEYASTGKASRKSDVFSYGVMLLEVVTGKKPTDAMFSEELSLREWVRQAIPSGLAHVVDHSILLVDEEATSSGDVLRADWSCLAQMLNLGLQCSCDLPEDRVSMKDVADELARIKKSLLCSS

SEQ ID NO: 192822 - protein, 276 aa, Zea Mays
MIMQLFYKRRRIGRRLEGKILPSIIAQLNARTRGLGHLEVIKGDDYVAEVRDNGDCFSRYVVKAHLRECSCKEWQHTGKPCHHALCLITAQQYRNVMMEEFVDDYYSVDMFRKAYERLVETIESKLFWPKVDFAKEVGAPLGKRGVGRQRKNRFKSCLEGGSSKKKPANESEKAKKIIRGKFKCPNCGELGHRKTSYKCPLNGTKKRKRKPRKNSTKKWFPKEPAEASSSQPELGESGQHQLVSTNVPEEIVGTTPQRRVRCAVKKKITPKKKICF

SEQ ID NO: 192823 - protein, 167 aa, Zea Mays
MQKKKNKHANVKSNHDTADAVVEFLSDSKYDAPLKLKKKSKKKKMESSGPAVVYESSVVTEDAGASKLKKKKRKVKGGKVSAGITDAEEILHENQIEETSADVNQLAALSEDVDNEEPQKLKRGKKMEVKKSGKAKKKDKHASRKDNNNLERHVDNGSWSANTRDLA

SEQ ID NO: 192824 - protein, 173 aa, Zea Mays
MQKKKNKHANVKSNHDTADAVVEFLSDSKYDAPLKLKKKSKKKKMESSGPAVVYESSVVTEDAGASKLKKKKRKVKGGKVSAGITDAEEILHENQIEETSANIYAADVNQLAALSEDVDNEEPQKLKRGKKMEVKKSGKAKKKDKHASRKDNNNLERHVDVSTANADENMRFH

SEQ ID NO: 192825 - protein, 826 aa, Zea Mays
MDLEIVGRHALLFDDDATAELVNSGVSLVPWAAVGAADLLLDRHDVRHLLDRVPPRPHRAYSMALLSAPSPDGVSETELDRERYLDLPAGDGEYEGSGDAAPSGNGSDTGQTDYNVVPFSYGYPAGSDEPNSSNLCYRPSFYVPESLLNKLPPSEKVHQIIARTALFVSEHGGQSEIVLRVKQGDNPTFGFLMPDHHLHSYFRYLVDHPQLLKDGADAVGTNKGNTENEHASSGGALSLLGTTYDSGDENEGTLPRSSEGMNPENSMTLDVQGHVKSASIMPDKKEIGKNQNAPPAVKRKTILMKKNQILTGNSMVAVQHEKVNDAIIASSTSKSHTNSGLSEIKEMILEPPSFMKRTMEKIIEFILTNGKEFEKKLIEQDRTTGRFPFLLSSNPYHSYYLKFLQETEESNSHGRSPNNKDRRGSSDRRGRNSRERADRSSCERADRSSRERADRRCSMERKDINYSMESSASDRSSSGPSEKQLYDKQGKGIFHPVCGVKTRKVTADEAAAIVMAATRGLGAANDSLNTMKGTKDNVRTHVSNDPSSSFGSFSSLQDRNALSKHISNSDVDASLTSSGQPQREGFGIIDDDWIANTIAKAAAAAASKEAGSLEATMTKEQKLKADRLRRAKMFAAIIKSGDNKMNDLAAASNPTSEAAKAIPDMNASGLDLQSVAKEREGSSSVLFDHEGPNLTKHSKDSDDEQNRVRKYRKKHQESDEEKDESEDSYKHSRKKHRPEHSRDQSKDVHKHKNKSHSKDRESRHHRHHCSSSEDEHEHERWSSKSRHRHRDDHRYSDEEHSDEEHRRSHKHRREHHSSSKRKHEED

SEQ ID NO: 192826 - protein, 351 aa, Zea Mays
MATVEVVVANGLGGADTKTVFKETYSKLKEEMLDDPAFEFTDESLQWIDRMLDYNVLGGKCNRGLSVIDSYRILKGVDVLSKEETFLACTLGWCIEWLQAYFLVLDDIMDNSQTRRGQPCWFRVPQVGLIAVNDGIILRNHISRILQRHFKGKPYYVDVIDLFNEVEFKTASGQMLDLITTHEGEKDLTKYNLTVRRHIVQYKTAYYSFYLPVACALLLAGENLDNFGDVKNILVEMGTYFQVQDDYLDCFGDPEFIGKIGTDIEDYKCSWLVVQALEHADEKQKNILFESYGKSDPACVAKVKDLYKELKLEAYERESYNKLIADIEAQPSKAVQSVLKSFLHKIYKRDK

SEQ ID NO: 192827 - protein, 529 aa, Zea Mays
MAPVKMLIRPVGARQSGRVVAGSRAGAEHDHDPVALARDPGAGELAVVEEPVVLRLGVVSEDDDGDEAQHARRHHLAVLGHRRVEVAAVQGSTYKPAKRGAPHRTASRSHRSVDVRKTPGSCALLTLSTSVSGSRFQLRSNPASVPRRASTSGAGAAGEIREHSSPATPHRPWPQLAADRERRRRGRADPDPVGGKDLIAPTTMAGAVSALFLLDMKGRVLVWRDYRGDVSALQAERFFTKLLDKEGDSEVHSPVVYDDAGVTYMFIQHNNVFLLTAARQNCNAASILLFLHRVIDVFKHYFEELEEESLRDNFVVVYELLDEMMDFGYPQYTEAKILSEFIKTDAYRMEVTQRPPMAVTNAVSWRSEGIRYKKNEVFLDVVESVNILVNSNGQIVRSDVVGALKMRTYLSGMPECKLGLNDRVLLEAQGRATKGKAIDLDDIKFHQCVRLARFENDRTISFIPPDGSFDLMTYRLSTQVKPLIWVEAQIEKHSRSRIELMVKARSQFKERRCHKPKYKNFNGVCCICS

SEQ ID NO: 192828 - protein, 360 aa, Zea Mays
MAGAVSALFLLDMKGRVLVWRDYRGDVSALQAERFFTKLLDKEGDSEVHSPVVYDDAGVTYMFIQHNNVFLLTAARQNCNAASILLFLHRVIDVFKHYFEELEEESLRDNFVVVYELLDEMMDFGYPQYTEAKILSEFIKTDAYRMEVTQRPPMAVTNAVSWRSEGIRYKKNEVFLDVVESVNILVNSNGQIVRSDVVGALKMRTYLSGMPECKLGLNDRVLLEAQGRATKGKAIDLDDIKFHQCVRLARFENDRTISFIPPDGSFDLMTYRLSTQVKPLIWVEAQIEKHSRSRIELMVKARSQFKERSTATNVEIEVPVPSDATNPNIRTSMGSAAYAPERDAMVWKIKSFPGGKQPIL

SEQ ID NO: 192829 - protein, 1055 aa, Zea Mays
MAVARIKLLRNRKEVQVRQMRREVAQLLEANQDMTARIRVEHVIREEKFMQAYDLIEVYCELIVARLSIIDSQKTCPIDLKEAVASVIFASMRCSDVTELADVRKHFKSKYGKEFEAAALEVRPDSGVNRLIIEKLSAGAPDVQTKIKTLSSIAEEHNIKWEPKAFEEKLQQPTEGHLYGSATYSGGNTSTMGSSTSSISTPQPTYSGVSAAPVDSATIHVPANKTAYGSANSNTFSKESIHNSSSASVPPISQHGPSAYSSAQVPGSNNISHGNPGGPPYPQYSATVPDAVSRNEDSNQNRERKPLVTGANWNVEFKDATSAAQAAAESAEMASIAARAAAELASRGNYSGDKGTGAYDSAAYSSKNTVRKQRAEHVVKDESFHDQSSGVNDPSEMPSNSRNFFGGTETSHVDSENISTAPYQQFHAYNPDSHPYVYEMPTEPPRAHSPDPRFDDLYERESDIGRSEVDPFDFPRENFQDTASVGHNFKDVEIRTPSYDQESTDDYYGNFNSSHDTLAHGSSTTAWDKQNDKAQDNSSPVVFDQYDSDVEQENLLDTFSSKHTEQLPAPGDHMRFSTADWSEQHTSESPSKQRTSALFSRTETQLSDNLGTNKSDIPSPHSYHNMRPAFDSDGGSSDEEIATTTHAVPLRSHSGGSASSVLNKGGGPDASPIFDYSGAHAVRNLNRVQSRDSDLSEEETDLDKFKGSSFARANEQQLLPSAIRTSATSDDKEDDISLNFGKLTPGLRNKPRQPPPYTKVSRESILPKQSLPKVSAGTEESVDSEENTTFKQDRSSPQSSFSARTSSGKDYDSGLYERNRSVGTHWEAKSTIARNSSGLDDAEKLSDLPTNISLPTTKSSERWNSSKVPYHEKPGIGTRREVRSTLARNYFDSDDSEEELEQQQIPQSKQSGVLIQSRRTREVTSDTKRDGRFQTGAQYGDETESVTSKTQVHQGFNSSSTERSERRDPSVYPRVAVQRSSSKAEQIESPMERGKPQGAEMRSTLFRGNEEDTETSSGTPKESTPKTPPAHVHPKLPTDYDSFAAHFRSLRTNRP

SEQ ID NO: 192830 - protein, 820 aa, Zea Mays
MVLQHILEEILQLWDHLLLAYQHHSLHIQVPGSNNISHGNPGGPPYPQYSATVPDAVSRNEDSNQNRERKPLVTGANWNVEFKDATSAAQAAAESAEMASIAARAAAELASRGNYSGDKGTGAYDSAAYSSKNTVRKQRAEHVVKDESFHDQSSGVNDPSEMPSNSRNFFGGTETSHVDSENISTAPYQQFHAYNPDSHPYVYEMPTEPPRAHSPDPRFDDLYERESDIGRSEVDPFDFPRENFQDTASVGHNFKDVEIRTPSYDQESTDDYYGNFNSSHDTLAHGSSTTAWDKQNDKAQDNSSPVVFDQYDSDVEQENLLDTFSSKHTEQLPAPGDHMRFSTADWSEQHTSESPSKQRTSALFSRTETQLSDNLGTNKSDIPSPHSYHNMRPAFDSDGGSSDEEIATTTHAVPLRSHSGGSASSVLNKGGGPDASPIFDYSGAHAVRNLNRVQSRDSDLSEEETDLDKFKGSSFARANEQQLLPSAIRTSATSDDKEDDISLNFGKLTPGLRNKPRQPPPYTKVSRESILPKQSLPKVSAGTEESVDSEENTTFKQDRSSPQSSFSARTSSGKDYDSGLYERNRSVGTHWEAKSTIARNSSGLDDAEKLSDLPTNISLPTTKSSERWNSSKVPYHEKPGIGTRREVRSTLARNYFDSDDSEEELEQQQIPQSKQSGVLIQSRRTREVTSDTKRDGRFQTGAQYGDETESVTSKTQVHQGFNSSSTERSERRDPSVYPRVAVQRSSSKAEQIESPMERGKPQGAEMRSTLFRGNEEDTETSSGTPKESTPKTPPAHVHPKLPTDYDSFAAHFRSLRTNRP

SEQ ID NO: 192831 - protein, 393 aa, Zea Mays
MAAPNSNDAASASGTGPAGEEDISIEALARRVQEHMTLNSNPAARRHKFWETQPVGQFRDAADASLPNGPIEPPTPLSEVRADPYPLPAAFEWLTCDLDDDALLADLYSLLAHNYVEDDENMFRFNYSPAFLRWALKPPSFFRAWHIGVRAKESKKLVAFISGVPARIRARDDVVRMAEINFLCVHKKLRSKRLAPVLIREVTRRVHQENIWQAAYTAGIVLPTPITTCRYWHRSLNPKKLIDVGFSRLGPRMTMSRTVRLYKLPDAPLTPGFRRMELRDVAAVTRLLRAYLARFVVAPDFDEVDVEHWLLPQEDVVDSYLVESPETHELMNDALIVAKRNNYDVFNALDVMENESFLKELKFGPGDGQLHYYLYNYRIRNGIKPSELGLVLL

SEQ ID NO: 192832 - protein, 184 aa, Zea Mays
MGAPKQKWTSEEEDALRRGVRKHGAGKWRTIQKDPQFSPILSSRSNIDLKDKWRNLSFSASGLGSSKVRVPKITGSSSSPSSSSQALLLPAANNVTEAMLPADADKKPRDGKTPPKYGAMIMEALSELNQPNGSDIDAIFDFIKQRHVVQSTFRRFLPSKLRRLADSNKIEKFIPWIWLKFYMS

SEQ ID NO: 192833 - protein, 180 aa, Zea Mays
MGTPSQGSAAVTAARVDLCALDLMPVFAKEMIAGGVAGAFSKTAIAPLERVKILLQTRTNEFGSLGVLKSLKKLRQLDGVMGFYKGNGASVMRIVPYAALHFMAYERYRCWILNNCPSLGTGPLVDLLAGSASGGTAVLCTYPLDLARTKLAFQVFHFALLILSLQSQVFHHLPFVILDY

SEQ ID NO: 192834 - protein, 199 aa, Zea Mays
MESTSGEDAPKRNPLPSALVSNLQSVLAARRPSAAEVSTAATASEAEAEAQEAEASDAPAGDGTPARPIVLLTCAGGIRSAGLAALVDALVAAGRCDVHVCAPESDKQACGHSITIRETIAASSVDFTGAKAFETSGTPVDCVSLALSGRLFPWSSPALVISGINTGSNCGYEMFHSSAIAAAREALVYGVPSIAISLN

SEQ ID NO: 192835 - protein, 245 aa, Zea Mays
MFHSSAIAAAREALVYGVPSIAISLNWKKDETKDSDFKDAAQACLPLINAALDDIEKGTFLRGCLLNIGVPSAPSANKGFKLTKQSGYSPAQSWEAVSTSRPLSATHFMGMHQSLGIQLAQLGKDASAAGAARRVSAQRKAVEVESVAAAGKQEIREVVKKLFRAEFVEKRYEGLDEDIDLRALENGFISVTPLNVHGQVELEIGATASDWLSAAVSLDKEKVAASATADQQDVAAEEKEAPSAA

SEQ ID NO: 192836 - protein, 97 aa, Zea Mays
MGFKLTKQSGYSPAQSWEAVSTSRPLSATHFMGMHQSLGIQLAQLGKDASAAGAARRVSAQRKAVEVESVAAAGKQEIREVVKKLFRAELSRSDMKV

SEQ ID NO: 192837 - protein, 443 aa, Zea Mays
MKERSGSRAAVDERYAQWKSLIPVLYDWFANHNLVWPSLSCRWGPQFEKATYKNRQRLYLSEQASASAIVKPRVAAAEHISQFNEEARSPFVKKYKTIVHPGEVNRIRELPQNSKIIATHTDSPDVLIWDVEAQPNRHAVLGASESRPDLILTGHKENAEFALAMCPAEPYVLSGGKDKSVVLWSIQDHISALGDSSSSPGASGSKQSIKTANEKESPKVDPRGIFHGHDSTVEDVQFCPSSAQEFCSVGDDACLILWDARTGTAPAVKVEKAHSGDVHCVDWNPLDVNYILTGSADNSVRMWDRRNLGSGGAGSPIHKFEGHKAAVLCVQWSPDRASVFGSSAEDGFLNVWDHEKVGKKKNSNVPAGLFFQHAGHRDKIVDFHWNSSDPWTIVSVSDDGESTGGGGTLQIWRMSDLIYRPEDEVLAELENFKAHLASCAPKN

SEQ ID NO: 192838 - protein, 477 aa, Zea Mays
MAALASAARSRRRLLPYLYRLLHSASTTAVSPSPSTSRFLRHASPVPRTPDHSPYLRFPAARVSTLPSGLRVVTQAYPVATRIASVGVWVDAGSRFELPGTNGTAHFLEHMAFKGTRRRPNAQVLEVEIEDMGARLNAYTSREQTTFFADVQARHVPAALDVLSDILQHPRFPERAIQRERGVILREMEEVQGMMEEVIFDHLHAAAFQGHPLGDTILGPEENIRSISKKDLEQYISTHYTCPRMVVSAAGSVSHDEVVDQVKELFTEFSTDPTTADQLVQANPAIFTGSEVRVENAEFPLAHIAIAFKGSSWTDPSSIPLMVIQSILGSWNRSIGVGNCSGSSLARGISNANLAESLMAFNTNYRDTGIFGIYTIAPPDTLQDLSRLIMAEFRRLASQVSETEVARARNQLKSSLLLHIDGSTAVTENNGRQMLTYGRVMPFLELFARIDAVDCATVMETAKEYIIDKVCSIVVTG

SEQ ID NO: 192839 - protein, 348 aa, Zea Mays
MAALASAARSRRRLLPYLYRLLHSASTTAVSPSPSTSRFLRHASPVPRTPDHSPYLRFPAARVSTLPSGLRVVTQAYPVATRIASVGVWVDAGSRFELPGTNGTAHFLEHMAFKGTRRRPNAQVLEVEIEDMGARLNAYTSREQTTFFADVQARHVPAALDVLSDILQHPRFPERAIQRERGVILREMEEVQGMMEEVIFDHLHAAAFQGHPLGDTILGPEENIRSISKKDLEQYISTHYTCPRMVVSAAGSVSHDEVVDQVKELFTEFSTDPTTADQLVQANPAIFTGSEVRVENAEFPLAHIAIAFKGSSWTDPSSIPLMVIQSILGSWNRSIGVGNCSGSWYQQC

SEQ ID NO: 192840 - protein, 297 aa, Zea Mays
MAALASAARSRRRLLPYLYRLLHSASTTAVSPSPSTSRFLRHASPVPRTPDHSPYLRFPAARVSTLPSGLRVVTQAYPVATRIASVGVWVDAGSRFELPGTNGTAHFLEHMAFKGTRRRPNAQVLEVEIEDMGARLNAYTSREQTTFFADVQARHVPAALDVLSDILQHPRFPERAIQRERGVILREMEEVQGMMEEVIFDHLHAAAFQGHPLGDTILGPEENIRSISKKDLEQYISTHYTCPRMVVSAAGSVSHDEVVDQVKELFTEFSTDPTTADQLVQANPAIFTGSEKMQSFL

SEQ ID NO: 192841 - protein, 293 aa, Zea Mays
MAALASAARSRRRLLPYLYRLLHSASTTAVSPSPSTSRFLRHASPVPRTPDHSPYLRFPAARVSTLPSGLRVVTQAYPVATRIASVGVWVDAGSRFELPGTNGTAHFLEHMAFKGTRRRPNAQVLEVEIEDMGARLNAYTSREQTTFFADVQARHVPAALDVLSDILQHPRFPERAIQRERGVILREMEEVQGMMEEVIFDHLHAAAFQGHPLGDTILGPEENIRSISKKDLEQYISTHYTCPRMVVSAAGSVSHDEVVDQVKELFTEFSTDPTTADQLVQANPAIFTGSELL

SEQ ID NO: 192842 - protein, 166 aa, Zea Mays
MTAAAAAARAARRHFSSRLQTTTSRLLHASDSQAAARETSGSFIHPAAVVHPDAAIGQAVSIGPFCTVGPSARVGDTCQLHAGSHVMGHTELGEGCIVQTLEMNAFYILVEIMRSESTALFTALLNLVTARLLVTIISLWVRLILLMIARLVTITSLLIILYLLVT

SEQ ID NO: 192843 - protein, 100 aa, Zea Mays
MTAAAAAARAARRHFSSRLQTTTSRLLHASDSQAAARETSGSFIHPAAVVHPDAAIGQAVSIGPFCTVGPSARVGDTCQLHAGSHVMGHTELGEGCIVQT

SEQ ID NO: 192844 - protein, 128 aa, Zea Mays
MGSSHIAHDCKIGNNNIFANNTLFAGHVIVEDWTHTAGAVVVHQFCHIGSYSFLGGGSVEPGISISMHLMLWCFRRNRYMITWSSRVVNYGVFSHQGGSQPLTVNIIYFIVVSSFPQFFLSLYLLVET

SEQ ID NO: 192845 - protein, 134 aa, Zea Mays
MTAAAAAARAARRHFSSRLQTTTSRLLHASDSQAAARETSGSFIHPAAVVHPDAAIGQAVSIGPFCTVGPSARVGDTCQLHAGSHVMGHTELGEGCIVQTCYCWCRYPWTDNYWGKQCHRTLCCCWCKMPRFEI

SEQ ID NO: 192846 - protein, 212 aa, Zea Mays
MTAAAAAARAARRHFSSRLQTTTSRLLHASDSQAAARETSGSFIHPAAVVHPDAAIGQAVSIGPFCTVGPSARVGDTCQLHAGSHVMGHTELGEGCIVQTGAIVGADIPGRTIIGENNVIGHYAVVGAKCQDLKYKTNNARFLLFRLEMNAFYILVEIMRSESTALFTALLNLVTARLLVTIISLWVRLILLMIARLVTITSLLIILYLLVT

SEQ ID NO: 192847 - protein, 451 aa, Zea Mays
MEPSRGGVGGGGRRWGEAEGDAAEEGRRGEDGGEVSLREWLDRPGRAVEAAECVHVFRQVAEAVAVAHAQGVAVGSARPSCFVVSPPFARVAFIESASGSDASGSCSGSDASEDADGDPDPDPDPDASPPLRRRDSAVPGEERAGRSFPLKSVLAMELSWYTSPEDADDSAATFASDVYRLGVLLFELFYTFETMEDKMRAMANLRHRVLPPQLLFKWPKEASFCQLLMHPVPETRPKMSEVLQSEFLNQSRNSLEEHEAALRLREEIEEQELLLDFLQQLQKRKQDIADSLQGTIAFLSSDINEVPHQQSTIGHCENFLSDGDKEVCSGTVEEQSDCGSRKRFRPELQGVDMEENNRSVEECSRTVPSSELIQESVLSKSSRLMKNFKKLETAYFLTRSKLMKQVGSQISSCDRVVKNTTGSAVGTEGSSLDDFSLERQYGTRQRGLGCY

SEQ ID NO: 192848 - protein, 770 aa, Zea Mays
MEPSRGGVGGGGRRWGEAEGDAAEEGRRGEDGGEVSLREWLDRPGRAVEAAECVHVFRQVAEAVAVAHAQGVAVGSARPSCFVVSPPFARVAFIESASGSDASGSCSGSDASEDADGDPDPDPDPDASPPLRRRDSAVPGEERAGRSFPLKSVLAMELSWYTSPEDADDSAATFASDVYRLGVLLFELFYTFETMEDKMRAMANLRHRVLPPQLLFKWPKEASFCQLLMHPVPETRPKMSEVLQSEFLNQSRNSLEEHEAALRLREEIEEQELLLDFLQQLQKRKQDIADSLQGTIAFLSSDINEVPHQQSTIGHCENFLSDGDKEVCSGTVEEQSDCGSRKRFRPELQGVDMEENNRSVEECSRTVPSSELIQESVLSKSSRLMKNFKKLETAYFLTRSKLMKQVGSQISSCDRVVKNTTGSAVGTEGSSLDDFSLERQYGTRQRGWVNSFLEGLCKYLSFSKLKVRAELKHCDLLNSSNLVCSVGFDRDREFFATAGVNKKIKVFEYNMIVNEHRDIHYPVVEMSNRSKLSCICWNSYMKSHIASSDFEGIVQVWDVTRSQVFVGMREHERRVWSVDFSIVDPTKLVSGSDDGSVKLWDMNQAGSIGTIRTRANVCSVQFQPDTARSIAIGSADHKIYCYDLRNIRAPYCTLVGHTKTVSYVKYLDASTILSASTDNSLKLWDLSMNPGRIIDSPVQTFTGHTNTKVFVYHKEFPMPVLAYKFSVTDPISGQEIDDQSQFISCVCWRGQSSTLLSANSSGNIKILEMD

SEQ ID NO: 192849 - protein, 252 aa, Zea Mays
MEPSRGGVGGGGRRWGEAEGDAAEEGRRGEDGGEVSLREWLDRPGRAVEAAECVHVFRQVAEAVAVAHAQGVAVGSARPSCFVVSPPFARVAFIESASGSDASGSCSGSDASEDADGDPDPDPDPDASPPLRRRDSAVPGEERAGRSFPLKSVLAMELSWYTSPEDADDSAATFASDVYRLGVLLFELFYTFETMEDKMRAMANLRHRVLPPQLLFKWPKEASFCQLLMHPVPETRPKMRFGMLLGVKFLLG

SEQ ID NO: 192850 - protein, 665 aa, Zea Mays
MEPSRGGVGGGGRRWGEAEGDAAEEGRRGEDGGEVSLREWLDRPGRAVEAAECVHVFRQVAEAVAVAHAQGVAVGSARPSCFVVSPPFARVAFIESASGSDASGSCSGSDASEDADGDPDPDPDPDASPPLRRRDSAVPGEERAGRSFPLKSVLAMELSWYTSPEDADDSAATFASDVYRLGVLLFELFYTFETMEDKMRAMANLRHRVLPPQLLFKWPKEASFCQLLMHPVPETRPKMSEVLQSEFLNQSRNSLEEHEAALRLREEIEEQELLLDFLQQLQKRKQDIADSLQGTIAFLSSDINEVPHQQSTIGHCENFLSDGDKEVCSGTVEEQSDCGSRKRFRPELQGVDMEENNRSVEECSRTVPSSELIQESVLSKSSRLMKNFKKLETAYFLTRSKLMKQVGSQISSCDRVVKNTTGSAVGTEGSSLDDFSLERQYGTRQRGWVNSFLEGLCKYLSFSKLKVRAELKHCDLLNSSNLVCSVGFDRDREFFATAGVNKKIKVFEYNMIVNEHRDIHYPVVEMSNRSKLSCICWNSYMKSHIASSDFEGIVQVWDVTRSQVFVGMREHERRVWSVDFSIVDPTKLVSGSDDGSVKLWDMNQAGSIGTIRTRANVCSVQFQPDTARSIAIGSADHKIYCYDLRNIRAPYCTLVGHTKTVSYEG

SEQ ID NO: 192851 - protein, 626 aa, Zea Mays
MEPSRGGVGGGGRRWGEAEGDAAEEGRRGEDGGEVSLREWLDRPGRAVEAAECVHVFRQVAEAVAVAHAQGVAVGSARPSCFVVSPPFARVAFIESASGSDASGSCSGSDASEDADGDPDPDPDPDASPPLRRRDSAVPGEERAGRSFPLKSVLAMELSWYTSPEDADDSAATFASDVYRLGVLLFELFYTFETMEDKMRAMANLRHRVLPPQLLFKWPKEASFCQLLMHPVPETRPKMSEVLQSEFLNQSRNSLEEHEAALRLREEIEEQELLLDFLQQLQKRKQDIADSLQGTIAFLSSDINEVPHQQSTIGHCENFLSDGDKEVCSGTVEEQSDCGSRKRFRPELQGVDMEENNRSVEECSRTVPSSELIQESVLSKSSRLMKNFKKLETAYFLTRSKLMKQVGSQISSCDRVVKNTTGSAVGTEGSSLDDFSLERQYGTRQRGWVNSFLEGLCKYLSFSVNKKIKVFEYNMIVNEHRDIHYPVVEMSNRSKLSCICWNSYMKSHIASSDFEGIVQVWDVTRSQVFVGMREHERRVWSVDFSIVDPTKLVSGSDDGSVKLWDMNQAGSIGTIRTRANVCSVQFQPDTARSIAIGSADHKIYCYDLRNIRAPYCTLVGHTKTEG

SEQ ID NO: 192852 - protein, 280 aa, Zea Mays
MAQGSILLPVANAPCARNQTEDEVWDVTRSQVFVGMREHERRVWSVDFSIVDPTKLVSGSDDGSVKLWDMNQAILFLHLLYVRLLTNDNMVIELAGSIGTIRTRANVCSVQFQPDTARSIAIGSADHKIYCYDLRNIRAPYCTLVGHTKTVSYVKYLDASTILSASTDNSLKLWDLSMNPGRIIDSPVQTFTGHTNTKNFVGLSISDGYIATGSETNEVFVYHKEFPMPVLAYKFSVTDPISGQEIDDQSQFISCVCWRGQSSTLLSANSSGNIKILEMD

SEQ ID NO: 192853 - protein, 648 aa, Zea Mays
MEPSRGGVGGGGRRWGEAEGDAAEEGRRGEDGGEVSLREWLDRPGRAVEAAECVHVFRQVAEAVAVAHAQGVAVGSARPSCFVVSPPFARVAFIESASGSDASGSCSGSDASEDADGDPDPDPDPDASPPLRRRDSAVPGEERAGRSFPLKSVLAMELSWYTSPEDADDSAATFASDVYRLGVLLFELFYTFETMEDKMRAMANLRHRVLPPQLLFKWPKEASFCQLLMHPVPETRPKMSEVLQSEFLNQSRNSLEEHEAALRLREEIEEQELLLDFLQQLQKRKQDIADSLQGTIAFLSSDINEVPHQQSTIGHCENFLSDGDKEVCSGTVEEQSDCGSRKRFRPELQGVDMEENNRSVEECSRTVPSSELIQESVLSKSSRLMKNFKKLETAYFLTRSKLMKQVGSQISSCDRVVKNTTGSAVGTEGSSLDDFSLERQYGTRQRGWVNSFLEGLCKYLSFSKLKVRAELKHCDLLNSSNLVCSVGFDRDREFFATAGVNKKIKVFEYNMIVNEHRDIHYPVVEMSNRSKLSCICWNSYMKSHIASSDFEGIVQVWDVTRSQVFVGMREHERRVWSVDFSIVDPTKLVSGSDDGSVKLLGVLALLEQEQMCVLYNFNLILLAPLPSALQTTKFTAMIYVTYELLIVH

SEQ ID NO: 192854 - protein, 309 aa, Zea Mays
MEENNRSVEECSRTVPSSELIQESVLSKSSRLMKNFKKLETAYFLTRSKLMKQVGSQISSCDRVVKNTTGSAVGTEGSSLDDFSLERQYGTRQRGWVNSFLEGLCKYLSFSKLKVRAELKHCDLLNSSNLVCSVGFDRDREFFATAGVNKKIKVFEYNMIVNEHRDIHYPVVEMSNRSKLSCICWNSYMKSHIASSDFEGIVQVWDVTRSQVFVGMREHERRVWSVDFSIVDPTKLVSGSDDGSVKLWDMNQAILFLHLLLGVLALLEQEQMCVLYNFNLILLAPLPSALQTTKFTAMIYVTYELLIVH

SEQ ID NO: 192855 - protein, 97 aa, Zea Mays
MVDGYRGCLVQLLGGFWPPEAEAETKRPTSGAASERSDCVRSRPPTYLAKRRSVGFRPKPRAVRLEFPGPLLRRRREPNGAPPVRTTRIAAGVRSDA

SEQ ID NO: 192856 - protein, 314 aa, Zea Mays
MTCCSRRRSSSTLRCRPRHLGSRVVTETTSNTPAAPQAQRSTPPPGAGAKPEQNQPADRPVGHPILRPPSPYSVVDCELDYITSMSRLRALWQASFNATKRALVWSSDDLIPPSERCIFNFNSKDELKRWHLYSDSEYGGLSSASLEITDGASVGDTPLTGVFSGNLSLDMSEESTWRIRRYGFCGMRSKKFDGFIDLDAYDTIAMKIKGDGRCYISTIYTENWVNSPGQQEDNSWQAFVYIPPQDRWEVLKIPLDRYLPTWRGNVIQAKLEMNPARIVGMSLSVNAEGGVPGAKTGPGDFRLDVAWIKALRAL

SEQ ID NO: 192857 - protein, 52 aa, Zea Mays
MKQARPKTGRRDEVHGDTAVSGKKQQISHGCCLADWRRRRRSGHSGRVKGVA

SEQ ID NO: 192858 - protein, 483 aa, Zea Mays
MEISFEAWEGVQRHGQDLADRLAQGFTGLLQVPPQFPWPPSPHKRMPFDIDLPVVPFGAGGPLGVPGKDFPFPAAAVSSVIDIGGRLGQAGAELGASVGGAVQHAVRRLPVPFRNGQIRRRKLPPPLPQPPADSVGEGAVGLFVERAAVDRCPLEAAAAAAAAATGSAAASSVSGPVSGEDLDEDDDGFGCDIGTLGNFKKANGTVNMSATYNTRSQDIESSVVARGGLWRLEASVGPSTSGNDTSPLYLIQLGPLLFVRDSTLLLPVHLSKQHLLWYGYDRKNGVHSLCPAIWSKHRRWLMMSMMCLNPIACSFMDLQFPNGQLTYVAGEGISASGFLPLFGGLLQAHGKYPGETRNKRGTRFTPMVQWPDKSVSLGVTQALAWKRSGLMVRPSIQVSVCPTFGGSDPGVRAEVVHSLKEELNLMCGLSCSQRPSAYTALSIGRSKWNGQVGSSGVVITLETPLNNIGRPSLSVQLNGGFEL

SEQ ID NO: 192859 - protein, 250 aa, Zea Mays
MHTSAYKSGSAFTGKRVLVVGCGNSGMEVCLDLCNHSAEPHIVVRDAVHILPREMLGHSTFGLSMWLLKWLPVHVVDRVLLCIARAMLGDTARLGLKRPASGPLQLKSLSGKTPVLDVGTFAKIKSGDIKVRPAVRQVSGRAVEFADGELEEFDAIVLATGYKSNVPFWLKDRVLFSEKDGLPRKAFPNGWKGEKGLYSVGFTRRGLMGTSVDARRVAHDVEQQWRKAKGTHRDGVPLPLVAVVYHGDGL

SEQ ID NO: 192860 - protein, 129 aa, Zea Mays
MASPVDFKVGWSIISSDVLAALNAIYGGHVFKFRLLNSAFITLLPKIEDATMVKDYRPISLIHSFVKLVTKILSARLAPLLPKLVSNNQSAFVEGRNIHDNFLPVQQLARAVHKSKEPHIDEVGYFESF

SEQ ID NO: 192861 - protein, 139 aa, Zea Mays
MGRQRSHWRVLQLSCTTGATQQIGIAQLLFMLATSPDASPKQSRINLVQTRSSSRGLTKRTTSSAYMESLDLTFAASKLCSSPLDSACLNKLPSTSITMIKKHRRQRIPLTQTSPMPNMIIWDPIEKNLCRGRGQQVGD

SEQ ID NO: 192862 - protein, 413 aa, Zea Mays
MDPWSESEGKRAHDPIFKCFSQNQGHHHFMERSTDAAVALSERCRCIWVSGPIIVGAGPSGLAAAACLKEKGISSLILERSRCLASLWQLKTYDRLSLHLPRQFLVCAEYDEQLLLWRVRTQTSDTTGEEVEYVSRWLIVATGENAEAVQPDIGGLQEFPGTIMHTSAYKSGSAFTGKRVLVVGCGNSGMEVCLDLCNHSAEPHIVVRDAVHILPREMLGHSTFGLSMWLLKWLPVHVVDRVLLCIARAMLGDTARLGLKRPASGPLQLKSLSGKTPVLDVGTFAKIKSGDIKVRPAVRQVSGRAVEFADGELEEFDAIVLATGYKSNVPFWLKDRVLFSEKDGLPRKAFPNGWKGEKGLYSVGFTRRGLMGTSVDARRVAHDVEQQWRKAKGTHRDGVPLPLVAVVYHGDGL

SEQ ID NO: 192863 - protein, 107 aa, Zea Mays
MQGTLTETEEDTHIYVCDINPNMLNVGKKRAAERGYSEEHCLSWIQGDAEALSFEDGSMDGYTIAFGIRNVTHIEKALSEAYRVLKRGGRFLCLELSHVDVPVFKEM

SEQ ID NO: 192864 - protein, 187 aa, Zea Mays
METLIDITPKDPLPAPSVGPLDPDCTKEGLILCDKERMKGQQGVSLDALVGIFTRLGRDMEEIGVSKSYKLAEKVASIMEEAQPLLTRIEDLAEEMQPLLSEVRDSDLLKDVETIAKGLADASVDLRRLKSSMLTPENTDLIKQSIFTLIFTLKNIESISSDISGFTGDETTRQNIKLLIKSLSRLL

SEQ ID NO: 192865 - protein, 436 aa, Zea Mays
MVAVYANACSRCMCMNDDGMPWREVICSALLLIVIEVRREFCHVITRDLLKFSIPESAMGNCWGTKISSDTAASPSTSPFPRSEGEILRCANVRSFTLTELMTSTRNFRPDSVLGEGGFGSVFKGWIDETTFAPARPGTGMVIAVKKLNQQGLQGHREWLAEVNYLGQLSHPSLVRLVGYCLQDEQRLLVYEFMPRGSLENHLFRTSRFQPLSWNLRIKVALGAAKGLAFLHSDKARVIYRDFKTSNVLLDSNYNAKLSDFGLAKDGPTGDQSHVSTRVMGTYGYAAPEYLATGHLTPKSDVYSFGVVLLEMLSGRRAMDKNRPATEHNLVDWARPYLSSKRRVSRILDDRLAGHYPLPAVQRAAALALQCLSEDSRKRPTMDQVVASLQQLTAAQDHDDAHRSSRRYPKDHRQAAALNNRNLNAHRRLSALPLPE

SEQ ID NO: 192866 - protein, 220 aa, Zea Mays
MWNADHNAIINTFVGHSNTVTCGDFTPDGKLICTGSDDASLRIWDPRSAQSRHVIRGHGYHTDGLTCLSMTLDSQTVVSGSKDSSVHAVNVNSGQIVGSLVGHTTSIECVGISSSYGWVATGSMDQKLIIWDLTHQSSRCTCEHDEGVTSLAWLGSSRYVASGCIDGKVRIWDSLSGDCAREFSGHADVVQSMAITADGNAMVSVSSDGSARVFDISMFK

SEQ ID NO: 192867 - protein, 758 aa, Zea Mays
MTSPQPTKLLPSVLLVRHLTLSFSLTAFSWTPGPEGRLTAAAGCQGVRALGQSIATAAAQQAVQLSTSPDAGSPIRPSPAGRLSLVPSAASSSPEPAQQVVRQVSISRSQHRLINKVWVWEHFTRYEVEVQEADGSIVKQKWAKCLRCSHKAKAYSYNGTKAFSNHLRMKHQVLKGQQMLSQSGDAIATYKYDENASVRLLYYAIIMHEYPFSIAQHRYFVKFIKSLRPSFPSKSRVTVCKEIMELYKEEKNLLYAQFNKLSCRVSFTMDTWTSIQNKSYLCVTAHWIDDHWKMQKRIINFMHVEGSHGGIKLSDTFFANVLNWNLDKKMFALSLDNAAANKVAVEIVIENAKELLVCDGKFFHVRCANHILNLVARDGLSCLGNVIGNIRQFVTIIKRSPLQLEAFEKCAKECGLDPKKTLSLDVATRWNSTYIMIRDAIYYKNAFDRLAKKDKDKYGHINPSSTDWLNATNISKCLKKFYDVTLLFSGTSYPTANHFFRKFSEIKMAIARWCDSSDLVICTMAFSMRHKFDKYWEMNNLALAVGAFLDPRYKHRMIELYMSKMYGSDKAELEKLVFMNVINELFAYYSAVINAKSTTKGSSSRESEFVPHKNTCLVDEEEDEVDLDELYATTSNDKKVSELDLYMSEDLVKVNDNEATFDILSWWKGQVTNFPILSTLARDVLSMQVSTVASESAFSSGGRIVDAFRSRLKPEFIEALVCCKDWKIASEKDLEIEIKTLSEPMNDVDLEDAAAIGT

SEQ ID NO: 192868 - protein, 323 aa, Zea Mays
MIRDAIYYKNAFDRLAKKDKDKYGHINPSSTDWLNATNISKCLKKFYDVTLLFSGTSYPTANHFFRKFSEIKMAIARWCDSSDLVICTMAFSMRHKFDKYWEMNNLALAVGAFLDPRYKHRMIELYMSKMYGSDKAELEKLVFMNVINELFAYYSAVINAKSTTKGSSSRESEFVPHKNTCLVDEEEDEVDLDELYATTSNDKKVSELDLYMSEDLVKVNDNEATFDILSWWKGQVTNFPILSTLARDVLSMQVSTVASESAFSSGGRIVDAFRSRLKPEFIEALVCCKDWKIASEKDLEIEIKTLSEPMNDVDLEDAAAIGT

SEQ ID NO: 192869 - protein, 178 aa, Zea Mays
MHTEETLSAPVFLFFPKISSRPTFFLLRIHFDLCLNIGNYDNTINVQICTKKERMHVLLSLLERDAPKSAIIFVAGQSERSKKAGNPPSTMVVSDFLRNEYKGSLDVMLLEEDMNFNARAASFSVRLSSSEDSSSLSESPPQHTQHLHFSVLLSMRIPAGSEGKRIPAGLNRHSEQRV

SEQ ID NO: 192870 - protein, 318 aa, Zea Mays
MQVTKVARLLAAKACTVMALLDGGTLKRQKSWVKAEPPAIIVATVASLCQMVERRAFSLQSMRVLVIDEVDFIFGSSKQVSSLRKILTSYSAASSRQTIFASASIPQHNRFLHDCVQHKWTKGDVVHVHVHPVQPMPSHLCHKYVICTKKERMHVLLSLLERDAPKSAIIFVAGQSERSKKAGNPPSTMVVSDFLRNEYKGSLDVMLLEEDMNFNARAASFSEVKGRGFLLVSTDIASRGFDLPQTSHVYNLDLPKTATDYLHRAGRTGRQPFSRLELECCVTTLITEEEHFVLRRFQNELKFHTQEEELPLMNCFPG

SEQ ID NO: 192871 - protein, 211 aa, Zea Mays
MQEQSLPLLLSGQDCILHAQTGSGKTLAYLLSIFSTIDFSRSSVQALVVVPTRELGMQVARLLAAKACTVMALLDGGTLKRQKSWVKAEPPAIIVATVASLCQMVERRAFSLQSMRVLVIDEVDFIFGSSKQVSSLRKILTSYSAASSRQTIFASASIPQHNRFLHDCVQHKWTKGDVVHVHVHPVQPMPSHLCHKYVAARHISSQPIQCI

SEQ ID NO: 192872 - protein, 264 aa, Zea Mays
MNSLESAKDIPKFLELFKDQINMDEIKDPVESFKTFNEFFIRGLKPGARPIAHGDQNSIATCAADSRLMAFSSVDESTRLWIKGRKFSIEGLLGTSAHSNALSNGSLVIFRLAPQDYHRFHVPVSGTVEKFVEIPGCLYTVNPIAVNSKYCNVFTENKRVVSMISTSEFGKVAFVAIGATMVGSITFLKKEGDYVRKGDEFGYFSFGGSTVICVFEKDAIQFDADLVANSERSLETLVSVGMTLGISTRNKEMQVPDLQKVSLG

SEQ ID NO: 192873 - protein, 218 aa, Zea Mays
MVSLRCAVGLCSSAQVGSSWPLFQSPHRIAVPSVAARDVTSPRAPSAWSRSASAASMETARLTPREQATTRICQVSSFATELLEIRSKEPSLHVLLIAGNPGIAAFYKDCVEALYENLGGQASITAIGHISHSQKDCEHGRLFSLYEQIDHKVDFIEQELQHSEQPIVLVGHSIGAYIGLEVFKRLQNKIKFIVGLYPFLKMNKSSVTQSAIGYIARY

SEQ ID NO: 192874 - protein, 159 aa, Zea Mays
MVTSTVNILRSSLLSKWASLFASFIGSLRPSITRGIVRRFLGPSWSVTAVDAACSHLLRYNTMRNVLFMAMTEFQKLTEEPDWTFIRAQEDKMAFLFGVDDHWGPLSHLEEISKHAPRVTLSVETEGHTHGYCCTEAGSVWVADYIANLIKNQMLLWNN

SEQ ID NO: 192875 - protein, 63 aa, Zea Mays
MTTNQFLFSLDIDNINIVEFCHFVKDINIIHKGIWLGVSCLVIPVQANLVTCYLKTVSAKRSS

SEQ ID NO: 192876 - protein, 251 aa, Zea Mays
MRQAAAMNYGMADVGMVVVAPAASFHHTHHHHHHHEAAAAAAAAAAASGDPIFPLLSGGPCVLDPDKSASASAIQFWQQQPPPPSSPAAAAGANPNPSASPFAYLKKPLPMLDAGAGSSGSGATTCQDCGNQAKKDCGHNRCRTCCKSRGFDCNTHVKSTWVPAARRRERQQLAASGSASSSPATASAAAVAASASASASKKPRLLSSQTTTSHTSTSNATTPRSFDTTSSHQGTASRGRCARRRCSSACA

SEQ ID NO: 192877 - protein, 234 aa, Zea Mays
MMDHQLFDDPFGSSISSLEAEIFSAAAQLPPSPPWPDIDLDDDYDIHDLSAPAANAATSSGGGYGSGGSGGHRKLSHNAYERGRRKQLNELYSSLRSLLPDADQTKKLSIPTTVSRVLKYIPELQKQVDNLERRKKELTNANCKPGVLKTTKAVTPIVSATCLNDTEIMVQVSLHSDVAATALPLSKCIKVLENEGLHLVSSSTYSSAFENKTFYSLHLQSKLRILKQEVSLDH

SEQ ID NO: 192878 - protein, 1092 aa, Zea Mays
MSDVSLDLGGIRAGPVERDIEQAITALKKGAYLLKYGRRGKPKFCPFRLSNDESVLIWFSGKEEKHLRLSHISKIIPGQRTSIFQRYPRPEKECQSFSLISHDRSLDVICKDKDEAEVWFAGLKTLISRCHQRKWRTESRSDLLSSGATSPRTYTRRSSPLSSPFSSNDSIHKDGSDNYRLRTPYGSPPKNGLEKAFSDVMLYAVPPRGFFPSDSNAGSVHSMSSGHSDNTNGHPRGVPMDAFRASYSSAVSSSSHGSGHDDGDALGDVFIWGEGTGEGILGGGGSRVGSSSGAKMDCLVPKPLEFAVRLDVQNISCGGRHAALVTKQGEIYSWGEESGGRLGHGVDCDVSQPKLIDALSHMNIELVACGEYHTCAVTLSGDLYTWGDGTFKFGLLGHGNDISHWVPKHVNGPLEGIHVSSISCGPWHTAVVTSAGQLFTFGDGSFGVLGHGDRESISVPREVESLKGLRTVRAACGVWHTAAVVEVMAGNSSSSNCSSGKIFTWGDGDKGRLGHGDKGPKLVPTCVAALVEPNFCQVACGHCLTVALTTSGHVYTMGSAVYGQLGNAQADGMLPVRVEGKLHKNFVEEISCGAYHVAVLTSKTEVYTWGKGANGRLGHGDTDDKNTPTLVEALKDKQVRIVVCGINFTAAICIHKWVSGVDQSMCSGCRQPFNLRRKRHNCYNCALVFCHSCSSKKSLKASLAPNTNKPYRVCDTCYSKLTKGLETDMHSSAKRAATVPGVSDANEEDLETRSNAQLSRLSSMESFKHLDSRYSKKNKKFEFNSTRVSPVPNGSSHWSGLNISRSFNPVFGSSKKFFSASVPGSRIVSRATSPISRRASPPRSTTPTPTLGGLTSPRVVPNDGKPTNDALSQEVLNLRSQVESLARKSQLLEVELERTTKQLKEAISIAGEETAKCKAAKEVIKSLTAQLKGMAERLPGGAAKNTKLPPLPGIFIPSDIPSMPTESEGSPSSSGEQIINGHNGLLTSNGQSSIRNKTSHPEVGKNGGRLPDAESCHDAEWVEQDEPGVYITLTALPGGARDLKRVRFSRKRFSETQAEQWWQQNRARVYQQYNVRVIDKSTASVNSDIAAN

SEQ ID NO: 192879 - protein, 1065 aa, Zea Mays
MSDVSLDLGGIRAGPVERDIEQAITALKKGAYLLKYGRRGKPKFCPFRLSNDESVLIWFSGKEEKHLRLSHISKIIPGQRTICKDKDEAEVWFAGLKTLISRCHQRKWRTESRSDLLSSGATSPRTYTRRSSPLSSPFSSNDSIHKDGSDNYRLRTPYGSPPKNGLEKAFSDVMLYAVPPRGFFPSDSNAGSVHSMSSGHSDNTNGHPRGVPMDAFRASYSSAVSSSSHGSGHDDGDALGDVFIWGEGTGEGILGGGGSRVGSSSGAKMDCLVPKPLEFAVRLDVQNISCGGRHAALVTKQGEIYSWGEESGGRLGHGVDCDVSQPKLIDALSHMNIELVACGEYHTCAVTLSGDLYTWGDGTFKFGLLGHGNDISHWVPKHVNGPLEGIHVSSISCGPWHTAVVTSAGQLFTFGDGSFGVLGHGDRESISVPREVESLKGLRTVRAACGVWHTAAVVEVMAGNSSSSNCSSGKIFTWGDGDKGRLGHGDKGPKLVPTCVAALVEPNFCQVACGHCLTVALTTSGHVYTMGSAVYGQLGNAQADGMLPVRVEGKLHKNFVEEISCGAYHVAVLTSKTEVYTWGKGANGRLGHGDTDDKNTPTLVEALKDKQVRIVVCGINFTAAICIHKWVSGVDQSMCSGCRQPFNLRRKRHNCYNCALVFCHSCSSKKSLKASLAPNTNKPYRVCDTCYSKLTKGLETDMHSSAKRAATVPGVSDANEEDLETRSNAQLSRLSSMESFKHLDSRYSKKNKKFEFNSTRVSPVPNGSSHWSGLNISRSFNPVFGSSKKFFSASVPGSRIVSRATSPISRRASPPRSTTPTPTLGGLTSPRVVPNDGKPTNDALSQEVLNLRSQVESLARKSQLLEVELERTTKQLKEAISIAGEETAKCKAAKEVIKSLTAQLKGMAERLPGGAAKNTKLPPLPGIFIPSDIPSMPTESEGSPSSSGEQIINGHNGLLTSNGQSSIRNKTSHPEVGKNGGRLPDAESCHDAEWVEQDEPGVYITLTALPGGARDLKRVRFSRKRFSETQAEQWWQQNRARVYQQYNVRVIDKSTASVNSDIAAN

SEQ ID NO: 192880 - protein, 892 aa, Zea Mays
MLYAVPPRGFFPSDSNAGSVHSMSSGHSDNTNGHPRGVPMDAFRASYSSAVSSSSHGSGHDDGDALGDVFIWGEGTGEGILGGGGSRVGSSSGAKMDCLVPKPLEFAVRLDVQNISCGGRHAALVTKQGEIYSWGEESGGRLGHGVDCDVSQPKLIDALSHMNIELVACGEYHTCAVTLSGDLYTWGDGTFKFGLLGHGNDISHWVPKHVNGPLEGIHVSSISCGPWHTAVVTSAGQLFTFGDGSFGVLGHGDRESISVPREVESLKGLRTVRAACGVWHTAAVVEVMAGNSSSSNCSSGKIFTWGDGDKGRLGHGDKGPKLVPTCVAALVEPNFCQVACGHCLTVALTTSGHVYTMGSAVYGQLGNAQADGMLPVRVEGKLHKNFVEEISCGAYHVAVLTSKTEVYTWGKGANGRLGHGDTDDKNTPTLVEALKDKQVRIVVCGINFTAAICIHKWVSGVDQSMCSGCRQPFNLRRKRHNCYNCALVFCHSCSSKKSLKASLAPNTNKPYRVCDTCYSKLTKGLETDMHSSAKRAATVPGVSDANEEDLETRSNAQLSRLSSMESFKHLDSRYSKKNKKFEFNSTRVSPVPNGSSHWSGLNISRSFNPVFGSSKKFFSASVPGSRIVSRATSPISRRASPPRSTTPTPTLGGLTSPRVVPNDGKPTNDALSQEVLNLRSQVESLARKSQLLEVELERTTKQLKEAISIAGEETAKCKAAKEVIKSLTAQLKGMAERLPGGAAKNTKLPPLPGIFIPSDIPSMPTESEGSPSSSGEQIINGHNGLLTSNGQSSIRNKTSHPEVGKNGGRLPDAESCHDAEWVEQDEPGVYITLTALPGGARDLKRVRFSRKRFSETQAEQWWQQNRARVYQQYNVRVIDKSTASVNSDIAAN

SEQ ID NO: 192881 - protein, 920 aa, Zea Mays
MDGSDNYRLRTPYGSPPKNGLEKAFSDVMLYAVPPRGFFPSDSNAGSVHSMSSGHSDNTNGHPRGVPMDAFRASYSSAVSSSSHGSGHDDGDALGDVFIWGEGTGEGILGGGGSRVGSSSGAKMDCLVPKPLEFAVRLDVQNISCGGRHAALVTKQGEIYSWGEESGGRLGHGVDCDVSQPKLIDALSHMNIELVACGEYHTCAVTLSGDLYTWGDGTFKFGLLGHGNDISHWVPKHVNGPLEGIHVSSISCGPWHTAVVTSAGQLFTFGDGSFGVLGHGDRESISVPREVESLKGLRTVRAACGVWHTAAVVEVMAGNSSSSNCSSGKIFTWGDGDKGRLGHGDKGPKLVPTCVAALVEPNFCQVACGHCLTVALTTSGHVYTMGSAVYGQLGNAQADGMLPVRVEGKLHKNFVEEISCGAYHVAVLTSKTEVYTWGKGANGRLGHGDTDDKNTPTLVEALKDKQVRIVVCGINFTAAICIHKWVSGVDQSMCSGCRQPFNLRRKRHNCYNCALVFCHSCSSKKSLKASLAPNTNKPYRVCDTCYSKLTKGLETDMHSSAKRAATVPGVSDANEEDLETRSNAQLSRLSSMESFKHLDSRYSKKNKKFEFNSTRVSPVPNGSSHWSGLNISRSFNPVFGSSKKFFSASVPGSRIVSRATSPISRRASPPRSTTPTPTLGGLTSPRVVPNDGKPTNDALSQEVLNLRSQVESLARKSQLLEVELERTTKQLKEAISIAGEETAKCKAAKEVIKSLTAQLKGMAERLPGGAAKNTKLPPLPGIFIPSDIPSMPTESEGSPSSSGEQIINGHNGLLTSNGQSSIRNKTSHPEVGKNGGRLPDAESCHDAEWVEQDEPGVYITLTALPGGARDLKRVRFSRKRFSETQAEQWWQQNRARVYQQYNVRVIDKSTASVNSDIAAN

SEQ ID NO: 192882 - protein, 103 aa, Zea Mays
MFEDAKNIFGKRFMEIVAVVGWIIWKQRNGCIFRNVVPSFTSSRICFNDMLKLQMFRFSPALQLDVSQWLNSRGRLYTEAPIDSDFGAIYGERRTNRGSRLYA

SEQ ID NO: 192883 - protein, 66 aa, Zea Mays
MPKFEYRLRFLTHDKGRELAVGVFKRLSFVQQITVACSHFCAMLASFTFYIVSLNSRLQGRRKKLS

SEQ ID NO: 192884 - protein, 176 aa, Zea Mays
MQTERSPRTCGFFPPCLSALPKLHPLALTTEMSGGGGLGSGCSYQKFVHFALEQTRHRSTLVPHPSQEKFRFIKANEDNTVLNALSFSTSKIRLLRSLTIEQKNSVQVLDFAAFSRPEYDLPIFCANAFSSPARSIVVLDLNPLYDTTEHKDYREKYYRALMPLVHKYSELHVFNR

SEQ ID NO: 192885 - protein, 167 aa, Zea Mays
MPLVHKYSELLPWGGKITSESLRFFSPIVIWTVFEPSEANHQALYSAFVDYYMVWLEFMDGAVRESSKEKIDRNREAQHKYLTWRAEKDPGYPLLKKLIGESGAKDLVREFLFEGVGSLGTKSFLEYFAEYAQEDGTVNKKRSMAGKSFGTRPWDAHGLFVGDAVDG

SEQ ID NO: 192886 - protein, 232 aa, Zea Mays
MHHHFLSRLLTHRLLLPAATSPYAATLSTPPRRAYARRAKPPPAGDSGDHAAASSPVAPPPPPDSEAKAAFQREKLSGELPRPPTVPFQPRVANAVHLVGTICAPVHMQRLPDGRFSAVSVLVHDRGINSPKFWVPIVFKDNWAQIAASHLKENDLVYVSGKLTCDGPPFKLADGEANIQVLANSLKFVDSKAVEMDAILDEDEGFLEIVEAEKKVEAKKTTSTFPPGTVSD

SEQ ID NO: 192887 - protein, 123 aa, Zea Mays
MKSQGSKKATRIFVARIPQSVDESMFRRHFEAFGEILDLYMPKEHGSKGHRGIGFITFQSAESVDNIMQESHELDGTTVVVDRATPKDEDVRYPPSRPSQGGYGAYNAYISAATSISLFDFHQ

SEQ ID NO: 192888 - protein, 211 aa, Zea Mays
MQESHELDGTTVVVDRATPKDEDVRYPPSRPSQGGYGAYNAYISAATRYATLGAPTLYDHPGSAYGRGYYGPSQAVGKKIFVGRLPQEANTDDLRQYFGRFGRIVDAYIPKDPKRSGHRGFGFVTFADDGVAERVARRSHEILGHEVAIDTAAPLENDSAAGGYIDPMDLYGAYGSMRSFGRFCGGLDYNYGYGPSSGSSRSRSDWRYRPY

SEQ ID NO: 192889 - protein, 212 aa, Zea Mays
MRRTVVAIEGGLYEGYPVFREYLDEALVEILGEEVARTVALRVTVDGSGAGAALLAAVHSSNRQQVHREYQAVMGWADRGQGSFSNKKPDMRTAHTITEVRSWATSHKGRKRAPFEKRDGFFQKAPRLQPHVGSSDSARVSRRSAGTVHDGSPIRLIGSVAVGSSFACTVTTRITRIVRRMMHGRRIVRYKQGTPEWDEMLVTSEITGSVIC

SEQ ID NO: 192890 - protein, 469 aa, Zea Mays
MVVVDQLPLLVPYQIVLAMAAEAMEALSNASTVNYVVRENAHPESSVLRTNMGKESKANKICFELSLQKRIGGSSSSVKKHPSKLKDKKSRKQMTRKAKGSIDSTTIEGDTNHEVSEGVKGSGASDSNVVGSNAVMCPKRKRTYMFISRSSKVQFNKAGSSTTPRSKSKEVVDVSTTKPVSVSGPDLNQLARVEKQFTSAQEDHNSSLTNRGPLGELNSKCSHFRTQVSKKPLKRGLVKSPGSRELVSLLRNEASLVLQTSRQRRNMSKVHVLLSHSMDKETIKMQTKILIYFGLQVAATISEATHFVAEKFARTRNMLQAIAMGIPIVTPSWLECCREARCFVDEKAYIMRDMKKEKELGFSMPVSLSRARKKPLLQGRRVLITPNAKPSKELLKSLVVAAHGQPLERITASTMKKKIFEGAFVLSCEQDHSVCMPLIESGLEVFDSELLLNGIVTQKLEFARYRLFP

SEQ ID NO: 192891 - protein, 592 aa, Zea Mays
MSGTKSASIIGTKVAQCLAKRGDCSSSLQKAGIFDWVDASSDDECTAIMTSRKKQRIQANTQAKNLTSQRYGGRGSIATVGSISDCTGGKSGLNSSKKPEPVGSTDDLYDIGPYTQMAAEAMEALSNASTVNYVVRENAHPESSVLRTNMGKESKANKICFELSLQKRIGGSSSSVKKHPSKLKDKKSRKQMTRKAKGSIDSTTIEGDTNHEVSEGVKGSGASDSNVVGSNAVMCPKRKRTYMFISRSSKVQFNKAGSSTTPRSKSKEVVDVSTTKPVSVSGPDLNQLARVEKQFTSAQEDHNSSLTNRGPLGELNSKCSHFRTQVSKKPLKRGLVKSPGSRELVSLLRNEASLVLQTSRQRRNMSKVHVLLSHSMDKETIKMQTKILIYFGLQVAATISEATHFVAEKFARTRNMLQAIAMGIPIVTPSWLECCREARCFVDEKAYIMRDMKKEKELGFSMPVSLSRARKKPLLQGRRVLITPNAKPSKELLKSLVVAAHGQPLERITASTMKKKIFEGAFVLSCEQDHSVCMPLIESGLEVFDSELLLNGIVTQKLEFARCFEIGKGGIWNIIPWHVDDVDTKLYTSSMH

SEQ ID NO: 192892 - protein, 217 aa, Zea Mays
MPWSSIPRRRLPARDAPDSMTTTVVESNSPSSRAIRRNRAAASSYRQLVVRAPTAAFHRITSGATASRKSARAAPAPAPAPAPRPALAYAASRDVRTGGSSTAPDLRAAQWRHAMQAVSPEEEDGADVRARTMAAALPRGVSSSRRWASSGAWWSKAARAARTDGGLRSDEARRRLAARRPGVWRRIHRRGASSLGGGCGAAPALEGRGRLFVIVEN

SEQ ID NO: 192893 - protein, 391 aa, Zea Mays
MGHECSREEKKRHNEKVEVKKQSSCVVHLINKSNDYVAFKVKTTSPKRYCVRPNTGVILPRKTCEFTVTMQALRTAPPDMQLKDKFLVQTTIVPYGTSDEELVPAFFSKETGRYIEESKLRVVLVSAYQSLEEQPTNKIHDTEPVVEVPVLKEVPNIENEVPDAAKEVPAPLVQAPAIVTGIPSPVEETPGLREFRVPLNEAPAVLAESPSAQKDPSVITVEHASTVIIEHSPAISIESPPLKQSVTVFKESPPSKQSIAAFKEYPPPSKQSIAVFKESPPLEETSPKEAVVLSDRGLFSVQNHQLSHVTEDVQNLKSKLNNLESKLEEAGKMIIRLKEESRSTTQERDKLQQEMVFLRKKGTPRSQVGFPLLFVVYVALLGTLLGYLLRL

SEQ ID NO: 192894 - protein, 322 aa, Zea Mays
MGHECSREEKKRHNEKVEVKKQSSCVVHLINKSNDYVAFKVKTTSPKRYCVRPNTGVILPRKTCEFTALRTAPPDMQLKDKFLVQTTIVPYGTSDEELVPAFFSKETGRYIEESKLRVVLVSAYQSLEEQPTNKIHDTEPVVEVPVLKEVPNIENEVPDAAKEVPAPLVQAPAIVTGIPSPVEETPGLREFRVPLNEAPAVLAESPSAQKDPSVITVEHASTVIIEHSPAISIESPPLKQSVTVFKESPPSKQSIAAFKEYPPPSKQSIAVFKESPPLEETSPKEAVVLSDRGLFSVQNHQLSHNHSLQVNIYIKLLFLLLL

SEQ ID NO: 192895 - protein, 115 aa, Zea Mays
MLLSRLKQHLLKDTVFDQILGLSFQGKHVNSQVTEDVQNLKSKLNNLESKLEEAGKMIIRLKEESRSTTQERDKLQQEMVFLRKKGTPRSQVGFPLLFVVYVALLGTLLGYLLRL

SEQ ID NO: 192896 - protein, 113 aa, Zea Mays
MFSLQSSPPPSGAAGETLRADAAAPSHLYGARCLHALSTLPQPAGVQDPAAATAPSQRQTSVGSWPLLMNTRYCGSHWILVYRRAPCKHVPLISLIWFPGSCGVILALRRCFS

SEQ ID NO: 192897 - protein, 73 aa, Zea Mays
MAVNSLIHEPTTPKLVVYYKIIHDLIINKKDHQRFQKVECGTIQENATRELNKKQLKWNCKFVTAILSEKTKN

SEQ ID NO: 192898 - protein, 261 aa, Zea Mays
MAAGGGAPWAERARVVGTQIRNRFRVAPVDHRSLWLRADGRVATEAVRRWSDRVRALLQRGRSADRNSTSTDTSPEAVAKPSSSVLRFYRKRVGKEVNGIEDSVIFRSLQALAVPLIGNACYVFMHGLNSVQVYGVEKLHQALHGRPKGKALLTVSNHVAAMDDPFVIASLLPPSVMLEAQKLRWTLCATDRCFTNPVLSTFFRSVKVLPVSRGDGIYQKGMDMALSKLNSGGWVHIFPEGSRSRDGGKTIAPAKRGVGRI

SEQ ID NO: 192899 - protein, 282 aa, Zea Mays
MHHQIHSSLVPFFVFFVQGMDMALSKLNSGGWVHIFPEGSRSRDGGKTIAPAKRGVGRLVMDADSLPVVIPFVHTGMQDIMPVGKRIPRAGKRVIVVVGDPINFDDLLIDNCGDTQDIPRGILYDKVTQRIGQRLQELKVEVDRLAAEQEPELQNHNVGDDGYRLWQQVDWEGFGIGSSMLPSEPSAAAQVPSREAEPEPHVEVEQSVSPAPSAATSYNVAVPHWFQRHADPSELMGFASRGLIKHGKFLEEGYREFQQSATTLHTFWVSRANNAAHRWSTA

SEQ ID NO: 192900 - protein, 301 aa, Zea Mays
MDDGSSNKVVEDVAEEDPGRRGGPWRTDEADANEKAPRPSRRVASLDVFRGLTVAVRCGTRGALDPPCNAVGYIDRRVLGINHMYQKPAWRRHRACTDDSPHEGPFREDAPAWCVAPFEPEGILSSLSAVLSTVVGVHYGHVLVHMKSHTDRLRQWVTMGVALLVLGIILHFSHAIPLNKQLYTFSYICVTAGAAGVVFSALYFLVDVVSLRYAFAPLRWVGMNAMLVYVMAAEGVFEGFLNGWYYESTNNTLVYWVRKHVFVKVWHSTRVGILLYVLFAQILFWALVSGVLHRARLYWKL

SEQ ID NO: 192901 - protein, 359 aa, Zea Mays
MCPGGYSHAPDELAYGVDMRHVRWGGILQRIALAYLVVAVLEMVTKDGAKVHQDQPPGSSGRFSRVFRMYLSQWIVACCILVVYLSLAYGVYVPDWEFRVRNADSPDYGKVLTVRCGTRGALDPPCNAVGYIDRRVLGINHMYQKPAWRRHRACTDDSPHEGPFREDAPAWCVAPFEPEGILSSLSAVLSTVVGVHYGHVLVHMKSHTDRLRQWVTMGVALLVLGIILHFSHAIPLNKQLYTFSYICVTAGAAGVVFSALYFLVDVVSLRYAFAPLRWVGMNAMLVYVMAAEGVFEGFLNGWYYESTNNTLVYWVRKHVFVKVWHSTRVGILLYVLFAQILFWALVSGVLHRARLYWKL

SEQ ID NO: 192902 - protein, 193 aa, Zea Mays
MCPGGYSHAPDELAYGVDMRHVRWGGILQRIALAYLVVAVLEMVTKDGAKVHQDQPPGSSGRFSRVFRMYLSQWIVACCILVVYLSLAYGVYVPDWEFRVRNADSPDYGKVLTVRCGTRGALDPPCNAVGYIDRRVLGINHMYQKPAWRRHRACTDDSPHEGPFREDAPAWCVAPFEPEGILSIASVAHCLLC

SEQ ID NO: 192903 - protein, 156 aa, Zea Mays
MKSHTDRLRQWVTMGVALLVLGIILHFSHAIPLNKQLYTFSYICVTAGAAGVVFSALYFLVDVVSLRYAFAPLRWVGMNAMLVYVMAAEGVFEGFLNGWYYESTNNTLVYWVRKHVFVKVWHSTRVGILLYVLFAQILFWALVSGVLHRARLYWKL

SEQ ID NO: 192904 - protein, 321 aa, Zea Mays
MNVSRRLLPRSGRTGVWSRHEAREVGRNPPEDRSCVPGGCGSRDGDERRRQGSSGPAARFFRPLLPCIQNVSLPVVRCGTRGALDPPCNAVGYIDRRVLGINHMYQKPAWRRHRACTDDSPHEGPFREDAPAWCVAPFEPEGILSSLSAVLSTVVGVHYGHVLVHMKSHTDRLRQWVTMGVALLVLGIILHFSHAIPLNKQLYTFSYICVTAGAAGVVFSALYFLVDVVSLRYAFAPLRWVGMNAMLVYVMAAEGVFEGFLNGWYYESTNNTLVYWVRKHVFVKVWHSTRVGILLYVLFAQILFWALVSGVLHRARLYWKL

SEQ ID NO: 192905 - protein, 300 aa, Zea Mays
MDDGSSNKVVEDVAEEDPGRRGGPWRTDEADANEKAPRPSRRVASLDVFRGLTVALMILVDGAGGEWPVIGHAPWNGCNLADFVMPFFLFIVGMAVPLALKVRRRRRSSRPSVVHAMHAHRIPDRGRAVRRVVVRTLKLLFWGILLQGGYSHAPDELAYGVDMRHVRWGGILQRIALAYLVVAVLEMVTKDGAKVHQDQPPGSSGRFSRVFRMYLSQWIVACCILVVYLSLAYGVYVPDWEFRVRNADSPDYGKVLTVRCGTRGALDPPCNAVGYIDRRVLGINHMYQKPAWRRHRCLVQ

SEQ ID NO: 192906 - protein, 67 aa, Zea Mays
MALHNFIRDSNSEDKLFDRCDADEEYLVQQSFTSQAQGDDNPEGENENTMNTIRIKIADALSTARGR

SEQ ID NO: 192907 - protein, 167 aa, Zea Mays
MGYVTNSAIIPALVGKGSLIISDSLNHNSIVNGARGSGATVRVFQHNNPAHLEEVLREQIAGGQPRTHRPWKKIIVIVEGIYSMEGELCKLPEVISVCKKYKAYTYLDEAHSIGAVGKTGRGVCELLGVDPADVDIMMGTFTKSFGSCGGYIAASNVSVYSHLAVVD

SEQ ID NO: 192908 - protein, 498 aa, Zea Mays
MVRLPYVTALTTLFSYGLLFAFGQLRDFFRRILDARKPSNLKGYAPICLGLEDFYTRRLYLRIQDCFGRPIASAPDAWFDVVERYSNDCNKTLHRTTATTKCLNLGSYNYLGFAAADEYCTPRVIESLKKYSASTCSVRVDGGNTKLHTELEELVARFVGKPAAILFGMGYVTNSAIIPALVGKGSLIISDSLNHNSIVNGARGSGATVRVFQHNNPAHLEEVLREQIAGGQPRTHRPWKKIIVIVEGIYSMEGELCKLPEVISVCKKYKGLIYLTYEQAYTYLDEAHSIGAVGKTGRGVCELLGVDPADVDIMMGTFTKSFGSCGGYIAASNEIIHHLKHTCPAHIYATSMSPPAVQQVISAIKVILGEDGTNRGAKKLAQIRENSNFFRSELQKMGFEVLGDNDSPVMPIMLYNPAKIPAFSRECLRQAVAVVTVAFPATPLLLARARICISASHSREDLIKGLEVISKVGDLVGIKYFPVEQEKTTAVENLKKIQ

SEQ ID NO: 192909 - protein, 205 aa, Zea Mays
MTFDIRPFPLSLCLDYRIASIKRRSLGRCRWTGKGELRPQEERARATPRHAAVDMEVELEHGGDEGGDRGSESSSSSSKRSFGASSDATVSSTPSKLQALRFAEDLSLPSVQVVVMSANMGCSHCRQRVANVVSKMNGLLDYMVDFGKKEVTVRGKVVHTKKKKKRHMRALLGAAGAGWDDARSAASLPGGHARTLSWFWGCYSS

SEQ ID NO: 192910 - protein, 66 aa, Zea Mays
MSVSPRRGLGVQAPGQAHRDAAPRLKMARRTPEGMVEASNHSSPKGGSQGAEFLNNLGGLGVMEAP

SEQ ID NO: 192911 - protein, 384 aa, Zea Mays
MQYGSAGDVLEDNPVGRLKVYVYDLPSKYNKKLVKKDPRCLNHMFAAEIFMHRFLLSSAVRTFNPEEADWFYTPVYATCDLTPSGLPLPFKSPRMMRSAIELIATNWPYWNRSEGADHFFVTPHDFGACFHYQEEKAIGRGILPLLQRATLVQTFGQKNHVCLKGGSITIPPFAPPQKMQAHLIPLDTPRSIFVYFRGLFYDTSNDPEGGYYARGARASVWENFKNNPLFDISTDHPPTYYEDMQRSVFCLCPLGWAPWSPRLVEAVVFGCIPVIIADDIVLPFADAIPWEEIGVFVAEEDVPKLDSILTSIPTDVILRKQRLLANPAMKQAMLFPQPAQAGDAFHQILNGLARKLPHGDNVFLKPGERVLNWTAGPPGDLKPW

SEQ ID NO: 192912 - protein, 287 aa, Zea Mays
MTGTVSKLAAPRPAAPPLRPASLRTAALAFAPSARRVRVSVAGRARSPIIAMASAKEGNGAPTKRTALHDLYELQGLSPWYDNLCRPVTDLLPIIASGVRGVTSNPTIFQKAISSSSAYDDQFKQLISAGKDAESAYWELVIKDIQDACKLFEPIYDETDGADGYVSVEVSPRLANDTQGTVEAAKWLHKVVNRPNVYIKIPATAECVPSIQEVIANGISVNVTLIFSIARYEAVIDAYLDGLEASGLSDLSRVTSVASFFVSRVDTLIDKMLDKIGTPEALALRGK

SEQ ID NO: 192913 - protein, 77 aa, Zea Mays
MVDVSRVQKELTECNRDREVSGVSIALHDGANISHLTGTIAGPADSPYEGGTFVIDIRLPGGYPFEPPKMQFITKAP

SEQ ID NO: 192914 - protein, 195 aa, Zea Mays
MVDVSRVQKELTECNRDREVSGVSIALHDGANISHLTGTIAGPADSPYEGGTFVIDIRLPGGYPFEPPKMQFITKVWHPNISSQNGAICLDILKDQWSPALTLKTALLSLQALLSSPAPDDPQDAVVAQQYLRDYPTFAATARYWTEAFAKSASTGMEEKKLVEMGFPEDQVRSALKSVDGDENMALEKLCSGSG

SEQ ID NO: 192915 - protein, 435 aa, Zea Mays
MAREIALLRRLGDHPNVVRLDGLVTSRLNTAPSLYLVFEYMEHDLTGLTACAAASARRLSLPQVKCYMKQLLSGIEHCHNNGVLHRDIKTSNLLVSSDGILKIADFGLATSYDPEDARPMTSQVITLWYRPPELLLGSTHYGVGVDLWSVGCVLAELLLGEPVFPGRTELHKVFKLCGTPSEDYWEKMKLAHPTFGPYERCLAEKFKDVAPSTLSLLETLLSIDPDMRGTATDALNSEFFRTEPYACEPSSLPRYPPCKERDVKLKYEKHKRKSRVNGSVERHRNRQHASQNPGRRVFTPDANNKPQANPKVPRLVTSTSTTKLERFPPPHLDASIGYSLDASVDDGATEEFFSSSAAELKKMPSLIFGHVKSYLASSPRKGVHKAKPSLNMAMAPPTLLIGAFRPYSFGRSMEVRRKNREQFRSKGRNAVGAVK

SEQ ID NO: 192916 - protein, 434 aa, Zea Mays
MAREIALLRRLGDHPNVVRLDGLVTSRLNTAPSLYLVFEYMEHDLTGLTACAAASARRLSLPQVKCYMKQLLSGIEHCHNNGVLHRDIKTSNLLVSSDGILKIADFGLATSYDPEDARPMTSQVITLWYRPPELLLGSTHYGVGVDLWSVGCVLAELLLGEPVFPGRTEVEQLHKVFKLCGTPSEDYWEKMKLAHPTFGPYERCLAEKFKDVAPSTLSLLETLLSIDPDMRGTATDALNSEFFRTEPYACEPSSLPRYPPCKERDVKLKYEKHKRKSRVNGSVERHRNRQHASQNPGRRVFTPDANNKPQANPKVPRLVTSTSTTKLERFPPPHLDASIGYSLDASVDDGATEEFFSSSAAELKKMPSLIFGHVKSYLASSPRKGVHKAKPSLNMAMAPPTLLIGAFRPYSFGRSMEVRRKNREQFRSKGRNAD

SEQ ID NO: 192917 - protein, 371 aa, Zea Mays
MKQLLSGIEHCHNNGVLHRDIKTSNLLVSSDGILKIADFGLATSYDPEDARPMTSQVITLWYRPPELLLGSTHYGVGVDLWSVGCVLAELLLGEPVFPGRTEVEQLHKVFKLCGTPSEDYWEKMKLAHPTFGPYERCLAEKFKDVAPSTLSLLETLLSIDPDMRGTATDALNSEFFRTEPYACEPSSLPRYPPCKERDVKLKYEKHKRKSRVNGSVERHRNRQHASQNPGRRVFTPDANNKPQANPKVPRLVTSTSTTKLERFPPPHLDASIGYSLDASVDDGATEEFFSSSAAELKKMPSLIFGHVKSYLASSPRKGVHKAKPSLNMAMAPPTLLIGAFRPYSFGRSMEVRRKNREQFRSKGRNAVGAVK

SEQ ID NO: 192918 - protein, 407 aa, Zea Mays
MNGASAGAGGEAPLVYKAWKGNNVFLLKGRFIFGPDARSLFITMFLIVAPVSIFCAFVAKELMDKFSYGLGLPVMIAAVLFTAYDLSLLLLTSGRDPGIIPRNAHPPEPEGFDGNAEVGANQTPPVRLPRVKDVVVNGITVKTKYCDTCMLYRPPRCSHCSICNNCVERFDHHCPWVGQCIGLRNYRFFYMFVFSTTLLCLYVFGFCWVFIIKIRNAEQITIWKAMTKTPASIALIIYTFIAVWFVGGLSVFHLYLMSTNQTTYENFRYRYDQRDNPYNKGVMENIKEIFFTTIPPSKNNFCGRVEQEHGLRPRPTNGFMSPNMGRAVGDIEMGRKPVAWDEPRMAAEIGDLGAGLSNLLEDKDGRFRTTSPDLSRDALAVGGGLEEHGSSAMNPGRSSWGVEAVGL

SEQ ID NO: 192919 - protein, 222 aa, Zea Mays
MNGASAGAGGEAPLVYKAWKGNNVFLLKGRFIFGPDARSLFITMFLIVAPVSIFCAFVAKELMDKFSYGLGLPVMIAAVLFTAYDLSLLLLTSGRDPGIIPRNAHPPEPEGFDGNAEVGANQTPPVRLPRVKDVVVNGITVKTKYCDTCMLYRPPRCSHCSICNNCVERFDHHCPWVGQCIGLRNYRFFYMFVFSTTLLCLLVCWWPLCVPSVSHEHKSDNI

SEQ ID NO: 192920 - protein, 457 aa, Zea Mays
MLKEQLLDDSVPARALVAIAGESSIGKTTLARKVYQSLEVRNHFEIRTWTVLPHKCRAADVLRDIHEQMTSQLRRTPSASNSKQAVEDACDDKAFGPGKDISNQLYRSMTGRRYLVVIDGSVAVTDWNSLRASLPDEGNGSRVLLITDLEGLEVVGHAQAGHTYDPIELTRLSPESTYEVFRRRVFGARGDCPGRYKSRYYQDVFRITRGLPLSIVVLAGILRSKELPAEWDEVMAQLAPPAREQQRGGSGGSSNSWPRIMSRAFDDLPHHLKSCFLYLAAMRESTPVDAQRLVRLWVAEGFVRPRRGSTMEEVGQGYLKELISRCMVQLVDKDDFGAVLTVVVHDRLHAFAQDEAQEASFIESHDSTDVLAPATVRRLAVLNSTTDRYVQLSNALPKLRSIICDLVEGRRVRSSNFIRTSDLSFLHASKFLRVIDIQGLELKRLPNEIGSMIHLRY

SEQ ID NO: 192921 - protein, 292 aa, Zea Mays
MSAGFDKQILAQKLSKLNSSQQTIETLSHWCVFHHRCCQQVVETWDSEFHAAPVERRVSLLYLANDIMQNSRKEGNGYIAEFMRVIPAALNGVLTVRDDFGRNVPKRLIDIWEDRKIFDTQAQSLKDDFFRRLKDIRNQLKNTGSEQLEKVVSSYKHVLNAPMDEDTLMRKCQAALINFDELNKTYGNNSILGSSNRSGFMQELQEQHSILRNSIEQLKVSESLRATLIFHLKEALNEQELKVEHLRSQLQAAQPRFKRASELCVGLGSNMERRQPSNQGLKSAVFTGGKWC

SEQ ID NO: 192922 - protein, 541 aa, Zea Mays
MSAGFDKQILAQKLSKLNSSQQTIETLSHWCVFHHRCCQQVVETWDSEFHAAPVERRVSLLYLANDIMQNSRKEGNGYIAEFMRVIPAALNGVLTVRDDFGRNVPKRLIDIWEDRKIFDTQAQSLKDDFFRRLKDIRNQLKNTGSEQLEKVVSSYKHVLNAPMDEDTLMRKCQAALINFDELNKTYGNNSILGGCSYCANGLHHTFVATEISLSLDGLYKEMHCSSNRSGFMQELQEQHSILRNSIEQLKVSESLRATLIFHLKEALNEQELKVEHLRSQLQAAQPRFKRASELCVGLGSNMERRQPSNQGLKRSSLSDPLSTVAPEAVKSLQKGQSSAVLYSQEGNGVEHSVTETKLAAGAASDDIRGGALSSRVNGGNTMLKIEEHTSGNKRQKLEDDAHISQPRSESPPPPPPPFPHPDTFQPPPPPPEYPRSPDPSPPPPRTSLPPHIIPPPPPPPPAMPLHMFSHLPPPAGTFVPFPAGPPGPMYCTYPSFTPVVNFPMTSPPGFRNLTPPPSFRGLAGTFYGPRFPTAPPPADRK

SEQ ID NO: 192923 - protein, 1382 aa, Zea Mays
MAERKLDRPSALGKGGLSLGIEEDRVAAAMGFVDHSKDQHHLDNSIPLSPQWLYAKPADGKISLPHGSSLELAEKEVRMLEGTVDRKERRRNAFDADSGLRWLEEERETSLLGRRERKKDVDRDVDNRKIDRRSDNVSARDITDPRAAPASERWHDGSTRGLGNEGRRDGKWSSRWGPDDKEKDSRSDKKVDAEKDETHADKLTFTGRLLSESDSRDKWRPRHRQESHSVGTATHRAAPGFGSEKGRVKDSTNVGFAAGRGRGNPNSVASFNRPSSAGSIGAPAVHGKFAKTAVSFCYPRGKLLDIYRQKNMMSSFDDVHMKLDEIPSVTLSTAAKPLAFVAPDTVEEALLEDIRKGKVISSEGINGIGNKKERAKELEEPASGIDDDMGKASFAIAGLGQEGSSGLISVNDASYVEGTLPSGVSTSLLKISLEENAISNQHGITDTQEGLKTAEIKENADHALGTKLPDDSNTLFEVPSFEHLQEPTRPYQSNNMDIKVGGHANYPEELTLYYLDPQGGVQGPFLGADIISWYEDGYFGLELPVRLSQFPDDVPFRPLVEVMPHLAQKTQSRIPLPCDGNSESLESSQSKFESSVPSTSSGRTDQFSIWDSESNAVDPKRGDHEASIPSRSGWLSSPETGKDISNTSNRQQHIPESVNQDAEEVLYTGRPNSSMGQSLRDLENDRADFQSTPHDPHSVAGEANLLQHNVPRDSDLSPLGLLWSELEGRPKQPLSSNVLSVNERRNPKPTTPKDIPPVNMRQGPLSRMNEVSSVRDEWPANFGRLDNMNDANISGRIHQVEAEHHLNFDGHLLLQQIRREQQQQRQEQLMAHNNLEFSGAFPGQVFDPLNQHRQPMNQQIPDVEHLLRIQFELEQQQQRQLQQEQHQRQLQQQRQAQLLQRQQQQQQQQQQQMILEQLLQQQLQGSNFGPTSMVDQVLLREHVLNELHQQPHHLQRQHDAAIEQLIQAKFGHGLHREHHNDMLDVLSRSNQRQMLPLEQQLLLGLQHEQQLKSQQLANALRQHSGQEEERHLSGVWPMDAAAQFIRSGTSPNQIHSRFDLLENLQRSSSFDHHEHLDRSLSLHEQLHMGGQGIRSLERTGSLPGGGPGPNPDVINALTRHHGLSQLETHGDVYPLVQMPMLPSGVHPQQLRHQDQLPGSHIGRLERHWSDANGQLQNSLMESSHINQLQIEAEKERRNVEMNLSVDNPHAWGALMNKDRNTEQDLTDMIHKKLVLQSQQSRGFPDVSVPASFRRKDHFVQPVVESPLRSVDMSFEESLSERSLYAKSGQLAQEGSSNLGTLPNSIENTGKFNLRSGSGSMLEQKHFLGIDDVQSDFLETTGGRTSANQLVGSVNELTRGKRQGSSASLAGDDPNLADEGVSK

SEQ ID NO: 192924 - protein, 1534 aa, Zea Mays
MAERKLDRPSALGKGGLSLGIEEDRVAAAMGFVDHSKDQHHLDNSIPLSPQWLYAKPADGKISLPHGSSLELAEKEVRMLEGTVDRKERRRNAFDADSGLRWLEEERETSLLGRRERKKDVDRDVDNRKIDRRSDNVSARDITDPRAAPASERWHDGSTRGLGNEGRRDGKWSSRWGPDDKEKDSRSDKKVDAEKDETHADKLTFTGRLLSESDSRDKWRPRHRQESHSVGTATHRAAPGFGSEKGRVKDSTNVGFAAGRGRGNPNSVASFNRPSSAGSIGAPAVHGKFAKTAVSFCYPRGKLLDIYRQKNMMSSFDDVHMKLDEIPSVTLSTAAKPLAFVAPDTVEEALLEDIRKGKVISSEGINGIGNKKERAKELEEPASGIDDDMGKASFAIAGLGQEGSSGLISVNDASYVEGTLPSGVSTSLLKISLEENAISNQHGITDTQEGLKTAEIKENADHALGTKLPDDSNTLFEVPSFEHLQEPTRPYQSNNMDIKVGGHANYPEELTLYYLDPQGGVQGPFLGADIISWYEDGYFGLELPVRLSQFPDDVPFRPLVEVMPHLAQKTQSRIPLPCDGNSESLESSQSKFESSVPSTSSGRTDQFSIWDSESNAVDPKRGDHEASIPSRSGWLSSPETGKDISNTSNRQQHIPESVNQDAEVLYTGRPNSSMGQSLRDLENDRADFQSTPHDPHSVAGEANLLQHNVPRDSDLSPLGLLWSELEGRPKQPLSSNVLSVNERRNPKPTTPKDIPPVNMRQGPLSRMNEVSSVRDEWPANFGRLDNMNDANISGRIHQVEAEHHLNFDGHLLLQQIRREQQQQRQEQLMAHNNLEFSGAFPGQVFDPLNQHRQPMNQQIPDVEHLLRIQFELEQQQQRQLQQEQHQRQLQQQRQAQLLQRQQQQQQQQQQQMILEQLLQQQLQGSNFGPTSMVDQVLLREHVLNELHQQPHHLQRQHDAAIEQLIQAKFGHGLHREHHNDMLDVLSRSNQRQMLPLEQQLLLGLQHEQQLKSQQLANALRQHSGQEEERHLSGVWPMDAAAQFIRSGTSPNQIHSRFDLLENLQRSSSFDHHEHLDRSLSLHEQLHMGGQGIRSLERTGSLPGGGPGPNPDVINALTRHHGLSQLETHGDVYPLVQMPMLPSGVHPQQLRHQDQLPGSHIGRLERHWSDANGQLQNSLMESSHINQLQIEAEKERRNVEMNLSVDNPHAWGALMNKDRNTEQDLTDMIHKKLVLQSQQSRGFPDVSVPASFRRKDHFVQPVVESPLRSVDMSFEESLSERSLYAKSGQLAQEGSSNLGTLPNSIENTGKFNLRSGSGSMLEQKHFLGIDDVQSDFLETTGGRTSANQLVGSVNELTRGKRQGSSASLAGDDPNLADEGVSKWSDSGMSKGSSHSLLKRSTNQHTTTSQSVPTDLSAIRLKKAGLASSDENKMEAGFASVAQGMEGCVPSNKETGAYGMPSATNNPDASGQSFSEALKSSRKPPLQYDASESADCGPGGKGAKKKTKKGKQIDPSLLGFKVHSNRIMMGEIVRDD

SEQ ID NO: 192925 - protein, 709 aa, Zea Mays
MAERKLDRPSALGKGGLSLGIEEDRVAAAMGFVDHSKDQHHLDNSIPLSPQWLYAKPADGKISLPHGSSLELAEKEVRMLEGTVDRKERRRNAFDADSGLRWLEEERETSLLGRRERKKDVDRDVDNRKIDRRSDNVSARDITDPRAAPASERWHDGSTRGLGNEGRRDGKWSSRWGPDDKEKDSRSDKKVDAEKDETHADKLTFTGRLLSESDSRDKWRPRHRQESHSVGTATHRAAPGFGSEKGRVKDSTNVGFAAGRGRGNPNSVASFNRPSSAGSIGAPAVHGKFAKTAVSFCYPRGKLLDIYRQKNMMSSFDDVHMKLDEIPSVTLSTAAKPLAFVAPDTVEEALLEDIRKGKVISSEGINGIGNKKERAKELEEPASGIDDDMGKASFAIAGLGQEGSSGLISVNDASYVEGTLPSGVSTSLLKISLEENAISNQHGITDTQEGLKTAEIKENADHALGTKLPDDSNTLFEVPSFEHLQEPTRPYQSNNMDIKVGGHANYPEELTLYYLDPQGGVQGPFLGADIISWYEDGYFGLELPVRLSQFPDDVPFRPLVEVMPHLAQKTQSRIPLPCDGNSESLESSQSKFESSVPSTSSGRTDQFSIWDSESNAVDPKRGDHEASIPSRSGWLSSPETGKDISNTSNRQQHIPESVNQDAEGLTAAWVNPYETLRMTVQISNRHHMTLILWLEKLICCNIMSQGTVI

SEQ ID NO: 192926 - protein, 1501 aa, Zea Mays
MCSYQHHLDNSIPLSPQWLYAKPADGKISLPHGSSLELAEKEVRMLEGTVDRKERRRNAFDADSGLRWLEEERETSLLGRRERKKDVDRDVDNRKIDRRSDNVSARDITDPRAAPASERWHDGSTRGLGNEGRRDGKWSSRWGPDDKEKDSRSDKKVDAEKDETHADKLTFTGRLLSESDSRDKWRPRHRQESHSVGTATHRAAPGFGSEKGRVKDSTNVGFAAGRGRGNPNSVASFNRPSSAGSIGAPAVHGKFAKTAVSFCYPRGKLLDIYRQKNMMSSFDDVHMKLDEIPSVTLSTAAKPLAFVAPDTVEEALLEDIRKGKVISSEGINGIGNKKERAKELEEPASGIDDDMGKASFAIAGLGQEGSSGLISVNDASYVEGTLPSGVSTSLLKISLEENAISNQHGITDTQEGLKTAEIKENADHALGTKLPDDSNTLFEVPSFEHLQEPTRPYQSNNMDIKVGGHANYPEELTLYYLDPQGGVQGPFLGADIISWYEDGYFGLELPVRLSQFPDDVPFRPLVEVMPHLAQKTQSRIPLPCDGNSESLESSQSKFESSVPSTSSGRTDQFSIWDSESNAVDPKRGDHEASIPSRSGWLSSPETGKDISNTSNRQQHIPESVNQDAEEVLYTGRPNSSMGQSLRDLENDRADFQSTPHDPHSVAGEANLLQHNVPRDSDLSPLGLLWSELEGRPKQPLSSNVLSVNERRNPKPTTPKDIPPVNMRQGPLSRMNEVSSVRDEWPANFGRLDNMNDANISGRIHQVEAEHHLNFDGHLLLQQIRREQQQQRQEQLMAHNNLEFSGAFPGQVFDPLNQHRQPMNQQIPDVEHLLRIQFELEQQQQRQLQQEQHQRQLQQQRQAQLLQRQQQQQQQQQQQMILEQLLQQQLQGSNFGPTSMVDQVLLREHVLNELHQQPHHLQRQHDAAIEQLIQAKFGHGLHREHHNDMLDVLSRSNQRQMLPLEQQLLLGLQHEQQLKSQQLANALRQHSGQEEERHLSGVWPMDAAAQFIRSGTSPNQIHSRFDLLENLQRSSSFDHHEHLDRSLSLHEQLHMGGQGIRSLERTGSLPGGGPGPNPDVINALTRHHGLSQLETHGDVYPLVQMPMLPSGVHPQQLRHQDQLPGSHIGRLERHWSDANGQLQNSLMESSHINQLQIEAEKERRNVEMNLSVDNPHAWGALMNKDRNTEQDLTDMIHKKLVLQSQQSRGFPDVSVPASFRRKDHFVQPVVESPLRSVDMSFEESLSERSLYAKSGQLAQEGSSNLGTLPNSIENTGKFNLRSGSGSMLEQKHFLGIDDVQSDFLETTGGRTSANQLVGSVNELTRGKRQGSSASLAGDDPNLADEGVSKWSDSGMSKGSSHSLLKRSTNQHTTTSQSVPTDLSAIRLKKAGLASSDENKMEAGFASVAQGMEGCVPSNKETGAYGMPSATNNPDASGQSFSEALKSSRKPPLQYDASESADCGPGGKGAKKKTKKGKQIDPSLLGFKVHSNRIMMGEIVRDD

SEQ ID NO: 192927 - protein, 1451 aa, Zea Mays
MAERKLDRPSALGKGGLSLGIEEDRAAAAMGFVDHSKDQHHLDNSIPLSPQWLYAKPADGKISLPHGSSLEPAEKEARMLEGTADRKERRRNVFDADSGLRWLEEERETSLLGRRERKKDVDRDVDNRKIDRRSDNVSARDNTDPRTAPSSERWNDGSTRSLGNEGRRDAKWSSRWGPDDKEKDSRSDKKVDAEKDETHADKQAFTGRLLSESDSRDKWRPRHRQESHSVGTATYRAAPGFGSEKGRVKDSSNVGFAAGRGRGNPNSVASFNRPSSAGSIGAPAVHGKFAKTAVSFRYPRGKLLDIYRQKNMMSSFDDAHMKLDEIPSITLSIAAKPLAFVAPDTVEEALLEDIRKGKVISSEGINGTGNKERAKELEEPASGIDDDKGKASFAIAGLGQEGSSGLISVNDAFYVEGTLPSGVSTSLPKKSLEGNAFSNQHRITDTQEGLKTAEIKENVDHDLGTKLPDDSNTLFDVPSFEHLQEPPKPYQSNNMDTKVGGHAIYPEELTLYYLDPQGGVQGPFLGADIISWYEDGYFGLELPVRLSQFSDDVPFRPLVEVMPHLVQKPQSRIPVPCDGNSESLESSQSKFESSVRSASSVRGDQLSNWDTESNAVDPKRGDHEESIPSRSGWLSSPETGKDISNTSNRQQHIPESVNQDAEEVLYTGRPNSSMGQSLRDLENDHADFQLTPHDPHSVVGEANLPQHNVPRDSDLSPLGLLWSELEGHPKQPLSSNVLGVNERRNSKPTTPKDILPVNMRQGPLSRMNEVSSVRDEWPANFGRLDNMNGPNISGRIPQVEAEHHLNFDGHLLLQQIRREQQQHQQRQEQLMARSNLEFSGAFPGQVFDSLHQHRQPMNQQLPDVEHLLRVQFELEQQQQHQLQQEQHQRQLQQQRQAQFLQRQQQQQQQQMILEQLLQQQLQGSNFGPTNMVDQVLLREHVFNELHQQPHHLQRQHDAAIEQLIQAKFGHGLHREHHNDMLDVLSRSNQRQMLPLEQQILLGLQHEHEQQLQSQQLANALRQHSGREEEMHLSGVWPMDDAAQFIRSGTSPNQRHGCFDLLENLQRSSSFDHHDHLDRSLSLQERLHMGGLGIHSLERSDSLPGGGPGPNTDVINALSRHHGLGQLETHGDVYPLGQMPMLPSGVHPQQHRHQEQLPGSHIGRRERHWSDANGQLQNSLMQSSHINQLQMEVEKQRRNVEMNLSVDNPHAWAALMNKERNAEQDLSDMIHKKLALQSQQSLGFPDVSVAASFGHKDHFVQPVAENPLKSVDMLSFEESLSERSLYAKSGQLAQEGSANLGTLPNSIENTGNFNLRPGSGSMFEQKHFLGIDDVQSDFSETTGGRTSANQLVGSVNELTRGKRQGSSASLAGDDTNFSEEAVSKWYSSKLVDVLLHYLLSFSKGYSLILLIPPNYRSNIFLRVTQSVYSDDLTLGHWIILICTLILESFLCS

SEQ ID NO: 192928 - protein, 53 aa, Zea Mays
MINEFIALITFTTQCYTKKCIDIVLNHNMKSRSFLPLCWLVSNIASRHNQGSC

SEQ ID NO: 192929 - protein, 438 aa, Zea Mays
MNCLEVETGTQSANTLSGYPVANRKRSWENFRVFSRELNSSEMPFAPIASDSISLIISVEDTGVGIPFDAQSRVFTPFMQVGPSIARIHGGTGIGLSISKCLVGLMRGEIGFASKPQVGSTFTFTAVLTRAHSSRNENKSSEFKGINALVVDHRPVRAKVTRYHLQRLGVQTELTTDLDQYISKINCGSQIAKLVLIDKETWLKESHSMPLLVTKLRNKDQPDSTKLFLLENPKSTAKSNSHIFREFNLNVIMKPLRASMLQVSLHRALGGIDKLHCRNGVLGNSTLGSLLHKKRILVVDDNIVNLKVAAGALKKYGAEVTCADSGKKAITQLKPPHSFDACFMDIQMPEMDGFEATKRIRVMERDLNEQIERGEAPPECAGLRQWRTPILAMTADVIQATHEQCLKSEMDGYVSKPFEGEQLYREVARFFQNQDQVQ

SEQ ID NO: 192930 - protein, 790 aa, Zea Mays
MAEDHFSSAPSAPSAAATAAAAAAAAVGSSVIPIVNKLQDIFAQLGSSSTIDLPQVAVVGSQSSGKSSVLEALVGRDFLPRGSDICTRRPLVLQLVHQPRRPADAEADEWGEFLHLSGRRFYDFREIRREIQAETDREAGGNKVGDQPTDIEARIRTMIMSYIKHKTCIILAVSPANADLANSDALQMARVADPDGSRTIGVITKLDIMDRGTDARNFLLGNVIPLKLGYVGVVNRSQQDINSDLSIKDALAREEKFFRTQPAYHGLAQYCGIPQLAKKLNQILVQHIKTVLPGLKSRISSQLTAVAKELAVYGDPVDSKAGQGAKLLNILAKYCEAFSSMVEGKNEDISTTELSGGARIHYIFQSIFVKSLEEVDPCEDVTDVDIRMAIQNATGPRSALFVPEVPFEVLVRRQISRLLDPSLQCAQFIYDELVKMSHRCLATELQQFPILRRSMDEVIGKFLRDGLKPAESMISHIIEMEEDYINTSHPSFIGGSKAVEEAQQQVRSAKTSAVVVRKDGVDSQVSEKTQKSRPILGRSGVNGVVTDHIQGVRPAAEAERPGSSGSGSTSFWNQIFTSNEDRTHAPARDNTANKSYAMPAPNLDHSFSTIQLREPPVVLKPSEHQSEQEALEIAITKLLLKSYYNIVRKNVEDFIPKAIMHFLVNHTKRALHNYLITKLYRDDLLEDLLKEPDELTIKRKQIRENLKVLQQAYKTLDEIPLDAEAVERGGGYSLDSDAIGLPRAHGLSSSLHGFNDGSSSYSTPKQSRSRRPNHSGEQLPFNPATSGNGF

SEQ ID NO: 192931 - protein, 633 aa, Zea Mays
MIMSYIKHKTCIILAVSPANADLANSDALQMARVADPDGSRTIGVITKLDIMDRGTDARNFLLGNVIPLKLGYVGVVNRSQQDINSDLSIKDALAREEKFFRTQPAYHGLAQYCGIPQLAKKLNQILVQHIKTVLPGLKSRISSQLTAVAKELAVYGDPVDSKAGQGAKLLNILAKYCEAFSSMVEGKNEDISTTELSGGARIHYIFQSIFVKSLEEVDPCEDVTDVDIRMAIQNATGPRSALFVPEVPFEVLVRRQISRLLDPSLQCAQFIYDELVKMSHRCLATELQQFPILRRSMDEVIGKFLRDGLKPAESMISHIIEMEEDYINTSHPSFIGGSKAVEEAQQQVRSAKTSAVVVRKDGVDSQVSEKTQKSRPILGRSGVNGVVTDHIQGVRPAAEAERPGSSGSGSTSFWNQIFTSNEDRTHAPARDNTANKSYAMPAPNLDHSFSTIQLREPPVVLKPSEHQSEQEALEIAITKLLLKSYYNIVRKNVEDFIPKAIMHFLVNHTKRALHNYLITKLYRDDLLEDLLKEPDELTIKRKQIRENLKVLQQAYKTLDEIPLDAEAVERGGGYSLDSDAIGLPRAHGLSSSLHGFNDGSSSYSTPKQSRSRRPNHSGEQLPFNPATSGNGF

SEQ ID NO: 192932 - protein, 405 aa, Zea Mays
MAEDHFSSAPSAPSAAATAAAAAAAAVGSSVIPIVNKLQDIFAQLGSSSTIDLPQVAVVGSQSSGKSSVLEALVGRDFLPRGSDICTRRPLVLQLVHQPRRPADAEADEWGEFLHLSGRRFYDFREIRREIQAETDREAGGNKGVSDRQIRLKIFSPNVLNITLVDLPGITKVPVGDQPTDIEARIRTMIMSYIKHKTCIILAVSPANADLANSDALQMARVADPDGSRTIGVITKLDIMDRGTDARNFLLGNVIPLKLGYVGVVNRSQQDINSDLSIKDALAREEKFFRTQPAYHGLAQYCGIPQLAKKLNQILVQHIKTVLPGLKSRISSQLTAVAKELAVYGDPVDSKAGQGAKLLNILAKYCEAFSSMVEGKNEDISTTELSGGARIHYIFQSIFVKSLET

SEQ ID NO: 192933 - protein, 646 aa, Zea Mays
MAEDHFSSAPSAPSAAATAAAAAAAAVGSSVIPIVNKLQDIFAQLGSSSTIDLPQVAVVGSQSSGKSSVLEALVGRDFLPRGSDICTRRPLVLQLVHQPRRPADAEADEWGEFLHLSGRRFYDFREIRREIQAETDREAGGNKGVSDRQIRLKIFSPNVLNITLVDLPGITKVPVGDQPTDIEARIRTMIMSYIKHKTCIILAVSPANADLANSDALQMARVADPDGSRTIGVITKLDIMDRGTDARNFLLGNVIPLKLGYVGVVNRSQQDINSDLSIKDALAREEKFFRTQPAYHGLAQYCGIPQLAKKLNQILVQHIKTVLPGLKSRISSQLTAVAKELAVYGDPVDSKAGQGAKLLNILAKYCEAFSSMVEGKNEDISTTELSGGARIHYIFQSIFVKSLEEVDPCEDVTDVDIRMAIQNATGPRSALFVPEVPFEVLVRRQISRLLDPSLQCAQFIYDELVKMSHRCLATELQQFPILRRSMDEVIGKFLRDGLKPAESMISHIIEMEEDYINTSHPSFIGGSKAVEEAQQQVRSAKTSAVVVRKDGVDSQVSEKTQKSRPILGRSGVNGVVTDHIQGVRPAAEAERPGSSGSGSTSFWNQIFTSNEDRTHAPARDNTANKSYAMPAPNLDHSFSTIHHQSS

SEQ ID NO: 192934 - protein, 647 aa, Zea Mays
MAEDHFSSAPSAPSAAATAAAAAAAAVGSSVIPIVNKLQDIFAQLGSSSTIDLPQVAVVGSQSSGKSSVLEALVGRDFLPRGSDICTRRPLVLQLVHQPRRPADAEADEWGEFLHLSGRRFYDFREIRREIQAETDREAGGNKGVSDRQIRLKIFSPNVLNITLVDLPGITKVPVGDQPTDIEARIRTMIMSYIKHKTCIILAVSPANADLANSDALQMARVADPDGSRTIGVITKLDIMDRGTDARNFLLGNVIPLKLGYVGVVNRSQQDINSDLSIKDALAREEKFFRTQPAYHGLAQYCGIPQLAKKLNQILVQHIKTVLPGLKSRISSQLTAVAKELAVYGDPVDSKAGQGAKLLNILAKYCEAFSSMVEGKNEDISTTELSGGARIHYIFQSIFVKSLEEVDPCEDVTDVDIRMAIQNATGPRSALFVPEVPFEVLVRRQISRLLDPSLQCAQFIYDELVKMSHRCLATELQQFPILRRSMDEVIGKFLRDGLKPAESMISHIIEMEEDYINTSHPSFIGGSKAVEEAQQQVRSAKTSAVVVRKDGVDSQVSEKTQKSRPILGRSGVNGVVTDHIQGVRPAAEAERPGSSGSGSTSFWNQIFTSNEDRTHAPARDNTANKSYAMPAPNLDHSFSTIQLRESS

SEQ ID NO: 192935 - protein, 460 aa, Zea Mays
MAEDHFSSAPSAPSAAATAAAAAAAAVGSSVIPIVNKLQDIFAQLGSSSTIDLPQVAVVGSQSSGKSSVLEALVGRDFLPRGSDICTRRPLVLQLVHQPRRPADAEADEWGEFLHLSGRRFYDFREIRREIQAETDREAGGNKGVSDRQIRLKIFSPNVLNITLVDLPGITKVPVGDQPTDIEARIRTMIMSYIKHKTCIILAVSPANADLANSDALQMARVADPDGSRTIGVITKLDIMDRGTDARNFLLGNVIPLKLGYVGVVNRSQQDINSDLSIKDALAREEKFFRTQPAYHGLAQYCGIPQLAKKLNQILVQHIKTVLPGLKSRISSQLTAVAKELAVYGDPVDSKAGQGAKLLNILAKYCEAFSSMVEGKNEDISTTELSGGARIHYIFQSIFVKSLEEVDPCEDVTDVDIRMAIQNATGPRSALFVPESLYVGRSADCLIQVFSVHSSYMMNL

SEQ ID NO: 192936 - protein, 282 aa, Zea Mays
MDISILNNKEDGVDSQVSEKTQKSRPILGRSGVNGVVTDHIQGVRPAAEAERPGSSGSGSTSFWNQIFTSNEDRTHAPARDNTANKSYAMPAPNLDHSFSTIQLREPPVVLKPSEHQSEQEALEIAITKLLLKSYYNIVRKNVEDFIPKAIMHFLVNHTKRALHNYLITKLYRDDLLEDLLKEPDELTIKRKQIRENLKVLQQAYKTLDEIPLDAEAVERGGGYSLDSDAIGLPRAHGLSSSLHGFNDGSSSYSTPKQSRSRRPNHSGEQLPFNPATSGNGF

SEQ ID NO: 192937 - protein, 72 aa, Zea Mays
MELLRERLAECGWRDEMKALCRAYARKKGRNNVTVDDLIHVITPKGRASVPDSVKAELLQRIRSFLMSTTLR

SEQ ID NO: 192938 - protein, 197 aa, Zea Mays
MDLDAAAEEEERRLEDYNEAQDARYFLGFGDTHGDPIEVDTVAGSQIGTGTESTSPSEAVPNPDQAANASGSNMKKRSKCWDDFDELTKIVNGKKVRSHVVPAASPDTSRCCLHPSSELTASPPPPNPRPPTITRKGRTAEEDAPQGRGGRSRMTLLLVAEHLRALSAAKEPSLSLMASQPLVLWRPPLHSPIYFVV

SEQ ID NO: 192939 - protein, 238 aa, Zea Mays
MDLDAAAEEEERRLEDYNEAQDARYFLGFGDTHGDPIEVDTVAGSQIGTGTESTSPSEAVPNPDQAANASGSNMKKRSKCWDDFDELTKIVNGKKVRSHVVPAASPDTSRCCLHPSSELTASPPPPNPRPPTITRKGRTAEEDAPQGRGGRSRMTLLLVAEHLRALSAAKEPSLSLMASQPPIVGDDDPASLSTSLLPNSYRCCGALLSTPLSILLFDVYFLRRSGCGTIGAPPPRAR

SEQ ID NO: 192940 - protein, 217 aa, Zea Mays
MDLDAAAEEEERRLEDYNEAQDARYFLGFGDTHGDPIEVDTVAGSQIGTGTESTSPSEAVPNPDQAANASGSNMKKRSKCWDDFDELTKIVNGKKVRSHVVPAASPDTSRCCLHPSSELTASPPPPNPRPPTITRKGRTAEEDAPQGRGGRSRMTLLLVAEHLRALSAAKEPSLSLMASQPCCGALLSTPLSILLFDVYFLRRSGCGTIGAPPPRAR

SEQ ID NO: 192941 - protein, 227 aa, Zea Mays
MDLDAAAEEEERRLEDYNEAQDARYFLGFGDTHGDPIEVDTVAGSQIGTGTESTSPSEAVPNPDQAANASGSNMKKRSKCWDDFDELTKIVNGKKVRSHVVPAASPDTSRCCLHPSSELTASPPPPNPRPPTITRKGRTAEEDAPQGRGGRSRMTLLLVAEHLRALSAAKEPSLSLMASQPLVISPPRPWALQPSIQSLLFDLRPIVGDDDPASLSTSLLPNSYRSN

SEQ ID NO: 192942 - protein, 205 aa, Zea Mays
MDLDAAAEEEERRLEDYNEAQDARYFLGFGDTHGDPIEVDTVAGSQIGTGTESTSPSEAVPNPDQAANASGSNMKKRSKCWDDFDELTKIVNGKKVRSHVVPAASPDTSRCCLHPSSELTASPPPPNPRPPTITRKGRTAEEDAPQGRGGRSRMTLLLVAEHLRALSAAKEPSLSLMASQPLVISPPRPWALQPSIQSLLFDLSI

SEQ ID NO: 192943 - protein, 135 aa, Zea Mays
MPHIGQTTVEVDLLNYGVIEGDESCKHFSELKVLHPWMIKDGMNLTKEQRLEKIESQKLEKYEAKGDKRHDLKDDQSVQEEYINAYYEALRKSWKRKKQKAECSMKARFLSLMLKGNAKLTINTSRMMMKKALNR

SEQ ID NO: 192944 - protein, 182 aa, Zea Mays
MYFIFQVEVDLLNYGVIEGDESCKHFSELKVLHPWMIKDGMNLTKEQRLEKIESQKLEKYEAKGDKRHDLKDDQSVQEEYINAYYEALRKSWKRKKQKAECSMKARFLSLMLKGNAKLTINTSRMMMKKALNKYSSFLIWTVGTQGLLCNPLSTVALTLALWRFFSKQDDLNPYVVPMAMGI

SEQ ID NO: 192945 - protein, 561 aa, Zea Mays
MANRLKTIVAMYVILYEVPTIGRNHFSLGLDAPRTLNVSFKKPNWINDLQKQPSFLDLDSIVLALNCSNAARLPDTQECSTTCSGAYFIFASVYDVLVQVTWHCVGIFLASSSTILYIMILMSRKCLSHMPQYLMLNKVFRHSWNNIHLRSCQILYWPIVFQDASLSSTVNVEYAHKAAIRKHALWSSIIVDLLMGFVLGAAFLLNTETICIWTIALVHHMTEAILRSGCVWLMGVPAGFKLNTELAELLGMISLNAVQIYSTLWFFVGGYLRHIIQGIAVSGIILGLTAPVSFFIDIIQLATLHVTILHWLISSLYSRQIQTVASLWRLFRGRKWNPLRQRLDSYDYTVEQHVVGSLLFTPILLLIPTTSVFYVFFSILTTTVIWVCVMLEIVIALIQSTPYAELTLWVMRRHRFPAGLFFFHLPSNGHTFEDDDLSSHSVGCCNETRKEDLIDKLSESLVSELHCSYATFVQVIRSNYERVFNRTGYSFCKQLAYGILSGERVPSSLHLQTSPSFPWMNIGITEYWMHCYVCVLQCAPKRYMMIAFERTLVLFGGFGFK

SEQ ID NO: 192946 - protein, 324 aa, Zea Mays
MTEAILRSGCVWLMGVPAGFKLNTELAELLGMISLNAVQIYSTLWFFVGGYLRHIIQGIAVSGIILGLTAPVSFFIDIIQLATLHVTILHWLISSLYSRQIQTVASLWRLFRGRKWNPLRQRLDSYDYTVEQHVVGSLLFTPILLLIPTTSVFYVFFSILTTTVIWVCVMLEIVIALIQSTPYAELTLWVMRRHRFPAGLFFFHLPSNGHTFEDDDLSSHSVGCCNETRKEDLIDKLSESLVSELHCSYATFVQVIRSNYERVFNRTGYSFCKQLAYGILSGERVPSSLHLQTSPSFPWMNIGITEYWMHCYVCVLQCAPKRDT

SEQ ID NO: 192947 - protein, 544 aa, Zea Mays
MANRLKTIVAMYVILYEVPTIGRNHFSLGLDAPRTLNVSFKKPNWINDLQKQPSFLDLDSIVLALNCSNAARLPDTQECSTTCSGAYFIFASVYDVLVQVTWHCVGIFLASSSTILYIMILMSRKCLSHMPQYLMLNKVFRHSWNNIHLRSCQILYWPIVFQDASLSSTVNVEYAHKAAIRKHALWSSIIVDLLMGFVLGAAFLLNTETICIWTIALVHHMTEAILRSGCVWLMGVPAGFKLNTELAELLGMISLNAVQIYSTLWFFVGGYLRHIIQGIAVSGIILGLTAPVSFFIDIIQLATLHVTILHWLISSLYSRQIQTVASLWRLFRGRKWNPLRQRLDSYDYTVEQHVVGSLLFTPILLLIPTTSVFYVFFSILTTTVIWVCVMLEIVIALIQSTPYAELTLWVMRRHRFPAGLFFFHLPSNGHTFEDDDLSSHSVGCCNETRKEDLIDKLSESLVSELHCSYATFVQVIRSNYERVFNRTGYSFCKQLAYGILSGERVPSSLHLQTSPSFPWMNIGITEYWMHCYVCVLQCAPKRDT

SEQ ID NO: 192948 - protein, 72 aa, Zea Mays
MPLHSCLMAAGFAASRPLMSWRWRTATRSTPCFTRPEAAFLAPPKSSSCGASFCSPPCVVLNKREKVFLRNL

SEQ ID NO: 192949 - protein, 82 aa, Zea Mays
MNCTIYCMFCFEKAICLIEQARLVLADVGGTCRPAASRTTRWSGLRNMEELLARIMAHTTWPGGGDADRRRRSDKSESNEVT

SEQ ID NO: 192950 - protein, 381 aa, Zea Mays
MTADHRAEMASKRGKPLHPNNGNCEIGNGYGVPGGGAYYAANLPSPQMNKPRDETDKAKCANDLPDFLKQRLRARGILKDETTNKNYTSTQTVDSQEIENKSAQELPPGWIEVKDPTTGAPYFYNQSTGVSQWDRPDSVVNIMQHQVSPSLPENWEEAIDKSTGHKYYYNTKTQTTQWEPPTSVNTSVRPPASTNTAVEPVAQAADIWNSQMQRCLGCGGWGVGLVQPWGYCNHCTRVQNRPFQQYPSYTNNTMHASGNNAPKAQGNVSAKNRSSSKPPLGKPNRKDHRKRNRPEDDELDPMDPSSYSDAPRGGWVVGLKGVQPRAADTTAAGPLFQQRPYPSPGAVLRKNAEVATHGKKRGGMAPITKRGDGSDGLGEAD

SEQ ID NO: 192951 - protein, 298 aa, Zea Mays
MRLQIRITRVDSQEIENKSAQELPPGWIEVKDPTTGAPYFYNQSTGVSQWDRPDSVVNIMQHQVSPSLPENWEEAIDKSTGHKYYYNTKTQTTQWEPPTSVNTSVRPPASTNTAVEPVAQAADIWNSQMQRCLGCGGWGVGLVQPWGYCNHCTRVQNRPFQQYPSYTNNTMHASGNNAPKAQGNVSAKNRSSSKPPLGKPNRKDHRKRNRPEDDELDPMDPSSYSDAPRGGWVVGLKGVQPRAADTTAAGPLFQQRPYPSPGAVLRKNAEVATHGKKRGGMAPITKRGDGSDGLGEAD

SEQ ID NO: 192952 - protein, 206 aa, Zea Mays
MDNSQNQPPPPGVGTWPQTPPSHPPQCHADPQSYHPQFAARPDNASANNSGSSANIESAVQEAVLHAQDIETQQVIQNQRYANTTSEPTKYGEDLLSNRRDPNALKEHLLKMTADHRAEMASKRGKPLHPNNGNCEIGNGYGVPGGGAYYAANLPSPQMNKPRDETDKAKCANDLPDFLKQRLRARGILKDETTNKNYTSTQTVSC

SEQ ID NO: 192953 - protein, 535 aa, Zea Mays
MEQLRTFGRELAMGSQGGWGQSKDFLDLVKSIGEARSKAEEDRIIARELEHLKRRLADPDVPRRKMKELLLRLVYAEMLGHDASFGHIHAVKMTHDESLPLKRTGYLAVALFLDERHDLVILVVNTIQKDLRSDNYLVVCAALTAACRLIGEEAIPAVLPQVVDLLVHPKEAVRKKAVMALHRFYQRSSSSVSHLVSNFRKRLCDNDPGVMGATLCPLYDLISEEPNSYKDLVVSFVNILKQVAERRLPTSYDYHQMPAPFIQIKLLKILAVLGSGDKQASGHMYTVLGDIFKKGDTASNIGNAILYECICCISSIFPNPKMLVAAAETTSKFLKSDSHNLKYMGIDALGRLIKINPDIAEEHQLAVIDCLEDPDDTLKRKTFELLYKMTKSTNVEVIVDRMIEYMINITDHHYKTEIASRCVELAEQFAPSNQWFIQTMNRVFEHAGDLVNIRVAHNLMRLIAEGFGDEDEGADSQLRSSAVDSYVRIVGEPKLPSSFLQMENIRLLILLGNCVMWQRPTSLMTLSRRMQSQQF

SEQ ID NO: 192954 - protein, 370 aa, Zea Mays
MPADASCEDIEVDRNLSFLDSYVQQALENGASPYIPESERSGLTSVGSYRSQEQQETSAHTLRFEAYEMPKPSLPLATSQTSMSTPNTDLVPVSEPGYYKEDHQTSRPQPPSDAVSGEFGVKLRLDGVQKKWGRSTYSSSTPSSSMSSQQTTNGASHSDGGGPSSQPRESSYGSKRQQGTEVSAEKQRLAASLFGSAAARADRKAQASRKTGKDSPSTEKVATTNVAAQSVKEQVIPAAAPPPDLLDLGDETVPSSRPSADPFSQLVGLLGPASAAPALSGTPATTTSTSKAPDLMSIFSDDVPTGVTSSGSTDPTPGDAISVSSHKGATAVAPKKGSSLQDALQKDSTARQVGVTPTGNNPNLFKDLLG

SEQ ID NO: 192955 - protein, 578 aa, Zea Mays
MEQLRTFGRELAMGSQGGWGQSKDFLDLVKSIGEARSKAEEDRIIARELEHLKRRLADPDVPRRKMKELLLRLVYAEMLGHDASFGHIHAVKMTHDESLPLKRTGYLAVALFLDERHDLVILVVNTIQKDLRSDNYLVVCAALTAACRLIGEEAIPAVLPQVVDLLVHPKEAVRKKAVMALHRFYQRSSSSVSHLVSNFRKRLCDNDPGVMGATLCPLYDLISEEPNSYKDLVVSFVNILKQVAERRLPTSYDYHQMPAPFIQIKLLKILAVLGSGDKQASGHMYTVLGDIFKKGDTASNIGNAILYECICCISSIFPNPKMLVAAAETTSKFLKSDSHNLKYMGIDALGRLIKINPDIAEEHQLAVIDCLEDPDDTLKRKTFELLYKMTKSTNVEVIVDRMIEYMINITDHHYKTEIASRCVELAEQFAPSNQWFIQTMNRVFEHAGDLVNIRVAHNLMRLIAEGFGDEDEGADSQLRSSAVDSYVRIVGEPKLPSSFLQIICWVLGEYGTADGKHSASYIIGKLCDVAEAHLTDDTVKAYAISAILKIFAFEIALGRRIDLLPETCSNGHTSYMLY

SEQ ID NO: 192956 - protein, 371 aa, Zea Mays
MNFILHTFHTYVVDRNLSFLDSYVQQALENGASPYIPESERSGLTSVGSYRSQEQQETSAHTLRFEAYEMPKPSLPLATSQTSMSTPNTDLVPVSEPGYYKEDHQTSRPQPPSDAVSGEFGVKLRLDGVQKKWGRSTYSSSTPSSSMSSQQTTNGASHSDGGGPSSQPRESSYGSKRQQGTEVSAEKQRLAASLFGSAAARADRKAQASRKTGKDSPSTEKVATTNVAAQSVKEQVIPAAAPPPDLLDLGDETVPSSRPSADPFSQLVGLLGPASAAPALSGTPATTTSTSKAPDLMSIFSDDVPTGVTSSGSTDPTPGDAISVSSHKGATAVAPKKGSSLQDALQKDSTARQVGVTPTGNNPNLFKDLLG

SEQ ID NO: 192957 - protein, 522 aa, Zea Mays
MNCGPPDQLPPGSAPSCFLNLNWDQSMAADQLDPALSSMVSSPASNSTAAAAVTDGRALHGISPQQQYGGTPLSSPPKLNLFHQTRPQFHHFPPPQVGGLPILENLMPMGHLDQFLADPGFAERAARLSGFDGRPGGSGYGGVGVPGQFGIPDAGPIGALKELELGNGRDESSVSDPASGSAEMALNKGPSDGNAKKRKASGKGKGKDGPGSAAAGAAKEESSGKRCRSADESSGAEDNNPTTKGKAAQSSSENGGGRKQQGKESATKPPAEAPKDYIHVRARRGEATDSHSLAERVRREKISQRMKLLQDLVPGCNKVVGKAVMLDEIINYVQSLQRQVEFLSMKLATVNPQLDFNSLPNLLLPKDIHQPCGPPHFPLETSGAPLPYLSQPHHGSPLGCCMDTQGGSMHPLDAAFCRPMNPQHPFLNGASDAASQVGTFWQDDLQSVVHMDIGQSQEIAPTSSNSYNDSPHENGALRHGRGKRKKENPSPKLDAVVPPVHTEKRGHSSHRKQRALGGSNPT

SEQ ID NO: 192958 - protein, 84 aa, Zea Mays
MEQPFKKKHRSARGSAEFVHLHSLVRFAYTKHTRLYSASMVSEKGRPEILHYTGGSAALTWRCRLYSATENRPSSCTSPSPSTS

SEQ ID NO: 192959 - protein, 166 aa, Zea Mays
MPPPPPPWCSPSSPSALPRPCFLFPVRPLFCSNRSPRRVPPWLPLPLRSALARTVQQHTGAKPVSATLAKCSMKYRSELHLDLCSPNPRRRNTLALRRCRASPIAPRRRARTVINYAYARDTETLFDIISVKMNLSIDKRCRINNLSTSMIALSQVLMKVFTFSSI

SEQ ID NO: 192960 - protein, 103 aa, Zea Mays
MAPSPLLLPAPWLCSTFTVSSPSAMADAASTSPLVLAELALSPAAPLLSVPSAPSVLFQSFSTPCSPMAPLASPVSTSPNGTAAYRCQTRVRDARQVLDEIPQ

SEQ ID NO: 192961 - protein, 72 aa, Zea Mays
MSKTADCAVQNQQVLKWLFREVGALLLLSCSILSDRLDPVDEYRSFRLIILNSYLSWSKSVEGKQHRLVRFS

SEQ ID NO: 192962 - protein, 54 aa, Zea Mays
MCKRIKKYRKPLNLENPAEHYLATVKRERERERERERGTLMTFGKIICLVVNSW

SEQ ID NO: 192963 - protein, 173 aa, Zea Mays
MSDPLLPNSNTQATQLWLPLLAAQFFAPCSSSSSFRTSAPASASTATEMEAQDDCKWRQVPAFGDWNLWDDMPVTQYFQAGTFFFAAPTTEKDDDEDLFKVPQFPATPYSYKKCVVRVKGEKGTAVPPAARKGGRRRRVNEQQKWKPKGAVDEDLYKISPQLLCKQVELCQRS

SEQ ID NO: 192964 - protein, 183 aa, Zea Mays
MSDPLLPNSNTQATQLWLPLLAAQFFAPCSSSSSFRTSAPASASTATEMEAQDDCKWRQVPAFGDWNLWDDMPVTQYFQAGTFFFAAPTTEKDDDEDLFKVPQFPATPYSYKKCVVRVKGEKGTAVPPAARKGGRRRRVNEQQKWKPKGAVDEDLYKISPQLLCKKKLLRNLLGGCLGLSCIA

SEQ ID NO: 192965 - protein, 218 aa, Zea Mays
MTLRVILSRLRLTPLIHDGHHLRRSLSAAAAKLPDELPPGAPAPTSDSRLFVAGLSWSVDERSLTDAFSSFGTVTEDGAQCRSSAKCRGGREPLHRPQACSLFDEIPVRDVVTCSAAIYRHARSGLFHESAELFVGMMRAVRIMYDKNSGRSRGFGFVHFSNDNEAKCAKDAMDGKLEMKHGPVLILQVMLGRPLRISFALGRVRGASVIVPRLSTVK

SEQ ID NO: 192966 - protein, 131 aa, Zea Mays
MTLRVILSRLRLTPLIHDGHHLRRSLSAAAAKLPDELPPGAPAPTSDSRLFVAGLSWSVDERSLTDAFSSFGTVTEGLRLNAVEAVSHSIAPRPAACSTKFLLGTWSPAQLQFTDMRGAGCSMSQLSCLLA

SEQ ID NO: 192967 - protein, 123 aa, Zea Mays
MTLRVILSRLRLTPLIHDGHHLRRSLSAAAAKLPDELPPGAPAPTSDSRLFVAGLSWSVDERSLTDAFSSFGTVTEGEMSRSIGRGILAWTDGHIRRVAKYPYRLVFLILQGRDLSRRRLAMA

SEQ ID NO: 192968 - protein, 150 aa, Zea Mays
MTLRVILSRLRLTPLIHDGHHLRRSLSAAAAKLPDELPPGAPAPTSDSRLFVAGLSWSVDERSLTDAFSSFGTVTEVRIMYDKNSGRSRGFGFVHFSNDNEAKCAKDAMDGKHGPVLILQVMLGRPLRISFALGRVRGASVIVPRLSTVK

SEQ ID NO: 192969 - protein, 117 aa, Zea Mays
MTLRVILSRLRLTPLIHDGHHLRRSLSAAAAKLPDELPPGAPAPTSDSRLFVAGLSWSVDERSLTDAFSSFGTVTEVRIMYDKNSGRSRGFGFVHFSNDNEAKCAKDAMDGKGGHCE

SEQ ID NO: 192970 - protein, 74 aa, Zea Mays
MVHNQMITVRIMYDKNSGRSRGFGFVHFSNDNEAKCAKDAMDGKVMLGRPLRISFALGRVRGASVIVPRLSTVK

SEQ ID NO: 192971 - protein, 309 aa, Zea Mays
MYSKCKDLSSARVLFDGMRKKSLVSWTAMVSGYIGSGRALEGMLLFGKMRHENNFVIDSVALVSLLTGCYETAKFDLCVQLHGYSYKSGLYLYRPVPNTFIAVYGKCGYAILAHKVFDDMISRDVVSWNTLILSYGINGQGEQAVALFNDMEESSEKRDSVTYLNAMLACSHSGQVDDGLIIFRRMIIEKRVNPCQEHIGCLVDMLARAGRLDEAAEVASLTSNEGANPWKALMGGGHLYSQTELTEVAAEKVLNADSFDNGHVVLLSNTCASAGKYSDAESIRSCYSKQTRKKILGLSSIEIMLSSTR

SEQ ID NO: 192972 - protein, 71 aa, Zea Mays
MYDKNSGRSRGFGFVHFSNDNEAKCAKDAMDGKHGPVLILQVMLGRPLRISFALGRVRGASVIVPRLSTVK

SEQ ID NO: 192973 - protein, 298 aa, Zea Mays
MAAASAAAEASGESKNEFLIRDDAPGLLAALKEMKDGLDLVRGKVEAITRKVKANQLPAANGIGYLEAKNHLLLGYCQDIVYYLLRKAKGLSVDGHPVVRSLVEIRLFLEKGKDGHSDEEDLLKYRPNPDMMDTKPGPDGQDTDGVYRPPKFMPTSMDDEEKRRKNDSRRDKAIARVAIENPYIKEIIDDAADRPEEWKETVGDESREFGRYMRQREEQEKQEEELFTRAPVTKRDKQIEKRIRRQLHGLGGLTDGFDLGMNMLLGGDKEDDGGSSKSHGKSGNRKKHLKSSKKRKRH

SEQ ID NO: 192974 - protein, 227 aa, Zea Mays
MPTLHANMAEMPSAAMAKARSLLRRTDRGSSSIPTRKRKKRRPGCEEEQQRHEARKTRGRSGTGEEVKPGATVSCIVCDGLVIHLSQAALGEPKKASENVIVSVKINDKKLVLGTLSVEKHPQISCDLFFDKEFSAAKFPVKDVIQNADETSGDDDDFTDSESEMSLEDDSSSEEQTPSPNKTDVVVGKKRAIEAEAPSGKKAKSEQSAQKTAQLGSHACKSCNKSF

SEQ ID NO: 192975 - protein, 515 aa, Zea Mays
MSKRPMMTTPAGGEDGEPSSGARGAGAPPPSQPVGTGRYARLQSAGTGTSAADGDRPRRRVTYMEGRFEAAEQPPTDDGYGAGDTAPPQTRTQRPRPTYTPVSQRRREPAIDEQPRLYGDYPRRGSPAEPPARTPTRPRGSRAGLGGAAGGALPPGSSSLPSPETAVSTTGGIPGSSGGAPPVQPRRGGLKTNKTIERVSTLGDEPVGLGGSGSSEPPPPPTQTQPKPEPRFSLPQQPEEGPYVDQPPKQPSSSGSGTKRPAGASPTLIRRKEKATKLMTVCLTCCCILFWLLVVCVGLAILVVYLLYHPRAPRIHVSTATLNAGYIDELPPPHLGKALNSDLYVLAAIYNPNTKVDVVLRYMQLDLYFQGRLIGTQAVWPPLYEKPGDSALRSVHLVVSEVVMTQEDAEVWKNVTTGGGLVEMHLQGKFHVQLNFGRWLPFSLRDTSLAPPETHISLLKPCNISLDRQPCCDIIPSYWHWDTSVSGKNRHQVTLSPVVETSQTVHGPCRAQLPA

SEQ ID NO: 192976 - protein, 102 aa, Zea Mays
MRKDELENMNKIQQHPENTITILNNQLRGSNHTTEQNQTFISDAHMTGGHVGNQITNSPASISIILGSNSRPVSAEYTGNRSYSLQLTSTEKGPFQLQCTVN

SEQ ID NO: 192977 - protein, 331 aa, Zea Mays
MGQRQSHSKRDGSSHGRRSRSFQQQPSAQWGAGGGGYYQQDPSTGYYGAPVPQQGGGYYQQDPGTGYYGAPVPQQGGGYAAPYRDKPAAAAAVAAPAPQAAKPRQLDRRYSRIADEYHSVDQVTDALAQAGLESSNLIVGIDFTKSNEWTGKFSFHGRSLHHISNTPNPYEQAISIIGRTLSKFDEDNLIPCFGFGDASTHDQDVFCFSPDEKPCNGFEEALDRYRELVPHLRLAGPTSFAPIIEMAMTIVEQSGGQYHVLLIIADGQVTRSVDTASGQLSSQEQKTVDAIVKASELPLSIVLVGVGDGPWDMMKEFDDNIPARAFDNFQR

SEQ ID NO: 192978 - protein, 278 aa, Zea Mays
MGQRQSHSKRDGSSHGRRSRSFQQQPSAQWGAGGGGYYQQDPSTGYYGAPVPQQGGGYYQQDPGTGYYGAPVPQQGGGYAAPYRDKPAAAAAVAAPAPQAAKPRQLDRRYSRIADEYHSVDQVTDALAQAGLESSNLIVGIDFTKSNEWTGKFSFHGRSLHHISNTPNPYEQAISIIGRTLSKFDEDNLIPCFGFGDASTHDQDVFCFSPDEKPCNGFEEALDRYRELVPHLRLADGYDHCGAKWRAIPRPIDNCRWAGYEECRYCIWTAEFARAKNC

SEQ ID NO: 192979 - protein, 152 aa, Zea Mays
MRPHAVGMGGGGVGRRKAGAAAAAASREWLVVPASGPARVEEAGKHAVMARTGLPARDLRVLDPLLSYPSTILGRERAIVVNLERVKALITAAEVLLPNTKDPAFARFVRDLQTRVLASSSDQLNSLTWKVNHLLLLHHFLYQVHPKGMKWR

SEQ ID NO: 192980 - protein, 298 aa, Zea Mays
MRPHAVGMGGGGVGRRKAGAAAAAASREWLVVPASGPARVEEAGKHAVMARTGLPARDLRVLDPLLSYPSTILGRERAIVVNLERVKALITAAEVLLPNTKDPAFARFVRDLQTRVLASSSDQAAELTDMEGESPIVASPFPVPSSSKGHEMEMTKKTAAVVPEMTSSSSMPNLAVAKDGNTKVLPFEFRALEVCLESACRSLEEETSTLELEAYPALDELTSKISTLNLERVRQIKSRLVAISGRVQKVRDELEHLLDDEMDMAEMYLTEKLTQQEISEASSRAEVDDASLTEDDRL

SEQ ID NO: 192981 - protein, 589 aa, Zea Mays
MAEIAGDEAPTPPTISGEVSGDPHTSAATPAGSSNKPPLRATKPGVKRLILTASVLLSFLVGLPFLLKSTEIHRSPLPSDAITALAHRLHSTPPSFPCALHAVFLRSVPGRSDDASLYRRLERSISAQLQLLAATSTAGNVSVSVTVESAGGCSSSSGSVGSGWQCGTVSSADLVVGDEVFDELLHSALGSVGGDGSRVYTVVVVEIDDADGMRVVVGKHRHAWVVGKADEVKAVSVIGKVFAKYFMNGGIEEGEAGIGKGEFMPVGSDGNVVLSFSLLNADPSDWVYDWDFEKIGEKMLNPVVEALRPIAEINIESQVLYHTPKSSYSYFDDKLGGNFLSMGDIPFFVNSNEWHLDTSISATGRSKVLQFVVYIPSARECPLYLQLPDGGLSKTNAFISPMWGGVLIWNSPDCSLGSKKTHGTQKKMSSQELMEALEIFVGQLRQLFGLKPSYFSQDMDVPTKFLVSEKGFTEWELDLLYRHHARSNLLSCLTTLESLSSLVHSLPRMIVMDEIGRQVELSLEAANLAQGNATLGISDSSAVSATRARALAEDAFFHPSIMSISYASVEHYFAIYMFPCMCCWRQSKS

SEQ ID NO: 192982 - protein, 344 aa, Zea Mays
MAEIAGDEAPTPPTISGEVSGDPHTSAATPAGSSNKPPLRATKPGVKRLILTASVLLSFLVGLPFLLKSTEIHRSPLPSDAITALAHRLHSTPPSFPCALHAVFLRSVPGRSDDASLYRRLERSISAQLQLLAATSTAGNVSVSVTVESAGGCSSSSGSVGSGWQCGTVSSADLVVGDEVFDELLHSALGSVGGDGSRVYTVVVVEIDDADGMRVVVGKHRHAWVVGKADEVKAVSVIGKVFAKYFMNGGIEEGEAGIGKGEFMPVGSDGNVVLSFSLLNADPSDWVYDWDFEKIGEKMLNPVVEALRPIAEINIESQVLYHTPKSSYSYFDDKLGGNFLSKLK

SEQ ID NO: 192983 - protein, 901 aa, Zea Mays
MASSQGESVPPWLKSLPLAPEFRPTVAEFADPIAYLLKIEPAAAPFGICKIVPPLPPPPKRTTLGNLSRSFAALHPDDPTPTFPTRHQQLGICPRRPRPALKPVWLSPHRYTLPKFEAKAGASRKALLARLNVPASKQLSPLDVEALFWRSSADRPVVVEYASDMPGSGFAPCAARLTQLPPANVGETAWNMRRVARSPASLLRFVREEVPGVTSPMLYVGMMFSWFAWHVEDHDLHSLNYMHYGAPKTWYGVPRDAALAFVEVVRVHGYGGEVNSLETFAMLGDKTTVMSPEVLVDSGIPCCRLVQSAGEFVVTFPGAYHSGFSHGFNCGEASNIATPEWLIVAKEAAVRRASINRPPMVSHCQLLYELALSLCLRDPSNDVMEPRSCRLKEKKKSEGDQLIKKIFVQNVIEDNKLLGHFLSDGSPCIILPVNYNDGSPLSTLLSKFQSTTDSRISHGQCSKAEAPKDSRRLPMDGADKNRELSSSNKNSLSAFSGKTVPLPPRICIHECANVTGASHAHNAENDKVDMNSAAGLLDQGLLSCVTCGILSFSCVAVIKPRECAAKWLMAADSSLINDRLASSGEHDIDALQGGRTTGGILRSDSEMNGNSIVSDADAAPLNGHSALDLLALAYGDPSDSDEDVMNIKNQVPNVSNELINHTIESQPYTSCNGDYDGTKVSSSSKEREQGPTSHSSKCIGNSNTLNGPKGVRTRNKDLLKMVLSEGFQPKGICSETHKKVQCEPSSSKKTSMEIPCGTDYHVSHNSGTICMDSSRGSTTTTMVNNLVTSVVKPDKDSSRMHVFCLEHAIEVEKQLQAIGGADIFLLCRPGQSLDLLSRSLPCFNVTPFFNANTICSFFINHYEHLLHDLQECMSSSLTKLLHSEYINACAIGHIVLHYHPF

SEQ ID NO: 192984 - protein, 1000 aa, Zea Mays
MVDSCERGSSPESFHQSSSHGFTLDPSNDVMEPRSCRLKEKKKSEGDQLIKKIFVQNVIEDNKLLGHFLSDGSPCIILPVNYNDGSPLSTLLSKFQSTTDSRISHGQCSKAEAPKDSRRLPMDGADKNRELSSSNKNSLSAFSGKTVPLPPRICIHECANVTGASHAHNAENDKVDMNSAAGLLDQGLLSCVTCGILSFSCVAVIKPRECAAKWLMAADSSLINDRLASSGEHDIDALQGGRTTGGILRSDSEMNGNSIVSDADAAPLNGHSALDLLALAYGDPSDSDEDVMNIKNQVPNVSNELINHTIESQPYTSCNGDYDGTKVSSSSKEREQGPTSHSSKCIGNSNTLNGPKGVRTRNKDLLKMVLSEGFQPKGICSETHKKVQCEPSSSKKTSMEIPCGTDYHVSHNSGTICMDSSRGSTTTTMVNNLVTSVVKPDKDSSRMHVFCLEHAIEVEKQLQAIGGADIFLLCRPEYPRIEVEAKLLAGEMDFEYDWKDILFKEVTIKDREKIQEVVRDEEAIPTNSDWAVKLGINLYYSANLAKSPLYSKQVPYNRVIYEAFGCGSPNDSPVKLKTYSRRQCRAKKIVLAGRWCGKVWMSNQVHPYLADRIKNHEPKEIDETFPSDQKSHAEPVENSSREAASTRKSSSRTIEGKTSKREKEQLEKANAKKPKFTEEDNSKSLEGTAEASTQKIKGRSVLEKTSKKEKAYTKKLKHTEKVSEALKGPSEASFPAPAGMVVRSSSRIANRKIMLKSKMEEEDNGSADRPKSKVEDDKDNPAGRSRAKPLRQKTKVDAKKKTKETRVEKRKAPSPASQKDEEEQSDDVEGRSTTKQRLSLRKKGAKTEGKQRMEKPRFGGSAPPPSSPKRKEEYVCDIEGCSMSFGTEQALSLHKNDICPEKGCCRKFFSHKYLQQHRKVHADDRPLKCPWEGCGMAFKWPWARTEHVRVHTGDRPYVCLEPGCGQTFRFVSDFSRHKRRTGHGASKKAKAKKQGKAAVT

SEQ ID NO: 192985 - protein, 226 aa, Zea Mays
MVVIELEPEEATRPSSPASEEKAAAAAGGEAARPSSSAAPEEAPTAAAAAVGGEASRAAGEEEEAFEDALTDEQLREKSRSQANDAKAEGNKFFGSGQYEEALSKYEMALQIAAELESSEDIRAACHSNRAVCFLKLGKHDETVKECTKALELNPSYLKALLRRAEAHEKLEHYDEAIADMKKVIEMDPSNQQATRSLFRLEPLAAEKREKMKEEMIDISPVKWLF

SEQ ID NO: 192986 - protein, 148 aa, Zea Mays
MALQIAAELESSEDIRAACHSNRAVCFLKLGKHDETVKECTKALELNPSYLKALLRRAEAHEKLEHYDEAIADMKKVIEMDPSNQQATRSLFRLEPLAAEKREKMKEEMIGKLKDLGNSVLGRFGMSVDNFKAVKDPNTGSYSIQFQK

SEQ ID NO: 192987 - protein, 324 aa, Zea Mays
MGAARQDFNQKGPSDNLNLRSSFQEQPGNLTNGFQHSSQKVQSQTNILDPHLDDTKTSVPLKVPDKNGTSASDAADHQNITGVSPLGGGGVFSFERMPVNQDTKLSEAMILECQSWSGGVPPKQFMQYPKHNHERCDLLGDYSCLPKPDLEHPIAPSHLYAPPPVISMSCSVEGDVRDFSDVKPDLLGCMKSLSPALTCTVESVSAQLSDSVVSSTNNDKKISSVEGLSSVKDCDFDQERNQAILLTSEEASILCSTDLTCLPDELSGYQLQGVSFGDIGLNSIDLFQCNDTMVLPGLQNNWYDDPDFSNETMEFPLLDGGLFA

SEQ ID NO: 192988 - protein, 585 aa, Zea Mays
MALADATAFPYGLRVLVVDDDPTWLKILEKMLRKCSYEVTTCGLASVALQILRERRNKFDIVISDVNMPDMDGFKLLELIGLEMDLPVIMMSIDGETSRVMKGVHHGACDYLLKPVRMKELRNIWQHVYRKKMHEVKEIEGNDSCDDLPIFRNGLDGLDERGLFMRADTDTMRKRKEVDKDHADQDSSDGATAKKARVVWSVDLHQKFVNAVNQIGFDKVGPKKILDLMNVHGLTRENVASHLQKYRLYLSRLQKQNEERIMGAARQDFNQKGPSDNLNLRSSFQEQPGNLTNGFQHSSQKVQSQTNILDPHLDDTKTSVPLKVPDKNGTSASDAADHQNITGVSPLGGGGVFSFERMPVNQDTKLSEAMILECQSWSGGVPPKQFMQYPKHNHERCDLLGDYSCLPKPDLEHPIAPSHLYAPPPVISMSCSVEGDVRDFSDVKPDLLGCMKSLSPALTCTVESVSAQLSDSVVSSTNNDKKISSVEGLSSVKDCDFDQERNQAILLTSEEASILCSTDLTCLPDELSGYQLQGVSFGDIGLNSIDLFQCNDTMVLPGLQNNWYDDPDFSNETMEFPLLDGGLFA

SEQ ID NO: 192989 - protein, 357 aa, Zea Mays
MNVHGLTRENVASHLQKYRLYLSRLQKQNEERIMGAARQDFNQKGPSDNLNLRSSFQEQPGNLTNGFQHSSQKVQSQTNILDPHLDDTKTSVPLKVPDKNGTSASDAADHQNITGVSPLGGGGVFSFERMPVNQDTKLSEAMILECQSWSGGVPPKQFMQYPKHNHERCDLLGDYSCLPKPDLEHPIAPSHLYAPPPVISMSCSVEGDVRDFSDVKPDLLGCMKSLSPALTCTVESVSAQLSDSVVSSTNNDKKISSVEGLSSVKDCDFDQERNQAILLTSEEASILCSTDLTCLPDELSGYQLQGVSFGDIGLNSIDLFQCNDTMVLPGLQNNWYDDPDFSNETMEFPLLDGGLFA

SEQ ID NO: 192990 - protein, 525 aa, Zea Mays
MALADATAFPYGLRVLVVDDDPTWLKILEKMLRKCSYEDAMSDRTVIARTGGISSCVTTCGLASVALQILRERRNKFDIVISDVNMPDMDGFKLLELIGLEMDLPVIMMSIDGETSRVMKGVHHGACDYLLKPVRMKELRNIWQHVYRKKMHEVKEIEEVGPKKILDLMNVHGLTRENVASHLQKYRLYLSRLQKQNEERIMGAARQDFNQKGPSDNLNLRSSFQEQPGNLTNGFQHSSQKVQSQTNILDPHLDDTKTSVPLKVPDKNGTSASDAADHQNITGVSPLGGGGVFSFERMPVNQDTKLSEAMILECQSWSGGVPPKQFMQYPKHNHERCDLLGDYSCLPKPDLEHPIAPSHLYAPPPVISMSCSVEGDVRDFSDVKPDLLGCMKSLSPALTCTVESVSAQLSDSVVSSTNNDKKISSVEGLSSVKDCDFDQERNQAILLTSEEASILCSTDLTCLPDELSGYQLQGVSFGDIGLNSIDLFQCNDTMVLPGLQNNWYDDPDFSNETMEFPLLDGGLFA

SEQ ID NO: 192991 - protein, 61 aa, Zea Mays
MAKRLLPSLNRVLVEKLVQPKKTAGGILVPETSKQIRLMSFLRLLPQRLPQLIRWSKMLRL

SEQ ID NO: 192992 - protein, 51 aa, Zea Mays
MNDNLSYSFLLVHQSLVIFFFRVMQIRLMSFLRLLPQRLPQLIRWSKMLRL

SEQ ID NO: 192993 - protein, 441 aa, Zea Mays
MPLALAQLQDLRDRISDRLRPWSRSAQFWVRAADIYTSYKVCQLRAGFVKDEDELETMWERQHELGAEKMYSLCSELGGLFLKAAQILGKPDLAPMAWVKRLVTLCDQAPSTPFDVVRDVVEKQLGKNFDDMFEFFDVEPVGSASIAQVHRARLKLSKTDVAVKVQHPGAEQLMMVDIRNMQAMALFLQKHDLNFDLFSATKEMEKQICYEFDFVREARAMERIREFLRVTNKKPPVMVPRVIPGMVSREVLIMEFIKGTPIMNLGNEMAKRGIDPGGKIAAMAKQKILSDLTLAYGQMILKDGFFHADPHPGNILICKDTEVALLDYGQVKEMPEDLRLAYANLVVAMADDDFSRAEESFRELGIRTWAITDNKLEELFQLSLRMFDTRLPPGVTVMSPFADDSSLNKIGVEVWSLLQESNRASRRSYFQCFEQSSFCEG

SEQ ID NO: 192994 - protein, 286 aa, Zea Mays
MPLALAQLQDLRDRISDRLRPWSRSAQFWVRAADIYTSYKVCQLRAGFVKDEDELETMWERQHELGAEKMYSLCSELGGLFLKAAQILGKPDLAPMAWVKRLVTLCDQAPSTPFDVVRDVVEKQLGKNFDDMFEFFDVEPVGSASIAQVHRARLKLSKTDVAVKVQHPGAEQLMMVDIRNMQAMALFLQKHDLNFDLFSATKEMEKQICYEFDFVREARAMERIREFLRVTNKKPPVMVPRVIPGMVSREVLIMEFIKGTPIMNLGNEMAKRGIDPGGKIAAMAKQ

SEQ ID NO: 192995 - protein, 242 aa, Zea Mays
MQESSKVIKLRLVQCCEFSDSPGQRFEATSSHLREDDLPWFIPSLDPTHVKILSDLTLAYGQMILKDGFFHADPHPGNILICKDTEVALLDYGQVKEMPEDLRLAYANLVVAMADDDFSRAEESFRELGIRTWAITDNKLEELFQLSLRMFDTRLPPGVTVMSPFADDSSLNKIGVESFPEELFSVLRTIQLLRGLTVGMGLTFSCAQHWRPIAEEALLKAGRQSASKSRKQKRSFLRRLFW

SEQ ID NO: 192996 - protein, 145 aa, Zea Mays
MPEDLRLAYANLVVAMADDDFSRAEESFRELGIRTWAITDNKLEELFQLSLRMFDTRLPPGVTVMSPFADDSSLNKIGVESFPEELFSVLRTIQLLRGLTVGMGLTFSCAQHWRPIAEEALLKAGRQSASKSRKQKRSFLRRLFW

SEQ ID NO: 192997 - protein, 180 aa, Zea Mays
MILKDGFFHADPHPGNILICKDTEVALLDYGQVKEMPEDLRLAYANLVVAMADDDFSRAEESFRELGIRTWAITDNKLEELFQLSLRMFDTRLPPGVTVMSPFADDSSLNKIGVESFPEELFSVLRTIQLLRGLTVGMGLTFSCAQHWRPIAEEALLKAGRQSASKSRKQKRSFLRRLFW

SEQ ID NO: 192998 - protein, 258 aa, Zea Mays
MPSVGVKIYSVFFKLLLRHRLQSLASAGGLDNAAFGVSCRPDEATAPPNPAFSAAADGVASKDLHIDPNSSLSVRIFLPTPPPPHAHPRRASDPTPTAPAAGAPYRGYLPHAVASPRAAASARRRLPIVVQFHGGGFVTGSNTAAANDAFCRRVAKLCDAIVVAVGYRLAPESRYPAAFEDGVKVLKWITKQANLAMMTKVRGGVDTFGASTVEPWIAAHGDPASADVFYLVQAVVQILLIMSLGRWSKMGNHLTQLR

SEQ ID NO: 192999 - protein, 380 aa, Zea Mays
MAASPAAAATFLHHHLPFPSRPKTLLRPRLHRLAASINPSSTDETPAADPPVIPSISIKNTEPEEVARRRSWVEHGWAPWEEIMTPEVAFARHSLNEGEEVPLQSPESLEAFRMLTPSYRKKVEAEPGYLERLFATRDTPEPLETTWAGRLPLRLVPPRDWPPPGWEVDPDELEFIREAHRAASERLDMEAAAAAGVTNVEKLEDAPQDLALERYKMFLKQYKEWVEANRDRLEQESYQFDQDYFPGRRKRGKDYSEDMRELPFYYPGQICYGQVTTVHLYQGAFVNIGCVHEGWVPIKGNDWYWIRHHIKPGMKVYVEILAKRDPYRFRFPLEMRFVYPNIDHLIFNRFDFPPIFHRKEDTNLEQFVKPDGHPFLGKNL

SEQ ID NO: 193000 - protein, 343 aa, Zea Mays
MKVYVEILAKRDPYRFRFPLEMRFVYPNIDHLIFNRFDFPPIFHRKEDTNLEQLWREAGRPPIPRKKPLKDMEKEPLVSDHPFVDTLWEWHNAEQMILDYEEQNPDKFKNTTYESTVDAPSIDEEKRVEYTEGYFKETLLKKKVVNISIKELDLDAARAERQLIKRLKKEAEERGEEYKVRKLRRNKEMDEYDLMQWRRSFEEREALIRDICCRKALDLPIEEPGRYDVDETEVYGKDYYDPEKPMYRYDYWGEPKNTEKTKLERDVERHNQQVVGDAKKWCEMSYDDYVRKKLRLEAAEARERRRKAAEAQEDEQEYDDGMDLDLKKMTDPRAPHNRFYITK

SEQ ID NO: 193001 - protein, 126 aa, Zea Mays
MGDAGADASSSPPPPSGSFSYFAVFRNYPLVAALLGFAVAQSIKFFVTRYKENRWDPKRLIGSGGMPSSHSATVTALAVAIGFQDGFSCSLFATATIFASVVGYQFSIPTHVPSEEHKRFYFFNLD

SEQ ID NO: 193002 - protein, 210 aa, Zea Mays
MGDAHVALQARLMSQALRKLSHSLSLSQTVLLFINQIRAKVATFGFGGPTEVTSGGNALKFYASVRLNIRRIGFLKEGEETIGSQVAVKIVKNKHAPPFKTAQFELEFGKGICRSSELFELGLKHKLIQKTGGAYYRFNDMSFKGKNNLKSYLTENKSVANDLETKLRRLMGTEAPKEQEAEDSSPSDLPEEVVTPEASSEEDMGVVIEA

SEQ ID NO: 193003 - protein, 593 aa, Zea Mays
MRKYSKFFRSETGDDTDSQGSSPCSPTVLGVDDMCSPYINGRAFGRQILSSQSFNSRFGSFNSRLGSFNCRRAAGGGPRSGNISVPPEELRCPISLQLMYDPVIISSGQTYERICIEKWFNDGHSTCPKTQQQLAHLSLTPNYCVKALIASWCESNDFPLPDGPPGTFDVNWRLASSDTEATGCVSVESFDCTSAKSVKIVLMEDARKEEPANSVSGTLDDGSCNDFDLNEGYGSLLLLLHERSNMDKQCRLVEQIRYLLKDDEEARIQLGSNGFAEALVEFLRNAVDDGNEKAQEVGAMALFNLAVNNNRNKGLLLSAGVAGLLEQMISNPRLSGPATALYLNLSCLPDAKAAIGSSQAVPFLVDCLYIQDASDTNGSSSKHDALYTLYNLSSHQASVSALLAAGIVDALHRLLAESAAPPEEGLGWTEKALAVLISLAATEAGRKEIVSTPGLVSTLATVLDTGEPTEQEQAVSCLLVMCSADDECVAAVLREGVVPSLVSVSAAGTGRGREKAQKLLKLFREQRQRDTAPAPQPQQQLLQSQLAEGGNGGGAIIACHHRESKPLFNVKSRKLGRTLSSLWKNRGFSLYQC

SEQ ID NO: 193004 - protein, 266 aa, Zea Mays
MISNPRLSGPATALYLNLSCLPDAKAAIGSSQAVPFLVDCLYIQDASDTNGSSSKHDALYTLYNLSSHQASVSALLAAGIVDALHRLLAESAAPPEEGLGWTEKALAVLISLAATEAGRKEIVSTPGLVSTLATVLDTGEPTEQEQAVSCLLVMCSADDECVAAVLREGVVPSLVSVSAAGTGRGREKAQKLLKLFREQRQRDTAPAPQPQQQLLQSQLAEGGNGGGAIIACHHRESKPLFNVKSRKLGRTLSSLWKNRGFSLYQC

SEQ ID NO: 193005 - protein, 150 aa, Zea Mays
MTYFRVRASNNLYKPVPNDIMITFTNWTKLEQVIEIPPAFPTLTYSLTHIEQIHSRIDHKDYYTDAIGIVTSVSNVSPHRSRGQQASSLKRNISICSARGASVNVVLWGAQATLFPGERIYEDGQNSPQIVLFVGTLVKKYAVVHQSIHS

SEQ ID NO: 193006 - protein, 1147 aa, Zea Mays
MFYSQFILAKKGPLGTIWIAAHLERKLRKNQVADTDIGVSVDSIIFPDVPIALRLSSHLMLGVVRIYSRKVNYLFHDCSEALLKIKQAFRSTAVDLPPEESTAPYHSITLPETFDLDDFELPEAVFQGDTDHHVSTKEQITLQDNPEKTGYSTSQFGLDERFGDGSSSHIGLDLEEELILNKDHSIHLESDDGIIIQGRSSVPSTDMEIDDNKSTNITAEGYSNMDGGPSSHVKLGPLNADDLGGNSIRNWTGYNVQTPDLNDILLHNNEDIAGPSTSYYQPSPFTCDEPASPEFISAQAPATPGLMEETVPSRVHESPVLSPQRKASPSTNDETAKADTPAAPASDFLHSATGNASDVVGAEMTELGLAKPVQVESSVVQDSDASVQQHTSEGLPSQGQASHLEAAADKLVGSDGIAASVDETVTVNATIEDVPLAVNDSEPCVDGSAGPSVVNLVQMDGPLFDAQVLSADFQHEVQAMQQVVASNDRLNELSTSEFAEPEKMLTAPNAEFNHAIDLGQITAEKGTIESDGSNIIGSLTSRKRHLEYSLPALESETTKKLPSRPHVKRTNDFVPHDDDILASILVGRTPGFTLDSTPLPPRESSLKRPRLGSKMGTLKRKVQIDDAMVLHADTIRQQLINTEDIRRIRKKAPCTRSEIWMIEKGSLEDDLFHEPIFSCLSEELNNLHNRTYETIVHPAVQRMELHGQLDMPETIPEYRNIAGFGSATIDGPLHIPDGIQSDAMLSGANVAYGATAAFGLQIPPDYQVNRASNDFVVGTQLQEVAKPFIGNEHEVAPPDREHAQVDTLYSDRFQGVPSDLQRSNDANVSSQDVVLDNSGQACAHAVDGMTREFNHFVHRDANLFGSTEVPASEITGVEYNQDASGFPRQTEDDNTVEYNQDASGFPRPTEGGNAVEYNQDVSGFPRPTEDGKTVEYNQDASGFPRPTEDENTVEYNQDASGFPQPTEDENTVEYNQDASGFPRPTEDENAASATGDNSGFQENNTGSHMDLDMMNDYEVKECNDFGSAIHGVDTDFLNYGDDDNDDDFVDADEPNPSEFQSLDNSGWSSRTRGVARYLKTLFDEESGLGRKSVAIDHLVRGKTRKEASRMFFETLVLTTKDYISVDQPNPFDFVSVKPGPKLLMSEF

SEQ ID NO: 193007 - protein, 592 aa, Zea Mays
MFYSQFILAKKGPLGTIWIAAHLERKLRKNQVADTDIGVSVDSIIFPDVPIALRLSSHLMLGVVRIYSRKVNYLFHDCSEALLKIKQAFRSTAVDLPPEESTAPYHSITLPETFDLDDFELPEAVFQGDTDHHVSTKEQITLQDNPEKTGYSTSQFGLDERFGDGSSSHIGLDLEEELILNKDHSIHLESDDGIIIQGRSSVPSTDMEIDDNKSTNITAEGYSNMDGGPSSHVKLGPLNADDLGGNSIRNWTGYNVQTPDLNDILLHNNEDIAGPSTSYYQPSPFTCDEPASPEFISAQAPATPGLMEETVPSRVHESPVLSPQRKASPSTNDETAKADTPAAPASDFLHSATGNASDVVGAEMTELGLAKPVQVESSVVQDSDASVQQHTSEGLPSQGQASHLEAAADKLVGSDGIAASVDETVTVNATIEDVPLAVNDSEPCVDGSAGPSVVNLVQMDGPLFDAQGTVLSADFQHEVQAMQQVVASNDRLNELSTSEFAEPEKMLTAPNAEFNHAIDLGQITAEKGTIESDGSNIIGSLTSRKRHLEYSLPALESETTKKLPSRPHVKRTNDFVPHDDDILASILGMYNL

SEQ ID NO: 193008 - protein, 1135 aa, Zea Mays
MFYSQFILAKKGPLGTIWIAAHLERKLRKNQVADTDIGVSVENIQSCKHVPQKAKHTQDSIIFPDVPIALRLSSHLMLGVVRIYSRKVNYLFHDCSEALLKIKQAFRSTAVDLPPEESTAPYHSITLPETFDLDDFELPEAVFQGDTDHHVSTKEQITLQDNPEKTGYSTSQFGLDERFGDGSSSHIGLDLEEELILNKDHSIHLESDDGIIIQGRSSVPSTDMEIDDNKSTNITAEGYSNMDGGPSSHVKLGPLNADDLGGNSIRNWTGYNVQTPDLNDILLHNNEDIAGPSTSYYQPSPFTCDEPASPEFISAQAPATPGLMEETVPSRVHESPVLSPQRKASPSTNDETAKADTPAAPASDFLHSATGNASDVVGAEMTELGLAKPVQVESSVVQDSDASVQQHTSEGLPSQGQASHLEAAADKLVGSDGIAASVDETVTVNATIEDVPLAVNDSEPCVDGSAGPSVVNLVQMDGPLFDAQGTVLSADFQHEVQAMQQVVASNDRLNELSTSEFAEPEKMLTAPNAEFNHAIDLGQITAEKGTIESDGSNIIGSLTSRKRHLEYSLPALESETTKKLPSRPHVKRTNDFVPHDDDILASILVGRTPGFTLDSTPLPPRESSLKRPRLGSKMGTLKRKVQIDDAMVLHADTIRQQLINTEDIRRIRKKAPCTRSEIWMIEKGSLEDDLFHEPIFSCLSEELNNLHNRTYETIVHPAVQRMELHGQLDMPETIPEYRNIAGFGSATIDGPLHIPDGIQSDAMLSGANVAYGATAAFGLQIPPDYQVNRASNDFVVGTQLQEVAKPFIGNEHEVAPPDREHAQVDTLYSDRFQGVPSDLQRSNDANVSSQDVVLDNSGQACAHAVDGMTREFNHFVHRDANLFGSTEVPASEITGVEYNQDASGFPRQTEDDNTVEYNQDASGFPRPTEGGNAVEYNQDVSGFPRPTEDGKTPTEDENTVEYNQDASGFPRPTEDENAASATGDNSGFQENNTGSHMDLDMMNDYEVKECNDFGSAIHGVDTDFLNYGDDDNDDDFVDADEPNPSEFQSLDNSGWSSRTRGVARYLKTLFDEESGLGRKSVAIDHLVRGKTRKEASRMFFETLVLTTKDYISVDQPNPFDFVSVKPGPKLLMSEF

SEQ ID NO: 193009 - protein, 605 aa, Zea Mays
MFYSQFILAKKGPLGTIWIAAHLERKLRKNQVADTDIGVSVDSIIFPDVPIALRLSSHLMLGVVRIYSRKVNYLFHDCSEALLKIKQAFRSTAVDLPPEESTAPYHSITLPETFDLDDFELPEAVFQGDTDHHVSTKEQITLQDNPEKTGYSTSQFGLDERFGDGSSSHIGLDLEEELILNKDHSIHLESDDGIIIQGRSSVPSTDMEIDDNKSTNITAEGYSNMDGGPSSHVKLGPLNADDLGGNSIRNWTGYNVQTPDLNDILLHNNEDIAGPSTSYYQPSPFTCDEPASPEFISAQAPATPGLMEETVPSRVHESPVLSPQRKASPSTNDETAKADTPAAPASDFLHSATGNASDVVGAEMTELGLAKPVQVESSVVQDSDASVQQHTSEGLPSQGQASHLEAAADKLVGSDGIAASVDETVTVNATIEDVPLAVNDSEPCVDGSAGPSVVNLVQMDGPLFDAQGTVLSADFQHEVQAMQQVVASNDRLNELSTSEFAEPEKMLTAPNAEFNHAIDLGQITAEKGTIESDGSNIIGSLTSRKRHLEYSLPALESETTKKLPSRPHVKRTNDFVPHDDDILASILGPLGSHLIQHHYHQGNHL

SEQ ID NO: 193010 - protein, 1114 aa, Zea Mays
MEISKLDSIIFPDVPIALRLSSHLMLGVVRIYSRKVNYLFHDCSEALLKIKQAFRSTAVDLPPEESTAPYHSITLPETFDLDDFELPEAVFQGDTDHHVSTKEQITLQDNPEKTGYSTSQFGLDERFGDGSSSHIGLDLEEELILNKDHSIHLESDDGIIIQGRSSVPSTDMEIDDNKSTNITAEGYSNMDGGPSSHVKLGPLNADDLGGNSIRNWTGYNVQTPDLNDILLHNNEDIAGPSTSYYQPSPFTCDEPASPEFISAQAPATPGLMEETVPSRVHESPVLSPQRKASPSTNDETAKADTPAAPASDFLHSATGNASDVVGAEMTELGLAKPVQVESSVVQDSDASVQQHTSEGLPSQGQASHLEAAADKLVGSDGIAASVDETVTVNATIEDVPLAVNDSEPCVDGSAGPSVVNLVQMDGPLFDAQGTVLSADFQHEVQAMQQVVASNDRLNELSTSEFAEPEKMLTAPNAEFNHAIDLGQITAEKGTIESDGSNIIGSLTSRKRHLEYSLPALESETTKKLPSRPHVKRTNDFVPHDDDILASILVGRTPGFTLDSTPLPPRESSLKRPRLGSKMGTLKRKVQIDDAMVLHADTIRQQLINTEDIRRIRKKAPCTRSEIWMIEKGSLEDDLFHEPIFSCLSEELNNLHNRTYETIVHPAVQRMELHGQLDMPETIPEYRNIAGFGSATIDGPLHIPDGIQSDAMLSGANVAYGATAAFGLQIPPDYQVNRASNDFVVGTQLQEVAKPFIGNEHEVAPPDREHAQVDTLYSDRFQGVPSDLQRSNDANVSSQDVVLDNSGQACAHAVDGMTREFNHFVHRDANLFGSTEVPASEITGVEYNQDASGFPRQTEDDNTVEYNQDASGFPRPTEGGNAVEYNQDVSGFPRPTEDGKTVEYNQDASGFPRPTEDENTVEYNQDASGFPQPTEDENTVEYNQDASGFPRPTEDENAASATGDNSGFQENNTGSHMDLDMMNDYEVKECNDFGSAIHGVDTDFLNYGDDDNDDDFVDADEPNPSEFQSLDNSGWSSRTRGVARYLKTLFDEESGLGRKSVAIDHLVRGKTRKEASRMFFETLVLTTKDYISVDQPNPFDFVSVKPGPKLLMSEF

SEQ ID NO: 193011 - protein, 1112 aa, Zea Mays
MEISKLDSIIFPDVPIALRLSSHLMLGVVRIYSRKVNYLFHDCSEALLKIKQAFRSTAVDLPPEESTAPYHSITLPETFDLDDFELPEAVFQGDTDHHVSTKEQITLQDNPEKTGYSTSQFGLDERFGDGSSSHIGLDLEEELILNKDHSIHLESDDGIIIQGRSSVPSTDMEIDDNKSTNITAEGYSNMDGGPSSHVKLGPLNADDLGGNSIRNWTGYNVQTPDLNDILLHNNEDIAGPSTSYYQPSPFTCDEPASPEFISAQAPATPGLMEETVPSRVHESPVLSPQRKASPSTNDETAKADTPAAPASDFLHSATGNASDVVGAEMTELGLAKPVQVESSVVQDSDASVQQHTSEGLPSQGQASHLEAAADKLVGSDGIAASVDETVTVNATIEDVPLAVNDSEPCVDGSAGPSVVNLVQMDGPLFDAQVLSADFQHEVQAMQQVVASNDRLNELSTSEFAEPEKMLTAPNAEFNHAIDLGQITAEKGTIESDGSNIIGSLTSRKRHLEYSLPALESETTKKLPSRPHVKRTNDFVPHDDDILASILVGRTPGFTLDSTPLPPRESSLKRPRLGSKMGTLKRKVQIDDAMVLHADTIRQQLINTEDIRRIRKKAPCTRSEIWMIEKGSLEDDLFHEPIFSCLSEELNNLHNRTYETIVHPAVQRMELHGQLDMPETIPEYRNIAGFGSATIDGPLHIPDGIQSDAMLSGANVAYGATAAFGLQIPPDYQVNRASNDFVVGTQLQEVAKPFIGNEHEVAPPDREHAQVDTLYSDRFQGVPSDLQRSNDANVSSQDVVLDNSGQACAHAVDGMTREFNHFVHRDANLFGSTEVPASEITGVEYNQDASGFPRQTEDDNTVEYNQDASGFPRPTEGGNAVEYNQDVSGFPRPTEDGKTVEYNQDASGFPRPTEDENTVEYNQDASGFPQPTEDENTVEYNQDASGFPRPTEDENAASATGDNSGFQENNTGSHMDLDMMNDYEVKECNDFGSAIHGVDTDFLNYGDDDNDDDFVDADEPNPSEFQSLDNSGWSSRTRGVARYLKTLFDEESGLGRKSVAIDHLVRGKTRKEASRMFFETLVLTTKDYISVDQPNPFDFVSVKPGPKLLMSEF

SEQ ID NO: 193012 - protein, 50 aa, Zea Mays
MVPERHANFWVIKTAIWRLELEIAFLLVDVLNQCLLFAPVCPDLSVLIWL

SEQ ID NO: 193013 - protein, 99 aa, Zea Mays
MVRAEKLAGDGCSGGEGQVEVEVGMGMDGKGVTECRICQEEGKEAAMDSPCACTGAMDYHVVVPAETEMATLQFTGFFLPCYVIARSCYALQHRKRRQV

SEQ ID NO: 193014 - protein, 128 aa, Zea Mays
MVRAEKLAGDGCSGGEGQVEVEVGMGMDGKGVTECRICQEEGKEAAMDSPCACTGAMDYHVVVPAETEMATLQFTGFFLPCYVIARSCYALQHRKRRQVHFLFPTSPVDTTLPFDLLTRTSFCLTCKL

SEQ ID NO: 193015 - protein, 293 aa, Zea Mays
MTNFGSSKYMGAVNFTGILSNDHTENPDFYNWNTVVIRYCDGASFAGDAEGGDLDGTKLFFRGLRIWKAVVDELMGKGMDAAKQALLTGCSAGSLAALLHCDNFHGRFPHEVSVKCLSDAGFFIDEKDLSGERSMRSLISGVVHLQCFFPAELIKGITTPTFILNSDYDSWQIRNILAPNGSYPGQEWSSCKADIRNCSCAQLDVLHGFKKKLVSELKVAEDNKDWGLFIDSCFTHCQTPFDITWNSPISPRLGNKSISEAVGDWYFDRRQNAKQIDCEYPCNPTCSSLLPTA

SEQ ID NO: 193016 - protein, 496 aa, Zea Mays
MAPAAALALSLLLAFLAIGPCAAADSIDLWPMPQSVSHGTQKLYVKKDITMSMVGSTYSDEKSILKDAFQRMLDLITLNHVIDGIDPGSSVLTCVNVVVRTPEDELSFGADESYNLTVPTTGDPLYAQIQAQTVFGALQALQTFGQLCYFDFTSRLIELNSAPWIITDRPRFPYRGLLIDTARHYLPVKTIKGVIDAMAYSKLNVLHWHIVDEQSFPIEIPSYPKLWNGSYSYSERYTMSDAIDIVRYAEKRGVNVLAEIDVPGHARSWGIGYPALWPSESCREPLDVSKNFTFEVIDGILSDFSKIFKFKFVHLGGDEVNTSCWTRTPHIEGWLNNNHMNVSDAYRDFVLRSQKIAISHGYDVINWEETFNSFGDKLDPKTVVHNWLGEDVAPKVVAAGHRCIVSNQDKWYLDHLDASWEGFYMNEPLKGINDTKQQQLVIGGEVCMWGEEIDASDIQQTIWPRAAAAAGCGLRLRSSQMTQDLSRQDWRASGVC

SEQ ID NO: 193017 - protein, 834 aa, Zea Mays
MATRAGRLPTTPAPALLLLLAFPFLLQGVLPSRAGDTVAAGRPLSGGQSLVSKRGKFRLGFFRPGATDNSSQRWYLGIWYNQLSVHTTVWVANRGTPISDPESSQLSISKDGNMVVLDHSRSSTAVWSTNVTTGVSSTSTVGVIRDNGNLVLADASNTSAVLWQSFDHSGDTWLPGGKLGRNKRTGEVTRLVAWKGRDDPTPSLFALELDPRGSSQYLLNWNDSERYWTSGNWTGTAFAAVPEMTSTGASPVSDYTFGYVDGANESYFTYDVADESVVTRFQVDVTGQIQFLTWVAAAAQWVLFWSEPKRQCDVYAVCGPFGLCTENALPSCTCPRGFRERDLAEWMQDDHTAGCARNTALQPCGAGAAARDGQKRRRDDDRFYTMPDVRLPSDARSAAAASAHDCELACLRNCSCTAYSYSGGCSLWYGDLINLQDTTSAGSGTGGGSISIRLAASEFSSNGNTKKLVIGLVVAGSSFVAAVTAIVLATVLVLRNRRIKSLRTVQGSLVAFTYRDLQLVTNNFSEKLGGGAFGSVFKGVLPDATLVAVKKLEGVRQGEKQFRAEVSTIGTIQHVNLIRLLGFCSEGSRRLLVYEHMPSGSLDRHLFDRDQQPGVLSWDARYQIALGVARGLDYLHEKCRDCIIHCDIKPENILLDDAFVPRVADFGLAKLMGRDFSRVLTTMRGTVGYLAPEWIAGTAVTTKADVFSYGMMLFEIISGRRNVGQRADGTVDFFPSTAVNRLLDGDVRSAVDSQLGGNADVAEVERACKVACWCVQDAESLRPSMGMVVQVLEGLVDVNAPPVPRSLMVLADPSKWQVFSQNLFPRSIWRQSWS

SEQ ID NO: 193018 - protein, 824 aa, Zea Mays
MATRAGRLPTTPAPALLLLLAFPFLLQGVLPSRAGDTVAAGRPLSGGQSLVSKRGKFRLGFFRPDNSSQRWYLGIWYNQLSVHTTVWVANRGTPISDPESSQLSISKDGNMVVLDHSRSSTAVWSTNVTTGVSSTSTVGVIRDNGNLVLADASNTSAVLWQSFDHSGDTWLPGGKLGRNKRTGEVTRLVAWKGRDDPTPSLFALELDPRGSSQYLLNWNDSERYWTSGNWTGTAFAAVPEMTSTGASPVSDYTFGYVDGANESYFTYDVADESVVTRFQVDVTGQIQFLTWVAAAAQWVLFWSEPKRQCDVYAVCGPFGLCTENALPSCTCPRGFRERDLAEWMQDDHTAGCARNTALQPCGAGAAARDGQKRRRDDDRFYTMPDVRLPSDARSAAAASAHDCELACLRNCSCTAYSYSGGCSLWYGDLINLQDTTSAGSGTGGGSISIRLAASEFSSNGNTKKLVIGLVVAGSSFVAAVTAIVLATVLVLRNRRIKSLRTVQGSLVAFTYRDLQLVTNNFSEKLGGGAFGSVFKGVLPDATLVAVKKLEGVRQGEKQFRAEVSTIGTIQHVNLIRLLGFCSEGSRRLLVYEHMPSGSLDRHLFDRDQQPGVLSWDARYQIALGVARGLDYLHEKCRDCIIHCDIKPENILLDDAFVPRVADFGLAKLMGRDFSRVLTTMRGTVGYLAPEWIAGTAVTTKADVFSYGMMLFEIISGRRNVGQRADGTVDFFPSTAVNRLLDGDVRSAVDSQLGGNADVAEVERACKVACWCVQDAESLRPSMGMVVQVLEGLVDVNAPPVPRSLMVLADPSKYAVEFFSGLPST

SEQ ID NO: 193019 - protein, 239 aa, Zea Mays
MALLRLQEQCSLLRISSSHHPNPIDIPRNPRKNQLLVPNAAKIANASEIPVPRIPTSTSKAAILARKAALWRDALVPVAAAFASCPLPSLAAEGDGKEYVFKKYKPVSAIDAFRKLRDVPEVEFDEEDEKGFVKEVLARFPDPANTVVCVLDNFDGNSSKVAELLVENGFKEAYAIKGGLRGPEGWQAVQENYLPPSVHVFPKKKRGAKLAHTDASNDGTYVQQEGSEESSAPPSSTLT

SEQ ID NO: 193020 - protein, 480 aa, Zea Mays
MKLDVNALRYLAKDDFRVLTAVEMGMRNHEIVPAELVDRIARLKHGGTYKVLRNLLKNKLVHHDATKYDGYRLTYLGYDFLAIKTLVNRGVFASVGRQIGVGKESDIFEVATEDGTVLAMKLHRLGRTSFRAVKSKRDYLRHRRSFNWLYLSRLAALKEFAFMKALGDHGFPVPAAVDCNRHCVIMSLVQGYPLVQVKELQNPDDVFDTILGLIVRLAEHGLIHCDFNEFNIMIDDDEKITVIDFPQMVSVSHRNAQMFFDRDIECIYKFFNKRFNLTSEKNEEQAGSESDDEGNSRPSFLSVKKTAGSLDKELAASGYTRKEQVEMDKYIEEDAERHDSSSDDDDDDDDNDKDDSAEPDCNLASRDSDVPGTFSEENETSCSSEKRLESPSGDNGEAMKPLESEGKTLSQKDDNNDDDSSEDADEEEEDAELTKQLNKQRKKAIAAASGRRRPVSSRNACKDKGKGTMNSKIQRQACQW

SEQ ID NO: 193021 - protein, 248 aa, Zea Mays
MIDDDEKITVIDFPQMVSVSHRNAQMFFDRDIECIYKFFNKRFNLTSEKNEEQAGSESDDEGNSRPSFLSVKKTAGSLDKELAASGYTRKEQVEMDKYIEEDAERHDSSSDDDDDDDDNDKDDSAEPDCNLASRDSDVPGTFSEENETSCSSEKRLESPSGDNGEAMKPLESEGKTLSQKDDNNDDDSSEDADEEEEDAELTKQLNKQRKKAIAAASGRRRPVSSRNACKDKGKGTMNSKIQRQACQW

SEQ ID NO: 193022 - protein, 167 aa, Zea Mays
MNEKDWLALVAVHSDSWLLSVAFYFGARFGFDRETRRRLFSLINNMPTIFEVVTGAAKKQAKEKTPNSSSKSNRPSSKVSRAESRSKAKVPQDEEESGDDDEDEEADEHNNTLCGTCGTNDSKDQFWICCDNCEKWYHGKCVKITPARAEHIKQYKCPDCTNKRARA

SEQ ID NO: 193023 - protein, 168 aa, Zea Mays
MNEKDWLALVAVHSDSWLLSVAFYFGARFGFDRETRRRLFSLINNMPTIFEVVTGAAKKQAKEKTPNSSSKSNRPSSKVQSRAESRSKAKVPQDEEESGDDDEDEEADEHNNTLCGTCGTNDSKDQFWICCDNCEKWYHGKCVKITPARAEHIKQYKCPDCTNKRARA

SEQ ID NO: 193024 - protein, 244 aa, Zea Mays
MNGGGSGLAPNAAHTADEVFRDYKGRRAGMIKALTTEKENLCLYGYPDETWEVTLPAEEVPPEIPEPALGINFARDGMNEKDWLALVAVHSDSWLLSVAFYFGARFGFDRETRRRLFSLINNMPTIFEVVTGAAKKQAKEKTPNSSSKSNRPSSKVSRAESRSKAKVPQDEEESGDDDEDEEADEHNNTLCGTCGTNDSKDQFWICCDNCEKWYHGKCVKITPARAEHIKQYKCPDCTNKRARA

SEQ ID NO: 193025 - protein, 368 aa, Zea Mays
MFRTFTRLRDAAAPLAASAVRRCSGVSGRIRAEANCPRCDAHMSVQFSLQQLPAPPPASAGAIDGAQHHNHDGAGVCPACRGAFLFRAQRIDPLRGAFLEIPAGVAAGDEDAESGGFADRIKRMLSERPPDEFPPLPQSPPMQMPHYPIRRKPRRRPREEGGGGGGGGGGGNGNGNGGDSSSGGDGTSASPKREWWGGASLGDDLPTPRELCRRLDEFVIGQAKAKKVLSVAVYNHYKRIYNANVQKEFAGNSGFPDAGHDDQNIVEIDKSNVLLMGPTGSGKTLLAKTLARIVNVPFVIADATSLTQAGYVGEDVESILQKLLVAAEYNVQAAQQGIVYIDEIDKITKKRVQMLVEMYLEKVFNKHC

SEQ ID NO: 193026 - protein, 413 aa, Zea Mays
MFRTFTRLRDAAAPLAASAVRRCSGVSGRIRAEANCPRCDAHMSVQFSLQQLPAPPPASAGAIDGAQHHNHDGAGVCPACRGAFLFRAQRIDPLRGAFLEIPAGVAAGDEDAESGGFADRIKRMLSERPPDEFPPLPQSPPMQMPHYPIRRKPRRRPREEGGGGGGGGGGGNGNGNGGDSSSGGDGTSASPKREWWGGASLGDDLPTPRELCRRLDEFVIGQAKAKKVLSVAVYNHYKRIYNANVQKEFAGNSGFPDAGHDDQNIVEIDKSNVLLMGPTGSGKTLLAKTLARIVNVPFVIADATSLTQAGYVGEDVESILQKLLVAAEYNVQAAQQGIVYIDEIDKITKKAESANVSRDVSGEGVQQALLKILEGTVVSIPEKGSRKNSRNDSIQVTCSIWSLMNTCAIYHMG

SEQ ID NO: 193027 - protein, 379 aa, Zea Mays
MQIFAGNSGFPDAGHDDQNIVEIDKSNVLLMGPTGSGKTLLAKTLARIVNVPFVIADATSLTQAGYVGEDVESILQKLLVAAEYNVQAAQQGIVYIDEIDKITKKAESANVSRDVSGEGVQQALLKILEGTVVSIPEKGSRKNSRNDSIQIDTTDILFICGGAFVDLEKTISERRQDSSIGFGAPIRTNMRSSGASCPMVTSSLLESVESGDLVRYGLIPEFIGRLPILVSLAALNEGQLVQVLTEPKNSLSKQYRKMFNLNKVKLHFTDGALRLLAKKAIAKSTGARGLRAILETVLLEAMYEVPDEKTGNERVDAVVVDEEAIGSVDRPGCGAKILRGDGALDQYITRTNVMNLQETNDGLAGELEEAYMLSRIVSL

SEQ ID NO: 193028 - protein, 499 aa, Zea Mays
MFRTFTRLRDAAAPLAASAVRRCSGVSGRIRAEANCPRCDAHMSVQFSLQQLPAPPPASAGAIDGAQHHNHDGAGVCPACRGAFLFRAQRIDPLRGAFLEIPAGVAAGDEDAESGGFADRIKRMLSERPPDEFPPLPQSPPMQMPHYPIRRKPRRRPREEGGGGGGGGGGGNGNGNGGDSSSGGDGTSASPKREWWGGASLGDDLPTPRELCRRLDEFVIGQAKAKKVLSVAVYNHYKRIYNANVQKEFAGNSGFPDAGHDDQNIVEIDKSNVLLMGPTGSGKTLLAKTLARIVNVPFVIADATSLTQAGYVGEDVESILQKLLVAAEYNVQAAQQGIVYIDEIDKITKKAESANVSRDVSGEGVQQALLKILEGTVVSIPEKGSRKNSRNDSIQIDTTDILFICGGAFVDLEKTISERRQDSSIGFGAPIRTNMRSSGASCPMVTSSLLESVESGDLVRYGLIPEFIGRLPILVSLAALNEGSDRTKEFTFQTIQENV

SEQ ID NO: 193029 - protein, 247 aa, Zea Mays
MFRTFTRLRDAAAPLAASAVRRCSGVSGRIRAEANCPRCDAHMSVQFSLQQLPAPPPASAGAIDGAQHHNHDGAGVCPACRGAFLFRAQRIDPLRGAFLEIPAGVAAGDEDAESGGFADRIKRMLSERPPDEFPPLPQSPPMQMPHYPIRRKPRRRPREEGGGGGGGGGGGNGNGNGGDSSSGGDGTSASPKREWWGGASLGDDLPTPRELCRRLDEFVIGQAKAKKVLSVAVYNHYKRIYNANICW

SEQ ID NO: 193030 - protein, 386 aa, Zea Mays
MFDRDALTMSFAPKDEHEAQVQFALERGIPAISAVMGTKRLPYPSRVFDVIHCARCRVPWHIEGGMLLLELNRLLRPGGYFVWSATPVYQKLPEDVEIWNAMSTLTKSMCWKMVNKTKDKLNQVGMVIYQKPMDNICYEKRSENSPPLCKESDDADAAWNVPLEACMHKLPGGSKVRGSKWPELWPQRLEKTPFWIDGSKVGVYGKPANEDFEADNAHWKRVVSKSYVNGMGIDWSKVRNVMDMRAVYGGFAAALRDQKVWVMNIVPIDSPDTLPIIYERGLFGMYHDWCESFSTYPRTYDLLHADHLFSKLRKRCKLAAVFAEVDRVLRPQGKLIVRDTADTINELESMAKSVQWEVRMTYTKGSEGLLCVEKSMWRPKELDAST

SEQ ID NO: 193031 - protein, 689 aa, Zea Mays
MAFGRGGKMDGRRPSSSSSSSSFCTTTTVVLFVALCLVGAWMMTSSTVFPLEISSNKKPVVKQQPAPVNFGASQEASPGIAGEGSEKFEDTDNNDATVPEEPNKQDASEQENFNEKPEEKELEVPVEKAETKDMFDDANGKSEGLSDETKNDDGEKSVEKKDNEITNESGDEKTDGESKDGQEEKPDGDAAQEEQPKIEENVEENGEKDQSSNSNEVFPDGAQSELLKESNTQNGSFPTQAAESKNEKEVQALPKSSGDATSYTWKLCNSSASTDYIPCLDNEKAIKKLRTTKHYEHRERHCPEEPPTCLVPLPEGYKRPIEWPKSRDKVWYSNVPHTRLAEYKGHQNWVKVSGDYLLFPGGGTQFKNGALHYIDTIQQALPDIAWGKRSRVILDVGCGVASFGGYMFDRDALTMSFAPKDEHEAQVQFALERGIPAISAVMGTKRLPYPSRVFDVIHCARCRVPWHIEGGMLLLELNRLLRPGGYFVWSATPVYQKLPEDVEIWNAMSTLTKSMCWKMVNKTKDKLNQVGMVIYQKPMDNICYEKRSENSPPLCKESDDADAAWNVPLEACMHKLPGGSKVRGSKWPELWPQRLEKTPFWIDGSKVGVYGKPANEDFEADNAHWKRVVSKSYVNGMGIDWSKVRNVMDMRAVYGGSEGPKGLGHEYRADRFTRHAAHHLRARFVWHVP

SEQ ID NO: 193032 - protein, 1126 aa, Zea Mays
MDPSKIICWNVRGLNSADRQNSVRNLVLSSKADVVCLQETKMTVISTRTILAALGSDFCQFSFLPSCGASGVVLVAWKRHLGVTGLSRIDRYSISIQFCNAHNRCWWLTCVYGPQSNSDKMLFLQELRDVRAACTGPWLIAGDFNLIYRASDKNNSNINRAMMGRFRKLVEDLSLNEVPLFGRKYTWSNQQDSPVLVKLDRVLCSVEWEDNFPNVLQSAASEGSDHCPLLLGIRDNKMGKRRFCFEAFWPKLEGFQDVIQEVWDSVAAVNCPFMTLNLKLKATARKLQSWSGKHVGHVRTQLALAKEILHRLEIAQDCRALSLAEIWLSNLLKKHSLFLSSLQRTIARSRSRISWLKEGDANTKLFHMHSRHRKRRNFVAQLVNGDQILTSHDDKAVLVDNFYAILIGECGDREQTINLEALHMPTFNLAHLDEPVTELELWNTIKSLPNDKAPGPDGFTGRFYKSCWNIIKMDLMAVVAAVWNRKFDNFCLLNSAYITLIPKHDGAVHVKDFRPISLVHSAAKLITKLLANRLSQKLNDMVSPIQSAFIKGRFIQDNFMLVQQTARLFHQQKRPRLLLKLDITKAFDSVSWPFLIEVMKYLGFGQIWRDIICGLLSSSSTQVLLNDDVALFLHPSAADIAITLDILHLFGEASGLRNNEQKSNVYPIQCGGVELEMVQDLLPCGISTFPCKYLGLPLSLKNLTKVQVQPIVDRIADQLPGWKADLMTRAGRKVQVQHVLTGMLIYLAMAVNIPSWAINAIDKIRRSFLWRGRKEARGGHCLVAWGRVCRPLQLGGLGISSLKELIWALRMRWLWLQKTEPNRPWCSLPIQVPDKARAFFSMVLTSKVGNGANTLFWTDKWIHGQKIADLVPRLFDIIPKKITNRRTVQEALTDRRWIADITGSLSVGVLLDYLHLWNLISDFELLPDIEDKHTFSIAANGTYSAKAAYDALFIGAVHFGHYERVWKTWAPSKCHFFLWLSVLNKCWTADRLAKRGLDHPEKCPLCDQESESLDHILVSCVFAREFWFRLMCIFRLQNLAPTPSTVSFTGWWEMIDNGSGDMIMKGVNSLIALGAWIIWNHRNQIVFDGISPSVSAALCQAREEQQLWEMAGAKGLSFLAATIRGT

SEQ ID NO: 193033 - protein, 86 aa, Zea Mays
MALLASTRQPNINQRKRLERARAISRVYLETVFVASPTHLEHCRLVRYQSVARKNRQRWNTLCCFGSATKEATLMGISTLGICYMQ

SEQ ID NO: 193034 - protein, 162 aa, Zea Mays
MALETWASWVKERIDLRRTHVFFRTYEPSHWSGLNQKVCEVTQQPTAEANGNDRREFGDILAGVVANMSVPVTVLNVTLMGAFRSDAHIGLWSHPNTILDCSHWCLPGVPDAWNELVFSHLLTNGPRTPEDFVWYRQRRLRSPPLYEKRGLAVASRRQAKTL

SEQ ID NO: 193035 - protein, 136 aa, Zea Mays
MALETWASWVKERIDLRRTHVFFRTYEPSHWSGLNQKVCEVTQQPTAEANGNDRREFGDILAGVVANMSVPVTVLNVTLMGAFRSDAHIGLWSHPNTILDCSHWCLPGVPDAWNELVFSHLLTNARSAEKLIGVEV

SEQ ID NO: 193036 - protein, 247 aa, Zea Mays
MSMKGRRYFSVAIIPLARGCGAKVYNTYGTMGNAALLHRYGFTELDNQYDIVNIDLALVTKWCTSIFSGRHTRARVSLWRNLGYSGCTSQDTEYFEIAYDGEPQLELSILLYIINMKPDVYDKLICVAHGFVSDEEHETICNVFKFVKATSSNQNSEVNGLEKLPDVKKLLHSESVCSALLSLADMRESLYGSNTLEDDEEELHACCVVNERKLYHSLVLRVSERRILRRLREFASSGSKGRKRKHP

SEQ ID NO: 193037 - protein, 341 aa, Zea Mays
MLSGELDVDPDDFSLEKYLSAKTLVSSRSFQIDSYHGSGMVPLADLFNHKTDCEHVHFTSASDASDSDGEEEEDDRSDASADDKPTTKNPTSSPPGSRANDEDLEIIIVRDVNEGEEVYNTYGTMGNAALLHRYGFTELDNQYDIVNIDLALVTKWCTSIFSGRHTRARVSLWRNLGYSGCTSQDTEYFEIAYDGEPQLELSILLYIINMKPDVYDKLICVAHGFVSDEEHETICNVFKFVKATSSNQNSEVNGLEKLPDVKKLLHSESVCSALLSLADMRESLYGSNTLEDDEEELHACCVVNERKLYHSLVLRVSERRILRRLREFASSGSKGRKRKHP

SEQ ID NO: 193038 - protein, 189 aa, Zea Mays
MQLKYPAPGAPDLALRTKGLLEQAGFGPVKEDHSRGLDHGAWVPLMLMYPDADIPVCQLSVQSDRDGAYHYSLGRALAPLREEGVLVLGSGSATHNLRKMGPFDAPVPQWAAEFDAWLKDSLLDGRYEDVNRFEEKAPHGRVAHPWPDHFYPLHVALGAAGDGAKAEQIHQCWTNATLSYASYRFTTKS

SEQ ID NO: 193039 - protein, 63 aa, Zea Mays
MDVERKVVEADDDGRVRTVRRVLVPTRRRFLHASECSYGVVGGSKAVSSLSNSPQLLYTSMAT

SEQ ID NO: 193040 - protein, 344 aa, Zea Mays
MVGWSCTCDGMQADGGPVRWMATRGLCCDSFHGGEAWIVFGARKIWVGHPWCMGIMIRRGGPARRRLWDSSGHSRKDLSGRDGAPSKPTKPRVFFLDVNPLCFRGSQRNLGAFARWLALFFAHVSLRDPVVVLDGDGGNEYWRRVLPSYKSHRARGVGTGADTRVVNVLCECNVPVVRVDGYEADDVVATLTEQVLQKGYRVFKASPDKDFKQLMSDDVQLAVMPIPEIGRWSFRGPVMAKYVFDIAIPYFWVVLRHCFYTLRQYVAQYKCDPTADLSLRCFMGDEADGVPGIQHLVLGFGRKTALKLLQKHGSLENLLNTAAIRTVGKGYAQDALTKHADYLR

SEQ ID NO: 193041 - protein, 492 aa, Zea Mays
MGGFCSKESAVDKSPSDTTLGPGRVVDHHDRLVVKEEKKAVVGEAAAKRIQEEQHQQQRQPAPPPLHVSVSRTAVPGASADTTAAPWDGVPPLARLPSLKSGMGVANKVSEVSSILGRASTAGLGKAVEVLDTLGSSMTDLNISSFGSGTATKGNKISILAFEVANTIVKGCNLMHALSKDSIKYLKETVLHSEGVQNLISKDMDELLKIVAADKREELKVFSTEVVRFGNCCKDPQWHNLNRYFDKLASELTPQHQLKEEAESVMQEFVTSVQFTAELYHEMHALDRFQQDYQRKQHEEDGSSVVQRGDNMHILKQEVKSQHKHVKSLRKKSLWSKNLEEVMGKLVDIVHFLHLEIHNAFGLSDSEESQEPTKRRNRLGSAGLALHYANIISQIDTLVSRASSVPSNTRDTLYQSLPPTIKSSLRSKLHSFGVKEELTVSQIKAEMEKTLRWLAPIASNTTKAHHGFGWVGEWASTGCELQANWAAGPDPN

SEQ ID NO: 193042 - protein, 183 aa, Zea Mays
MVSVGLESGQVPDVNCKPTGQLDLTRIETLYHADKDKTEAYILELVIRLHHLISQTKTANGERSPIKSPVQSPTQRGASITLSPNIKNSNSSPLLTQDDQDMLSDVKYRTFIPGISKSQEFDTKERHNNQSRLSKSNSHSPSSGNRKEALSISIRRLLPVIDFEIDRTKALDVIDRVDDLRVQ

SEQ ID NO: 193043 - protein, 501 aa, Zea Mays
MDPDQVADAGVQHDDLGGSATSANGCFDGGSDDGWGRALLRLGWDLSRKAVIAGVAATAAPVVAPPLLVLSLAGLALSLPFAAYLASLAATDRLMGALLPAPRTTQPYCGCDLEDDEFLDPSEAPGAEATALDHWRDTEDDAIMEENESFVPLPLSRQPRFSEEPITSSSTDVEDKMAEGESLSRGLGHESLVLDNKEGTIMEDTEYITMEAPPRGSDVFGSAVPVLRGEDDMVQRAVEAPLTAKESVQELSVSDSEDRTQDDKCKDAESSKEILSLSVDITESSDFPVPGNEGIVVQRGNGETISVRKSGQDSHSTEIGDEMEGHKTEEEIPLHDANVSESSVLDDTVLEERKIEGDVTVGMAVKEVTIYTDPCTGEVAGDQVDSIAIALPAESELMQASNVDDVINAALTEGIVLDIGDTSTEGTEHYGEGGVSTAVSVVTVDDVAETVSSRSPAVSVIGDDMTSVKSRPDADSSDQTTGYDALRSKEFREKEVIEDKV

SEQ ID NO: 193044 - protein, 1039 aa, Zea Mays
MSSGNPVSESLNLRSLHPAAAWIPSPPTSVRMWRSSSPQPPITSTRSKLTSKLASPPSNRLCTSSSCGALAWRHRSSPSTPPSIRSAPRSPRWGSAGPPTPVWMDLDNPVSSVRTGLDPEGSLLLKNLQIAHVLGPASRITTGIVGTCTPVPTLTTRSREAGDSSRRPDPVHGDSSYAGRSSWKSAVPQSARWDPSRGLAPESSKTPTQPAPTIDSKVASLRSYRRASGLCQYCAEKWNKGHKCSPTVQLHAVQEMWELFDHDQSDTDPDFQDSSDQFAVMLSQAAISTPAKAQAFRLQGCLQGVELLMLLDSGSSHCFLNTNSVAAITGLTLVSTPLMVTVANGEVLTCTSELVEADWTLQGVPFRTTFKLLSLPHYDAILGMDWLQQFSPMLIDWKNKWLSIPFQDQLIVLRDCQSLVPAGSLLEIRSVSSTSTPQHLFSATTSAVPEPVRSLLQQFDALFQPPTTLPPSRACDHSIPLVDGARPVNIRPYRLSPALKDEVESQVAEMLQNGIIQNSSSAFSSPVLMVKKKDNSWRFCVDYRHLNALTVKSKYPVPIIDELLDELAGACWFSILDLRAGFHQILLKPGEEYKTAFQTHTGHYEFRVMAFGLTGAPGTFQKAMNHTLAPLLRKCTIVFFDDILVYSRSLQDHFTHLQQVFELLSSDHWKIKMSKCSFAQPQVTYLGHIISSAGVATDPAKIQAIVAWPVPKCVKELRSFLGLSGYYRKFIRHYGVICQPLTALLKKGALYVWTADHDTAFCTLKQAMSSAPVLALPDFNVIFQIETDASANGVGAVLSQQGHPLAFLSKALGVKSRGLSTYEKEYLAVQQWRAYLQHQKFVIITDHKSLSQLNEQRLHTPWQHKVFTKLLGLQYRVQYRPGTENRAADALSRYGPAEINAVSVVIPQWLTDIQQTYDSDSKTKELVAKLAIDPAAVAHFSLKDGLIRYKNRLWIGEDPHLQAKIVSALHSSPIGGHSGVPVTYSRVKSIFAWKNMKSFVRSFVQQCQICLQAKPDRAAYPAVPISHIQAPWFSSGHCI

SEQ ID NO: 193045 - protein, 1262 aa, Zea Mays
MASPPIDSALTLALEHQTRSLLSELDKRLSAMDVKWESRVGELESQVSASSRRLDSVTTDLRADVEIQFSSAADHLHQIEADVKTRVAALQSTMHVFELWRPRVEASVESLHSSVDSIRAEVSKMGIRWSTDARVDGSGQPGLLGAHGSGSGRVPAPEEPPDRPRFGSCFENYYRDSGHVHPGADAHYPVTGMWSSPHSPSFSFNAHCGHSQGDWGQRGPLSRHCGGLPKLNFPTFDGTYPKLWQKRCEDYFEMYATETFVWVKVSTMHFVGAAARWLQSIEPRLPSMSWRQFCQAIHDRFGREQHELVIRKLFHIKQTSTVQDYVDRFSELVDLLVTYEHTTDPLYYTMKFIDGLRDDIKSVILVQRPGDLDTACSLALLQEAGDSSRRPDPVHGDSSYAGRSSWKSAVPQSARWDPSRGLAPESSKTPTQPAPTIDSKVASLRSYRRASGLCQYCAEKWNKGHKCSPTVQLHAVQEMWELFDHDQSDTDPDFQDSSDQFAVMLSQAAISTPAKAQAFRLQGCLQGVELLMLLDSGSSHCFLNTNSVAAITGLTLVSTPLMVTVANGEVLTCTSELVEADWTLQGVPFRTTFKLLSLPHYDAILGMDWLQQFSPMLIDWKNKWLSIPFQDQLIVLRDCQSLVPAGSLLEIRSVSSTSTPQHLFSATTSAVPEPVRSLLQQFDALFQPPTTLPPSRACDHSIPLVDGARPVNIRPYRLSPALKDEVESQVAEMLQNGIIQNSSSAFSSPVLMVKKKDNSWRFCVDYRHLNALTVKSKYPVPIIDELLDELAGACWFSILDLRAGFHQILLKPGEEYKTAFQTHTGHYEFRVMAFGLTGAPGTFQKAMNHTLAPLLRKCTIVFFDDILVYSRSLQDHFTHLQQVFELLSSDHWKIKMSKCSFAQPQVTYLGHIISSAGVATDPAKIQAIVAWPVPKCVKELRSFLGLSGYYRKFIRHYGVICQPLTALLKKGALYVWTADHDTAFCTLKQAMSSAPVLALPDFNVIFQIETDASANGVGAVLSQQGHPLAFLSKALGVKSRGLSTYEKEYLAVQQWRAYLQHQKFVIITDHKSLSQLNEQRLHTPWQHKVFTKLLGLQYRVQYRPGTENRAADALSRYGPAEINAVSVVIPQWLTDIQQTYDSDSKTKELVAKLAIDPAAVAHFSLKDGLIRYKNRLWIGEDPHLQAKIVSALHSSPIGGHSGVPVTYSRVKSIFAWKNMKSFVRSFVQQCQICLQAKPDRAAYPAVPISHIQAPWFSSGHCI

SEQ ID NO: 193046 - protein, 96 aa, Zea Mays
MPDLILLHQEVLHFILNAFNLVEIRYLPLMGPSHPIYVFLTFLHTFLHNQTLVKVLVRSSLSHTYSSLCGLLLYLVLLYVVHSPHSYHGTNIVLSP

SEQ ID NO: 193047 - protein, 235 aa, Zea Mays
MASSRVIPSSSPSHTASDLARLAQAASRPGGGGSGPGSMNVEELLRGIYSDMPTPAPPASEPGRPMPPAPAPVSATRKTAEEVWKEITGGGGSGEAVAPVAAQAVAPDGGAGTGGPEVTLEDFLARESAVKEDEVKISVPPAPVMGLPGGAEGVSVPGGGGGRERKRQLVSTVDRARSAIQREKRMIKNRESAARSRERKQAYIAELEYMVTRLAEEKAELLRQQRPVHHECSHL

SEQ ID NO: 193048 - protein, 213 aa, Zea Mays
MGSAVPEIQPVNQTPLHTHDQETVSNNIIHAGVSKNTSHDGVSKNTSHDEVASVQPSREAEMRPRSAPPSQSTQADNSGWSVETLMELLDFTPQEITKAISATESNRFVASVVIAFLVVLSNWGLDIGGAITRVLVGTRPLLFLIVTNITIVFTLLMENKDPNVRSRPVGVNLGSADSLGQMLEIGLLLQKALGALLIDCSVCAVIMICFLGF

SEQ ID NO: 193049 - protein, 238 aa, Zea Mays
MGTGVQAYISYRVITKTNLPEFEGPEKIVIRRYSDFEWLHDRLAERYKGVFIPPLPEKNAVEKFRFSKEFIELRRQALDLFVNRIASHPELKQSDVLRTFLQADEEIMDRARSYETGIFKKPSDFLQMFKDVQSKVSDVVLGKEKPVEESTPEYEKLKSYIFELEIHLAEAQKQAYRLVKRHRELGQSLADFGKAIKLLGSCEGDLMEKVFSEVGSKSEMLSIKLQRETTFSLTLKNP

SEQ ID NO: 193050 - protein, 335 aa, Zea Mays
MGTGVQAYISYRVITKTNLPEFEGPEKIVIRRYSDFEWLHDRLAERYKGVFIPPLPEKNAVEKFRFSKEFIELRRQALDLFVNRIASHPELKQSDVLRTFLQADEEIMDRARSYETGIFKKPSDFLQMFKQSKVSDVVLGKEKPVEESTPEYEKLKSYIFELEIHLAEAQKQAYRLVKRHRELGQSLADFGKAIKLLGSCEGDLMEKVFSEVGSKSEMLSIKLQREADNLLFNFEEPLKDYVRALQSIKATMLDRANAFRQHFDLDQERKYKELNLEKLKFMNPEKYAEAESEFRGLKADSEEATKKFEHIAKLAKDIADAWRSVLPKLEACSTS

SEQ ID NO: 193051 - protein, 336 aa, Zea Mays
MGTGVQAYISYRVITKTNLPEFEGPEKIVIRRYSDFEWLHDRLAERYKGVFIPPLPEKNAVEKFRFSKEFIELRRQALDLFVNRIASHPELKQSDVLRTFLQADEEIMDRARSYETGIFKKPSDFLQMFKSKVSDVVLGKEKPVEESTPEYEKLKSYIFELEIHLAEAQKQAYRLVKRHRELGQSLADFGKAIKLLGSCEGDLMEKVFSEVGSKSEMLSIKLQREADNLLFNFEEPLKDYVRALQSIKATMLDRANAFRQHFDLDQERKYKELNLEKLKFMNPEKYAEAESEFRGLKADSEEATKKFEHIGQAKLAKDIADAWRSVLPKLEACSTS

SEQ ID NO: 193052 - protein, 161 aa, Zea Mays
MEKVFSEVGSKSEMLSIKLQREADNLLFNFEEPLKDYVRALQSIKATMLDRANAFRQHFDLDQERKYKELNLEKLKFMNPEKYAEAESEFRGLKADSEEATKKFEHIVRLMNEELSRFQEQKTADIGLAFHEFAKGQAKLAKDIADAWRSVLPKLEACSTS

SEQ ID NO: 193053 - protein, 329 aa, Zea Mays
MGTGVQAYISYRVITKTNLPEFEGPEKIVIRRYSDFEWLHDRLAERIASHPELKQSDVLRTFLQADEEIMDRARSYETGIFKKPSDFLQMFKDVQSKVSDVVLGKEKPVEESTPEYEKLKSYIFELEIHLAEAQKQAYRLVKRHRELGQSLADFGKAIKLLGSCEGDLMEKVFSEVGSKSEMLSIKLQREADNLLFNFEEPLKDYVRALQSIKATMLDRANAFRQHFDLDQERKYKELNLEKLKFMNPEKYAEAESEFRGLKADSEEATKKFEHIVRLMNEELSRFQEQKTADIGLAFHEFAKGQAKLAKDIADAWRSVLPKLEACSTS

SEQ ID NO: 193054 - protein, 543 aa, Zea Mays
MVQGEESSWRMERAALPLNQALAYGVQAHGAGGAAAAPPTCFLDFHQPAAAAAAYFGFGELEEALIHGGGGGVDPGVITKNDVAQAKSAAAAAGYLAGAAARPPTLEIFPSLPMRHQQQLHSGNSQSVGSTTDSSSAQNAMSQMELASPAASSAPRQEAMMVTADGYSYKPGLAAAAAGAAPPSFQFQQQHQHHHPLPLHGDGGGDHDKCHSHVQRKHGSTGKDGKLVDAKTERRLAQNREAARKSRLRKKAYVQQLETTRIRLQHVEHEFQRARSHSQGVGVGGCGAAGDMSCGAAMFDMEYARWLDDDSKRLAELRGGLQAHLLLDANLGLIVEECMQHHDELFQLKAALARSDVFHLLTGSWTTPAERCFFWMGGFRPSELLKVLIPQLDPLTEQQLLGICSLQQSSEQAEEALAQGLHQLHQALADTVAAGTLNEGSAAPNCMNIMAVALDKIASLENFYQQADNLRQQTLHQMRRILTTRQAARCFLSIGEYYSRLRALSNLWASRPGDTFIRSESLSPTATELQALHHQRQNQFSGF

SEQ ID NO: 193055 - protein, 260 aa, Zea Mays
MVQGEESSWRMERAALPLNQALAYGVQAHGAGGAAAAPPTCFLDFHQPAAAAAAYFGFGELEEALIHGGGGGVDPGVITKNDVAQAKLSFARTEEAWIHRKRWQAGRCQDGTAAGAEQRGCEEEQAEEEGLRAAARDYQDQASARRARVPESTVTLTGRGRWGVRRRRGHELWRRHVRHGVRAVAGRRQQAAGGAPRRAAGAPAAGRQPGPHRGGVHAAPRRAVPAQGGARALRRLPPPHRLLDHPRRALLLLDGRLPPV

SEQ ID NO: 193056 - protein, 320 aa, Zea Mays
MVQGEESSWRMERAALPLNQALAYGVQAHGAGGAAAAPPTCFLDFHQPAAAAAAYFGFGELEEALIHGGGGGVDPGVITKNDVAQAKSAAAAAGYLAGAAARPPTLEIFPSLPMRHQQQLHSGNSQSVGSTTDSSSAQNAMSQMELASPAASSAPRQEAMMVTADGYSYKPGLAAAAAGAAPPSFQFQQQHQHHHPLPLHGDGGGDHDKRKHGSTGKDGKLVDAKTERRLAQNREAARKSRLRKKAYVQQLETTRIRLQHVEHEFQRARSHSQGVGVGGCGAAGDMSCGNAQSPSVHPLPSNSSTTIAAKASPCGCSCGL

SEQ ID NO: 193057 - protein, 513 aa, Zea Mays
MVQGEESSWRMERAALPLNQALAYGVQAHGAGGAAAAPPTCFLDFHQPAAAAAAYFGFGELEEALIHGGGGGVDPGVITKNDVAQAKSAAAAAGYLAGAAARPPTLEIFPSLPMRHQQQLHSGNSQSVGSTTDSSSAQNAMSQMELASPAASSAPRQEAMMVTADGYSYKPGLAAAAAGAAPPSFQFQQQHQHHHPLPLHGDGGGDHDKRKHGSTGKDGKLVDAKTERRLAQNREAARKSRLRKKAYVQQLETTRIRLQHVEHEFQRARSHSQGVGVGGCGAAGDMSCGAAMFDMEYARWLDDDSKRLAELRGGLQAHLLLDANLGLIVEECMQHHDELFQLKAALARSDVFHLLTGSWTTPAERCFFWMGGFRPSELLKVLIPQLDPLTEQQLLGICSLQQSSEQAEEALAQGLHQLHQALADTVAAGTLNEGSAAPNCMNIMAVALDKIASLENFYQQADNLRQQTLHQMRRILTTRQAARCFLSIGEYYSRLRALSNLWASRPGEYVSQA

SEQ ID NO: 193058 - protein, 83 aa, Zea Mays
MGLSGAAPTASTSSTRRRSHHKHLHRLLLLDLGRRPTAPRPAFCLCSLHGCTRCPDLSSAAFHQYVWVLFIKSGLIVSSHSIL

SEQ ID NO: 193059 - protein, 503 aa, Zea Mays
MATSFGFGSSATAGSTASSPFSSTPSAFSFSQPASASSPAPAFGSSLFSSSSAAASSAPTFGSSLFRASSAAAAPASSPAFGFGSTFSFGQSMAAASSAASAPSLFGATPASSAGTTLSLFGAATSAASSPGFFGATSTAASSPGLFGASATGSAATSPSLFGGTSGLFGGTSSAATTPSPFGATSSTAATVSPFGAASSAASTPSLFSGGATGFSFGSSASGSTTTTAAAPAPSFGFSFNSGPAASSTASTPTSAPALGFGGATGSSLFGSTTSAPLFSTTTASSPASAATTTPSFGFSSSPATTASAPSFGFTPSSGSATTANTAPSLFSSSATTLTTPASSSSTGFSLATSQAAPAPSLFSTSAIGSSSVTTPGFSFGSSSAASTPTLASVFATGSSTVPSAAAASAASGSSFPAVSTSGFSFAVAPSSSAAAATATTTTVTSASTSAGMTTTAPLTGTTGFPNFNLQTTTPASTSSPTLAFGELTWLFTICSSSILCLQ

SEQ ID NO: 193060 - protein, 169 aa, Zea Mays
MLAFIHQALDTPHDPHCRTPSHDHIELLLVALRYVTASVLYLKAHHYGIIITLHMPLLCACYSDIFYNAFLSYVRKRSDGKHSKFQHVFTVFQFSSLLSFVYAILLDSFNHLRHQQSEYRTVSGVAGPLIILDKVKLILRVKLHRTLGVHGDDVVGVIVVAILASEFTS

SEQ ID NO: 193061 - protein, 295 aa, Zea Mays
MDHAEVSGLLCIGTRETDGGEESYAAEYPKMDQDTNATTKFDVVMETSAMYTDQINTNACLDEYHMSGKQPMEEMGFGSAHPFELPSEGMVADSGEESMPSSPDTSTSNYDAPGYTEQNLQHIYNSYDALVDKDGVVLTPAFMICDKTLYLEPHLTFSLDGIKIEYLDLDSFEDEKLSALQWEISNIISISCKWTRSVGSALITLLVGSTAETGNAGPVRARFSLDDSQWPRRQQRIWELGPRYQEIWKDIPSDDFALENWSIEPCLFFPRQYFSSWSLHLFHHCMPFSSPIWGV

SEQ ID NO: 193062 - protein, 235 aa, Zea Mays
MDHAEVSGLLCIGTRETDGGEESYAAEYPKMDQDTNATTKFDVVMETSAMYTDQINTNACLDEYHMSGKQPMEEMGFGSAHPFELPSEGMVADSGEESMPSSPDTSTSNYDAPGYTEQNLQHIYNSYDALVDKDGVVLTPAFMICDKTLYLEPHLTFSLDGIKIEYLDLDSFEDEKLSALQWEISNIISISCKWTRSVGSALITLLVGSTAETGNADSGAPSLGGLDSIASSCNY

SEQ ID NO: 193063 - protein, 109 aa, Zea Mays
MASTDLWHQRLGHPSFSIVSSVLRSNKLACAPSQSSSVCDSCQRAKIHQLPFYKSNHVSSSPLELVHSDVWGPAITSVGGFKYYVSFLDDYSRYTWIYLLKRKSDVEHA

SEQ ID NO: 193064 - protein, 478 aa, Zea Mays
MNYHHALANEKWRLAMDAEYTALMQNGTWSLVPKPSGHNIISCKWVFRIKEHADGSVDKYKARLVARGFTQQHGIDYFETFSPVVKMSTVRLVLSIAISRQWDIRQLDISNAFLHGVLNEDVYMHQPPGFQDPSKPGFVCKLHKAIYGLKQSPRAWYSRLSDRLCQLGFVPSVADTSLFTFHQGAVIMYLLVYVDDIIIVSSSPSITQLLLQQLSVTFPVKDLGPLHFFLGIEVASNSGGMTLTQQKYARDILRRADMENCKSVPTPLCVTDKLSRHHGNKLVCQFLAQPADIHWEAVKRILRFVKGTLHTGLYLRKTGSTLLSIFTDADWAGCIDDRRSTGGFAIFFGSNLISWSARKQPTVSRSSTEAEYKALANGTAEAIWIQSLLKELRIMQPRPPVLWCDNLGATYLSANPVFHGRIKHVEVDFHFVREKVALGALQVRLISSGDQIADIFTKPATKQMLERSRFNLNLVSTG

SEQ ID NO: 193065 - protein, 479 aa, Zea Mays
MNYHHALANEKWRLAMDAEYTALMQNGTWSLVPKPSGHNIISCKWVFRIKEHADGSVDKYKARLVARGFTQQHGIDYFETFSPVVKMSTVRLVLSIAISRQWDIRQLDISNAFLHGVLNEDVYMHQPPGFQDPSKPGFVCKLHKAIYGLKQSPRAWYSRLSDRLCQLGFVPSVADTSLFTFHQGAVIMYLLVYVDDIIIVSSSPSITQLLLQQLSVTFPVKDLGPLHFFLGIEVASNSGGMTLTQQKYARDILRRADMENCNIVGALQYLTLTRPDLSFAVNKVCQFLAQPADIHWEAVKRILRFVKGTLHTGLYLRKTGSTLLSIFTDADWAGCIDDRRSTGGFAIFFGSNLISWSARKQPTVSRSSTEAEYKALANGTAEAIWIQSLLKELRIMQPRPPVLWCDNLGATYLSANPVFHGRIKHVEVDFHFVREKVALGALQVRLISSGDQIADIFTKPATKQMLERSRFNLNLVSTG

SEQ ID NO: 193066 - protein, 114 aa, Zea Mays
MLQTQKVRITEFLDERSAYLTKFAKDADSEFDLIGQNAMKELDAVGDQILERLDSKMQAFEETAGADGDTRDYNCECHLCNTRGGVEEGCCSGSDFHWSGCSGHLRAGYLTAGS

SEQ ID NO: 193067 - protein, 246 aa, Zea Mays
MDGDWGEEMEKRKLYWDQKKKGCLNMPTRKSERLAKRMKLMASLLLTQRKKIGVGEHFQAEVPGWTGQPSGKELSCYRNDPETSKMLGTRMWPPEGEVYKTDIVAVGQGRPGSCNCPYPGSFLCRQLHTNEARDQLRSELGRVFTMWQFDSMGEEVSKLWSRDEQLKFDALEQLVPVMDQKTYWAVVSKNFASKPRIDLIKYYLNVFLMRRVLYQCRLGLLEIDSDEDDVEEEEDEDQPEGSSSLR

SEQ ID NO: 193068 - protein, 331 aa, Zea Mays
MEAASNGGLLYHEVQEGKLCAVHCVNTALQGPFFSEFDLAALAADLDQRERLVMLEGSRSPGAGNAAAGDFFAEGEGSHNVSLGGDFSIQKALEVWDLQVIPLDSPAAGSSLFDPEQEVAFICHLQDHWFCMRKVNGEWYNFNSLYPAPEHLSKFYLSAFIDTLKGSGWSIFAVRGNFPKECPMATEGSNGFGQWFTPDDARRITASCNQVQTPPTEQVQSPLLAEQPEGMSEMDMIAAQQEEADLNAAIAASLMDTGVPFASYAAAREHSDSQDSPAREAAPSKDNNQEEAGKAEPSAPPCEEDIQELASGSDTRREVPSVEEKGSAKEE

SEQ ID NO: 193069 - protein, 126 aa, Zea Mays
MEAASNGGLLYHEVQEGKLCAVHCVNTALQGPFFSEFDLAALAADLDQRERLVMLEGSRSPGAGNAAAGDFFAEGEGSHNVSLGGDFSIQVGFRHPALRFQVVFDVFPIICQIGHWQTLLFCNGEI

SEQ ID NO: 193070 - protein, 346 aa, Zea Mays
MEAASNGGLLYHEVQEGKLCAVHCVNTALQGPFFSEFDLAALAADLDQRERLVMLEGSRSPGAGNAAAGDFFAEGEGSHNVSLGGDFSIQVGFRHPALRFQVVLQKALEVWDLQVIPLDSPAAGSSLFDPEQEVAFICHLQDHWFCMRKVNGEWYNFNSLYPAPEHLSKFYLSAFIDTLKGSGWSIFAVRGNFPKECPMATEGSNGFGQWFTPDDARRITASCNQVQTPPTEQVQSPLLAEQPEGMSEMDMIAAQQEEADLNAAIAASLMDTGVPFASYAAAREHSDSQDSPAREAAPSKDNNQEEAGKAEPSAPPCEEDIQELASGSDTRREVPSVEEKGSAKEE

SEQ ID NO: 193071 - protein, 459 aa, Zea Mays
MHARARPTTPSCKLQTTTPPRPHVPLRALPSSAARLPIEAAKAGRQRHPARPLLLLLLALMMAQVWTKPDSEGYTKCTGRTKNRHGTNSTTAGYIIADANGGLNQMRLGISDMVAVAKLMNATLVIPALDHKSFWTDPSDFKDIFDVQHFKQTLEDDIMVVDSLPPDFKRFKPYTRAPKSWARASYYRAFTKTLKKARVVRFTHTDSRIANNGLPPSIQRLRCRANYEALRYEKDMLSFTGCSHNLTHQEAEELREMRLRVQHWKEKEINGKERRLQGGCPMTPREAALFLKAMGYPSSTRIYVVSGEIYGVRSMDALKAEYPNVYTHYSLATVNELESLRLYQNRLAAVDYNVALQSDVFVYTYDGNMARAVQGHRRYEGFQKTINPDRRKLVELIDKLDEGTIDWTGFASEVKMHHGNRLGGPYQRLFGRSPRHEEYFYANPLPGCLCRRNTQDQVA

SEQ ID NO: 193072 - protein, 428 aa, Zea Mays
MMAQVWTKPDSEGYTKCTGRTKNRHGTNSTTAGYIIADANGGLNQMRLGISDMVAVAKLMNATLVIPALDHKSFWTDPSDFKDIFDVQHFKQTLEDDIMVVDSLPPDFKRFKPYTRAPKSWARASYYRAFTKTLKKARVVRFTHTDSRIANNGLPPSIQRLRCRANYEALRYSREIEELGNTLVGRLRNGSNHYIALHLRYEKDMLSFTGCSHNLTHQEAEELREMRLRVQHWKEKEINGKERRLQGGCPMTPREAALFLKAMGYPSSTRIYVVSGEIYGVRSMDALKAEYPNVYTHYSLATVNELESLRLYQNRLAAVDYNVALQSDVFVYTYDGNMARAVQGHRRYEGFQKTINPDRRKLVELIDKLDEGTIDWTGFASEVKMHHGNRLGGPYQRLFGRSPRHEEYFYANPLPGCLCRRNTQDQVA

SEQ ID NO: 193073 - protein, 400 aa, Zea Mays
MSAAETAVSPTTTPQPQLQSDPNAAADAASSNSLWVADETQTLTEVLLQPQPNHLSPPPSGEGDDGITASGAPVGGDAAASASAAAAANATIEERVRGPWSPEEDAVLSNLVEKFGARNWTLIARGIPGRSGKSCRLRWCNQLDPQVKRKPFTEEDRIIMAAHAVHGNKWASIAKLLDGRTDNAIKNHWNSTLRRRYCNDGQCKHGGSVERSIPKVSREVSEEPWPLNDLNSFTAMDVKDDPVQTAPDTSPRARHITDHCSITQVVDPPYLSRPAAKIGAFRPYYLGHTEPTQQEMPGAVVMFDSTHKVSTPESEVFKFVDPICFAAEVPDKCGYGCCGAHEQHRKNSLLGPEFSEFEGHPPVLNISFASLVSEISSIAWMRSGMQSSDSSNLMQSIPPT

SEQ ID NO: 193074 - protein, 313 aa, Zea Mays
MYNNYRNPPGTHMPPQNSQPVQFDNPLYGASSGLIRSGIGVYGEKFLGSSSEFMQSNINRYFSNPQYYFHVNDQYVRNKLKVILFPFFHRGHWTRISEPVGGRLSYKPPIYDINAPDLYIPFMAFGSFIILSGFTLGFMGKSYKPAVYKGAHRMGLPAHGPERPALLNGWRRGATARPGSVWWLFIRRALARRRREAHVGVLVLRDDAVDEPVHGGVPGEDDEEGALHGDEEQREALVAAALLPPLHGDSAVPPVLLARQHRRVIHSFVRVMIFRCVVEKKQSEDGLTSLCPSILCVLEEPWMWCCIAWELLL

SEQ ID NO: 193075 - protein, 600 aa, Zea Mays
MGPSPLTHQLRKDYSHTSNCPPRRTAPRRNRVRVGPLPPKPYTPPPRRGMADPPPVAASASPAQPDQLAAAASVSTPQNPNPLLSPQIPPSPTVSDLSAHISSPQQLDQAAAAADASGGGGSMDYLPRPPQLQAPSPTQAGVGAAGFAQIPRSGSTSRLSTATQLQQYAARMYGGQMSFSGGGGLVGQQQLAGRAPMLGQGQLGMLQGQGNAASAAHFGLQSQMLAQARQKVMAQNTQLNNANTAQVLQGMQPMGVMGAMGMNQTRPNVTIPYGAQQRFAQAQMRPQASQQPALSPQKVPGQGLSRTASITALNSQLSGSSQNGQMVAMSMPQQQQQQQQWLKQMQPSMGSPLSPQQQYQNQQRLLLMQHLQQKTGLNQQQLLQIQQQHPHLNVQQLIKQQQFLKQFQQQQPLQSPRVLASGSQKSANLTGSQPGTPLSGGTMTGGSGSQGAEGTSQLLGKRKIQDLVAQVDPLGKVDPEVEDLLLEIADDFIGSVTAFACTLAKHRKSSVVEAKDVLLHLEKNWNLSIPGFSRGDKNPQRNSAKQLVDPQHSESDVTGIRGTSNKLGANNSVGNHQIRPPMAEPSAMPTMGPLSKAPRF

SEQ ID NO: 193076 - protein, 498 aa, Zea Mays
MADPPPVAASASPAQPDQLAAAASVSTPQNPNPLLSPQIPPSPTVSDLSAHISSPQQLDQAAAAADASGGGGSMDYLPRPPQLQAPSPTQAGVGAAGFAQIPRSGSTSRLSTATQLQQYAARMYGGQMSFSGGGGLVGQQQLAGRAPMLGQGQLGMLQGQGNAASAAHFGLQSQMLAQARQKVMAQNTQLNNANTAQVLQGMQPMGVMGAMGMNQTRPNVTIPYGAQQRFAQAQMRPQASQQPALSPQKVPGQGLSRTASITALNSQLSGSSQNGQMVAMSMPQQQQQQQQWLKQMQPSMGSPLSPQQQYQNQQRLLLMQHLQQKTGLNQQQLLQIQQQHPHLNVQQLIKQQQFLKQFQQQQPLQSPRVLASGSQKSANLTGSQPGTPLSGGTMTGGSGSQGAEGTSQLLGKRKIQDLVAQVDPLGKVDPEVEDLLLEIADDFIGSVTAFACTLAKHRKSSVVEAKDVLLHLEKIGIYLFLVSHGGIRILKEILQSNW

SEQ ID NO: 193077 - protein, 380 aa, Zea Mays
MKALGAHAADLLRGPHLLRAAVFAFAVALAFLVGYHWPNASPRLVFFSSDASSSSPRSSSRSPSVVLSPNSNVSFDPSLIPTPSTPPASSTPNAWSPPALPPPTSAPPPPLPPPPPPARLGIVGEDGAMQDDFDIGNVGANDTDLATDETAPQEPSDVGASGGPPRVRIERFPVCPESMREYIPCLDNEDDIKRLPSTERGERFERHCPAKDKGLSCLVPAPNGYKAPIPWPRSRDEVWFSNVPHTRLIDDKGGQNWITKVKDKFRFPGGGTQFIHGANQYLDQISQMVPNVAFGSHTRVVLDVGCGVASFGAYLLSRDVLTLSIAPKDVHENQIQFALERGVPAMAAAFATRRLLYTSQAFDIIHCSRCRINWTRDGEL

SEQ ID NO: 193078 - protein, 474 aa, Zea Mays
MKALGAHAADLLRGPHLLRAAVFAFAVALAFLVGYHWPNASPRLVFFSSDASSSSPRSSSRSPSVVLSPNSNVSFDPSLIPTPSTPPASSTPNAWSPPALPPPTSAPPPPLPPPPPPARLGIVGEDGAMQDDFDIGNVGANDTDLATDETAPQEPSDVGASGGPPRVRIERFPVCPESMREYIPCLDNEDDIKRLPSTERGERFERHCPAKDKGLSCLVPAPNGYKAPIPWPRSRDEVWFSNVPHTRLIDDKGGQNWITKVKDKFRFPGGGTQFIHGANQYLDQISQMVPNVAFGSHTRVVLDVGCGVASFGAYLLSRDVLTLSIAPKDVHENQIQFALERGVPAMAAAFATRRLLYTSQAFDIIHCSRCRINWTRDDGILLLEVNRLLRAGGYFAWAAQPVYKHEEAQQEAWKEMENLTARLCWEFVKKEGYIAMWRKPLNNSCYINRGPEGKPPLCDADDNPDDVCWSESMY

SEQ ID NO: 193079 - protein, 335 aa, Zea Mays
MKALGAHAADLLRGPHLLRAAVFAFAVALAFLVGYHWPNASPRLVFFSSDASSSSPRSSSRSPSVVLSPNSNVSFDPSLIPTPSTPPASSTPNAWSPPALPPPTSAPPPPLPPPPPPARLGIVGEDGAMQDDFDIGNVGANDTDLATDETAPQEPSDVGASGGPPRVRIERFPVCPESMREYIPCLDNEDDIKRLPSTERGERFERHCPAKDKGLSCLVPAPNGYKAPIPWPRSRDEVWFSNVPHTRLIDDKGGQNWITKVKDKFRFPGGGTQFIHGANQYLDQISQVRCQIFFKTAWNLILTLTRATCSLCSSRWYQMLHLDLILELSWMLAVE

SEQ ID NO: 193080 - protein, 475 aa, Zea Mays
MKALGAHAADLLRGPHLLRAAVFAFAVALAFLVGYHWPNASPRLVFFSSDASSSSPRSSSRSPSVVLSPNSNVSFDPSLIPTPSTPPASSTPNAWSPPALPPPTSAPPPPLPPPPPPARLGIVGEDGAMQDDFDIGNVGANDTDLATDETAPQEPSDVGASGGPPRVRIERFPVCPESMREYIPCLDNEDDIKRLPSTERGERFERHCPAKDKGLSCLVPAPNGYKAPIPWPRSRDEVWFSNVPHTRLIDDKGGQNWITKVKDKFRFPGGGTQFIHGANQYLDQISQMVPNVAFGSHTRVVLDVGCGVASFGAYLLSRDVLTLSIAPKDVHENQIQFALERGVPAMAAAFATRRLLYTSQAFDIIHCSRCRINWTRDDGILLLEVNRLLRAGGYFAWAAQPVYKHEEAQQEAWKEMENLTARLCWEFVKKEGYIAMWRKPLNNSCYINRGPEGKPPLCDADDNPDDVWYSFSLLP

SEQ ID NO: 193081 - protein, 281 aa, Zea Mays
MNCLEHIPRRKIMLCLQLSKVGERKRLNRVFDAIGFVYPDYRYPLRGQGKKRKTAASATPVEPVPKGKKVKVLTHRPHYIKPTVVPEFGVGTSSASKIKETIPTAQSTEEPTLMPKVLTVKLVETKFDKAEEPKIEEIMKMPEILSPSTEATVSKVQMGSVVTPKRRRMANVLDVVLETTKTLSHTPTRKVAEASKSQPEVDTKEAEVEAAIIQAKTEAGPSVPTEMERADPKDKSTERIATEKIEAPGPEASNKSIDYIIRHASGKVLSQEEMLEAQHYA

SEQ ID NO: 193082 - protein, 543 aa, Zea Mays
MLCFVCTPHPVNRYTPFFLYFFFANEFFHYNDRRTTGPIRRAKGGWTPEEDETLQKAVVAFKGRNWKKIAEFFQDRTEVQCLHRWQKVLNPELIKGPWTQEEDEKIIDLVGKYGPTKWSIIAKSLPGRIGKQCRERWHNHLNPEIRKDAWTPEEERALIDAHQVFGNKWAEIAKALPGRRTDNSIKNHWNSSLRKKLEAYSSVLSAPKLFVHDDFKDKMKPVATDSHLDLNQMPSVGSKDVPGRAYCTILSPPSQAYNLDSSGLFSFSIPTTQPLTSYAMSSLVDGSAVTLAAQGLQSDSVRDKGLEIDSVHEKGVEVGSTPDPAGVELESAPAKRGAELSSKIELHSILGPLCYQIPNMEDVVPISTPLRSEHNSAQKTSQHCMSPNGYTSPSATIGNVSSQLTVDSILRIAADTFPCTPSILRKRKRDKATPASGNELKTGGVTNDSFYTPNRTNGKDTTSPRSFKTAASFLSLGSVNGLLTSARSFDSSPPYQKKRSKRMAIIKSVEKQLDFSADGLDTSGSEIMNSPCHNSQGANSNRM

SEQ ID NO: 193083 - protein, 422 aa, Zea Mays
MDPILNSKNCRWHNHLNPEIRKDAWTPEEERALIDAHQVFGNKWAEIAKALPGRTDNSIKNHWNSSLRKKLEAYSSVLSAPKLFVHDDFKDKMKPVATDSHLDLNQMPSVGSKDVPGRAYCTILSPPSQAYNLDSSGLFSFSIPTTQPLTSYAMSSLVDGSAVTLAAQGLQSDSVRDKGLEIDSVHEKGVEVGSTPDPAGVELESAPAKRGAELSSKIELHSILGPLCYQIPNMEDVVPISTPLRSEHNSAQKTSQHCMSPNGYTSPSATIGNVSSQLTVDSILRIAADTFPCTPSILRKRKRDKATPASGNELKTGGVTNDSFYTPNRTNGKDTTSPRSFKTAASFLSLGSVNGLLTSARSFDSSPPYQKKRSKRMAIIKSVEKQLDFSADGLDTSGSEIMNSPCHNSQGIDLNLMKPYRT

SEQ ID NO: 193084 - protein, 547 aa, Zea Mays
MLCFVCTPHPVNRYTPFFLYFFFANEFFHYNDRRTTGPIRRAKGGWTPEEDETLQKAVVAFKGRNWKKIAEFFQDRTEVQCLHRWQKVLNPELIKGPWTQEEDEKIIDLVGKYGPTKWSIIAKSLPGRIGKQCRERWHNHLNPEIRKDAWTPEEERALIDAHQVFGNKWAEIAKALPGRTDNSIKNHWNSSLRKKLEAYSSVLSAPKLFVHDDFKDKMKPVATDSHLDLNQMPSVGSKDVPGRAYCTILSPPSQAYNLDSSGLFSFSIPTTQPLTSYAMSSLVDGSAVTLAAQGLQSDSVRDKGLEIDSVHEKGVEVGSTPDPAGVELESAPAKRGAELSSKIELHSILGPLCYQIPNMEDVVPISTPLRSEHNSAQKTSQHCMSPNGYTSPSATIGNVSSQLTVDSILRIAADTFPCTPSILRKRKRDKATPASGNELKTGGVTNDSFYTPNRTNGKDTTSPRSFKTAASFLSLGSVNGLLTSARSFDSSPPYQKKRSKRMAIIKSVEKQLDFSADGLDTSGSEIMNSPCHNSQGIDLNLMKPYRT

SEQ ID NO: 193085 - protein, 542 aa, Zea Mays
MLCFVCTPHPVNRYTPFFLYFFFANEFFHYNDRRTTGPIRRAKGGWTPEEDETLQKAVVAFKGRNWKKIAEFFQDRTEVQCLHRWQKVLNPELIKGPWTQEEDEKIIDLVGKYGPTKWSIIAKSLPGRIGKQCRERWHNHLNPEIRKDAWTPEEERALIDAHQVFGNKWAEIAKALPGRTDNSIKNHWNSSLRKKLEAYSSVLSAPKLFVHDDFKDKMKPVATDSHLDLNQMPSVGSKDVPGRAYCTILSPPSQAYNLDSSGLFSFSIPTTQPLTSYAMSSLVDGSAVTLAAQGLQSDSVRDKGLEIDSVHEKGVEVGSTPDPAGVELESAPAKRGAELSSKIELHSILGPLCYQIPNMEDVVPISTPLRSEHNSAQKTSQHCMSPNGYTSPSATIGNVSSQLTVDSILRIAADTFPCTPSILRKRKRDKATPASGNELKTGGVTNDSFYTPNRTNGKDTTSPRSFKTAASFLSLGSVNGLLTSARSFDSSPPYQKKRSKRMAIIKSVEKQLDFSADGLDTSGSEIMNSPCHNSQGANSNRM

SEQ ID NO: 193086 - protein, 452 aa, Zea Mays
MGRGLGAAPVSPRLASLGAAALALLVAAALPSPAAGAGLNATAVLSAFPNFADFARLLASTPVASELAGRSSLTLLAVPNANLPQSPSAFVAGADIADVLRYHVLLEYLSPSDLARLPPSGKLVTTLFQTTGRAPSDFGAVNLTVGPNSTVVVRSPAPSPGSSATVLGAVTAVPYNLSVLAVGGLIVPSGFDLAASESRPPPPVNITRVLTDARGFYVAASMLQASGVASEFEADERGAGITVFVPTDDAFAGLPATDRLQSLPAERKAVVLRFHVLHSYYPLGSLESIVNPVQPTLATEHTEAGHFTLNITRVNGSIAIDTGIVQASITRTVFDQNPVAVFAVSKVLLPKEMFSRGDSGSTAMVPPSVAMAPGDAGTEQTPQTRLSSPPDLHGEDSESSAALATAKGTSWWCVGLMYLHLLLSLELFVAFASMSCTLMGLIRKGCRTIACS

SEQ ID NO: 193087 - protein, 431 aa, Zea Mays
MGRGLGAAPVSPRLASLGAAALALLVAAALPSPAAGAGLNATAVLSAFPNFADFARLLASTPVASELAGRSSLTLLAVPNANLPQSPSAFVAGADIADVLRYHVLLEYLSPSDLARLPPSGKLVTTLFQTTGRAPSDFGAVNLTVGPNSTVVVRSPAPSPGSSATVLGAVTAVPYNLSVLAVGGLIVPSGFDLAASESRPPPPVNITRVLTDARGFYVAASMLQASGVASEFEADERGAGITVFVPTDDAFAGLPATDRLQSLPAERKAVVLRFHVLHSYYPLGSLESIVNPVQPTLATEHTEAGHFTLNITRVNGSIAIDTGIVQASITRTVFDQNPVAVFAVSKVLLPKEMFSRGDSGSTAMVPPSVAMAPGDAGTEQTPQTRLSSPPDLHGEDSESSAALATAKGTSWWCVGLMYLHLLLSLMAGSNQ

SEQ ID NO: 193088 - protein, 383 aa, Zea Mays
MGRGLGAAPVSPRLASLGAAALALLVAAALPSPAAGAGLNATAVLSAFPNFADFARLLASTPVASELAGRSSLTLLAVPNANLPQSPSAFVAGADIADVLRYHVLLEYLSPSDLARLPPSGKLVTTLFQTTGRAPSDFGAVNLTVGPNSTVVVRSPAPSPGSSATVLGAVTAVPYNLSVLAASGVASEFEADERGAGITVFVPTDDAFAGLPATDRLQSLPAERKAVVLRFHVLHSYYPLGSLESIVNPVQPTLATEHTEAGHFTLNITRVNGSIAIDTGIVQASITRTVFDQNPVAVFAVSKVLLPKEMFSRGDSGSTAMVPPSVAMAPGDAGTEQTPQTRLSSPPDLHGEDSESSAALATAKGTSWWCVGLMYLHLLLSLV

SEQ ID NO: 193089 - protein, 342 aa, Zea Mays
MDMEIPQQQAAHGQDESGPAAPPLSPASAAAAARWNPTKEQVAVLEGLYEHGLRSPSAEQIQQIADRLREHGHGHGAIEGKSVFYWFQNHRARLRQQRQKQESFAYFTRLLRRPPPLPVLSMPPAPPYRHGRVPSPATITMPAPPPPTPAACYNSGGSRVMYMNPFYMTVPQLPPANAAAYYYPQQQQQQQVTVMYQQYPRMEVGQDKTTTPPAATFQQAAAAPRGAASTTPPQVLHSPSPPAINNGARGPADQRVGRPSRDRDLETLQLFPLQPTFAQLRRDKGNAAAGSSASSLTSTAVAASASVVSEDAENLESAESNGGEAPALPFYDFFGLQSAAGR

SEQ ID NO: 193090 - protein, 164 aa, Zea Mays
MATTTTQASLLLQKQLRDLAKHPVDGFSAGLVDDSNVFEWQVTIIGPPDTLYDGGYFNAIMSFPQNYPNSPPSVRFTSEMWHPNVYPDGRVCISILHPPGEDPNGYELASERWTPVHTVESIVLSIISMLSSPNDESPANIEAAPPRLPAAARQLLRRRESELA

SEQ ID NO: 193091 - protein, 53 aa, Zea Mays
MGVLAKLTMPSQAAGFCCQPQSAHLTPASCVFSIYRLFIGDNCLQKCIGTWSA

SEQ ID NO: 193092 - protein, 392 aa, Zea Mays
MAVVVAGSRARAEQARRQWREQEPRSPEMAAPPPRSTMPRPARAAAVVYYLARNGHLEHPHFMEVALSCPDGLHLRDVMDRLDALRGKGMARMYSWASKRSYRNGFVWHDLAEDDYIHPVVAREYVLKGTERLHPALLDAAAASSSSSAGSQETPTTSSSARWEAHRMTMKGACGGADLGEYVAAYMGEERGADAATQTEDDGRGRQRRVQSPAAQEELSRAETSPPTASTSPEALAKADGRAVLEGAVSGSGRARASSVLMQLISCGSVSVRDARASPVMPRAHHHHRPPRPPAVEAPSYRRAKLVVEDKEYFSGSIVETATKRSPADGVTSRDDLAVLRRSASYNAESSRMIKLELAKEAGDMHGRCIPRKAQAQGRRRIPGHLLQRAGE

SEQ ID NO: 193093 - protein, 62 aa, Zea Mays
MDIEWTQAAKIADNLSTHIRAYNRSDILRNRNNYFKNLQQNILYQFTSNCIQLNQNKQMIFI

SEQ ID NO: 193094 - protein, 257 aa, Zea Mays
MGLAAAARAVLLLLAVAGVLLRPAAAEIKQESFKDDSRGSILFEKFGFGPHGMVSISVTGAKASSALAKPDPAQLGFFLLSDESLFEAIYDQPAPTDLNPNPESSPTCVLSSPYVKPLFTFAELDDKGFHNQTFPITHPDEYSLFFANCAPETSVTMEVRTDMYNTNLDGTKDYLSVGMASVPAIYAFFAVCYVVFLAGWLYVTLYRNRLSAQRIHHLMSGLLVARMLYCISAAEDQHYIRTAGTPHGTRRRKCSCW

SEQ ID NO: 193095 - protein, 54 aa, Zea Mays
MRRPTGGLCRLCFCSSSSSFKKERVAVRFCSVLSPSAGLLLTFFSRLSWLAGSY

SEQ ID NO: 193096 - protein, 70 aa, Zea Mays
MQAAAKAKTRNGSSEHPARTSSQGSNKAGRTARMAESPTGLSPKVDRRTAVSAEREDCRLQRSSVLRCLG

SEQ ID NO: 193097 - protein, 118 aa, Zea Mays
MALHANTTGIHYPWQTCSNVIGSYWADSPRSMLPIYQELIAAGIKIWVFSSNTDDVIPVTATRYSIDALKLPTAGGWNQVYKGQTLVTIAGAGHEVPLHRPRQALIMFRHFLQNKPMP

SEQ ID NO: 193098 - protein, 171 aa, Zea Mays
MECISSDKDVEGKQKVNHVTVFERPGLHEFLRKTSEFADLILFTAGLEGYARPLVDRIDVHNRFRIRLYRPSTVTTEYREHVKDLTRVSKDFGRIVIVDNNPFSFILQPLNGIPCVPFSAGQHSDDQLMTVIFPLLKHLSLQKDVRPVLRERFHMPEWFQNHGIPQISQAV

SEQ ID NO: 193099 - protein, 301 aa, Zea Mays
MAATEVYSPTTAAAAQQQRGKAASQAWRAVVGWIGFFLQVLLQILRGTPSCAQLLSFVGFRYPLLSGPAASEPLPEVAFMPLHSEIPADAAPAPKPASEPLGRLTVVLDLDETLVSAYESSSLPAIVRTQAVEAGLHCFDMECISSDKDVEGKQKVNHVTVFERPGLHEFLRKTSEFADLILFTAGLEGYARPLVDRIDVHNRFRIRLYRPSTVTTEYREHVKDLTRVSKDFGRIVIVDNNPFSFILQPLNGIPCVPFSAGQHSDDQHLSLQKDVRPVLRERFHMPEWFQNHGIPQISQAV

SEQ ID NO: 193100 - protein, 598 aa, Zea Mays
MEFGTARQYDTTDLFFQEDWLYDDHLFPSKLDDEDDEREEEDKFVLDAHGGASAQTEIGKLGAGHNHRHEHIGGDRCEGCAEVYTCSSPLCGCCGGGLKNDGLHVARSSSSTVYGRYQIMDDRTETMDDCAQDGFQLKQSGDIMFECGMQRDPGRGDDDSDLSVVEKELQMLSSFDTDAVTNHGVHDFTDNGDLNGICDKNPKISIDKEYLKGHRIQPFPEIGDPDEAYEFRNVGSLNADVQHSTALEAEEDAETNIDLALSDFHREYEVFELRIIHRKNRTGFEENKDFPIVLNSVVAGRYCITEYLGSAAFSKVVQAHDLQTGMDVCLKIIKNDKDFFDQSLDEIKLLKFVNKYDPLDEHHVLRLYDYFYHQEHLFIVTELLRANLYEFQKYNQESGGEVYFTLPRIQVIARQCLEALVYLHHLRIIHCDLKPENILIKSYSRCEIKVIDLGSSCFLTDNLCLYVQSRSYRAPEVILGLPYDQRIDIWSLGCIISELYTGEVLFPNEPVSMMLAQMIGIIGPVDMEMLELGQETQKYFTDDYDLFTKNEIVRLNEYSLIAKSILHELLLIVSFAFIKFISYQLPLGSYLFPTVCYK

SEQ ID NO: 193101 - protein, 621 aa, Zea Mays
MAAPGLDQVMAFLTDHGFAGAASALRDDVLARTAAGDEGHDAALGPRLPPLRMPAAGTGSGSGAGSGTPAPASPGSSSGSASSSAFVSMRSTPSGLLNPYGLWSPRHSQSDVSSSEMEFGTARQYDTTDLFFQEDWLYDDHLFPSKLDDEDDEREEEDKFVLDAHGGASAQTEIGKLGAGHNHRHEHIGGDRCEGCAEVYTCSSPLCGCCGGGLKNDGLHVARSSSSTVYGRYQIMDDRTETMDDCAQDGFQLKQSGDIMFECGMQRDPGRGDDDSDLSVVEKELQMLSSFDTDAVTNHGVHDFTDNGDLNGICDKNPKISIDKEYLKGHRIQPFPEIGDPDEAYEFRNVGSLNADVQHSTALEAEEDAETNIDLALSDFHREYEVFELRIIHRKNRTGFEENKDFPIVLNSVVAGRYCITEYLGSAAFSKVVQAHDLQTGMDVCLKIIKNDKDFFDQSLDEIKLLKFVNKYDPLDEHHVLRLYDYFYHQEHLFIVTELLRANLYEFQKYNQESGGEVYFTLPRIQVLFPNEPVSMMLAQMIGIIGPVDMEMLELGQETQKYFTDDYDLFTKNEIVRLNEYSLIAKSILHELLLIVSFAFIKFISYQLPLGSYLFPTVCYK

SEQ ID NO: 193102 - protein, 632 aa, Zea Mays
MAAPGLDQVMAFLTDHGFAGAASALRDDVLARTAAGDEGHDAALGPRLPPLRMPAAGTGSGSGAGSGTPAPASPGSSSGSASSSAFVSMRSTPSGLLNPYGLWSPRHSQSDVSSSEMEFGTARQYDTTDLFFQEDWLYDDHLFPSKLDDEDDEREEEDKFVLDAHGGASAQTEIGKLGAGHNHRHEHIGGDRCEGCAEVYTCSSPLCGCCGGGLKNDGLHVARSSSSTVYGRYQIMDDRTETMDDCAQDGFQLKQSGDIMFECGMQRDPGRGDDDSDLSVVEKELQMLSSFDTDAVTNHGVHDFTDNGDLNGICDKNPKISIDKEYLKGHRIQPFPEIGDPDEAYEFRNVGSLNADVQHSTALEAEEDAETNIDLALSDFHREYEVFELRIIHRKNRTGFEENKDFPIVLNSVVAGRYCITEYLGSAAFSKVVQAHDLQTGMDVCLKIIKNDKDFFDQSLDEIKLLKFVNKYDPLDEHHVLRLYDYFYHQEHLFIVTELLRANLYEFQKYNQESGGEVYFTLPRIQVIARQCLEALVYLHHLRIIHCDLKPENILIKSYSRCEIKVIDLGSSCFLTDNLCLYVQSRSYRAPEVILGLPYDQRIDIWSLGCIISELYTGEVSMFYLLEMLGGL

SEQ ID NO: 193103 - protein, 226 aa, Zea Mays
MDRVQLVLLGLPILLFCSDVVTLFAPLPPPGPGPDRGPHAFQPGAESSSAADASAHVEPQVDGTGSGTTVDFKFCASCSYRGTAMTMKRMLETSFPGIHVVLENYPPPFPKRALSKAVPLLQFGAMATLMAGDQIFPRFGMVPPPWYYSLRANRFGTMASIWLFGNFAHSFLQSSGAFEVYCNGQLVGSCEHLVLLQCCSQVLLLLFATLYFFRNHFISCRMFSGH

SEQ ID NO: 193104 - protein, 175 aa, Zea Mays
MDRVQLVLLGLPILLFCSDVVTLFAPLPPPGPGPDRGPHAFQPGAESSSAADASAHVEPQVDGTGSGTTVDFKFCASCSYRGTAMTMKRMLETSFPGIHVVLENYPPPFPKRALSKAVPLLQFGAMATLMAGDQIFPRFGMVPPPWFSPNCLSRGFLVNLSYRSSLAVGYRILRL

SEQ ID NO: 193105 - protein, 167 aa, Zea Mays
MDRVQLVLLGLPILLFCSDVVTLFAPLPPPGPGPDRGPHAFQPGAESSSAADASAHVEPQVDGTGSGTTVDFKFCASCSYRGTAMTMKRMLETSFPGIHVVLENYPPPFPKRALSKAVPLLQFGAMATLMAGDQIFPRFSPNCLSRGFLVNLSYRSSLAVGYRILRL

SEQ ID NO: 193106 - protein, 138 aa, Zea Mays
MLFWPLFSSGWYTPFLAALAPGVNIIRMLLLGLGLMKNEAMVKSMSRSGDYRELLKGPLYYAATITFATSLLWRTSPVAIALICNLCAGDGIADVVGRRLGKEKLPYNPNKSYAGSIAMAVAGFLASVYALLPHFRFY

SEQ ID NO: 193107 - protein, 510 aa, Zea Mays
MASSSSLFSPCALTAKLGIGHASYGSGRRANLRRRGRLSVVAVQTGPQKPSPSSSQAAAAEDEADALQKLLKREYKYGFVSDFESFSIPKGLSEATVRRISELKAEPAWMLDFRLAAYRRFLTMVEPTWSDNEYAPVDLQSICYYSAPKTKPKLNSLDEVDPELLKTFDRLGIPLTEQKRLSNVAVDAVIDSTSIATTHREALMAKGVIFCSISEAIREYPDLIRRYLGSVVPPGDNYYAALNSAVFSDGSFCFVPKDTVCPMEISTYFRINDKETGQFERTLIVADERSTVSYLEGCTAPAYDSNQLHAAVVELVCEEGAEIKYSTVQNWYSGDEEGKGGIYNFVTKRGRCKGHGSKISWTQVETGSAITWKYPSVELIGDDSVGEFYSVALTKDCQQADTGTKMIHKGKNSRSRIISKGISAGKSRNCYRGLVLMNPSAENAYNSSQCDSLLIGDNAAANTYPTIQHEADGGATGPHLRSTLRWDLLVQRCRCHRFLPARSTSLYDSL

SEQ ID NO: 193108 - protein, 518 aa, Zea Mays
MAAAEAASSAPAPEHLLEVEDDEVMIDFKPNAKCRADLRLRSLHPSLPVAFKVQTSSPLKFLVSPPRGAVPPLSSASLRVVLRPQPHAPPSFPRSRADRFLVLSSLSAARLDSVGSSNDGGGGGGGVRAVRLRVFFGGPYLLRLAADAGDAAAVRLILRRQPHLLPFLEHQQAAAAPDAGEQQWAPLHAAAARGDCGELRRLGPEALAARDREGRTVLHAVAAAGEAEAVAVLVDMGADTSAVDARGRTPLDVARDKGYQEVVDVLERWELVMTAARRGDLGSLESLLSKRAGVRGRDQYGLTALHLAAIKGHGDAIALLAGPGCMDVECEDVEGHRPLHLAVEGGHAEAVELLLDMGADANARTRRGATPLQMAEAMGYEAIAQLLCARGAEVAAASALCAASSSSSSISINYFKDQLVRRFSKKRKPYQRNIFMEFVTKTQRMTWRESERQGLHTCMPDQAQKKTIPIQVPQLFSVSGGVCQATFIQRSACSSRMGPEAQNSLEIGVGHKFPTIRD

SEQ ID NO: 193109 - protein, 426 aa, Zea Mays
MAAAEAASSAPAPEHLLEVEDDEVMIDFKPNAKCRADLRLRSLHPSLPVAFKVQTSSPLKFLVSPPRGAVPPLSSASLRVVLRPQPHAPPSFPRSRADRFLVLSSLSAARLDSVGSSNDGGGGGGGVRAVRLRVFFGGPYLLRLAADAGDAAAVRLILRRQPHLLPFLEHQQAAAAPDAGEQQWAPLHAAAARGDCGELRRLGPEALAARDREGRTVLHAVAAAGEAEAVAVLVDMGADTSAVDARGRTPLDVARDKGYCNGGGVVNFCPVQQEVVDVLERWELVMTAARRGDLGSLESLLSKRAGVRGRDQYGLTALHLAAIKGHGDAIALLAGPGCMDVECEDVEGHRPLHLAVEGGHAEAVELLLDMGADANARTRRGATPLQMAEAMGYEAIAQLLCARGAEVAAASALCAASSSSSSISCA

SEQ ID NO: 193110 - protein, 119 aa, Zea Mays
MDKGSRRNKRICKKQQLKYDVHIQVLLSDILTKTAGRSVAVRWRLDAPPSPSPHEASWQLPVPPHCHGMGAWQHPLHLSSTAIWSCRVHVETAHRSRWVDLSVLLTRIACPTSRVLYYL

SEQ ID NO: 193111 - protein, 75 aa, Zea Mays
MQKAAVEVRCSYTGEFELLLCSVKIATPLRIMRPAYRLTGPHSPLPKGHISMDFSGNWYLQQWIESCTSYRRTKY

SEQ ID NO: 193112 - protein, 58 aa, Zea Mays
MTPCNGSNLARATGVQSTKKKELASPEALSASEISLLECGTKEVQNVDDSSNQSNDLT

SEQ ID NO: 193113 - protein, 201 aa, Zea Mays
MTPPARTSGKRADAGASAGAIDEPLLPESSAGGRHGGGASVSGAVFNVSTSIVGAGIMSIPAAMRVLGVVPAALLIAAVAALADVSVEFMLRYTGRGWGGGGKDEAATSYAGTMGDAFGRAGAALLNVFVALTTTGTLVVYLIIIGDVMSGSVGGGDEHAGVLQELFGARWWTGRQFVLLVTAVFVLLPLVLRRRVGMFME

SEQ ID NO: 193114 - protein, 106 aa, Zea Mays
MPQSTRLGHPPHLSCCQKLPTLPSSPSRHQSSHLALPNPSADATATSPNLFSLPPHINGSTPADFFFFNFSHNRSHERKARQTQKQHPLSSAFSQHRCSSRARGRG

SEQ ID NO: 193115 - protein, 140 aa, Zea Mays
MIQQCTYKKKRRETTITVNTSIAASSTLSIGKKKINQPHIACPISPQLSQTNSSMYRTYDLSLQEKKSHANHHKHSNHLLHATAIHAVFSPIISVASQQRRAGSRHRSDKAVKSSHLGRRKRNRQSSPNGSIHPDQPRKR

SEQ ID NO: 193116 - protein, 173 aa, Zea Mays
MALQRVAGNFHISVHGLNIFVAEKIFEGSNHVNVSHVIHELSFGPKYPGIHNPLDETSRILHDTSGTFKYYIKVVPTEYKYLSKKVLPTNQFSVTEYFLPIRPTDRAWPAVYFLYDLSPITVTIKEERRNFLHFVTRLCAVLGGTFAMTGMLDRWMYQLIKTVTNSKTRSVLR

SEQ ID NO: 193117 - protein, 245 aa, Zea Mays
MRARYMSYEVGDDRNGEIKPEEAQEIWKVMLEQFKAEALRMQALSMQAYDVYSERTREVLLEASEKLKIQADKAQKDLSVVATEIGQEGQEYLMMAARNSPDSIKDITTTFRALGKLNWPSEYEDYHVGIPFGTFLTVGGFLNFMLAGSTSALRFGIILGLALLALGISSLRSQRDGGRRPRLLVKGQAAIASVIFFREFSVLLQNGWFPKIFMVLLSGVVAGFYFYRIAAGSPKELSSNSDSVN

SEQ ID NO: 193118 - protein, 279 aa, Zea Mays
MIFATKYGKEFVAAASELMPDCRVNRQAGQLHLVKPYMVAVQSNNVSAVNEALNELYVEDEDYERLRESVDMHDNFDQIGLAQKLEKHELLEMRRIAAYIYKKAGRWKQSIALSKKDNMYKDCMETCSQSGDRELSEDLLVYFIKQGKKECFASCLFICYDLIRPDVALELAWMNNMVDFAFPYLLQFIREYTSKVDDLVKDKIESQKEERAKEKEEKDLATQQNMYAQLLPLALPAPPMPGMGGPPPPMGGMGMPPMAGMGMPPMGPGPMPAFGMGGY

SEQ ID NO: 193119 - protein, 262 aa, Zea Mays
MKEIAEEHIPAGQLHLVKPYMVAVQSNNVSAVNEALNELYVEDEDYERLRESVDMHDNFDQIGLAQKLEKHELLEMRRIAAYIYKKAGRWKQSIALSKKDNMYKDCMETCSQSGDRELSEDLLVYFIKQGKKECFASCLFICYDLIRPDVALELAWMNNMVDFAFPYLLQFIREYTSKVDDLVKDKIESQKEERAKEKEEKDLATQQNMYAQLLPLALPAPPMPGMGGPPPPMGGMGMPPMAGMGMPPMGPGPMPAFGMGGY

SEQ ID NO: 193120 - protein, 137 aa, Zea Mays
MEGGSPAIHHSKRCVPKRSLVHGVVGVLSPRQPAQPLAGAISSEAAQVHHYDSVGGFRLAVRLGMKSGRHVKLSTHKPHELLPERRGEYGVAVGDDGLRNTVEAHNVGEECLCHRLCRVRVREWNEVAVLAEAVNHG

SEQ ID NO: 193121 - protein, 823 aa, Zea Mays
MFKFLKEVVAGSGSGLKDFPYTIGEPYASAWGSWKHHRGTSKDDGSPVSIFSLSGSNPQDRHMVAGRNGVKRLRTVRHPNILSFLHSTEAEAADGPAMKYTIYIVTEPVMPLSEKLKELNLGGTQRDEYFAWGLHQISKAVSFLNNDCKLVHGNVCLASVVVTQTLDWKLHAFDVLSEFDANNEASGSPMLQFEWLVGTQYKPMELSKSDWASIRKSPPWAIDSWGLGCLIYELFSGAKLARTEDLRNTASIPKSLLPDYQRLLNSTPSRRLNPSKLIDNSEFFQNKLVETIQFMEILNLKDTFEKDSFFRKLPNIAEQLPREIVLKKLLPVLASSLEFGSAAAPALTVLLKMGSWLPADQFNIKVLPTIVKLFASNDRAIRACLLHHINQFGESMSAQIVDEQVFPHVATGFSDTDGTIRELTLKSMLVLAPKLSQRTISGSLLKYLSKLQVDEEPGIRTNTTILLGNIAGYMNDGTRKRVLINAFTVRALRDTFPPARAAGIMALSVTSSYYEMTEIATRILPNIVVLTFDPNSDVRTKAFQATDQFLQIAKQHHEKLNTGDNSVAESTGVKLKPGNAGLLGWAMSSVTQKGKPFDHAPISTANANNSQASTTSTATPDTQASTLAYAPSTSTSLDQAASASARSSVDGWGELEDGNIHEENSSDKDGWDDVDPFEDKPSPSLLSNIQAAQKRPVVQPKQPVANSSKPNPLKAPKSEDDPLWGPIAAAPPKSAVKSADIKPSTSHNDEDDLWGSIAAPPKSSGKPLKPAVANSDDLWGAIAAPPPATKARPLASSGRGRGTKPAQPKLGAQRIGRTSSTGM

SEQ ID NO: 193122 - protein, 496 aa, Zea Mays
MFKFLKEVVAGSGSGLKDFPYTIGEPYASAWGSWKHHRGTSKDDGSPVSIFSLSGSNPQDRHMVAGRNGVKRLRTVRHPNILSFLHSTEAEAADGPAMKYTIYIVTEPVMPLSEKLKELNLGGTQRDEYFAWGLHQISKAVSFLNNDCKLVHGNVCLASVVVTQTLDWKLHAFDVLSEFDANNEASGSPMLQFEWLVGTQYKPMELSKSDWASIRKSPPWAIDSWGLGCLIYELFSGAKLARTEDLRNTASIPKSLLPDYQRLLNSTPSRRLNPSKLIDNSEFFQNKLVETIQFMEILNLKDTFEKDSFFRKLPNIAEQLPREIVLKKLLPVLASSLEFGSAAAPALTVLLKMGSWLPADQFNIKVLPTIVKLFASNDRAIRACLLHHINQFGESMSAQIVDEQVFPHVATGFSDTDGTIRELTLKSMLVLAPKMQERAHTHNNLPWHALMEYFWDFRSSIPHALISISCQKLYLQMTDCLVRYCSYLSVQSQDLS

SEQ ID NO: 193123 - protein, 836 aa, Zea Mays
MFKFLKEVVAGSGSGLKDFPYTIGEPYASAWGSWKHHRGTSKDDGSPVSIFSLSGSNPQDRHMVAGRNGVKRLRTVRHPNILSFLHSTEAEAADGPAMKYTIYIVTEPVMPLSEKLKELNLGGTQRDEYFAWGLHQISKAVSFLNNDCKLVHGNVCLASVVVTQTLDWKLHAFDVLSEFDANNEASGSPMLQFEWLVGTQYKPMELSKSDWASIRKSPPWAIDSWGLGCLIYELFSGAKLARTEDLRNTASIPKSLLPDYQRLLNSTPSRRLNPSKLIDNSEFFQNKLVETIQFMEILNLKDTFEKDSFFRKLPNIAEQLPREIVLKKLLPVLASSLEFGSAAAPALTVLLKMGSWLPADQFNIKVLPTIVKLFASNDRAIRACLLHHINQFGESMSAQIVDEQVFPHVATGFSDTDGTIRELTLKSMLVLAPKLSQRTISGSLLKYLSKLQVDEEPGIRTNTTILLGNIAGYMNDGTRKRVLINAFTVRALRDTFPPARAAGIMALSVTSSYYEMTEIATRILPNIVVLTFDPNSDVRTKAFQATDQFLQIAKQHHEKIQGFWYFSWFRSQLNTGDNSVAESTGVKLKPGNAGLLGWAMSSVTQKGKPFDHAPISTANANNSQASTTSTATPDTQASTLAYAPSTSTSLDQAASASARSSVDGWGELEDGNIHEENSSDKDGWDDVDPFEDKPSPSLLSNIQAAQKRPVVQPKQPVANSSKPNPLKAPKSEDDPLWGPIAAAPPKSAVKSADIKPSTSHNDEDDLWGSIAAPPKSSGKPLKPAVANSDDLWGAIAAPPPATKARPLASSGRGRGTKPAQPKLGAQRIGRTSSTGM

SEQ ID NO: 193124 - protein, 542 aa, Zea Mays
MEILNLKDTFEKDSFFRKLPNIAEQLPREIVLKKLLPVLASSLEFGSAAAPALTVLLKMGSWLPADQFNIKVLPTIVKLFASNDRAIRACLLHHINQFGESMSAQIVDEQVFPHVATGFSDTDGTIRELTLKSMLVLAPKLSQRTISGSLLKYLSKLQVDEEPGIRTNTTILLGNIAGYMNDGTRKRVLINAFTVRALRDTFPPARAAGIMALSVTSSYYEMTEIATRILPNIVVLTFDPNSDVRTKAFQATDQFLQIAKQHHEKIQGFWYFSWFRSQLNTGDNSVAESTGVKLKPGNAGLLGWAMSSVTQKGKPFDHAPISTANANNSQASTTSTATPDTQASTLAYAPSTSTSLDQAASASARSSVDGWGELEDGNIHEENSSDKDGWDDVDPFEDKPSPSLLSNIQAAQKRPVVQPKQPVANSSKPNPLKAPKSEDDPLWGPIAAAPPKSAVKSADIKPSTSHNDEDDLWGSIAAPPKSSGKPLKPAVANSDDLWGAIAAPPPATKARPLASSGRGRGTKPAQPKLGAQRIGRTSSTGM

SEQ ID NO: 193125 - protein, 840 aa, Zea Mays
MFKFLKEVVAGSGSGLKDFPYTIGEPYASAWGSWKHHRGTSKDDGSPVSIFSLSGSNPQDRHMVAGRNGVKRLRTVRHPNILSFLHSTEAEAADGPAMKYTIYIVTEPVMPLSEKLKELNLGGTQRDEYFAWGLHQISKAVSFLNNDCKLVHGNVCLASVVVTQTLDWKLHAFDVLSEFDANNEASGSPMLQFEWLVGTQYKPMELSKSDWASIRKSPPWAIDSWGLGCLIYELFSGAKLARTEDLRNTASIPKSLLPDYQRLLNSTPSRRLNPSKLIDNSEFFQNKLVETIQFMEILNLKDTFEKDSFFRKLPNIAEQLPREIVLKKLLPVLASSLEFGSAAAPALTVLLKMGSWLPADQFNIKVLPTIVKLFASNDRAIRACLLHHINQFGESMSAQIVDEQVFPHVATGFSDTDGTIRELTLKSMLVLAPKLSQRTISGSLLKYLSKLQVDEEPGIRTNTTILLGNIAGYMNDGTRKRVLINAFTVRALRDTFPPARAAGIMALSVTSSYYEMTEIATRILPNIVVLTFDPNSDVRTKAFQATDQFLQIAKQHHEKLNTGDNSVAESTGVKLKPGNAGLLGWAMSSVTQKGKPFDHAPISTANANNSQASTTSTATPVLFTLKDLQLSISIRLPDTQASTLAYAPSTSTSLDQAASASARSSVDGWGELEDGNIHEENSSDKDGWDDVDPFEDKPSPSLLSNIQAAQKRPVVQPKQPVANSSKPNPLKAPKSEDDPLWGPIAAAPPKSAVKSADIKPSTSHNDEDDLWGSIAAPPKSSGKPLKPAVANSDDLWGAIAAPPPATKARPLASSGRGRGTKPAQPKLGAQRIGRTSSTGM

SEQ ID NO: 193126 - protein, 378 aa, Zea Mays
MFKFLKEVVAGSGSGLKDFPYTIGEPYASAWGSWKHHRGTSKDDGSPVSIFSLSGSNPQDRHMVAGRNGVKRLRTVRHPNILSFLHSTEAEAADGPAMKYTIYIVTEPVMPLSEKLKELNLGGTQRDEYFAWGLHQISKAVSFLNNDCKLVHGNVCLASVVVTQTLDWKLHAFDVLSEFDANNEASGSPMLQFEWLVGTQYKPMELSKSDWASIRKSPPWAIDSWGLGCLIYELFSGAKLARTEDLRNTASIPKSLLPDYQRLLNSTPSRRLNPSKLIDNSEFFQNKLVETIQFMEILNLKDTFEKDSFFRKLPNIAEQLPREIVLKKLLPVLASSLEFGSAAAPALTVLLKMGSWLPADQFNIKPLASLILMVLFVN

SEQ ID NO: 193127 - protein, 556 aa, Zea Mays
MEILNLKDTFEKDSFFRKLPNIAEQLPREIVLKKLLPVLASSLEFGSAAAPALTVLLKMGSWLPADQFNIKVLPTIVKLFASNDRAIRACLLHHINQFGESMSAQIVDEQVFPHVATGFSDTDGTIRELTLKSMLVLAPKERAHTHNNLPWHALMEYFWDFRSSIPHALISISCQKLYLQMTDCLVDEEPGIRTNTTILLGNIAGYMNDGTRKRVLINAFTVRALRDTFPPARAAGIMALSVTSSYYEMTEIATRILPNIVVLTFDPNSDVRTKAFQATDQFLQIAKQHHEKLNTGDNSVAESTGVKLKPGNAGLLGWAMSSVTQKGKPFDHAPISTANANNSQASTTSTATPDTQASTLAYAPSTSTSLDQAASASARSSVDGWGELEDGNIHEENSSDKDGWDDVDPFEDKPSPSLLSNIQAAQKRPVVQPKQPVANSSKPNPLKAPKSEDDPLWGPIAAAPPKSAVKSADIKPSTSHNDEDDLWGSIAAPPKSSGKPLKPAVANSDDLWGAIAAPPPATKARPLASSGRGRGTKPAQPKLGAQRIGRTSSTGM

SEQ ID NO: 193128 - protein, 237 aa, Zea Mays
MSSVTQKGKPFDHAPISTANANNSQASTTSTATPDTQASTLAYAPSTSTSLDQAASASARSSVDGWGELEDGNIHEENSSDKDGWDDVDPFEDKPSPSLLSNIQAAQKRPVVQPKQPVANSSKPNPLKAPKSEDDPLWGPIAAAPPKSAVKSADIKPSTSHNDEDDLWGSIAAPPKSSGKPLKPAVANSDDLWGAIAAPPPATKARPLASSGRGRGTKPAQPKLGAQRIGRTSSTGM

SEQ ID NO: 193129 - protein, 98 aa, Zea Mays
MITAVRLESTAIYDVVMFFGARGLYLGLIRAAGSPGEQRTFIAGHRSPQNRATSGAACLAYRLEREVACHLKGKLVPGISSARQVVPLITSFTHSCSN

SEQ ID NO: 193130 - protein, 1505 aa, Zea Mays
MDQISLFWTNLCTNYTSPAPITTSGAATSARGVADSMSMKRSAASMLSGKKPVQAAAATKKSGPSKSTAAKKTDGGSQSKASAALEIEDVEPAEMSFEEIEERLKSVVKAETISQLKSSVWKERLEAIGVLKQEVENLTELDKSAELLIRLLCAVPGWSEKNVQVLTVLVQQQVIEVNTYIASTVNKFPKRCVVLCLLGVSERVADIKTRTSAMKCLTAFCEAVGPGFVFERLYKIMKEHKNPKVLSEGILWMVSAVEDFGISNLKLKDMIDFCKDTGLQSSAAVTRNATIKLIGMLHKFVGPDIKGFLSDVKPALLSALDTEYEKNPFEGAAAAAPKRTVRVLDTASSVSAGLFDGLPREDISAKITPTLLKNLGSPDWKVRLESIDAVTKIVEEANKRIQPTGTADLFSALRGRLYDSNKNLVMATLSTIGGLAYAMGPSVEKSSKGILADVLKCLGDNKKHMRECTLTALDSWIAAAQLDKMVPYIIVSLGDQKTGSEGRKDLFDWLSKHVSKMSDPSEALPLLKPSASSLMDKSSEVRKAAESFMNEILRICGQEVVGRNLKDLPSPTLAIVSERLKLSTVHEGFSESVKMVTTSMSLPSKAGLKNNKHGLNDRGSNVGKLVSQRGLPARASVTMVSTQDPAQSQALFNIKDSNKEERERRVLVRKFKFEEPRREQIDELKIDLFKHFREDVSLRLWNSDFKRQIDGIELLQKALPSSWKEVIELLDILLRWFVLRFCESNTTCLLKVLDFLPELFDILKDQSYMLTEAEAAIFLPCLIEKSGHNIEKVREKMGELIKQMINIYSLPKLIPYILEGLRSKNNRTRIECVDIVGYFIDHHGTEVGGLMKNLPSVAALTAERDGEIRKAALNTLATAYKNLGDDVWRYVGKLSDAQRSMLDDRFKWKAREMDKRREGRPGDARAALRRSVRENGSDIAEQSGEVVSRPVAGSMISRDFGYADAHMDRHMVPRQIPSTSGPVDWREALEIVALGLPEQSVEGMKVICHELTQAADPESTLLEDLIKEADRLVSCLAVMVPKTFNFSLSGASSRSCKYVLNTLMQTFQIKRLAHAVKEGTLDNLITELLLWLLDERVPLMDDGSQLLKALNVLMLKILDNAERTSSFVVLINLLRPLDPSRWPSPTPTESLAVKNQKFSDLVVKCLIKLTKVLQSTIYEVDLDRILQSIHIYLQELGMEEIRRRAGADDKPLRMVKTVLHELVKLRGTAIKGHLSMVPIDAEPQPIILAYIDLNLQTLAAARMLTPSGPMGQTHWGDAASNNPNPSTHSADAQLKQELAAIFKKIGDKQTCTIGLYELYRITQLYPKVDIFAQLQNASEAFRTYIRDGLAQVEKNAAAGRMPSSLPLSTPPPIAAIPNPKFAPSPVHTKSIGKTDYNEDNASGETQPFRGQGAITDQQTDRYHTSGTLDALRERMKSIQAAAIGHFDGAQARPLASMNGSNMVHGGTRLDGEPQQRSNIPPMDERALSGLQARMERLKSGSMELQ

SEQ ID NO: 193131 - protein, 1292 aa, Zea Mays
MKCLTAFCEAVGPGFVFERLYKIMKEHKNPKVLSEGILWMVSAVEDFGISNLKLKDMIDFCKDTGLQSSAAVTRNATIKLIGMLHKFVGPDIKGFLSDVKPALLSALDTEYEKNPFEGAAAAAPKRTVRVLDTASSVSAGLFDGLPREDISAKITPTLLKNLGSPDWKVRLESIDAVTKIVEEANKRIQPTGTADLFSALRGRLYDSNKNLVMATLSTIGGLAYAMGPSVEKSSKGILADVLKCLGDNKKHMRECTLTALDSWIAAAQLDKMVPYIIVSLGDQKTGSEGRKDLFDWLSKHVSKMSDPSEALPLLKPSASSLMDKSSEVRKAAESFMNEILRICGQEVVGRNLKDLPSPTLAIVSERLKLSTVHEGFSESVKMVTTSMSLPSKAGLKNNKHGLNDRGSNVGKLVSQRGLPARASVTMVSTQDPAQSQALFNIKDSNKEERERRVLVRKFKFEEPRREQIDELKIDLFKHFREDVSLRLWNSDFKRQIDGIELLQKALPSSWKEVIELLDILLRWFVLRFCESNTTCLLKVLDFLPELFDILKDQSYMLTEAEAAIFLPCLIEKSGHNIEKVREKMGELIKQMINIYSLPKLIPYILEGLRSKNNRTRIECVDIVGYFIDHHGTEVGGLMKNLPSVAALTAERDGEIRKAALNTLATAYKNLGDDVWRYVGKLSDAQRSMLDDRFKWKAREMDKRREGRPGDARAALRRSVRENGSDIAEQSGEVVSRPVAGSMISRDFGYADAHMDRHMVPRQIPSTSGPVDWREALEIVALGLPEQSVEGMKVICHELTQAADPESTLLEDLIKEADRLVSCLAVMVPKTFNFSLSGASSRSCKYVLNTLMQTFQIKRLAHAVKEGTLDNLITELLLWLLDERVPLMDDGSQLLKALNVLMLKILDNAERTSSFVVLINLLRPLDPSRWPSPTPTESLAVKNQKFSDLVVKCLIKLTKVLQSTIYEVDLDRILQSIHIYLQELGMEEIRRRAGADDKPLRMVKTVLHELVKLRGTAIKGHLSMVPIDAEPQPIILAYIDLNLQTLAAARMLTPSGPMGQTHWGDAASNNPNPSTHSADAQLKQELAAIFKKIGDKQTCTIGLYELYRITQLYPKVDIFAQLQNASEAFRTYIRDGLAQVEKNAAAGRMPSSLPLSTPPPIAAIPNPKFAPSPVHTKSIGKTDYNEDNASGETQPFRGQGAITDQQTDRYHTSGTLDALRERMKSIQAAAIGHFDGAQARPLASMNGSNMVHGGTRLDGEPQQRSNIPPMDERALSGLQARMERLKSGSMELQ

SEQ ID NO: 193132 - protein, 1863 aa, Zea Mays
MSTEDEKLLKEAKKLPWDERLQHKNWKVRNDANIDLAALCDSITDPKDARLREFGPLFRKTVADSNAPVQEKALDALLAFQRAADADASRYAKEVCDSIVAKCLTGRPKTVEKAQAAFLLWVELEASEVFLEAMEKAVKNKVAKAVVPAIDVMFQALSEFGTKVVPPKKILKMLPELFDHPDQNVRASSKGLTLELCRWIGKDPVKSILFEKMRDTMKKELEAELANVSGLAKPTRKIRSEQEKELEEESVPETSGANTSEEAATDAPVEIDEYDLVDPVDILTPLEKSGFWDGVKATKWSERRDAVAELTKLGSAKKIAPGDFHEICRTLKKLITDVNLAVSVEATQAIGNLARGLRAQFSGNARMLLPVLLEKLKEKKPTMTEALSQTLQAMHKSGCFTLIDVIEDVRAAVKNKVPLVRSLTLTWVAFCIETSNKATVLKLHKEYVPICMECLNDGTPEVRDASFSVLTAIAKMVGMKPLERSLEKLDDVRKKKLSDMIGSSSDSVLSSGTAPITTSGAATSARGVADSMSMKRSAASMLSGKKPVQAAAATKKSGPSKSTAAKKTDGGSQSKASAALEIEDVEPAEMSFEEIEERLKSVVKAETISQLKSSVWKERLEAIGVLKQEVENLTELDKSAELLIRLLCAVPGWSEKNVQVQQQVIEVNTYIASTVNKFPKRCVVLCLLGVSERVADIKTRTSAMKCLTAFCEAVGPGFVFERLYKIMKEHKNPKVLSEGILWMVSAVEDFGISNLKLKDMIDFCKDTGLQSSAAVTRNATIKLIGMLHKFVGPDIKGFLSDVKPALLSALDTEYEKNPFEGAAAAAPKRTVRVLDTASSVSAGLFDGLPREDISAKITPTLLKNLGSPDWKVRLESIDAVTKIVEEANKRIQPTGTADLFSALRGRLYDSNKNLVMATLSTIGGLAYAMGPSVEKSSKGILADVLKCLGDNKKHMRECTLTALDSWIAAAQLDKMVPYIIVSLGDQKTGSEGRKDLFDWLSKHVSKMSDPSEALPLLKPSASSLMDKSSEVRKAAESFMNEILRICGQEVVGRNLKDLPSPTLAIVSERLKLSTVHEGFSESVKMVTTSMSLPSKAGLKNNKHGLNDRGSNVGKLVSQRGLPARASVTMVSTQDPAQSQALFNIKDSNKEERERRVLVRKFKFEEPRREQIDELKIDLFKHFREDVSLRLWNSDFKRQIDGIELLQKALPSSWKEVIELLDILLRWFVLRFCESNTTCLLKVLDFLPELFDILKDQSYMLTEAEAAIFLPCLIEKVGGLMKNLPSVAALTAERDGEIRKAALNTLATAYKNLGDDVWRYVGKLSDAQRSMLDDRFKWKAREMDKRREGRPGDARAALRRSVRENGSDIAEQSGEVVSRPVAGSMISRDFGYADAHMDRHMVPRQIPSTSGPVDWREALEIVALGLPEQSVEGMKVICHELTQAADPESTLLEDLIKEADRLVSCLAVMVPKTFNFSLSGASSRSCKYVLNTLMQTFQIKRLAHAVKEGTLDNLITELLLWLLDERVPLMDDGSQLLKALNVLMLKILDNAERTSSFVVLINLLRPLDPSRWPSPTPTESLAVKNQKFSDLVVKCLIKLTKVLQSTIYEVDLDRILQSIHIYLQELGMEEIRRRAGADDKPLRMVKTVLHELVKLRGTAIKGHLSMVPIDAEPQPIILAYIDLNLQTLAAARMLTPSGPMGQTHWGDAASNNPNPSTHSADAQLKQELAAIFKKIGDKQTCTIGLYELYRITQLYPKVDIFAQLQNASEAFRTYIRDGLAQVEKNAAAGRMPSSLPLSTPPPIAAIPNPKFAPSPVHTKSIGKTDYNEDNASGETQPFRGQGAITDQQTDRYHTSGRHPTQPRC

SEQ ID NO: 193133 - protein, 534 aa, Zea Mays
MLDDRFKWKAREMDKRREGRPGDARAALRRSVRENGSDIAEQSGEVVSRPVAGSMISRDFGYADAHMDRHMVPRQIPSTSGPVDWREALEIVALGLPEQSVEGMKVICHELTQAADPESTLLEDLIKEADRLVSCLAVMVPKTFNFSLSGASSRSCKYVLNTLMQTFQIKRLAHAVKEGTLDNLITELLLWLLDERVPLMDDGSQLLKALNVLMLKILDNAERTSSFVVLINLLRPLDPSRWPSPTPTESLAVKNQKFSDLVVKCLIKLTKVLQSTIYEVDLDRILQSIHIYLQELGMEEIRRRAGADDKPLRMVKTVLHELVKLRGTAIKGHLSMVPIDAEPQPIILAYIDLNLQTLAAARMLTPSGPMGQTHWGDAASNNPNPSTHSADAQLKQELAAIFKKIGDKQTCTIGLYELYRITQLYPKVDIFAQLQNASEAFRTYIRDGLAQVEKNAAAGRMPSSLPLSTPPPIAAIPNPKFAPSPVHTKSIGKTDYNEDNASGETQPFRGQGAITDQQTDRYHTSGRHPTQPRC

SEQ ID NO: 193134 - protein, 297 aa, Zea Mays
MSAAAADWLPSASVTASGRPVLSAGEVERNLLPLVDLEPEENPRLAPLRACLLALTSHRLIFLHEPSRSARGLPLATVVHAYPPHRRHSHNPLRSLFSAPSSSSSSQHHRIRLQISMPPVRSEVIAIVVTCKADVDVFFGRLLEAIRARAWEVTPAAAPSSGTSVAEGAAPTEDIAIRMPVVGVSGILRMEQESWENAGQNLQDAFQDLNALMSKAKEMMQLAEKMRLKLLMNSSTESNSNDEEMGSKQDMQDLLLSVGIVSPVTKETAGALYHQQLSLQVTCNCFLCSLFWTINWL

SEQ ID NO: 193135 - protein, 343 aa, Zea Mays
MSAAAADWLPSASVTASGRPVLSAGEVERNLLPLVDLEPEENPRLAPLRACLLALTSHRLIFLHEPSRSARGLPLATVVHAYPPHRRHSHNPLRSLFSAPSSSSSSQHHRIRLQISMPPVRSEVIAIVVTCKADVDVFFGRLLEAIRARAWEVTPAAAPSSGTSVAEGAAPTEDIAIRMPVVGVSGILRMEQESWENAGQNLQDAFQDLNALMSKAKEMMQLAEKMRLKLLMNSSTESNSNDEEMGSKQDMQDLLLSVGIVSPVTKETAGALYHQQLSLQLADFVRIPLEKAGGMMALVDVYCLFNRARGTELISPEDLLQACSLWEKVDVYVYHAFNDYRTS

SEQ ID NO: 193136 - protein, 118 aa, Zea Mays
MSSPVMLRKFDSGVKVIQTKTHSDEEVFARISSLAQKPDALQKGISPSDAAFTLGIAPALAKEHLLNAENKGLLCRDVSPDGFRFFSNLFNDIDPQNIHSQKPHGMYKAWISVAMASH

SEQ ID NO: 193137 - protein, 100 aa, Zea Mays
MSSPVMLRKFDSGVKVIQTKTHSDEEVFARISSLAQKPDALQKGISPSDAAFTLGIAPALAKEHLLNAENKGLLCRDVSPDGFRFFSNLFNDIDPQNIHS

SEQ ID NO: 193138 - protein, 164 aa, Zea Mays
MFEPGAFSLGSRVATLVSKGATFAVVGFAAGLAGTALSNGLMAMRKRMDPAFETPNKPPPTLLNAATWALHMAGSSNLRYQTLNGVEYMLGKVAPAPVFKASVVVLRCLNNVLGGVSFVLLARLTGAQKSDKPATVAEEKDRLIAVGNAAADAIGEARDGEEGK

SEQ ID NO: 193139 - protein, 153 aa, Zea Mays
MSSLRNAIPRRAHKERAQPEARKKFGLLEKHKDYVVRARAYHIKEATIAKLKEKAAFRNPDEFYFKMINSRTVGGIHRPKPEDNKYTEEELLLLKNKDMGYILQSVQSEKKKIEKLSSTLHELDNKPQNKHVYFAEDRSKRNTIKDRTKQQHA

SEQ ID NO: 193140 - protein, 281 aa, Zea Mays
MESRRGGSGAAAEDAGGAMPSFGPTQHAIRAGADVNSMQPSRVTDFGALAQSAGFRIEDLANLNANALFNLKPNSHTIDNSPLQFGNYGKSISPHINTTEATTAATRIDPQLSAQQTGAQPILVALPTGNMENWGESAMAGSPMTDTSTDPDTDERNQMFEQGLVAVPTASDSSDKSRDKLDQKTLRRLAQNREAARKSRLRKKAYIQNLESSRLKLTQLEQELQRARQQGIFISTSGDQPQSTSGNGALAFDMEYARWLEEHNKHVNELRAAVNAHADPC

SEQ ID NO: 193141 - protein, 459 aa, Zea Mays
MESRRGGSGAAAEDAGGAMPSFGPTQHAIRAGADVNSMQPSRVTDFGALAQSAGFRIEDLANLNANALFNLKPNSHTIDNSPLQFGNYGKSISPHINTTEATTAATRIDPQLSAQQTGAQPILVALPTGNMENWGESAMAGSPMTDTSTDPDTDERNQMFEQGLVAVPTASDSSDKSRDKLDQKTLRRLAQNREAARKSRLRKKAYIQNLESSRLKLTQLEQELQRARQQGIFISTSGDQPQSTSGNGALAFDMEYARWLEEHNKHVNELRAAVNAHAGDNDLRCIVDSIMVHYDEIFKLKGVAAKADVFHVLSGMWKTPAERCFMWLGGFRSSELLKLLAGHLEPLTDQQLVGISNLQQSSQQAEDALSQGMEALQQSLAETLASGSLGPAGPSGNVANYMGQMAMAMGKLGTLENFLRQAIQIIRRGTTARSISSEGSSVGGIELLNLIKTCRKVAA

SEQ ID NO: 193142 - protein, 489 aa, Zea Mays
MQPSRVTDFGALAQSAGFRIEDLANLNANALFNLKPNSHTIDNSPLQFGNYGKSISPHINTTEATTAATRIDPQLSAQQTGAQPILVALPTGNMENWGESAMAGSPMTDTSTDPDTDERNQMFEQGLVAVPTASDSSDKSRDKLDQKTLRRLAQNREAARKSRLRKKAYIQNLESSRLKLTQLEQELQRARQQGIFISTSGDQPQSTSGNGALAFDMEYARWLEEHNKHVNELRAAVNAHAGDNDLRCIVDSIMVHYDEIFKLKGVAAKADVFHVLSGMWKTPAERCFMWLGGFRSSELLKLLAGHLEPLTDQQLVGISNLQQSSQQAEDALSQGMEALQQSLAETLASGSLGPAGPSGNVANYMGQMAMAMGKLGTLENFLRQADNLRLQTLQQMQRILTTRQSARALLAISNTNNQTRDYCQVNIIGGKLCRRHRTSQSHQNMPEGGSMTYLPAPRAMFRTPSSHTTRPLEIVISTIPCTNEMNIST

SEQ ID NO: 193143 - protein, 442 aa, Zea Mays
MRAGRCRALGQRSTPCADVNSMQPSRVTDFGALAQSAGFRIEDLANLNANALFNLKPNSHTIDNSPLQFGNYGKSISPHINTTEATTAATRIDPQLSAQQTGAQPILVALPTGNMENWGESAMAGSPMTDTSTDPDTDERNQMFEQGLVAVPTASDSSDKSRDKLDQKTLRRLAQNREAARKSRLRKKAYIQNLESSRLKLTQLEQELQRARQQGIFISTSGDQPQSTSGNGALAFDMEYARWLEEHNKHVNELRAAVNAHAGDNDLRCIVDSIMVHYDEIFKLKGVAAKADVFHVLSGMWKTPAERCFMWLGGFRSSELLKLLAGHLEPLTDQQLVGISNLQQSSQQAEDALSQGMEALQQSLAETLASGSLGPAGPSGNVANYMGQMAMAMGKLGTLENFLRQADNLRLQTLQQMQRILTTRQSARALLAISQYHRREAL

SEQ ID NO: 193144 - protein, 220 aa, Zea Mays
MTRVIHDSGDDMQKEALDLVSSDVNFPKGHFPDYRIGPNNQIIDPEETHEAVPLKEIVAKETAQLLEQHKRLSVRDLKEKFEKGLSGASKLSEEAKRREAASLDRQVLLKKLRDVLDTLKGRVAGRNRDDAEEAISLVEALAVQLTQREGELIYEKAEVKKLANFLKQATEDARKVAEEERALALAEIEKARAAIEKVEKAWRVHDFASSSREKAVLIPK

SEQ ID NO: 193145 - protein, 1006 aa, Zea Mays
MTRVIHDSGDDMQKEALDLVSSDVNFPKGHFPDYRIGPNNQIIDPEETHEAVPLKEIVAKETAQLLEQHKRLSVRDLKEKFEKGLSGASKLSEEAKRREAASLDRQVLLKKLRDVLDTLKGRVAGRNRDDAEEAISLVEALAVQLTQREGELIYEKAEVKKLANFLKQATEDARKVAEEERALALAEIEKARAAIEKVEKAWRVHDFASSSREKAEIEELRKEVREARRIKMLHQPSKVMDMEFELQALRTLISEKTQLCNQLKKELAMIKRLEDDSSGLFELEGSNTLGSQLCIIPRVDGASNITNCPIQWYRVISGGTRELISGATKFMYAPEPFDVGRLLQAEIVLNADKIIVQTDGPVDNAAGLERYVDSLMKRTDIEFNVVVTQMNGKDYSSNSVHVFHIGKLRIKLRKGWSTKARESYSTTMKLCGSRGGGNAAARAVFWHPRKGSSYTLAFETDRDRNAAIMIARKFASNCNIALAGPGDQVHVNIIGSAVAAHAGGEEESRAARLQSFFASVLSGLFGQAEAEDEDEDEEMPTRNHNAAAAAAPQHHHHNRGGAPALGKSKAVPGRADAMNRRAPLGDIGNLVSVRPAEGKPQLQEQINRPITRSFGAQLVKNVQANAAIKNAAILPARHAPRQERKAPAKQPPPEDVIVLSSDSEQSRTQLESSASSVRSRKKVINTLSSVLSARSKAACGITDKRRQVAVIEDIDKLDVNNELAVVEYIEDIYTFYKIAQHDRRPCDYIDTQVEINPKMRAILAGWIIEVHHKFELMPETLYLTMYIIDQYLSLQPVLRRELQLVGVSAMLIACKYEEIWAPEVNDFILISDSAYSREQILSMEKGILNSLEWNLTVPTVYMFLVRFLKAAALGNKVEKEMENMVFFFAELALMQYGLVTRLPSLVAASVVYAARLTLKRAPLWTDTLKHHTGFRESETELIECTKLLVSAHSSAADSKLRSVYKKYSSEQFGGVALRPPAAAVEIKCHQPIMEVHKALSHQAWIR

SEQ ID NO: 193146 - protein, 308 aa, Zea Mays
MGKEGASGGGGDGGMSASVIRKVLVSYMYVAVWIFLSFSVIVYNKYILDPKMYNWPFPISLTMVHMAFCSSLAVALVRVLRVVDLPSSPAMTSQLYLSSVVPIGALYSLSLWFSNSAYIYLSVSFIQMLKALMPVAVYSIGVLFKKETFRSSAMLNPITSLYYVAPCCLAFLVVPWVFVELPRLRAVAGGFQPDLFVFGTNSLCAFALNLAVFLLVGKTSALTMNVAGVVKDWLLIAFSWSVIRDTVTPVNLFGYGIAFLGVGYYNHVKLQALKAKEAQKKAAQADEEAGSLLQERDSHGDRKTDDQA

SEQ ID NO: 193147 - protein, 203 aa, Zea Mays
MGRPDARDLCAAEAGAGAGLSGIVTSRTRRSRRCTVAQGGPRDLHRGAASQGLPRHATARARHPLAVWLKEMEEEEERKRGQPLDNSIEIQLDSCPEFFNSHDREFHVASLPYKPDFKVMSEGWDGTTRDPDEVLYEISMKEDQILYEEFVQRLEFNKKKLEFHQRIFFILADLILLLKFTTKNMQMHVFVELTNGESPLQSF

SEQ ID NO: 193148 - protein, 276 aa, Zea Mays
MPHLPRTSPNSLSHGRVTVLSASWALGSRRQSGRADREPEATCTGAPTQPATATGPAGRQQAPTPSGSPAVAADASPRCDSAAKPTRIRVDPSSFRPKEKPPGYVACLVFGERGRGGGDQGNGRGGGAGPAGRPCERGRGGGEAGLAAAAAGEGGRRPAPDRRRRGGRLGQRLLRAAAGRVRPPPRQGAGPHLAPPGPRRRPRHRRAPLRRHQRARGRPAPPDPPLRLPQVRRGAPRRPHALRRRDTQGRLLPQHDRHAALPAQGRHQPAGGRLGR

SEQ ID NO: 193149 - protein, 308 aa, Zea Mays
MWEKKFCTDACAVPWAKLCEAKRLMTLYKSVVDWDDSAALEAFNDAKARFCAVYHGQHYDIPLPDPDMFIDIINPDEYVDLELVADLEKSRRRVPRKDDGVPDVWDSFILSDKPVPVTGWGDTDTSFTHGQQLSVNWDYQLKHSVEANHKHMSANWDYSIKRPAQIVCQQNSGKQQDQTSSQGEQTNSCISHWIMRGGSQDAWKHDSGWGPAAIQTDLWDNRQGSYEVPDSTGMPYGHWTHCRRRNDDSGRRNTRNRGGPISSKPMKSKYQTDEHNVAINGWWNCRIRNDVYYYPHGQADYTKQSHAM

SEQ ID NO: 193150 - protein, 714 aa, Zea Mays
MDAERDIKPFVFPTVPTTIQRNFHGPGARQPTARPLERCGTRVLPQTHRPCSAPRLSRKFWGAGDYDAVAGRSAPQPPSLQNRMCVHPEFLHSNATSHKWPFGVCLTFFPIAIAVAELLDNAVDEIETGGATTILLDKLIDKRNGSPALLIQDDGGGMDPDSLRRCMSFGFSEKQSGSSIGQYGNGFKTSTMRLGADAIVFSRCCTRSSGPTQSIGLLSYTFLVETGHTNVVVPMVDYKCNLMNGQTQRLERHGSKQFFSNLSALLKWSPFATEEELMQNFCDIGPHGTKIIVFNLWSNDDGNLELDFDTNPEDIMISGAPNPEQISNSVRRANENHLANRLRYSLRVYASVLYLQLPDYFRIMLRGREVERHHIASDLIYPERISYRPQSCGIIREAEVLTTIGFLKGAPTISVHGFNIYHKNRLILPFHRVLSTASSKGRSVSGVLEVDFIKPTHDKQDFEKSQLFQRLMNRLKEMTNEYWDLYSNKIGYVKVPRVRAAPTPAPPVMLAIENGPAEPSERSAPAPTQPLRWQHGNSSCVNAVPIAMAPPAFHPAPVKTETDAPGAPTGYAYSYSPSWPSVQAMQIEKIKEEPSMAAPGTDWVETRKRTNDDGATTVALFKRRKAPQELAGSGSRSATDQVSRYVGEGELNEFCFLKMENRMLRGECSEFEMAEKELRVKEQNLRLEIEMAQEQFKRLLGEYVSFSSMPTRKP

SEQ ID NO: 193151 - protein, 701 aa, Zea Mays
MDAERDIKPFVFPTVPTTIQRNFHGPGARQPTARPLERCGTRVLPQTHRPCSAPRLSRKFWGAGDYDAVAGRSAPQPPSLQNRMCVHPEFLHSNATSHKWPFGVCLTFFPIAIAVAELLDNAVDEIETGGATTILLDKLIDKRNGSPALLIQDDGGGMDPDSLRRCMSFGFSEKQSGSSIGQYGNGFKTSTMRLGADAIVFSRCCTRSSGPTQSIGLLSYTFLVETGHTNVVVPMRLERHGSKQFFSNLSALLKWSPFATEEELMQNFCDIGPHGTKIIVFNLWSNDDGNLELDFDTNPEDIMISGAPNPEQISNSVRRANENHLANRLRYSLRVYASVLYLQLPDYFRIMLRGREVERHHIASDLIYPERISYRPQSCGIIREAEVLTTIGFLKGAPTISVHGFNIYHKNRLILPFHRVLSTASSKGRSVSGVLEVDFIKPTHDKQDFEKSQLFQRLMNRLKEMTNEYWDLYSNKIGYVKVPRVRAAPTPAPPVMLAIENGPAEPSERSAPAPTQPLRWQHGNSSCVNAVPIAMAPPAFHPAPVKTETDAPGAPTGYAYSYSPSWPSVQAMQIEKIKEEPSMAAPGTDWVETRKRTNDDGATTVALFKRRKAPQELAGSGSRSATDQVSRYVGEGELNEFCFLKMENRMLRGECSEFEMAEKELRVKEQNLRLEIEMAQEQFKRLLGEYVSFSSMPTRKP

SEQ ID NO: 193152 - protein, 740 aa, Zea Mays
MCMSSLIAPTRPRRLSFENSKRLEEASTDYMDAERDIKPFVFPTVPTTIQRNFHGPGARQPTARPLERCGTRVLPQTHRPCSAPRLSRKFWGAGDYDAVAGRSAPQPPSLQNRMCVHPEFLHSNATSHKWPFGAVAELLDNAVDEIETGGATTILLDKLIDKRNGSPALLIQDDGGGMDPDSLRRCMSFGFSEKQSGSSIGQYGNGFKTSTMRLGADAIVFSRCCTRSSGPTQSIGLLSYTFLVETGHTNVVVPMRLERHGSKQFFSNLSALLKWSPFATEEELMQNFCDIGPHGTKIIVFNLWSNDDGNLELDFDTNPEDIMISGAPNPEQISNSVRRANENHLANRLRYSLRVYASVLYLQLPDYFRIMLRGREVERHHIASDLIYPERISYRPQSCGIIREAEVLTTIGFLKGAPTISVHGFNIYHKNRLILPFHRVLSTASSKGRSVSGVLEVDFIKPTHDKQDFEKSQLFQRLMNRLKEMTNEYCTDAYFASNVTTQMSRSFHRDLYSNKIGYVKVPRVRAAPTPAPPVMLAIENGPAEPSERSAPAPTQPLRWQHGNSSCVNAVPIAMAPPAFHPAPVKTETDAPGAPTGYAYSYSPSWPSVQAMQIEKIKEEPSMAAPGTDWVETRKRTNDDGATTVALFKRRKAPQELAGSGSRSATDQVSRYVGEGELNEFCFLKMENRMLRGECSEFEMAEKELRVKEQNLRLEIEMAQEQFKRLLGEYVSFSSMPTRKP

SEQ ID NO: 193153 - protein, 763 aa, Zea Mays
MCMSSLIAPTRPRRLSFENSKRLEEASTDYMDAERDIKPFVFPTVPTTIQRNFHGPGARQPTARPLERCGTRVLPQTHRPCSAPRLSRKFWGAGDYDAVAGRSAPQPPSLQNRMCVHPEFLHSNATSHKWPFGVCLTFFPIAIAVAELLDNAVDEIETGGATTILLDKLIDKRNGSPALLIQDDGGGMDPDSLRRCMSFGFSEKQSGSSIGQYGNGFKTSTMRLGADAIVFSRCCTRSSGPTQSIGLLSYTFLVETGHTNVVVPMVDYKCNLMNGQTQRLERHGSKQFFSNLSALLKWSPFATEEELMQNFCDIGPHGTKIIVFNLWSNDDGNLELDFDTNPEDIMISGAPNPEQISNSVRRANENHLANRLRYSLRVYASVLYLQLPDYFRIMLRGREVERHHIASDLIYPERISYRPQSCGIIREAEVLTTIGFLKGAPTISVHGFNIYHKNRLILPFHRVLSTASSKGRSVSGVLEVDFIKPTHDKQDFEKSQLFQRLMNRLKEMTNEYCTDAYFASNVTTQMSRSFHRDLYSNKIGYVKVPRVRAAPTPAPPVMLAIENGPAEPSERSAPAPTQPLRWQHGNSSCVNAVPIAMAPPAFHPAPVKTETDAPGAPTGYAYSYSPSWPSVQAMQIEKIKEEPSMAAPGTDWVETRKRTNDDGATTVALFKRRKAPQELAGSGSRSATDQVSRYVGEGELNEFCFLKMENRMLRGECSEFEMAEKELRVKEQNLRLEIEMAQEQFKRLLGEYVSFSSMPTRKP

SEQ ID NO: 193154 - protein, 390 aa, Zea Mays
MANRSKQLVTTALPLAAAAAASLAVVLLLCSTGSSEADGYLGRVGAPWGRTLTVLPFSPADLLPLLPRGVAMAALRALRGVSDIFPVFVGAASAGGSGSVPGSGGTVRWKGACFYENEAWLVFHNESGSKYGGGTLHIKGEDVIAILPWEEWWEFEVTKDDSNPQIALLPLHPDLRAKFNETAAWIYAKSMEGKPYGYHNMIFSWIDTISDNYPPPLDAHVVASVMTVWSKLQPEYAANMWKEALNKRLGTKGLDLSEIIVESEKRGITFDKLLSVPENDSWVYEDGQSASCVAFVLMMYKEAGLFDPITSSIEVTEFTIKDAYILNFFEDNSTRLPEWCNKDDDVKLPFCQIKGKYRMELPGYNTMKPYAHMNERCPSLPPDYNRTKGC

SEQ ID NO: 193155 - protein, 336 aa, Zea Mays
MVCPSSSCHLEQLAHFEHSGMSSLCSQILHGSGDFLVLSKIRGRWGGFETLEKWVTGAYAGHTAVCLRDSDGKLWVGESGNENEQGEDVIAILPWEEWWEFEVTKDDSNPQIALLPLHPDLRAKFNETAAWIYAKSMEGKPYGYHNMIFSWIDTISDNYPPPLDAHVVASVMTVWSKLQPEYAANMWKEALNKRLGTKGLDLSEIIVESEKRGITFDKLLSVPENDSWVYEDGQSASCVAFVLMMYKEAGLFDPITSSIEVTEFTIKDAYILNFFEDNSTRLPEWCNKDDDVKLPFCQIKGKYRMELPGYNTMKPYAHMNERCPSLPPDYNRTKGC

SEQ ID NO: 193156 - protein, 289 aa, Zea Mays
MGERRRRASTASLGGGGGAGGSGAVPARNEEDKAAEPPPPTLWFALKRSLHCRSELSEVHVPRANKASGPVVASGGHLSSIVTKRASARSGCSRSIANLRDVIHGSKRHPGQPPSCSPRSIGSSEFLNPIAHEVVLSTNSRCELKITGFGGCGGLAAVGTGAAAAHDACGGGDGGVVSSFVGTLRPGTPGPAWAGAGHGLPCSGSVRGGVRCTPPRSPCVLLERNGSVVSGHRASSCEETAKDGGAGKGSGGLSCHRCGEQFSKWEALEEHHLSRHAACRRSKPAAPQP

SEQ ID NO: 193157 - protein, 227 aa, Zea Mays
MAIPQVRTPLPSNFSLLHCPSQPPGSRRRESLAHVPSPPPVPPHRPTRPRPLTSTAADRGPATVREATEAIAAPPPPTSPLHSPHPSSSRPRLSLTATRWVQPKVYPLFMTMGVAMGICGLQLFWNITGNLEVRVRRSTWSAASPSPPLPRQPPRAALHRRRLLRQCHPHASLGSLRSRPFSQHRPSGRFSRQYLDSTPRPPRPCGGQWSGGRRLRPPVQDVQACPH

SEQ ID NO: 193158 - protein, 261 aa, Zea Mays
MATNPSNGAGADVPAAPAAVRLSVAAQAAAIQPSSPRFFFSSLAGTNPASPHRRIAIAVDLSDESAFAVKWAVQNYLRPGDAVVLLHVRPTSVLYGADWGSIPVSVADEDDAAEDAAAAAEGGPSEEELQKKREEDYDAFTSTKAQDLAQPLVDAQIPFKIHVVKDHDMKERLCLEAERLGLSAMIMGSRGFGASRKGSKGRLGSVSDYCVHHCVCPVVVVRYPDDAADAGGDASGVTDELHTVPEDEPVYHDAAEERRKT

SEQ ID NO: 193159 - protein, 230 aa, Zea Mays
MGCCFSKNPRTRPVAGASDFPRRCGPEDRDPPSPEEETVKEVLSETPSAKPRANPKLVGNAVVPAAADERKAEKAKKQDSVDAAASDVGSCVSLSLATDERSEAASESSVATSSVAGPERSPRTKPARRRPASADLGPARRERDRAVAASYGVRSRSARASASPPPRHVPRDRSVRRSPSPLEDDAVTAASEPSIPDGSDGGDVQSGRGGDDGKESLENPLVSLECFIFL

SEQ ID NO: 193160 - protein, 639 aa, Zea Mays
MNTRMLFSSSGGISTEHSDWSEIKWGSTDEMLGNTGQDDDHFTPMGMFCLTNNTDILDLSCIESNMGERTESIRNGNSSCLTMQEEHLQAECGGYPHPDYISVDMIDERSLHDLPHGLSQNNEQYEMEQLPQNICESGSMQMASPDQYCSSPDQYCDDTSLSDFYMDVSSPESISCEQNQPEDIFFKSESSTDSSPVPSSRNSTTEDADKYLGQPSKQLLDSKIVPFSNQHTFKNMEYQKPLVLDKQYAYRSNNSSIHNSTKGCFSRDGDMVSDLCVLEGNRNPAPAHLWPYQGKFHHNFQQPVYGNSIIPAFGGTRYKPHDERTTLRLALQDISQPNSEANPPDGVLAVPLLRHQKIALSWMVKKETSISLCYGGILADDQGLGKTVSAISLILTERPPVPQSSTKNEPCEAVTLDEDDDCIGPHSEKLMRTCSSQVTSNTVKQENPIVAVKARPAAGTLVVCPTSVLRQWAGELKNKVTSKANLSFLIYHGSNRTKDPNELTKYDVVLTTYSIVSMEVPKQSNPDSDGEEKGKPDPYGAPVSSSGSKKRKASSSKKTKNKSVAESCLPEKPLAKVAWFRVILDEAQSIKNYRTQVARACWGLRAKRRWCLSGTPIQNAVEDLYSYFRFLRYNPLRCI

SEQ ID NO: 193161 - protein, 609 aa, Zea Mays
MLGNTGQDDDHFTPMGMFCLTNNTDILDLSCIESNMGERTESIRNGNSSCLTMQEEHLQAECGGYPHPDYISVDMIDERSLHDLPHGLSQNNEQYEMEQLPQNICESGSMQMASPDQYCSSPDQYCDDTSLSDFYMDVSSPESISCEQNQPEDIFFKSESSTDSSPVPSSRNSTTEDADKYLGQPSKQLLDSKIVPFSNQHTFKNMEYQKPLVLDKQYAYRSNNSSIHNSTKGCFSRDGDMVSDLCVLEGNRNPAPAHLWPYQGKFHHNFQQPVYGNSIIPAFGGTRYKPHDERTTLRLALQDISQPNSEANPPDGVLAVPLLRHQKIALSWMVKKETSISLCYGGILADDQGLGKTVSAISLILTERPPVPQSSTKNEPCEAVTLDEDDDCIGPHSEKLMRTCSSQVTSNTVKQENPIVAVKARPAAGTLVVCPTSVLRQWAGELKNKVTSKANLSFLIYHGSNRTKDPNELTKYDVVLTTYSIVSMEVPKQSNPDSDGEEKGKPDPYGAPVSSSGSKKRKASSSKKTKNKSVAESCLPEKPLAKVAWFRVILDEAQSIKNYRTQVARACWGLRAKRRWCLSGTPIQNAVEDLYSYFRFLRYNPLRCI

SEQ ID NO: 193162 - protein, 575 aa, Zea Mays
MGERTESIRNGNSSCLTMQEEHLQAECGGYPHPDYISVDMIDERSLHDLPHGLSQNNEQYEMEQLPQNICESGSMQMASPDQYCSSPDQYCDDTSLSDFYMDVSSPESISCEQNQPEDIFFKSESSTDSSPVPSSRNSTTEDADKYLGQPSKQLLDSKIVPFSNQHTFKNMEYQKPLVLDKQYAYRSNNSSIHNSTKGCFSRDGDMVSDLCVLEGNRNPAPAHLWPYQGKFHHNFQQPVYGNSIIPAFGGTRYKPHDERTTLRLALQDISQPNSEANPPDGVLAVPLLRHQQKIALSWMVKKETSISLCYGGILADDQGLGKTVSAISLILTERPPVPQSSTKNEPCEAVTLDEDDDCIGPHSEKLMRTCSSQVTSNTVKQENPIVAVKARPAAGTLVVCPTSVLRQWAGELKNKVTSKANLSFLIYHGSNRTKDPNELTKYDVVLTTYSIVSMEVPKQSNPDSDGEEKGKPDPYGAPVSSSGSKKRKASSSKKTKNKSVAESCLPEKPLAKVAWFRVILDEAQSIKNYRTQVARACWGLRAKRRWCLSGTPIQNAVEDLYSYFRFLRYNPLRCI

SEQ ID NO: 193163 - protein, 89 aa, Zea Mays
MCHPGLPPSCAVRRREQQAAVAPSLSPSVPWARHGAPHHYCVCSPTAHRGSFRCRWHRSGFEWGRRRPFANTPGRAEAGPAMHARMAAP

SEQ ID NO: 193164 - protein, 69 aa, Zea Mays
MERDYQHSIQTEWNARTVLQRHMYTKYVVWFPALDHIVGKTLGGPDLSSPIYLKSNICSEWPAIRKTCT

SEQ ID NO: 193165 - protein, 79 aa, Zea Mays
MVIPFYTPEVAHLVHQGLEPVVHVLWLLPLAKPEPTELPLDRFPLGDLCELVSLVRGFEHIPNLLGALQPLNFVILLST

SEQ ID NO: 193166 - protein, 254 aa, Zea Mays
MPRPVLAKPRSTRTVQEAIEDNGWINDIPGSLSVGALADFLRIWNLVAHVDLDPHKEDKHIFRLAANGKYSTKAAYEGLFIGSVEFEPFERIWKTWAPPKCRFFLWLVAHKKCWTTDRLEKRGLDHPEKCPLCEQERETIDHLLVNCVFSRECWFLLLRQFGLQGLAPQPTDINFMEWWHQTNEAIQGSFRDGLNSLIMLGAWILWNHRNRCIFDGLSPNVANFLIHVGDERRLWETAGAKGLTSLVASLSHVA

SEQ ID NO: 193167 - protein, 58 aa, Zea Mays
MNFLLLTISNAVTYIHTTHGTNGLCHCSDSLIRYMWVQVHTIQLWTLVGPTHLKLTNY

SEQ ID NO: 193168 - protein, 74 aa, Zea Mays
MLARGYKKETKECRCADGTSAKHATKALLKKMAVKEEAVAMRPGLAARRPLVVVGFGRGYEESSSLLAGALEWT

SEQ ID NO: 193169 - protein, 55 aa, Zea Mays
MATRIDERHLNGSVEIGALIHGNWQPSASGFQVPVVIQRCLPPVGIKRPMMFFLH

SEQ ID NO: 193170 - protein, 110 aa, Zea Mays
MELDPRLYENVSVSDNDVRNIVLSYLMHNCFKETAEAFLSSTGLNLPVDYSVDVDKRKAIFNFVLEGNALKAIELTEEMAPNLLENDMDLHFDLLSLHFIELVRSKKLSS

SEQ ID NO: 193171 - protein, 180 aa, Zea Mays
MELDPRLYENVSVSDNDVRNIVLSYLMHNCFKETAEAFLSSTGLNLPVDYSVDVDKRKENDMDLHFDLLSLHFIELVRSKKFTEALDFGQKKLTSFQKVTKYIEKLEDFMALLAYEEPEKSPMFHLLSPEHRQNVAEGLNRAVLAHANLPAYSSLERVVQQATVVRQYLQQEVGKAFLSK

SEQ ID NO: 193172 - protein, 125 aa, Zea Mays
MAPNLLENDMDLHFDLLSLHFIELVRSKKFTEALDFGQKKLTSFQKVTKYIEKLEDFMALLAYEEPEKSPMFHLLSPEHRQNVAEGLNRAVLAHANLPAYSSLERVVQQATVVRQYLQQEVGKFW

SEQ ID NO: 193173 - protein, 189 aa, Zea Mays
MELDPRLYENVSVSDNDVRNIVLSYLMHNCFKETAEAFLSSTGLNLPVDYSVDVDKRKENDMDLHFDLLSLHFIELVRSKKFTEALDFGQKKLTSFQKVTKYIEKLEDFMALLAYEEPEKSPMFHLLSPEHRQNVAEGLNRAVLAHANLPAYSSLERVVQQATVVRQYLQQEVGKDSYPPFSLKAFLSK

SEQ ID NO: 193174 - protein, 382 aa, Zea Mays
MTRCLMFMPPLFLVSSLISTVGLPVEPPAELLQLGGDVSGGRLSVDASDIAEASRDFGGLSRAEPMAVFQPRAAGDVAGLVRAAFGSARGFRVSARGHGHSISGQAQAPGGVVVDMGHGGAVARALPVHSPALGGHYVDVWGGELWVDVLNWTLSHGGLAPRSWTDYLYLSVGGTLSNAGISGQAFHHGPQISNVYELDVVTGKGEVVTCSETENPDLFFGVLGGLGQFGIITRARIALERAPQRVRWIRALYSNFTEFTADQERLISLGSRRFDYVEGFVVAAEGLINNWRSSFFSPQNPVKLSSLKHHSGVLYCLEVTKNYDDATAGSVEQVRPRRRLSLFMWPACSDILSCLGNRPISGWRAARANHWSRAQTSMAGCY

SEQ ID NO: 193175 - protein, 160 aa, Zea Mays
MWEVPHPWLNLFVPASRIADFDRGVFRGVLGGGTAGAGGPILIYPMNKHRWDPRSSVVTPDEDVFYLVAFLRSALPGAPESLEALARQNRRVLDFCAEAGIGAKQYLPNHKAPGEWAEHFGAARWERFARLKAQFDPRAILAAGQGIFRPPGSPPLVADS

SEQ ID NO: 193176 - protein, 455 aa, Zea Mays
MVYHGFITKVDKEIIMFWMTPNMVACIAVEAISILEKLHAKGFVHGDVKPENFLLGQPGSPDEKKLFLIDLGLASRWKESGSSGQHVEYDQKPDIFRGTIRYASVHAHLGRTGSRRDDLESLAYTLIFLLRGRLPWQGYQGENKSFLVCKKKMATSPDLLCCFCPTPFKLFLETVTNMKFDEEPNYSKLISLFDELIEPQHLRPIRIDGALKAGQKRGRLHVNPEEDEQPKKKVRLGSPANQWISVYNARRPMKQRYHYNVADARLHQHIEKGTGFTSQVYELSPIFLHKDWIMEQWENNYYISAIAGAMNGSSLVVMSKGTPYTQQSYKVSESFPYKWINKKWKEGFHVTSMTTAGSRWGVVMSRNSGYSEQVVELDFLYPSEGIHRRWENGYRITSTAATGDQAAFILSIPKRKLMDETQETLRTSAFPSNHVKEKWAKNLYIASICYGRTVS

SEQ ID NO: 193177 - protein, 587 aa, Zea Mays
MHVIHGASRRPRRMLALGSNRASMHAHSLPSKRRKGKLTTRLREAFKKPAPSSPFQATQPQATAQRCVWVCVCARDQTPTSPHPRPIPTSPPPPPPHGLLPRGAGVGARAAGGAQPIEDIANKVLKMDGGSAEKIAGGEDEGTTSPVPEKVQVGHSPQYKVERKLGKGGFGQVYVGRRISGGTERTGPDAYEVALKFEHRNSKGCNYGPPYEWQVYSALNGCYGVPWVHYKGRQGDYYVLVMDILGPSLWDVWNSFGQLMTPNMVACIAVEAISILEKLHAKGFVHGDVKPENFLLGQPGSPDEKKLFLIDLGLASRWKESGSSGQHVEYDQKPDIFRGTIRYASVHAHLGRTGSRRDDLESLAYTLIFLLRGRLPWQGYQGENKSFLVCKKKMATSPDLLCCFCPTPFKLFLETVTNMKFDEEPNYSKLISLFDELIEPQHLRPIRIDGALKAGQKRGRLHVNPEEDEQPKKKVRLGSPANQWISVYNARRPMKQRYHYNVADARLHQHIEKGNEDGLFISSVASSANLWALIMDAGTGFTSQVYELSPIFLHKELLTLSSLTKLVNHSPTSGSTRNGKKVFMLHQ

SEQ ID NO: 193178 - protein, 696 aa, Zea Mays
MHVIHGASRRPRRMLALGSNRASMHAHSLPSKRRKGKLTTRLREAFKKPAPSSPFQATQPQATAQRCVWVCVCARDQTPTSPHPRPIPTSPPPPPPHGLLPRGAGVGARAAGGAQPIEDIANKVLKMDGGSAEKIAGGEDEGTTSPVPEKVQVGHSPQYKVERKLGKGGFGQVYVGRRISGGTERTGPDAYEVALKFEHRNSKGCNYGPPYEWQVYSALNGCYGVPWVHYKGRQGDYYVLVMDILGPSLWDVWNSFGQLMTPNMVACIAVEAISILEKLHAKGFVHGDVKPENFLLGQPGSPDEKKLFLIDLGLASRWKESGSSGQHVEYDQKPDIFRGTIRYASVHAHLGRTGSRRDDLESLAYTLIFLLRGRLPWQGYQGENKSFLVCKKKMATSPDLLCCFCPTPFKLFLETVTNMKFDEEPNYSKLISLFDELIEPQHLRPIRIDGALKAGQKRGRLHVNPEEDEQPKKKVRLGSPANQWISVYNARRPMKQRYHYNVADARLHQHIEKGTGFTSQVYELSPIFLHKDWIMEQWENNYYISAIAGAMNGSSLVVMSKGTPYTQQSYKVSESFPYKWINKKWKEGFHVTSMTTAGSRWGVVMSRNSGYSEQVVELDFLYPSEGIHRRWENGYRITSTAATGDQAAFILSIPKRKLMDETQETLRTSAFPSNHVKEKWAKNLYIASICYGRTVS

SEQ ID NO: 193179 - protein, 570 aa, Zea Mays
MDGGSAEKIAGGEDEGTTSPVPEKVQVGHSPQYKVERKLGKGGFGQVYVGRRISGGTERTGPDAYEVALKFEHRNSKGCNYGPPYEWQVYSALNGCYGVPWVHYKGRQGDYYVLVMDILGPSLWDVWNSFGQLMTPNMVACIAVEAISILEKLHAKGFVHGDVKPENFLLGQPGSPDEKKLFLIDLGLASRWKESGSSGQHVEYDQKPDIFRGTIRYASVHAHLGRTGSRRDDLESLAYTLIFLLRGRLPWQGYQGENKSFLVCKKKMATSPDLLCCFCPTPFKLFLETVTNMKFDEEPNYSKLISLFDELIEPQHLRPIRIDGALKAGQKRGRLHVNPEEDEQPKKKVRLGSPANQWISVYNARRPMKQRYHYNVADARLHQHIEKGTGFTSQVYELSPIFLHKDWIMEQWENNYYISAIAGAMNGSSLVVMSKGTPYTQQSYKVSESFPYKWINKKWKEGFHVTSMTTAGSRWGVVMSRNSGYSEQVVELDFLYPSEGIHRRWENGYRITSTAATGDQAAFILSIPKRKLMDETQETLRTSAFPSNHVKEKWAKNLYIASICYGRTVS

SEQ ID NO: 193180 - protein, 765 aa, Zea Mays
MHVIHGASRRPRRMLALGSNRASMHAHSLPSKRRKGKLTTRLREAFKKPAPSSPFQATQPQATAQRCVWVCVCARDQTPTSPHPRPIPTSPPPPPPHGLLPRDLNALGSAWGERMPELRSGVRQSRLRAKKVEDLVVQDPTDNLVVAAPTVAGRRVPVINLDPDQPLEVLPGAGVGARAAGGAQPIEDIANKVLKMDGGSAEKIAGGEDEGTTSPVPEKVQVGHSPQYKVERKLGKGGFGQVYVGRRISGGTERTGPDAYEVALKFEHRNSKGCNYGPPYEWQVYSALNGCYGVPWVHYKGRQGDYYVLVMDILGPSLWDVWNSFGQLMTPNMVACIAVEAISILEKLHAKGFVHGDVKPENFLLGQPGSPDEKKLFLIDLGLASRWKESGSSGQHVEYDQKPDIFRGTIRYASVHAHLGRTGSRRDDLESLAYTLIFLLRGRLPWQGYQGENKSFLVCKKKMATSPDLLCCFCPTPFKLFLETVTNMKFDEEPNYSKLISLFDELIEPQHLRPIRIDGALKAGQKRGRLHVNPEEDEQPKKKVRLGSPANQWISVYNARRPMKQRYHYNVADARLHQHIEKGTGFTSQVYELSPIFLHKDWIMEQWENNYYISAIAGAMNGSSLVVMSKGTPYTQQSYKVSESFPYKWINKKWKEGFHVTSMTTAGSRWGVVMSRNSGYSEQVVELDFLYPSEGIHRRWENGYRITSTAATGDQAAFILSIPKRKLMDETQETLRTSAFPSNHVKEKWAKNLYIASICYGRTVS

SEQ ID NO: 193181 - protein, 333 aa, Zea Mays
MESDPVKIAVEGVERFKKENCDLIIVDTSGRHKQEAALFEEMRQVSEATKPDLVIFVMDSSIGQAAFDQAQAFKQSVSVGAVIITKMDGHAKGGGALSAVAATKSPVIFIGTGEHIDEFEVFDVKPFVSRLLGMGDWAGFMDKIHEVVPTDQQPELLQKLSEGSFTLRLMYEQFQNILKMGPIGQVFSMLPGFSAELMPKGHEKESQAKIKRYMTMMDSMTDAELDSTNPKLMTESRIIRIARGSGRPVRDVIDMLEEYKRLAKIWGKMKGLKIPKKGEMSALSRNMNVQHMSKVLPPQMLKQIGGMGGLQSLMKQMGSKEMSGMFGGMGGER

SEQ ID NO: 193182 - protein, 292 aa, Zea Mays
MVKFTKIKKPDLVIFVMDSSIGQAAFDQAQAFKQSVSVGAVIITKMDGHAKGGGALSAVAATKSPVIFIGTGEHIDEFEVFDVKPFVSRLLGMGDWAGFMDKIHEVVPTDQQPELLQKLSEGSFTLRLMYEQFQNILKMGPIGQVFSMLPGFSAELMPKGHEKESQAKIKRYMTMMDSMTDAELDSTNPKLMTESRIIRIARGSGRPVRDVIDMLEEYKRLAKIWGKMKGLKIPKKGEMSALSRNMNVQHMSKVLPPQMLKQIGGMGGLQSLMKQMGSKEMSGMFGGMGGER

SEQ ID NO: 193183 - protein, 276 aa, Zea Mays
MDSSIGQAAFDQAQAFKQSVSVGAVIITKMDGHAKGGGALSAVAATKSPVIFIGTGEHIDEFEVFDVKPFVSRLLGMGDWAGFMDKIHEVVPTDQQPELLQKLSEGSFTLRLMYEQFQNILKMGPIGQVFSMLPGFSAELMPKGHEKESQAKIKRYMTMMDSMTDAELDSTNPKLMTESRIIRIARGSGRPVRDVIDMLEEYKRLAKIWGKMKGLKIPKKGEMSALSRNMNVQHMSKVLPPQMLKQIGGMGGLQSLMKQMGSKEMSGMFGGMGGER

SEQ ID NO: 193184 - protein, 534 aa, Zea Mays
MRGVLDYIGSVDVSCVLDHLQSQRMCILSLMQLCFSSIVASVVQKLLLNFVTRPKIPLNASHPVFSDDGRPGVLQRVGSAAANFVLLPYYYLVSSTPEGATSQLADNSLLVLLIMIHYRKCISTNESIPTNNVYTMDSNTNDKDAPVFHDNPYCKALNSAKDIQYDRADVEGNAQDRPVVRLSFASLFDAFGRCLNDESSVLLLYSLVYGNCDFQEYVLVRTDLDTLLMPILEMLYNASRKTSNQIYMLLIILLILSQDSTFNASVHQLVLPAVPWYHERLMHQTSLGSLMVVILIRTIKYNLSKLKDVYLHTNCLAILANMAPHVHRLSAYASQRLVSLFDMLSRKYAKLAELKNDKSLKVIYDQMEADIADDMSIELHIYTDFLRIVLEIIIAILTYALPRNPEVVYAVLHRQEVFEPFKNHPRFSELLENIYTVLDFFNSRMDMQQLDGEWSVDKVLEVINKTCRSWRGEGMKMFTQLRFTYEQESHPEEFFIPYAWRLVLSRGFSFNPDAINLFPVEIHLEEAPAGGQKV

SEQ ID NO: 193185 - protein, 473 aa, Zea Mays
MGAAPSTPTLDVAPLTPRLGAAGAPPSPSAAEQMFAALVGEKAYPISSEFWNQLLELPLTLQWPRDRVLQACHAFAENNYKTKHLAKILIHLVCCLQECTSTTSVSSVVYQRAINAAYISSIFLKFIIENAKTDSWQELCLDIDRSEKGLEKIPAENTVEYFLMRGVLDYIGSVDVSPELCYLHHELLNLMLVLMSTQLCSGPSPEPKDVHPFIDAAMLQDSSIVASVVQKLLLNFVTRPKIPLNASHPVFSDDGRPGVLQRVGSAAANFVLLPYYYLVSSTPEGATSQLADNSLLVLLIMIHYRKCISTNESIPTNNVYTMDSNTNDKDAPVFHDNPYCKALNSAKDIQYDRADVEGNAQDRPVVRLSFASLFDAFGRCLNDESSVLLLYSLVYGNCDFQEYVLVRTDLDTLLMPILEMLYNASRKTSNQIYMLLIILLILSQDSTFNASVHQLVSQLVNFLICLFVKLLII

SEQ ID NO: 193186 - protein, 534 aa, Zea Mays
MGAAPSTPTLDVAPLTPRLGAAGAPPSPSAAEQMFAALVGEKAYPISSEFWNQLLELPLTLQWPRDRVLQACHAFAENNYKTKHLAKILIHLVCCLQECTSTTSVSSVVYQRAINAAYISSIFLKFIIENAKTDSWQELCLDIDRSEKGLEKIPAENTVEYFLMRGVLDYIGSVDVSPELCYLHHELLNLMLVLMSTQLCSGPSPEPKDVHPFIDAAMLQDSSIVASVVQKLLLNFVTRPKIPLNASHPVFSDDGRPGVLQRVGSAAANFVLLPYYYLVSSTPEGATSQLADNSLLVLLIMIHYRKCISTNESIPTNNVYTMDSNTNDKDAPVFHDNPYCKALNSAKDIQYDRADVEGNAQDRPVVRLSFASLFDAFGRCLNDESSVLLLYSLVYGNCDFQEYVLVRTDLDTLLMPILEMLYNASRKTSNQIYMLLIILLILSQDSTFNASVHQLVLPAVPWYHERLMHQTSLGSLMVVILIRTIKYNLSKLKDVYLHTNCLAILANMAPHVHRLSAYASQRLVSLFDMLSRNL

SEQ ID NO: 193187 - protein, 530 aa, Zea Mays
MLVLMSTQLCSGPSPEPKDVHPFIDAAMLQDSSIVASVVQKLLLNFVTRPKIPLNASHPVFSDDGRPGVLQRVGSAAANFVLLPYYYLVSSTPEGATSQLADNSLLVLLIMIHYRKCISTNESIPTNNVYTMDSNTNDKDAPVFHDNPYCKALNSAKDIQYDRADVEGNAQDRPVVRLSFASLFDAFGRCLNDESSVLLLYSLVYGNCDFQEYVLVRTDLDTLLMPILEMLYNASRKTSNQIYMLLIILLILSQDSTFNASVHQLVLPAVPWYHERLMHQTSLGSLMVVILIRTIKYNLSKLKDVYLHTNCLAILANMAPHVHRLSAYASQRLVSLFDMLSRKYAKLAELKNDKSLKVIYDQMEADIADDMSIELHIYTDFLRIVLEIIIAILTYALPRNPEVVYAVLHRQEVFEPFKNHPRFSELLENIYTVLDFFNSRMDMQQLDGEWSVDKVLEVINKTCRSWRGEGMKMFTQLRFTYEQESHPEEFFIPYAWRLVLSRGFSFNPDAINLFPVEIHLEEAPAGGQKV

SEQ ID NO: 193188 - protein, 510 aa, Zea Mays
MCILSLMQLCFSSIVASVVQKLLLNFVTRPKIPLNASHPVFSDDGRPGVLQRVGSAAANFVLLPYYYLVSSTPEGATSQLADNSLLVLLIMIHYRKCISTNESIPTNNVYTMDSNTNDKDAPVFHDNPYCKALNSAKDIQYDRADVEGNAQDRPVVRLSFASLFDAFGRCLNDESSVLLLYSLVYGNCDFQEYVLVRTDLDTLLMPILEMLYNASRKTSNQIYMLLIILLILSQDSTFNASVHQLVLPAVPWYHERLMHQTSLGSLMVVILIRTIKYNLSKLKDVYLHTNCLAILANMAPHVHRLSAYASQRLVSLFDMLSRKYAKLAELKNDKSLKVIYDQMEADIADDMSIELHIYTDFLRIVLEIIIAILTYALPRNPEVVYAVLHRQEVFEPFKNHPRFSELLENIYTVLDFFNSRMDMQQLDGEWSVDKVLEVINKTCRSWRGEGMKMFTQLRFTYEQESHPEEFFIPYAWRLVLSRGFSFNPDAINLFPVEIHLEEAPAGGQKV

SEQ ID NO: 193189 - protein, 420 aa, Zea Mays
MIHYRKCISTNESIPTNNVYTMDSNTNDKDAPVFHDNPYCKALNSAKDIQYDRADVEGNAQDRPVVRLSFASLFDAFGRCLNDESSVLLLYSLVYGNCDFQEYVLVRTDLDTLLMPILEMLYNASRKTSNQIYMLLIILLILSQDSTFNASVHQLVLPAVPWYHERLMHQTSLGSLMVVILIRTIKYNLSKLKDVYLHTNCLAILANMAPHVHRLSAYASQRLVSLFDMLSRKYAKLAELKNDKSLKVIYDQMEADIADDMSIELHIYTDFLRIVLEIIIAILTYALPRNPEVVYAVLHRQEVFEPFKNHPRFSELLENIYTVLDFFNSRMDMQQLDGEWSVDKVLEVINKTCRSWRGEGMKMFTQLRFTYEQESHPEEFFIPYAWRLVLSRGFSFNPDAINLFPVEIHLEEAPAGGQKV

SEQ ID NO: 193190 - protein, 523 aa, Zea Mays
MGAAPSTPTLDVAPLTPRLGAAGAPPSPSAAEQMFAALVGEKAYPISSEFWNQLLELPLTLQWPRDRVLQACHAFAENNYKTKHLAKILIHLVCCLQECTSTTSVSSVVYQRAINAAYISSIFLKFIIENAKTDSWQELCLDIDRSEKGLEKIPAENTVEYFLMRGVLDYIGSVDVSPELCYLHHELLNLMLVLMSTQLCSGPSPEPKDVHPFIDAAMLQDSSIVASVVQKLLLNFVTRPKIPLNASHPVFSDDGRPGVLQRVGSAAANFVLLPYYYLVSSTPEGATSQLADNSLLVLLIMIHYRKCISTNESIPTNNVYTMDSNTNDKDAPVFHDNPYCKALNSAKDIQYDRADVEGNAQDRPVVRLSFASLFDAFGRCLNDESSVLLLYSLVYGNCDFQEYVLVRTDLDTLLMPILEMLYNASRKTSNQIYMLLIILLILSQDSTFNASVHQLVLPAVPWYHERLMHQTSLGSLMVVILIRTIKYNLSKLKDVYLHTNCLAILANMAPHVHRLSAYASQSL

SEQ ID NO: 193191 - protein, 427 aa, Zea Mays
MCILSLMQLCFSSIVASVVQKLLLNFVTRPKIPLNASHPVFSDDGRPGVLQRVGSAADDRADVEGNAQDRPVVRLSFASLFDAFGRCLNDESSVLLLYSLVYGNCDFQEYVLVRTDLDTLLMPILEMLYNASRKTSNQIYMLLIILLILSQDSTFNASVHQLVLPAVPWYHERLMHQTSLGSLMVVILIRTIKYNLSKLKDVYLHTNCLAILANMAPHVHRLSAYASQRLVSLFDMLSRKYAKLAELKNDKSLKVIYDQMEADIADDMSIELHIYTDFLRIVLEIIIAILTYALPRNPEVVYAVLHRQEVFEPFKNHPRFSELLENIYTVLDFFNSRMDMQQLDGEWSVDKVLEVINKTCRSWRGEGMKMFTQLRFTYEQESHPEEFFIPYAWRLVLSRGFSFNPDAINLFPVEIHLEEAPAGGQKV

SEQ ID NO: 193192 - protein, 462 aa, Zea Mays
MGAAPSTPTLDVAPLTPRLGAAGAPPSPSAAEQMFAALVGEKAYPISSEFWNQLLELPLTLQWPRDRVLQACHAFAENNYKTKHLAKILIHLVCCLQECTSTTSVSSVVYQRAINAAYISSIFLKFIIENAKTDSWQELCLDIDRSEKGLEKIPAENTVEYFLMRGVLDYIGSVDVSPELCYLHHELLNLMLVLMSTQLCSGPSPEPKDVHPFIDAAMLQDSSIVASVVQKLLLNFVTRPKIPLNASHPVFSDDGRPGVLQRVGSAAANFVLLPYYYLVSSTPEGATSQLADNSLLVLLIMIHYRKCISTNESIPTNNVYTMDSNTNDKDAPVFHDNPYCKALNSAKDIQYDRADVEGNAQDRPVVRLSFASLFDAFGRCLNDESSVLLLYSLVYGNCDFQEYVLVRTDLDTLLMPILEMLYNASRKTSNQIYMLLIILLILSQDSTFNASVHQLFLGTMSA

SEQ ID NO: 193193 - protein, 279 aa, Zea Mays
MGAAPSTPTLDVAPLTPRLGAAGAPPSPSAAEQMFAALVGEKAYPISSEFWNQLLELPLTLQWPRDRVLQACHAFAENNYKTKHLAKILIHLVCCLQECTSTTSVSSVVYQRAINAAYISSIFLKFIIENAKTDSWQELCLDIDRSEKGLEKIPAENTVEYFLMRGVLDYIGSVDVSPELCYLHHELLNLMLVLMSTQLCSGPSPEPKDVHPFIDAAMLQDSSIVASVVQKLLLNFVTRPKIPLNASHPVFSDDGRPGVLQRVGSAAGNVDPFLQQYCL

SEQ ID NO: 193194 - protein, 64 aa, Zea Mays
MLKKQIIILIWEINQRYIPKIEGNDLTVHEEPCHLHFQIDAQTQQQEFRDFQQQWMPYACSHKS

SEQ ID NO: 193195 - protein, 139 aa, Zea Mays
MAGSKLMARGRGGRERDVHYAPAAAPLKEEARAPSRVRLCEARGERDGSSRKRAEKYSYSPTCNAPPPAKPSVSTKRPNPSSLSSAARTAVCGQCCVVYLYCGLRPLFWASASTALFVCVGLLARRIHKSHQLREPCKK

SEQ ID NO: 193196 - protein, 545 aa, Zea Mays
MAAATNPFGLVCHFVVAASPWINSAANLDSNLGLYAVPTKGGAMVARLVHRLTPPRTSSYASEQMAPAAGTVASSRHKKWSDECRNLWRVAGPVILTGIFQFLLGFVTTAFVGHIGKVELAAVSIVNGVVEGLAFGLLLGMGSALETLCGQAVGAGQLQMLGVYMQRSWIICLATSLALLPLYVFTSPLLRMLRQSADISAVAGRYARWCVPQLFAYAVNFPIQKFYQAQSRVWAMTAISGAALAVHALLSWLVVARLGRGLAGAAVVGDVSWWLVNVAQFVYLVGGSFPDAWTGFSRKAFDSLGGFVRLSVASAVMLCLEMWYYTAVLILVGCLKNPEIQVDAISICMNYQLWTLMVAVGFNAAVSVRVSNELGANHPKAARFSVVVATVTSAAVGVVFTAVALAARKQMPRLFTGDDVVVRETAKLGYLLAATIFLNSVQPVLSGVAIGAGWQSLVAFVNVGSYYLVGLPLAAVFGFKLKLNATVRQAWDLGGSVDRNGITDCDSVRNTQQNQVAKRGYASRREDTGVGRKCRAATYSRNGAK

SEQ ID NO: 193197 - protein, 58 aa, Zea Mays
MQVWRCTRACAAAEPTGTGVCRFFIDGSHGPVATSRCGGNMKGLWSATMNRYVTLWRT

SEQ ID NO: 193198 - protein, 520 aa, Zea Mays
MGWETTSTRRDTSGSGWTTSAFQGSGTRTRTRRLRSSSSGTWWAAAVGGLDPAAPSSSTAATRATSPGSPPTPASSGRPPHASPPSSSSPRQSFFRGLTRLVVVLVSLLRFKNFPFETLYCLWCERWPLACVLQHRYYGESMPFGSKAKAYSDSKSLAYLTAEQALADFAVLLTDLKRNLSAEGSPVVLFGGSYGGMLAAWMRLKYPHIAIGALASSAPILQFEDIVPSTIFYDLVSDDFRRESLSCFLTIKDSWKELDDQANEQDGLLKLSKTFHLCQTLKTSGDLSDWLSSAYSYLAMVDYPLPSEFLMPLPANPIKEVCRNIDSQPKGTGTLERIYAGVNVYYNYTGTVDCFDLNDDPHGMGGWDWQACTEMVMPMSYSEQRSMYPPYKFDYASYAEDCIKSYGVRPRPKWITTEFGGHNITKVLENFGSNIIFFNGLLDPWSGGGVLKNISESVVAIVAPLGAHHIDLRPATPDDPDWLVALRESELEIISGWLWDYYGAGGALFQPVAVKGSSSY

SEQ ID NO: 193199 - protein, 96 aa, Zea Mays
MFFWVRRLSLACYVNIIVMWFHVVQVRCQFNNFLHHHVENIIGSCLESNNDQLMGHVLDECKLVTRILEAEKNSALSSELDGRIDARFQQRSRYSP

SEQ ID NO: 193200 - protein, 96 aa, Zea Mays
MSLMSVNLLQEFWKQRRTLLYRQNWTVASTPGSSRGVVTLLDSFTEFTEVPYSRNKYLIIVLILVLCCLFRGAINFNSYSDIELHNLIMIFSRNMN

SEQ ID NO: 193201 - protein, 194 aa, Zea Mays
MASTRDLAIASLSAATGAVVAAAALRLLSSRRTSSVRPQNLPAAANGSASERPLAQSPFDPVKREGYISWDDYFMAIAFLSAERSKDPNRQVGACLVSQEGIILGIGYNGFPRGCSDDKLPWAKKSASGDPLETKFPYVVHAEVNAILNTNHASAAGQKLYVTMFPCNECAKIIIQVRKHQPQMAQIPIKFQEP

SEQ ID NO: 193202 - protein, 168 aa, Zea Mays
MAIAFLSAERSKDPNRQVGACLVSQEGIILGIGYNGFPRGCSDDKLPWAKKSASGDPLETKFPYVVHAEVNAILNTNHASAAGQKLYVTMFPCNECAKIIIQAYLRSYISLKKRLTTQLTFMLPLTSYCRWLVSRSGSISPRWRKYRSSSRSHEAGTSSSLPGALVSE

SEQ ID NO: 193203 - protein, 313 aa, Zea Mays
MAEEMAQAQPRLTAPRSVRCIVKLGGAAITNKGELESINEENLRSACAQLRHAMSESDGDGAMEKVLGMDWSRKPGDPVDPAVDAEWIAGIARLGLDTNFVVVHGAGSFGHFQASRSGVHKGGLHSTLVKAGFVATRISVTSLNQEIVRALARGIPSVGMSPFACGWSTQQRKLASANASQIFQSLHAGFVPVSCCSKGFEPLFLQNFIFIKNRAWCSGSLSTCCLEILEKLSKGKDVEKFSSPYPFFCGSFWHWVRTPEVVGMSGIVTHPIFDSIWCYWNMYHIVIFLCMHYFGTRDSAFLYCTLNAKTSPI

SEQ ID NO: 193204 - protein, 299 aa, Zea Mays
MAEEMAQAQPRLTAPRSVRCIVKLGGAAITNKGELESINEENLRSACAQLRHAMSESDGDGAMEKVLGMDWSRKPGDPVDPAVDAEWIAGIARLGLDTNFVVVHGAGSFGHFQASRSGVHKGGLHSTLVKAGFVATRISVTSLNQEIVRALAREGIPSVGMSPFACGWSTQQRKLASANASQIFQSLHAGFVPVLHGDAVLDELLDCTILSGDVIIRHLAQLLSPKYVVFLSLCEETGQQSLALRTGTCLSHYSDTSKYLIQGRAKTSKSAIKYPDDFLSGKVRKTAERLLKRTGGSTE

SEQ ID NO: 193205 - protein, 162 aa, Zea Mays
MQGISICGSVASPHGANCRRACVARNDVRLPCEVNAVSQGLHSLHWWCAHKPQMKNNGRRMNAAVKTNARWLFGGDGRSNDARLERSESANEDILIFYFQMDLQTRIQYALNIEQFDVAKQLREKLTEIETEIIRQREARRGSPKTEAQDKALNLIRVRWSP

SEQ ID NO: 193206 - protein, 164 aa, Zea Mays
MQGISICGSVASPHGANCRRACVARNDVRLPCEVNAVSQGLHSLHWWCAHKPQMKNNGRRMNAAVKTNARWLFGGDGRSNDARLERSESANEDILIFYFQMDLQTRIQYALNIEQFDVAKQLREKLTEIETEIIRQREARRGSPKTEAQDKALNLIRVRLAEGY

SEQ ID NO: 193207 - protein, 208 aa, Zea Mays
MDGFGGSLVEYIVRETEKLHAQVGRYKSPDEHPFFSKDLPEPRLPPMQYPRVLHPIADSININKEIWKMYFDELLPRLVKEGSDGNAGSSALCDTTCLQALSRRIHYGKFVAEAKFQESPEAYTPAIIAQDRDQLMNLLTYETVERAIEHRVEAKAKIFGQEVNIGAKDNGSPPVYKIRPSLVAELYSYRIMPLTKEVEVAYLLKRLD

SEQ ID NO: 193208 - protein, 358 aa, Zea Mays
MATTAQLAGTGTARSAQGPPNQKRSDPRSLAKPSSSRSVPPFKLVTKPAAASPAAAHWGDLARGPQGTSRVAFGPAPRNKGLRTANNSATPMAKYERSFSWEERVDRSEILTLDSIRQVLIRLEDSIIFGLLERAQFCYNADTYDSNAFHMDGFGGSLVEYMVRETEKLHAQVGRYKSPDEHPFFSKDLPEPQLPPMQYPRVLHPIADSININKEIWTMYFDELLPRLVKEGSDGNAGSNALCDTTCLQALSKRIHYGKFVAEAKFQESPEAYTPAIIAQDRDQLMRLLTYETVERAVEHRVEAKAKIFGQEVNIGAKDNGSQPVYKIRPSLVAELYSYRIMPLTKEVEVAYLLRRLD

SEQ ID NO: 193209 - protein, 211 aa, Zea Mays
MAPMKLYGAVMSWNVTRCATALEEAGSDYEIVPINFATAEHKSPEHLPFGQVPALQDGDLYLFESRAICKYAARKNKPELLREGNLEEAAMVDVWIEVEANQYTAALNPILFQVLISPMLGGTTDQKVVDENLEKLKKVLEVYEARLTKCKYLAGDFLSLADLNHVSVTLCLFATPYASVLDAYPHVKAWWSGLMERPSVQKVAALMKPSA

SEQ ID NO: 193210 - protein, 148 aa, Zea Mays
MFSPNRNLSPLPFPASRLAVSFGLPPLSPLRRSHHRADPDGLRRLIGRRRWQIAVPGVPQVPQKAVGDHGPLRLARVPQRAAWRARVPRQVPGHRARRPRQGHRAHIRSGDSLRHQVLHPRPPPEPSARAPHPAPQARPRALHGHQAV

SEQ ID NO: 193211 - protein, 123 aa, Zea Mays
MIYRHEMKETHGESIFYSYVHDILVSRWTKSNTPLHCLAHSLNPNYYTDAWINEVPNRQAPHNNEENSEMRNACFRRYFSGEELKKIKLQHANFSLFGTGFNSFESLEDRGYAKGCYGSCCGA

SEQ ID NO: 193212 - protein, 408 aa, Zea Mays
MNLDRSFHPGRSDRAPPPPPPPPPPSSQPSLPLATTPPPSIVVQAPPHSPFGGVTHEADPPPTARHRHHPPPRRLAVPVPALPRGLVRLRRTQGDLLRGRVGGRRAPAPCPTRRAFTIASSRLAALSNVTVCVELCSGTVDWGEAPVLPSVTAGDQPAVLGAAGRACAVLAAALAAPLGALLQDVAGVLPGHNFASVRDPQLLLSCFGKPQTKDARINAMRSAISETFPEPNRRLLQRILKMMHTVASHTSENRMTASAVAACMAPLLLRPLLAGECEMDEVFDMDGDDSAQLLAAANAANSAQGIVATLLEEYEGIFHDEHLICSLSPESQIEDSGTEASTDDGNLEAKGNGFHDAENDVDQELDDDNGVEHILSGKLSESSGYAGSDLYDYKSREPDYCIGEQVLR

SEQ ID NO: 193213 - protein, 208 aa, Zea Mays
MGFSEPVSDKLLPDLAPQEQHVLTLVLDLNETLVYSDWKRERGWRTFKRPGVDAFLEHLGRFYEIVVYSDQLSMYVDPVVDRLDPKGNIRHRLSRVATKYENGKHYRDLSKLNRNPAQVLYISAHAKESSLQPENSVEIKPWKLENDDTQLLDLIPFLEYVAMARPSDIRAVLASYQSGDIAAEFIERSKEHQRRMQEQKKSGRIWRR

SEQ ID NO: 193214 - protein, 321 aa, Zea Mays
MSRVAGSRLLPRISALSFCTASPATAAASSSSSTAAVAAAAATASEASSTAGDPSSQPPQTARKPWGALKFAAFAAVSTAVGGTGYVSYAYSLEEVDQMTRELRKKSKQPIPEDASGFERFQAMAYSAAMKVPVAAIEVYMDVRSQIEDQIRRERGWRTFKRPGVDAFLEHLGRFYEIVVYSDQLSMYVDPVVDRLDPKGNIRHRLSRVATKYENGKHYRDLSKLNRNPAQVLYISAHAKESSLQPENSVEIKPWKLENDDTQLLDLIPFLEYVAMARPSDIRAVLASYQSGDIAAEFIERSKEHQRRMQEQKKSGRIWRR

SEQ ID NO: 193215 - protein, 234 aa, Zea Mays
MSRVAGSRLLPRISALSFCTASPATAAASSSSSTAAVAAAAATASEASSTAGDPSSQPPQTARKPWGALKFAAFAAVSTAVGGTGYVSYAYSLEEVDQMTRELRKKSKQPIPEDASGFERFQAMAYSAAMKVPVAAIEVYMDVRSQIEDQIRGFSEPVSDKLLPDLAPQEQHVLTLVLDLNETLVYSDWKRERGWRTFKRPGVDAFLEHLGRFYEIVVYSDQLSMAGSKGQYST

SEQ ID NO: 193216 - protein, 356 aa, Zea Mays
MSRVAGSRLLPRISALSFCTASPATAAASSSSSTAAVAAAAATASEASSTAGDPSSQPPQTARKPWGALKFAAFAAVSTAVGGTGYVSYAYSLEEVDQMTRELRKKSKQPIPEDASGFEAMAYSAAMKVPVAAIEVYMDVRSQIEDQIRGFSEPVSDKLLPDLAPQEQHVLTLVLDLNETLVYSDWKRERGWRTFKRPGVDAFLEHLGRFYEIVVYSDQLSMYVDPVVDRLDPKGNIRHRLSRVATKYENGKHYRDLSKLNRNPAQVLYISAHAKESSLQPENSVEIKPWKLENDDTQLLDLIPFLEYVAMARPSDIRAVLASYQSGDIAAEFIERSKEHQRRMQEQKKSGRIWRR

SEQ ID NO: 193217 - protein, 219 aa, Zea Mays
MDVRSQIEDQIRGFSEPVSDKLLPDLAPQEQHVLTLVLDLNETLVYSDWKRERGWRTFKRPGVDAFLEHLGRFYEIVVYSDQLSMYVDPVVDRLDPKGNIRHRLSRVATKYENGKHYRDLSKLNRNPAQVLYISAHAKESSLQPENSVEIKPWKLENDDTQLLDLIPFLEYVAMARPSDIRAVLASYQSGDIAAEFIERSKEHQRRMQEQKKSGRIWRR

SEQ ID NO: 193218 - protein, 155 aa, Zea Mays
MQGSGALPGLTGTGRGGGFLPCGSLGKRTPAGRRGATSVRAVDGASVAAAASAAADSPLPPVQVTWQIAVGALAGVTPFVVAGVEFGKRIKKCQVCGGSGLVTKNDYYVRCQKCGKKSPTMAYLWRIKRDNGFLPQVVFFRGSLGEDSSRGERGL

SEQ ID NO: 193219 - protein, 540 aa, Zea Mays
MDDIASEAPVGAFAIGPSTALGGAVALRVLLCGSAARLRHRLAAALRAALPVAAAWLHPRDNTRGILLAVCAVALLLRGRRGRAGLRARVQSAYRCKFWRNMMRAALTYEEWAHAARMLELEAAPRRASDADLYDEELVRNKLRELRHRRQEGSLRDIVFCMRADLLRNLGNMCNPELHKGRLQVPRLIKEYIEEVSTQLKMVCDSDSDELPLEEKLAFMHETRHAFGRTALLLSGGASLGSFHVGVVKTLVEHKLLPRIVSGSSVGSIMCSIVATRSWPELESFFEEWHSLKFFDQMGGIFPVVKRILTHGALHDIRHLQVLLRNLTSNLTFQEAYDITGRILVVTVCSPRKHEPPRCLNYLTSPHVLIWSAVTASCAFPGLFEAQELMAKDRFGQTIPFHAPFLLGMEERTVAPTRRWRDGSLESDLPMKQLKELFNVNHFIVSQANPHIAPLLRLKEIIRAYGGSFAAKLAELAEMEVKHRCNQVLELGFPLGGLAKLFAQDWEGDVTVVMPATLAQYSKMIQNPSYAELQKAANQG

SEQ ID NO: 193220 - protein, 466 aa, Zea Mays
MDDIASEAPVGAFAIGPSTALGGAVALRVLLCGSAARLRHRLAAALRAALPVAAAWLHPRDNTRGILLAVCAVALLLRGRRGRAGLRARVQSAYRCKFWRNMMRAALTYEEWAHAARMLELEAAPRRASDADLYDEELVRNKLRELRHRRQEGSLRDIVFCMRADLLRNLGNMCNPELHKGRLQVPRLIKEYIEEVSTQLKMVCDSDSDELPLEEKLAFMHETRHAFGRTALLLSGGASLGSFHVGVVKTLVEHKLLPRIVSGSSVGSIMCSIVATRSWPELESFFEEWHSLKFFDQMGGIFPVVKRILTHGALHDIRHLQVLLRNLTSNLTFQEAYDITGRILVVTVCSPRKHEPPRCLNYLTSPHVLIWSAVTASCAFPGLFEAQELMAKDRFGQTIPFHAPFLLGMEERTVAPTRRWRDGSLESDLPMKQLKELFNVNHFINAETLFIGHASVHVKHEDISSF

SEQ ID NO: 193221 - protein, 474 aa, Zea Mays
MDDIASEAPVGAFAIGPSTALGGAVALRVLLCGSAARLRHRLAAALRAALPVAAAWLHPRDNTRGILLAVCAVALLLRGRRGRAGLRARVQSAYRCKFWRNMMRAALTYEEWAHAARMLELEAAPRRASDADLYDEELVRNKLRELRHRRQEGSLRDIVFCMRADLLRNLGNMCNPELHKGRLQVPRLIKEYIEEVSTQLKMVCDSDSDELPLEEKLAFMHETRHAFGRTALLLSGGASLGSFHVGVVKTLVEHKLLPRIVSGSSVGSIMCSIVATRSWPELESFFEEWHSLKFFDQMGGIFPVVKRILTHGALHDIRHLQVLLRNLTSNLTFQEAYDITGRILVVTVCSPRKHEPPRCLNYLTSPHVLIWSAVTASCAFPGLFEAQELMAKDRFGQTIPFHAPFLLGMEERTVAPTRRWRDGSLESDLPMKQLKELFNVNHFIVSQANPHIAPLLRLKEIIRAYGGSFAAKED

SEQ ID NO: 193222 - protein, 230 aa, Zea Mays
MVATAPTVLIILRMRLPDVKLLKLHWSVIQMLLGLRSGAVHIRIGIIDLPLVGKHNKGCHCKKSGCLKKYCECFQANILCSENCKCMDCKNFEGSEERRNLFQGDHKNAINIQQATNAAVNGAIGTTGFPSPSTSRKRKHIDPSLDHSNKEHAAHRNCHIPQKNAVPDGSIPISQSAHPPTLGPFKVTYRPLLADIVQAEDVKELCKLLVVVSGEAAKTYAGTALVFMLI

SEQ ID NO: 193223 - protein, 346 aa, Zea Mays
MDCKNFEGSEERRNLFQGDHKNAINIQQATNAAVNGAIGTTGFPSPSTSRKRKHIDPSLDHSNKEHAAHRNCHIPQKNAVPDGSIPISQSAHPPTLGPFKVTYRPLLADIVQAEDVKELCKLLVVVSGEAAKTYADRKAKEERVGKKEDERAEQKEDDRAGSLALTNHDREGNNQDPDKKASIDDHSSRGTHTGKANQEESRPNCADDQKSNRPMSPGTLALMCDEQAFEKMCDEQDTVFTASQNAVPQQTVTVNQNQSALYAEQERIVLTEFRDCLRKLVTYGRMKEERYAMEIKSETSGHPGQVNGVSQVPYSKVEVPVVKTDPQSSSSHPVAGKPVTGLLDKN

SEQ ID NO: 193224 - protein, 371 aa, Zea Mays
MAGKEQGGGGPPQRPPMPAASMQPPIKKLVRQLDFNSAALAGNPAMAAAAAAVSRALQPRALPAGFQHPQHVRAAVPMVVPQQLHQRALPVMRPHPVVGHVPRHAVPLAVPVPQLRPMPPQPVQRPPVAVPLKPDSPKPWARLYEGKDSTPTKKKCCNCRNSRCLKLYCECFASGTHCDGCNCTNCFNNPENEVARREAIEATLERNPDAFRPKIGSSPHTNRNNEVSSDLPLVGKHNKGCHCKKSGCLKKYCECFQANILCSENCKCMDCKNFEGSEERRNLFQGDHKNAINIQQATNAAVNGAIGTTGFPSPSTSRKRKHIDPSLDHSNKEHAAHRNCHIPQTGKRRKRGLARRKMKGQNKRKMTGQVP

SEQ ID NO: 193225 - protein, 596 aa, Zea Mays
MAGKEQGGGGPPQRPPMPAASMQPPIKKLVRQLDFNSAALAGNPAMAAAAAAVSRALQPRALPAGFQHPQHVRAAVPMVVPQQLHQRALPVMRPHPVVGHVPRHAVPLAVPVPQLRPMPPQPVQRPPVAVPLKPDSPKPWARLYEGKDSTPTKKKCCNCRNSRCLKLYCECFASGTHCDGCNCTNCFNNPENEVARREAIEATLERNPDAFRPKIGSSPHTNRNNEVSSDLPLVGKHNKGCHCKKSGCLKKYCECFQANILCSENCKCMDCKNFEGSEERRNLFQGDHKNAINIQQATNAAVNGAIGTTGFPSPSTSRKRKHIDPSLDHSNKEHAAHRNCHIPQKNAVPDGSIPISQSAHPPTLGPFKVTYRPLLADIVQAEDVKELCKLLVVVSGEAAKTYADRKAKEERVGKKEDERAEQKEDDRAGSLALTNHDREGNNQDPDKKASIDDHSSRGTHTGKANQEESRPNCADDQKSNRPMSPGTLALMCDEQAFEKMCDEQDTVFTASQNAVPQQTVTVNQNQSALYAEQERIVLTEFRDCLRKLVTYGRMKEERYAMEIKSETSGHPGQRTHDRVVAVNCRLQRLLPQDSRS

SEQ ID NO: 193226 - protein, 634 aa, Zea Mays
MAGKEQGGGGPPQRPPMPAASMQPPIKKLVRQLDFNSAALAGNPAMAAAAAAVSRALQPRALPAGFQHPQHVRAAVPMVVPQQLHQRALPVMRPHPVVGHVPRHAVPLAVPVPQLRPMPPQPVQRPPVAVPLKPDSPKPWARLYEGKDSTPTKKKCCNCRNSRCLKLYCECFASGTHCDGCNCTNCFNNPENEVARREAIEATLERNPDAFRPKIGSSPHTNRNNEVSSDLPLVGKHNKGCHCKKSGCLKKYCECFQANILCSENCKCMDCKNFEGSEERRNLFQGDHKNAINIQQATNAAVNGAIGTTGFPSPSTSRKRKHIDPSLDHSNKEHAAHRNCHIPQKNAVPDGSIPISQSAHPPTLGPFKVTYRPLLADIVQAEDVKELCKLLVVVSGEAAKTYADRKAKEERVGKKEDERAEQKEDDRAGSLALTNHDREGNNQDPDKKASIDDHSSRGTHTGKANQEESRPNCADDQKSNRPMSPGTLALMCDEQAFEKMCDEQDTVFTASQNAVPQQTVTVNQNQSALYAEQERIVLTEFRDCLRKLVTYGRMKEERYAMEIKSETSGHPGQLLKCPNWETESARVKMVHDFRKLLAQQYLELPSLSSHMMFNQPSEKNIPWYQKTLRTTQGP

SEQ ID NO: 193227 - protein, 610 aa, Zea Mays
MAGKEQGGGGPPQRPPMPAASMQPPIKKLVRQLDFNSAALAGNPAMAAAAAAVSRALQPRALPAGFQHPQHVRAAVPMVVPQQLHQRALPVMRPHPVVGHVPRHAVPLAVPVPQLRPMPPQPVQRPPVAVPLKPDSPKPWARLYEGKDSTPTKKKCCNCRNSRCLKLYCECFASGTHCDGCNCTNCFNNPENEVARREAIEATLERNPDAFRPKIGSSPHTNRNNEVSSDLPLVGKHNKGCHCKKSGCLKKYCECFQANILCSENCKCMDCKNFEGSEERRNLFQGDHKNAINIQQATNAAVNGAIGTTGFPSPSTSRKRKHIDPSLDHSNKEHAAHRNCHIPQKNAVPDGSIPISQSAHPPTLGPFKVTYRPLLADIVQAEDVKELCKLLVVVSGEAAKTYADRKAKEERVGKKEDERAEQKEDDRAGSLALTNHDREGNNQDPDKKASIDDHSSRGTHTGKANQEESRPNCADDQKSNRPMSPGTLALMCDEQAFEKMCDEQDTVFTASQNAVPQQTVTVNQNQSALYAEQERIVLTEFRDCLRKLVTYGRMKEERYAMEIKSETSGHPGQRKLYTRDSVGDGDGEPASKQTADSLIRMDTKPNKTKR

SEQ ID NO: 193228 - protein, 577 aa, Zea Mays
MAGKEQGGGGPPQRPPMPAASMQPPIKKLVRQLDFNSAALAGNPAMAAAAAAVSRALQPRALPAGFQHPQHVRAAVPMVVPQQLHQRALPVMRPHPVVGHVPRHAVPLAVPVPQLRPMPPQPVQRPPVAVPLKPDSPKPWARLYEGKDSTPTKKKCCNCRNSRCLKLYCECFASGTHCDGCNCTNCFNNPENEVARREAIEATLERNPDAFRPKIGSSPHTNRNNEVSSDLPLVGKHNKGCHCKKSGCLKKYCECFQANILCSENCKCMDCKNFEGSEERRNLFQGDHKNAINIQQATNAAVNGAIGTTGFPSPSTSRKRKHIDPSLDHSNKEHAAHRNCHIPQKNAVPDGSIPISQSAHPPTLGPFKVTYRPLLADIVQAEDVKELCKLLVVVSGEAAKTYADRKAKEERVGKKEDERAEQKEDDRAGSLALTNHDREGNNQDPDKKASIDDHSSRGTHTGKANQEESRPNCADDQKSNRPMSPGTLALMCDEQAFEKMCDEQDTVFTASQNAVPQQTVTVNQNQSALYAEQERIVLTEFRDCLRKLVTYGRMKEERYAMEIKSETSGHPGQGFGR

SEQ ID NO: 193229 - protein, 248 aa, Zea Mays
MPKIKNLSNACKVSFSPEGPISEEVLERVRALLDEIRPLDVGLDNEAQIARNWSSTTRPSNGRRGRNGANQFTAPIKYLHIHECESFSMGIFCMPPSSVIPLHNHPGMTVLSKLLYGRLHAESYDWVDVPDHPIDQLQPRPAKLVKDCEMTAPETTILYPNAGGNIHTFRAITPCALFDVLSPPYSAEDGRHCSYFRKSQMNQPSVVLPAEIDSTQVVWLEELEDHQPPEGFVVARGDDTMESIIDAL

SEQ ID NO: 193230 - protein, 328 aa, Zea Mays
MQRDTSSSDVSASHVGRVRRRKHPSEATTDGNRANGQPLLVNDQNKYKSMLIRTYSTVWMIGGFAFIIYVGHLYIWAMVVVIQIYMARELFNLLRKSSEEKQLPGFRLLNWHFFFTAMLYTYGRFLSRQLVNTVTSDHLLYKVVSGLIKYQMFICYFLYIAGFVWFILTLKKKTYKYQFKQYAWTHMILLTVFAQSAFTVANIFEGIFWFLLPASLIVINDIFAYLFGFFLGRTPLIKLSPKKTWEGFIGASVTTIISAFLLANVMGRFQWLTCPRKDLSTGWLYCDPGPMFKPEHYSLGESVPHWNIQVDTLTNITDIVSMIYGHYM

SEQ ID NO: 193231 - protein, 327 aa, Zea Mays
MQRDTSSSDVSASHVGRVRRRKHPSEATTDGNRANGQPLLVNDQNKYKSMLIRTYSTVWMIGGFAFIIYVGHLYIWAMVVVIQIYMARELFNLLRKSSEEKQLPGFRLLNWHFFFTAMLYTYGRFLSRQLVNTVTSDHLLYKVVSGLIKYQMFICYFLYIAGFVWFILTLKKKTYKYQFKQYAWTHMILLTVFAQSAFTVANIFEGIFWFLLPASLIVINDIFAYLFGFFLGRTPLIKLSPKKTWEGFIGASVTTIISAFLLANVMGRFQWLTCPRKDLSTGWLYCDPGPMFKPEHYSLGESVPHWVRKTVLLLNLFILILFLVLSL

SEQ ID NO: 193232 - protein, 324 aa, Zea Mays
MQRDTSSSDVSASHVGRVRRRKHPSEATTDGNRANGQPLLVNDQNKYKSMLIRTYSTVWMIGGFAFIIYVGHLYIWAMVVVIQIYMARELFNLLRKSSEEKQLPGFRLLNWHFFFTAMLYTYGRFLSRQLVNTVTSDHLLYKVVSGLIKYQMFICYFLYIAGFVWFILTLKKKTYKYQFKQYAWTHMILLTVFAQSAFTVANIFEGIFWFLLPASLIVINDIFAYLFGFFLGRTPLIKLSPKKTWEGFIGASVTTIISAFLLANVMGRFQWLTCPRKDLSTGWLYCDPGPMFKPEHYSLGESVPHWSIVQNHVLHDHMHDMLTI

SEQ ID NO: 193233 - protein, 239 aa, Zea Mays
MILLTVFAQSAFTVANIFEGIFWFLLPASLIVINDIFAYLFGFFLGRTPLIKLSPKKTWEGFIGASVTTIISAFLLANVMGRFQWLTCPRKDLSTGWLYCDPGPMFKPEHYSLGESVPHWFPWKDLAIMPVQWHALALGLFASIIAPFGGFFASGFKRAFKIKDFGDSIPGHGGITDRMDCQMVMAVFAYIYHQSFIAPQNFSVEIILDQILRNLTYEEQKYLYEQLGEMFHERQLGQN

SEQ ID NO: 193234 - protein, 447 aa, Zea Mays
MARNAVDKATSIDAQLRLLAPQKLSDDDKLVEYDALLLDRFLDILQDLHGEDIRETVQECYELAAEYENKLDPKMLDEIGNVLTSLDPGDSIVITKSFSHMLILANLAEEVQIAYRRRIKLKKGDFVDENSATTESDIEETLKRLMHQLKKSPLEVFDALKNQTVDLVLTAHPTQSVRRSLLQKHGRIRNCLTQLYAKDITPDEKQELDEALQREIQAAFRTDEIRRAPPTPQDEMRAGMSYFHETIWKGVPKFLRRVDTALKNIGINERLPYNAPIIQFSSWMGGDRDGNPRVTPEVTRDVCLLARMMAANLYNAQIEDLMFELSMWRCSDELRVKVDQLYHSSKKDTTKHYIEFWKQVPPSEPYRVILSDVRDKLYNTRERARHLLASGFSEIPEEATFTDVEQFLEPLELCYRSLCACGDRSVADGSLLDFLRGETPRMATIGT

SEQ ID NO: 193235 - protein, 516 aa, Zea Mays
MARNAVDKATSIDAQLRLLAPQKLSDDDKLVEYDALLLDRFLDILQDLHGEDIRETVQECYELAAEYENKLDPKMLDEIGNVLTSLDPGDSIVITKSFSHMLILANLAEEVQIAYRRRIKLKKGDFVDENSATTESDIEETLKRLMHQLKKSPLEVFDALKNQTVDLVLTAHPTQSVRRSLLQKHGRIRNCLTQLYAKDITPDEKQELDEALQREIQAAFRTDEIRRAPPTPQDEMRAGMSYFHETIWKGVPKFLRRVDTALKNIGINERLPYNAPIIQFSSWMGGDRDGNPRVTPEVTRDVCLLARMMAANLYNAQIEDLMFELSMWRCSDELRVKVDQLYHSSKKDTTKHYIEFWKQVPPSEPYRVILSDVRDKLYNTRERARHLLASGFSEIPEEATFTDVEQFLEPLELCYRSLCACGDRSVADGSLLDFLRQVSTFGLSLVRLDIRQESDRHTDVMDAITEYLGIGSYRKWPEEKRQEWLLSELNGKRPLFGPDLPKSDEIADILSQHQQR

SEQ ID NO: 193236 - protein, 337 aa, Zea Mays
MAAAAHQVSAVIFDLDGTLLDTERATRDVLTEFLAAYGKVPDAGEEEKRLGQMYLESTTGIIRDYGLPLTVDEYSKAMYPLYLKRWQKAKPLPGVKRLVKHLHKNGVPLALASNSIRRNVDHKLPKLEDWGKCFSVILGGDQVPNGKPSPDIFLEAAKRLGANPSSCLVIEDSVVGVKGAKASGAKAVAVPSLQNQRNHYYIADVILYSLLDFQPEMWGLPPFEDRIQGVLPIDPLLSNARIGGKILNNIHWVISDDCAYEYIPDQISGIFLGWAKSKVHGFSKVIVATGWDFSQQTVERVMHVHFLDCSGTVETEPVKLLIIGYIRKLQSAVITFS

SEQ ID NO: 193237 - protein, 121 aa, Zea Mays
MWGLPPFEDRIQGVLPIDPLLSNARIGGKILNNIHWVISDDCAYEYIPDQISGIFLGWAKSKVHGFSKVIVATGWDFSQQTVERVMHVHFLDCSGTVETEPVKLLIIGYIRKLQSAVITFS

SEQ ID NO: 193238 - protein, 220 aa, Zea Mays
MFNKGQGKTMGSYYTLLNALIEDGRIEEAEELFGMVFSRYMEGLPRTFFMRMISFYYSVEAYDKMFEIFADMEELGVRPDGSIIRMLGDVFQKLEMMDKYEKLKKKYPPPKWDYRHIKGKRIRIRVYPDSNPEVAAKGDPDTDELEELESTHLNNELDEAASSGLDRSVLDDAASGDLEYITHVVILPRHLCFGLTSQNPCRHTSKTWASLSSEVFYYLE

SEQ ID NO: 193239 - protein, 185 aa, Zea Mays
MFCLRGYWSPSLAPVREGPVRHHIKFNSVVVCGARGPRPRYPRVWKTRKKIGTISKSQKLVECIKGLSNVKEEVYGALDSFVAWELEFPLIVVKKALKKLEDEKEWKRIIQVIKWMFNKGQGKTMGSYYTLLNALIEDGRIEEAEELFGMVFSRYMEGLPRTFFMRMISFYYSVEAYDKMFEDAR

SEQ ID NO: 193240 - protein, 50 aa, Zea Mays
MDKEKDPMSGIMDLMKNMYEDGDEDMKRTIAKAWSDASEAGRARNIEFSS

SEQ ID NO: 193241 - protein, 126 aa, Zea Mays
MSSIRCVLSRWRTPCPPVWTARRYLLAASCGIQLPCPTCCSPRARWWRRTPCLSRLTSLRARWRRRMPYPSRPTSSTASLWMAQRLAVVASCSPKSSATASLSWLLQLPTDEFLLKYVEKKQEGLW

SEQ ID NO: 193242 - protein, 314 aa, Zea Mays
MGIDLNMVDGEGHERRPPPVTCRELWHACAGPVVALPRRGSLVVYLPQGHLAAAGGGDVAADLPPHVVCRVADVELCADAATDEVCARLALVAEGEAFGRNLGGGGVEGDDGMEDFDAERKSGMLHMFCKTLTASDTSTHGGFSVPRRAAEDCFPPLDYNQLRPSQELVAKDLHGAKWKFRHIYRGQPRRHLLTTGWSSFVNKKKLVSGDAVLFLRGDDGELRLGVRRAIQLKNEALFEDFNSDSTKRHSLTAVADSLKNRSVFHISYNPRATASEYIIPYAKFLKSLNHPVCIGARINFQCHNEDAIWSGCSH

SEQ ID NO: 193243 - protein, 360 aa, Zea Mays
MKWPGSKWRSLLVRWEDGAECNGQDRVSPWEIEIAGGSVSVSHSLSASSSKRTKLCPQGNLDVPAMWNGCTDSMETGKLPRVLQGQELMSFRTCHVPCAPQTAEAAKLQSSDASRFLSNAHGCALGGPTSRLAVHSSGFTYQCVGFNESIGFSEVLQGQEISRAVPKFQGMMSEACSLKDRYGLHSYMRAPVAVNGLSATTQECSLALSTPPGAQVPSLYPGNVVNRTVVPQLGLARKFGGGGTNGQQSGPFDRPRELWTRPQHETPDQMNLDQFETRRPSVPVDAAKLGSGGGEVRKTSCRLFGFSLTEKILPADDDDVKEVSYETECQNPRMLDLFGYNCSTPSAALPALCAAAPFGM

SEQ ID NO: 193244 - protein, 295 aa, Zea Mays
MWNGCTDSMETGKLPRVLQGQELMSFRTCHVPCAPQTAEAAKLQSSDASRFLSNAHGCALGGPTSRLAVHSSGFTYQCVGFNESIGFSEVLQGQEISRAVPKFQGMMSEACSLKDRYGLHSYMRAPVAVNGLSATTQECSLALSTPPGAQVPSLYPGNVVNRTVVPQLGLARKFGGGGTNGQQSGPFDRPRELWTRPQHETPDQMNLDQFETRRPSVPVDAAKLGSGGGEVRKTSCRLFGFSLTEKILPADDDDVKEVSYETECQNPRMLDLFGYNCSTPSAALPALCAAAPFGM

SEQ ID NO: 193245 - protein, 643 aa, Zea Mays
MTHETTAVSVSRCYWTALSALTSTDALIRMLGPAVAFPKAADPDDDPTKWQPENSAEHLACETKDGAPEEGKGKQPPRPRPFRSTSTRAQRSRRRMRMRMGKGPSSRAGSRHRQFRARAMTRVDDLQEVFSGLQSARKDSRSADAAVLEAQLQQMLREWRSELSDPSPASSLQGNARELSDPPSDTLRLLQLVVAEEEDDATSKMVEQQQQQPPPPLPANRSQGHAHVVCQGMKPEPREEAVDVAVDQPQLLSQGVLPNGAATASAMFHDQLYYVNQELTVEDFLYDDDYKIDLSGSNLDVINNLEGIVQLEYPDHNLPQGLAPNAYLDMNSCGQSAGAVFLHMPDLLTTMTSAPSAFLKPKCALWDCPRPAIGSERWHNYCSMYHADLAVQEEGPPGTMPVIRPRGIDLKDGPLFAALSAKVQGKNVGVPICEGAATAKSPWNAPGESIREWLFFDKPRRAFDSGNRKQRSLPDYNGRGWHESRKQVMKDFGGLKRSYYMDPQPSNGYEWHLYEYEINDCDAFALYRLEFKSSDAKKIAKSKLGCNPLNEIQQQMDRLSADSPVDTKRTARSRTEPNPIDVNTNIYSVPNTTVQTDVPNAYQPGSQVDQMTYLNGSVVYGPHLPYGYSTERSDFYWNSNDGT

SEQ ID NO: 193246 - protein, 59 aa, Zea Mays
MKLQEQGKTEQARKDLERLALIRQQRADAAKKREEEKAGAEEVRSTEVTATVMDQESTK

SEQ ID NO: 193247 - protein, 268 aa, Zea Mays
MGPLRTRVLGRGTSVSFSCDPLVLYIASCVWGLQPRLVWALPIKGPIKGTIVGLSPIQSLLTGCRGHTQHSALSCLIAPGTRRVLRPAASDDAAAEPFAGAGHHGRHVRVRRPSGGDGQVLGREPTRAGRVRARVPRHGGRAGGGHQEAAGRRRAGRPRVPRRGGDHQPRAPQEPRLPRRLLPLRRAAAARVRGQGVAGRRWTGRGGGGSRLAPRRASRTCTKTVIQRSSIVTSKRRTSFWITITSQRLQISGWPNTKQLKSPLFLRV

SEQ ID NO: 193248 - protein, 71 aa, Zea Mays
MSLQSPPSNLSYVGSSISVVVPVQWRAGGSDVGDDPCRGAQVHVSGRHLPKIHRFYWYTFYFLCFSVGENI

SEQ ID NO: 193249 - protein, 121 aa, Zea Mays
MIHAEVHKYMLVDGTCQRYTVSTGTHFIFYVFQLEKTFKTTFSSFVLHMGLVSRHLKEEGNGGVKFGQYIYTSWSIGINVLNLLKFQIILTIRLFYCLWRCALYMSTNYIQIPFVGYLWCV

SEQ ID NO: 193250 - protein, 114 aa, Zea Mays
MIGVLELLIAGLFELLSFYDHDILRHKYITCTFAVFQLEKTFKTTFSSFVLHMGLVSRHLKEEGNGGVKFGQYIYTSWSIGINTIRLFYCLWRCALYMSTNYIQIPFVGYLWCV

SEQ ID NO: 193251 - protein, 117 aa, Zea Mays
MIGVLELLIAGLFELLSFYDHDILRHKYITCTFAVFQLEKTFKTTFSSFVLHMGLVSRHLKEEGNGGVKFGQYIYTSWSIGINVLNLLKFQIILVRAAIKVKALVIICFTSSGQAAR

SEQ ID NO: 193252 - protein, 106 aa, Zea Mays
MIGVLELLIAGLFELLSFYDHDILRHKYITCTFAVFQLEKTFKTTFSSFVLHMGLVSRHLKEEGNGGVKFGQYIYTSWSIGINVRAAIKVKALVIICFTSSGQAAR

SEQ ID NO: 193253 - protein, 75 aa, Zea Mays
MMIILCLIALIYSQIIFSCFSCFLIVAQFHLTHILATYMYVTKQTIRLFYCLWRCALYMSTNYIQIPFVGYLWCV

SEQ ID NO: 193254 - protein, 697 aa, Zea Mays
MMSRSYTNLLDLAEGNFAALGPAAGAGGGGRQRQGSFGLRRMSRVMTVPGTLSELDGEDESEPAATSSVASDAPSSVAADRLIVVSNQLPIVARRRPDGRGWSFVWDDDSLLLQLRDGIPEDMEVLFVGSLRADVPVAEQDEVSQALLDRFRCAPVFLPDRLNDRFYHGFCKRQLWPLFHYMLPFSSSASAAGTTSSSSAATCNGRFDRSAWEAYVLANKFFFEKVVEVINPEDDYVWVHDYHLMALPTFLRRCFNRLRIGFFLHSPFPSSEIYRTLPVREEILKALLNCDLIGFHTFDYARHFLSCCSRMLGIEYQSKRGYIELDYFGRTVGIKIMPVGVHMGQLELGLRLPDREWRLSELQRQFQGKTVLLGVDDMDIFKGINLKLLAFENMLRTHPKWQGRAVLVQIANPARGRGKDLEAIQAEIEESCQRINGDFGQSGYSPVVFIGRDVSSVEKIAYYTIAECVVVTAVRDGMNLTPYEYVVCRQGAPGSQSVSEVSGPKKSMLVVSEFIGCSPSLSGAIRVNPWNIEATAEAMNEAISMPEQEKQLRHEKHYRYVRSHDVAYWSKSFIIDLERVCKDHFKRTCWGIGLGFGFRVVALDPHFTKLNMDSIINAYELSESRAILLDYDGTLVPQTSLNKEPSPQVLSIINTLCSDSRNIVFLVSGRDKDTLGKWFSSCPRLGIAAEHGYFLRE

SEQ ID NO: 193255 - protein, 94 aa, Zea Mays
MPQVLNWRLIRLMNLSHISHHLILVTNNQNPVINQLKGLSQFSLAFSEHDDCFNSQFYSTQFSDGNSTTNNWFYECSRVKLLNLLCSKFSSWAR

SEQ ID NO: 193256 - protein, 1095 aa, Zea Mays
MGRKGSEMSPSKRYPLRSPHSSGRVLRSALANDNKDSEPLNAAAATQAAVKKRSGSQLDSPNSSVRLFHSTSKNKNEACSGPLNDRIPDKPAANKRKRASPSQVGSSSNSVRVLRSAIKNKDEACSKSLSDRTAGEPAANKRKNVNRSKTGSLSCGVRVLLSASKAKDETSTKPLNDSAAVEPASGKRKGTSPSKVGSASNSVRVLRSTSKYKNETCTEPLNDSGAVEPAANKRKGVSRSKKRSLNSSVRVLRSASNNKIEVSIKPLGNSTAGQPAAKRRKSGSSFEAGSPVSSARVLRSTSERKNEASKPLNESTAAQPAARKKKAGVISKTDNPKIGLRVLRSASGKKNEACIGHVNDSTSAEPTVTKRNRKPSMDRSPKKDYLKICQRVRYILNRMNYQQTFIQAYASEGWKGQSLEKIRPEKELERAKAEILQCKLRIREAFRNMDSLLSKGKLEESLFDSAGEISSEDIFCAVCGSKDVTLQNDIILCDGACDRGFHQNCLNPPLLTEDIPPGDQRWLCPACVCKADSIDALNELQGSKLSIHDSWEKVFPEAASIANGSKQVDTSDLLPDHIKHSDNPALVEGLMVNEVRLSAEDDSKADDLGLPSEDSGDGDFDPSGPDSSEDQKDGLNSEESDFTSDSDDFCAEIAKSCGQDEVSASPLSNVINHTYRMKLRASNNRSNEENHDHVFMDMELGQDMVLPVSSRRQVERLDYKKLYDEAYGKESSNSSDDKEWSGKELLEGSETDSLSERPHPVKRCSRRAQAEQQNNEHTPQRERLHGSESEQKTGILRSNGSSSTGRKFGPVATQKLKVHFEKDPYPSRETKENISEELGLTFNQVSRWFSSTRHYSRVASARKEMHPDGHTSENNDTTTVDSMQARQPNTVVMEKLTGNRNDIVSEKPMVQNNLNQGVAEKLTRDRNDIVPEKQVVQSNLNQCNNEDIPLSGTEIEMESYEQESSESSDEEWSTLSTPRKTKLQGNEKVSLTESLRSAKRCSRRAPAREQNNEHTQSEQLHGSASEQQAREQLHGSVSKQQTEVLRSNVSSGDASKCHFGPIVTQKLKEHFEKDPYPCRATKEGLAQELGLTFNQ

SEQ ID NO: 193257 - protein, 1502 aa, Zea Mays
MGRKGSEMSPSKRYPLRSPHSSGRVLRSALANDNKDSEPLNAAAATQAAVKKRSGSQLDSPNSSVRLFHSTSKNKNEACSGPLNDRIPDKPAANKRKRASPSQVGSSSNSVRVLRSAIKNKDEACSKSLSDRTAGEPAANKRKNVNRSKTGSLSCGVRVLLSASKAKDETSTKPLNDSAAVEPASGKRKGTSPSKVGSASNSVRVLRSTSKYKNETCTEPLNDSGAVEPAANKRKGVSRSKKRSLNSSVRVLRSASNNKIEVSIKPLGNSTAGQPAAKRRKSGSSFEAGSPVSSARVLRSTSERKNEASKPLNESTAAQPAARKKKAGVISKTDNPKIGLRVLRSASGKKNEACIGHVNDSTSAEPTVTKRNRKPSMDRSPKKDYLKICQRVRYILNRMNYQQTFIQAYASEGWKGQSLEKIRPEKELERAKAEILQCKLRIREAFRNMDSLLSKGKLEESLFDSAGEISSEDVGVPPGDQRWLCPACVCKADSIDALNELQGSKLSIHDSWEKVFPEAASIANGSKQVDTSDLLPDHIKHSDNPALVEGLMVNEVRLSAEDDSKGDGDFDPSGPDSSEDQKDGLNSEESDFTSDSDDFCAEIAKSCGQDEVSASPLSNVINHTYRMKLRASNNRSNEENHDHVFMDMELGQDMVLPVSSRRQVERLDYKKLYDEAYGKESSNSSDDKEWSGKELLEGSETDSLSERPHPVKRCSRRAQAEQQNNEHTPQRERLHGSESEQKTGILRSNGSSSTGRKFGPVATQKLKVHFEKDPYPSRETKENISEELGLTFNQVSRWFSSTRHYSRVASARKEMHPDGHTSENNDTTTVDSMQARQPNTVVMEKLTGNRNDIVSEKPMVQNNLNQGVAEKLTRDRNDIVPEKQVVQSNLNQCNNEDIPLSGTEIEMESYEQESSESSDEEWSTLSTPRKTKLQGNEKVSLTESLRSAKRCSRRAPAREQNNEHTQSEQLHGSASEQQAREQLHGSVSKQQTEVLRSNVSSGDASKCHFGPIVTQKLKEHFEKDPYPCRATKEGLAQELGLTFNQISKWFSATHHYSRDAVAKNQKYPGENTTENNSSTIFDGIQVIEPNFGLIDKPDADTNDMISEKLMVQINLNEGIEEDIPPSQYTTRCEEKLTMTQAAISREAGPPGYGPGENFLQVSSRITSCEQSVIMAPSAIARGVGPPGYTPGEHQGNGAPWNTSYERRPFTSPTTSSREVGPPGYGPEENQGSGISCNTSREQILFMSPTTISRELGPPGYLPRENQRSDTSWNTSCESGLFMSPATTSIEHGPPGYGPGENQENDSTSCELRMFTSPTIVSREVGPPGYQQGVFMSPKTISREVCPPGFGSGENQGNDTTWYKQSAFTSPTTISREVGPPGYGQEDQGNGGSWNTSCEQGVFTSPTRGISREVGPPGYGPGESQGNTTSWISTCQQRMLAGIQRTGGSRSMDLEAFPPGYGPGGASGSVISPQARSAENVEFSDEARKKAIQRELRRRQKFR

SEQ ID NO: 193258 - protein, 762 aa, Zea Mays
MVASSHSSPAASRTPNLKSALAPSPSPSTRRAATDVASASAAVDSKARFEAYNRLQAAAVAFGENLPIPEIVAIGGQSDGKSSLLEALLGFRFNVREVEMGTRRPLVLQMVHDPTALEPRCRFQEEDSEEYGSPMVLATAIADLIKQRTESHLRKIQAAVSSKPIVMRAEYAHCPNLTIIDTPGFVLKAKRGEPGSTPDEIRSMVKSLASPPHRLVLFLQQSSVEWCSSIWLDTLKEIDPTFRRTIIVISKFDNRLKEFTERWEVDTFLSASGYLGDNIHPFFVALPKDHGTISNEEFRRQICQVDIDVLRHLRENVKGGFNEEKYVSCIGFSCLKKYLESELQKRYKEAAPATLALLEQRCTEVSMNLTRLDSKLQAASDVSQLRRSAMLHAASICTNLNALLDGAADPAPEIWGKTTEEEQIHSGIGSWPGINMPVKPANSSLKLYGGAAFERVMHEFRCATYSLECPQVSREKVANILLAHAGRRGSSRLTEAAVAIARAAARSWLAPLIDTACDRLAFVLQNLFDLAMERNRNNDSQYHQNFEDMDSYVGFLAALRCSYYKFVKELSKQCKQIVRHHLDSVTSPYSHICYDDDFFSGVGSVANSTCRFNHFTGVTSFDLADSGSALEEAQENLPPKDQHHMTPPINKGNDSKEVLRESQLTVPETPSPDLPSDIHGGKKKDNGIPNDGGPRKRHARMAAYTSRNHHNSMIGADDMASKSGSSYSTICAISAQYFAKMREVLIERNAPSALNSGFLTPW

SEQ ID NO: 193259 - protein, 1483 aa, Zea Mays
MSDAEPPPAMEVATLTTPDVMLGEDYKDIEAIEGQKDYETCYGGGGSVIVANELVGISEDPNQPDIATADEPEEGADVEGQTNDISAAVSTSKLVDDPMEVGMQTEVSAAADDLIEVGAALVSSAEDCTAVAACLVNDDCNIIFPGGVHRSDDQTDQEFGGNSLDADEVALLVNDIQDDSARMDMDVSAHGDVHAQDRESSQLDVATALLNEVGTELVEAGDHAVQECTNMDMRIQAGDNNEAERVGTIADTATNEEHRHMGEVTMTRDDSEKHDVAGGVDVPDERIQMGRGGLPGDDNEQKEVATADEDRVEDEGMQVDAVNITGDMVEEGRIAVEYIAGEAVIGEGGIDVPEEKAAQIDRAGNDIPEEEGLQMGEAGLIGSDNGLKEAVIADHDGVEVNAIPTEATGTTNDDDENNTIVGEDVAEAVNDITGDDVPDEEAAHMEDDDDDEPPPLVEKKGGGRRKRGRPSSKVQGVVKPSVKRKDEEEVCFICFDGGDLVICDRRGCPKAYHPSCVNRDDDFFKSKGRWNCGWHICSNCQKPARHMCYTCTFSLCKACMKDAKFSCVRENKGFCDTCMNTVMLIENREEAADPMEVDFDDKGSWWYLFKDYWLNLKTNLSLTVEEISAAKSRKSGELPDTNDEVNSESSSGRNLESNTSKKRGRKRSKQAAINEGSEGKASTRKSAKRDLSGIHDVQTSSGKKVRKLSRRSLSSQHSSKDSESVGTSTSSAEEDSWASKELINFVAHVRNGDKSVISRYDVQPLLLDYIKRNKLRDPRRKSQIICDSLLQSLFAKERVGHFEMLKLLESHFFMSEVSPIDADENHGGVVDPDPSQDADGNSEASVVMSSEKRRKSRKYDLRHQPNLDDYAAIDNHNIGLMYLRRNLMEELIGDVDTFDEKVVGSFVRIKIPGTGQRQDIYRLVQIVGTGRSAEKYKYGKRTTDITLEILNLDKREAVTIDIISNQEFTEEECKRLRQSIKYGFIPRLTVGEVQEKARVLQTLKVNDWIESEKMRLGHLRDRASDMGYRKDLRECVEKLRLLSTPEERARRLNEELEIHADPAMDPYYESPEEQEQEIEKSSFNKSRGSFLRKDGNPVPPGKGDGRNAAQRDSKTNWESNRNTWAESSSHMESPLPRRSTFSSQGESAGYTSKSESPNTGAQTVKLEGTTRSAPQGSPGASSGILANNICSGAKTAPQSAINESEKIWLYMDPSNKIQGPFSIIQLRKWNSNGYFPPSLKIWKASEKQDDSILLTDALAGKFEKDLPPWEPPHVSLFQINKTPLEQSTIAGEQTPKSVVAKSFSSSNQRHGYSSTNLGTTMIHSGTQGYYGMQNSHAAYTSQHSLTGSWNATSSQFGVAVNPVTPTQPAMGSFSGQNIVSAENMGHLTPGTAPAAANAEMVNSDLTSQKQISYLPQTDGILADDIESKSGEDVSHGKVSSSAKAIGPLGAQLGQGQLNTQQHEDDVNTIRCISTTFIVNHCWQ

SEQ ID NO: 193260 - protein, 1718 aa, Zea Mays
MSDAEPPPAMEVATLTTPDVMLGEDYKDIEAIEGQKDYETCYGGGGSVIVANELVGISEDPNQPDIATADEPEEGADVEGQTNDISAAVSTSKLVDDPMEVGMQTEVSAAADDLIEVGAALVSSAEDCTAVAACLVNDDCNIIFPGGVHRSDDQTDQEFGGNSLDADEVALLVNDIQDDSARMDMDVSAHGDVHAQDRESSQLDVATALLNEVGTELVEAGDHAVQECTNMDMRIQAGDNNEAERVGTIADTATNEEHRHMGEVTMTRDDSEKHDVAGGVDVPDERIQMGRGGLPGDDNEQKEVATADEDRVEDEGMQVDAVNITGDMVEEGRIAVEYIAGEAVIGEGGIDVPEEKAAQIDRAGNDIPEEEGLQMGEAGLIGSDNGLKEAVIADHDGVEVNAIPTEATGTTNDDDENNTIVGEDVAEAVNDITGDDVPDEEAAHMEDDDDDEPPPLVEKKGGGRRKRGRPSSKVQGVVKPSVKRKDEEEVCFICFDGGDLVICDRRGCPKAYHPSCVNRDDDFFKSKGRWNCGWHICSNCQKPARHMCYTCTFSLCKACMKDAKFSCVRENKGFCDTCMNTVMLIENREEAADPMEVDFDDKGSWWYLFKDYWLNLKTNLSLTVEEISAAKSRKSGELPDTNDEVNSESSSGRNLESNTSKKRGRKRSKQAAINEGSEGKASTRKSAKRDLSGIHDVQTSSGKKVRKLSRRSLSSQHSSKDSESVGTSTSSAEEDSWASKELINFVAHVRNGDKSVISRYDVQPLLLDYIKRNKLRDPRRKSQIICDSLLQSLFAKERVGHFEMLKLLESHFFMSEVSPIDADENHGGVVDPDPSQDADGNSEASVVMSSEKRRKSRKYDLRHQPNLDDYAAIDNHNIGLMYLRRNLMEELIGDVDTFDEKVVGSFVRIKIPGTGQRQDIYRLVQIVGTGRSAEKYKYGKRTTDITLEILNLDKREAVTIDIISNQEFTEEECKRLRQSIKYGFIPRLTVGEVQEKARVLQTLKVNDWIESEKMRLGHLRDRASDMGYRKDLRECVEKLRLLSTPEERARRLNEELEIHADPAMDPYYESPEEQEQEIEKSSFNKSRGSFLRKDGNPVPPGKGDGRNAAQRDSKTNWESNRNTWAESSSHMESPLPRRSTFSSQGESAGYTSKSESPNTGAQTVKLEGTTRSAPQGSPGASSGILANNICSGAKTAPQSAINESEKIWLYMDPSNKIQGPFSIIQLRKWNSNGYFPPSLKIWKASEKQDDSILLTDALAGKFEKDLPPWEPPHVSLFQINKTPLEQSTIAGEQTPKSVVAKSFSSSNQRHGYSSTNLGTTMIHSGTQGYYGMQNSHAAYTSQHSLTGSWNATSSQFGVAVNPVTPTQPAMGSFSGQNIVSAENMGHLTPGTAPAAANAEMVNSDLTSQKQISYLPQTDGILADDIESKSGEDVSHGKVSSSAKAIGPLGAQLGQGQLNTQQHEDIKNQMSSTDVSNSTMPSQMMSTPSAASVQPSLSTIAGSDNQSSGWAVPTQVVNTSGQSQITGNLTWGNTPQGDASLGWGMMGQNNMNMPWVASAQGASGYNMGAAMPTQPNAVPNMGWLPNPGNTNMNMIWAATQGQGIPNAAAMMGGQMQGVAVAPWGGVAAGNANSYPAWGNQQVGNMNQNVRWSAPVQGNPSQENNNMNWNAPNGNPNNWNNQQRENEGRHSGHRGAFSAGDSGRKSWKPRSGADGGSWGT

SEQ ID NO: 193261 - protein, 335 aa, Zea Mays
MEAAASAEYGYYGGGAGPHETKTAGCGDHFVVDDLLALPPYDDEEEGATGETPLCLQPVKEEEGGLGNFSADSSIVVTAIDSCSNSFSRLADDDFPGEFYEPYDQLVELEWLSNYMGEGEETFAAEDLEKLKLISGGFSPAAVNVSAPAPVGVASAASATQSASMAISPSESGISAQQAFRAKKPPPSKKKDAAAPAPAPAEGRRCVHCDTDKTPQWRTGPMGPKTLCNACGVRYKSGRLVPEYRPAASPTFVMSKHSNSHRKVLELRRQKEVVVQQPPHVMGGAGGPAGGLMRMQSAMLLDGPVAAVSSSSPIVGGDEFLIHQHLGTADYRQRI

SEQ ID NO: 193262 - protein, 528 aa, Zea Mays
MASWLKVAEDLLEVVDRRAKIVATELSDEQSTSQPSGPNNQEVQAKKGKPREKGPLKLTNADGGNKISAQKEKRSRQRPRERMKIEKIRPSPPAGSSSVDTSASEPEVTPIDVKEVGNEGTLEKGEKGTDGLKTDGSGIVNTMVEVQLMQKNSDNATLDGVTHTNSEIAVESYFSVMDAKSESSSSNQTSEIGSVINLEERDSTVAVIQDTNASELPNTEVTGKLQESKKASVSDSSESIEDRRKQKSDTISVKEQDQLEEAQGLLKSAVKTGQSKEARLARVCAGLSSRLQEYKSENAQLEELLVQEREKSTLHEAHIKQLQQELSMSRVEGSRAELNMVDALTAKNAEIESLVKSLDSWKKRAATSEEKLASLEEDIDGLKRNCELTETRVIQALREELATTERRAEEERIAHNATKMAAVEREVELEHRAVEASSALARIQRAADQSSSRVLELEHKLAVLEVECASLQQELQEMEARNRRVQKKPSEEANQVLQMQAWQEEVERARQSQREAEAKISSLESCRK

SEQ ID NO: 193263 - protein, 451 aa, Zea Mays
MASWLKVAEDLLEVVDRRAKIVATELSDEQSTSQPSGPNNQEVQAKKGKPREKGPLKLTNADGGNKISAQKEKRSRQRPRERMKIEKIRPSPPAGSSSVDTSASEPEVTPIDVKEVGNEGTLEKGEKGTDGLKTDGSGIVNTMVEVQLMQKNSDNATLDGVTHTNSEIAVESYFSVMDAKSESSSSNQTSEIGSVINLEERDSTVAVIQDTNASELPNTEVTGKLQESKKASVSDSSESIEDRRKQKSDTISVKEQDQLEEAQGLLKSAVKTGQSKEARLARVCAGLSSRLQEYKSENAQLEELLVQEREKSTLHEAHIKQLQQELSMSRVEGSRAELNMVDALTAKNAEIESLVKSLDSWKKRAATSEEKLASLEEDIDGLKRNCELTETRVIQALREELATTERRAEEERIAHNATKMAAVEREVELEHRAVEASSALARIQVILQESC

SEQ ID NO: 193264 - protein, 417 aa, Zea Mays
MASWLKVAEDLLEVVDRRAKIVATELSDEQSTSQPSGPNNQEVQAKKGKPREKGPLKLTNADGGNKISAQKEKRSRQRPRERMKIEKIRPSPPAGSSSVDTSASEPEVTPIDVKEVGNEGTLEKGEKGTDGLKTDGSGIVNTMVEVQLMQKNSDNATLDGVTHTNSEIAVESYFSVMDAKSESSSSNQTSEIGSVINLEERDSTVAVIQDTNASELPNTEVTGKLQESKKASVSDSSESIEDRRKQKSDTISVKEQDQLEEAQGLLKSAVKTGQSKEARLARVCAGLSSRLQEYKSENAQLEELLVQEREKSTLHEAHIKQLQQELSMSRVEGSRAELNMVDALTAKNAEIESLVKSLDSWKKRAATSEEKLASLEVDFPNCRKIGSRDRELLESDFFQSWQKIKIERRYRWSQEEL

SEQ ID NO: 193265 - protein, 693 aa, Zea Mays
MASWLKVAEDLLEVVDRRAKIVATELSDEQSTSQPSGPNNQEVQAKKGKPREKGPLKLTNADGGNKISAQKEKRSRQRPRERMKIEKIRPSPPAGSSSVDTSASEPEVTPIDVKEVGNEGTLEKGEKGTDGLKTDGSGIVNTMVEVQLMQKNSDNATLDGVTHTNSEIAVESYFSVMDAKSESSSSNQTSEIGSVINLEERDSTVAVIQDTNASELPNTEVTGKLQESKKASVSDSSESIEDRRKQKSDTISVKEQDQLEEAQGLLKSAVKTGQSKEARLARVCAGLSSRLQEYKSENAQLEELLVQEREKSTLHEAHIKQLQQELSMSRVEGSRAELNMVDALTAKNAEIESLVKSLDSWKKRAATSEEKLASLEEDIDGLKRNCELTETRVIQALREELATTERRAEEERIAHNATKMAAVEREVELEHRAVEASSALARIQRAADQSSSRVLELEHKLAVLEEMEARNRRVQKKPSEEANQVLQMQAWQEEVERARQSQREAEAKISSLEAELQKMRVEMAGMRRDAEHYSRQEHVELEKRYRELTDLLYHKQTQLESMASEKAALEFQLEKSLKQFHEVQIEAERSKATRRSASSWEEDADIKALEPLPLHHRHMATANQQLQKAAKLLDTGAVRATRFLWRHPVARVSLLFYLVFVHLFLMHLLNRLQDFASREGTSAMGDLASANLP

SEQ ID NO: 193266 - protein, 596 aa, Zea Mays
MPVLRSAARRAREAQGHPAAADEKAPEAAAAALAAAPAPPPVEKRRRVTRAEEREREEIRPREVVAGEGGDDEGERGMDEPDSAARSADKLTFDDEDGPTVPEAVQVGSSPKYRVDRKLGKGGFGQVYVGHRMSATGPGAVEVALKFEHRTSKGCHYGPPYEWTAYNAIGGIHGFPRVHYKGRQGDYFVMVMDMLGPSLWDVWNNKSHIMSVEMVSCIAIEAICILEKLHSKGYVHGDVKPENFLLGTPGTPEEKKLFLVDLGLATKWKDIATGRHVKYDQRSDVFRGTFRYASVHAHLGRTGSRRDDLESLAYTLVFLLRGCLPWQGYQGDNKSFLVCKKKMATFPVSLCCFCPHPFRKFVEYVVNLKFDEEPDYAKCASLFHSVLSVVGSNPDVRPINTDGAQKRGRFFIEEEADEQPKKKIRVGMPATQWISVYNGRVPMKQRYHYNVSDSRVGQHIEKGNADGLFISCITSCSDLWALIMDAGTGFTSQIYELIPHFLHKEWVMDQWERDYYITAVAGANNGSSLVVMSKGTKYTQQSYKVSNSFPYKWINKKWQDGFYVTSMATAGSRWAVVMSHNAGFSNQLVPSDRARR

SEQ ID NO: 193267 - protein, 255 aa, Zea Mays
MATFPVSLCCFCPHPFRKFVEYVVNLKFDEEPDYAKCASLFHSVLSVVGSNPDVRPINTDGAQKLIHQFGQKRGRFFIEEEADEQPKKKIRVGMPATQWISVYNGRVPMKQRYHYNVSDSRVGQHIEKGNADGLFISCITSCSDLWALIMDAGTGFTSQIYELIPHFLHKEWVMDQWERDYYITAVAGANNGSSLVVMSKGTKYTQQSYKVSNSFPYKWINKKWQDGFYVTSMATAGSRWAVVMSHNAGFSNQPM

SEQ ID NO: 193268 - protein, 55 aa, Zea Mays
MRDALEAIKASIPSLGITLFLSYQRTISFIRPGPNDEQEWLFVTNRMTTKFCNFL

SEQ ID NO: 193269 - protein, 103 aa, Zea Mays
MFFLLAFLYSLGAIFFGVCPSIQLDPQKSAILPLPIVTIVDVLKRSTSALSHGKCMPAHAFSLNFHLSHNHLSLSALAKRSTSRTPRPPLFFGRQVVGQLIKQ

SEQ ID NO: 193270 - protein, 257 aa, Zea Mays
MRPLIRTARCWLLRARVRGMATLPMALSPAAISPFTTLPLYYSSRPHRRLLARFFSVASAPGGAKGHRPAASAVEVGGVKIAREDVVKEDDPTNNVPDNIFSKIGLQLHRRDNHPLGILKNTIYDYFDKNFTGQFDKFDDLCPLVSVKQNFDDVLVPSDHVSRSYNDTYYVDGQTVLRCHTSAHQAELLRHGHTHFLVTGDVYRRDSIDSTHYPVFHQGSVSSLLMNGQGLAWVGQHMQLQNSRKHWKAWQDIYLVL

SEQ ID NO: 193271 - protein, 389 aa, Zea Mays
MRPLIRTARCWLLRARVRGMATLPMALSPAAISPFTTLPLYYSSRPHRRLLARFFSVASAPGGAKGHRPAASAVEVGGVKIAREDVVKEDDPTNNVPDNIFSKIGLQLHRRDNHPLGILKNTIYDYFDKNFTGQFDKFDDLCPLVSVKQNFDDVLVPSDHVSRSYNDTYYVDGQTVLRCHTSAHQAELLRHGHTHFLVTGDVYRRDSIDSTHYPVFHQMEGFRVFSPDEWSGSRMGGTAYAAAELKKTLEGLARHLFGAVEMRWVDTYFPFTNPSFELEIYFQVLGCGVTEQEILKRNGRRDHVAWAFGLGLERLAMVLFDIPDIRLFWSNDKRFTSQFSEGKLGVKFKPFSKFPPCYKDMSFWINDAFTENNLCEVVRGIAGDLVEEV

SEQ ID NO: 193272 - protein, 226 aa, Zea Mays
MRPLIRTARCWLLRARVRGMATLPMALSPAAISPFTTLPLYYSSRPHRRLLARFFSVASAPGGAKGHRPAASAVEVGGVKIAREDVVKEDDPTNNVPDNIFSKIGLQLHRRDNHPLGILKNTIYDYFDKNFTGQFDKFDDLCPLVSVKQNFDDVLVPSDHVSRSYNDTYYVDGQTVLRCHTSAHQAELLRHGHTHFLVTGDVYRRDSIDSTHYPVFHQAWILSIAH

SEQ ID NO: 193273 - protein, 421 aa, Zea Mays
MESYIRPGCVILTIYLHLPNWMWDEFNDDPASWIENLISLSNDGFWRTGWLYARVQDCLTLSCNGSLMFASPWQPVIGDKHQRLCVTPIAVDCSSSVKFSVKGFNIVQPTTKLLCVFDEKYLIQEETQMLLEDSTMQQGPQCLTFSCSFPCTSGRGFIEIEDYDQSSLSVPFVVTDKDGDIDVLSPIEFALGENLLHTAVKKRSKPLVEFLLRYTTTNIAPVGGGDGAPVQFLFTPAMTELSNITPLHIAATISDAIGVLDALTDDPQQLGIKAWKNARDATGFTPEEYAAKRGNISYIQMVQDKIDRRVTRAHVSVTIPSTIDTVGKHGSRMKPADQITFGVEKKQLSINQTLSCRQCVQQAQQLAFHPRTNRFLSNRTAMLSLVSIAAVCVCVGLIMKSLPQVGCMKPFLWDNIRWGPN

SEQ ID NO: 193274 - protein, 206 aa, Zea Mays
MDAGLASAVTMLRTCTDVVHLAHVLEQFRLAWCGKLVRDTRAVAPSRASASTSSSLGVETELSMYAGGERCDRYYPCLINYDNGDGHDIWSGSIRTSGELGTGDRMAASGAKIWRSQPSRAVDEVFACDSIIRGRAVLLAAPVPPPLARTPAIGRELLMGETKIGRDIGDNPCRVHPLLTSRNHGSGLQNPKLMGNLNGFNVAPEK

SEQ ID NO: 193275 - protein, 232 aa, Zea Mays
MDAGLASAVTMLRTCTDVVHLAHVLEQFRLAWCGKLVRDTRAVAPSRASASTSSSLGVETELSMYAGGERCDRYYPCLINYDNGDGHDIWSGSIRTSGELGTGDRMAASGAKIWRSQPSRAVDEVFACDSIIRGRAVLLAAPVPPPLARTPAIGRELLMGETKIGRDIGDNPCRVHPLLTSRNHGSGLQVQMGDGGRATQLTNPTKATNHYSPVPPAAQLMLLSPAWMVSFL

SEQ ID NO: 193276 - protein, 181 aa, Zea Mays
MDAGLASAVTMLRTCTDVVHLAHVLEQFRLAWCGKLVRDTRAVAPSRASASTSSSLGVETELSMYAGGNKGAIAGCNSNPPNPFPQKSKQLRHLDQTRRTMSTPLGTSTNFSPPNSIYLCPLCTGEGDRDPRNAARCSSSGQVLSGHPENWAPVIGWRPPALRSGGHNLAAPSTRFSPVIP

SEQ ID NO: 193277 - protein, 181 aa, Zea Mays
MELEDVWILGTSHLSASSTPSKEKIIVAPSLKSLHLCLCHYVTNQGFAEAVNCFPQLEELDITFCSLYGIVCETAGRACPTTSSSSSAGAEPSLRSWNHVLVQCQRAAFEVQHVLSRWLQVLRRNQQKHQLGSDQPIAASCLPLLITHGTHKDLLILLVSLDWHRWAERSCSPSAPRCFSF

SEQ ID NO: 193278 - protein, 547 aa, Zea Mays
METKPERHHRHEEARDGEDDAVAMEHGALSLQRGGATLFGWRQDEEAGRRRRVEIREVDFFSRDSRARSHDDAGDGRDDVNIGLHLLTTTSPDEEMTAAAAKNQKIEASSAVEAELRRVVEDNRRLRGMMNELTRNYGAMYQQLLQVTQHHPHRQHPVDLMINRSSLAHTRLTTAASYNDDTSAQQLLRVEDEAASDGAGEASPSLSNGGNHNDGGDGKQRRTSSNVTAPPARENGGGERAELPAHKTRVSVRARSEAPMISDGCQWRKYGQKMAKGNPCPRAYYRCTMAVACPVRKQVQRCAEDKTILVTTYEGHHNHPLPPAAATMASTTSAAATMLLSGPATSRDGAAALLGHPAALFQFHHSSSIPYASTMATLSASAPFPTITLDLTQTPGGVVGSGGGLLLPHHGLGLHRPPSGIHPVAAPAMPLSPLATLLQQLPPTGSMSLAGLVARHEQQQSVMETVTAAIAANPNFTTALAAAISSVMAGAAHQAQPTPRAGNIGSAGEANGSAGGAAAGPTAAGAYGASGGSPRFATQSACTTSTT

SEQ ID NO: 193279 - protein, 81 aa, Zea Mays
MRQQDHPRLAPDQTIPEKRLDSLGTPTPDTVGEGVHGRRCDRPEAGLALAGWLLMLWSTINEFLTRSLHMFSPMKTGMETG

SEQ ID NO: 193280 - protein, 55 aa, Zea Mays
MIPKKPREHEAIIVSTSCRTMTIIPYKIQGKSLSFFLGIIEKCIPTSFPRVANVV

SEQ ID NO: 193281 - protein, 84 aa, Zea Mays
MLINSTAVDPLVLGVRVWPQAIPQFLVGHLDLLEAAKAALDRGGYDGLFLGGNYVAGVALGRCVEGAYESASQISDFLTKYAYK

SEQ ID NO: 193282 - protein, 253 aa, Zea Mays
MLPNAITSSLGSKVKLSWKLTSITKSDDKGYVLEYETPEGVVSVQAKSVIMTIPSYVASNILRPLSSDAADALSRFYYPPVAAVTVSYPKEAIRKECLIDGELQGFGQLHPRSQGVETLGTIYSSSLFPNRAPDGRVLLLNYIGGATNTGIVSKTESELVEAVDRDLRKMLINSTAVDPLVLGVRVWPQAIPQFLVGHLDLLEAAKAALDRGGYDGLFLGGNYVAGVALGRCVEGAYESASQISDFLTKYAYK

SEQ ID NO: 193283 - protein, 357 aa, Zea Mays
MVAATATATAMATAASPLLNGTRIPARLRHRGLSVRCAAVAGGAAEAPASTGARLSADCVVVGGGISGLCTAQALATRHGVGDVLVTEARARPGGNITTVERPEEGYLWEEGPNSFQPSDPVLTMAVDSGLKDDLVFGDPNAPRFVLWEGKLRPVPSKPADLPFFDLMSIPGKLRAGLGALGIRPPPPGREESVEEFVRRNLGAEVFERLIEPFCSGVYAGDPSKLSMKAAFGKVWRLEETGGSIIGGTIKTIQERSKNPKPPRDARLPKPKGQTVASFRKGLAMLPNAITSSLGSKVKLSWKLTSITKSDDKGYVLEYETPEGVVSVQAKSVIMTIPSYVASNILRPLSDHVAQNI

SEQ ID NO: 193284 - protein, 321 aa, Zea Mays
MASPSTEAPPLPTLRDVIAHDDDDDHFIAEEEEDEEWDDMSKRMSRLSMEGSEAGDADDEDDGGEDEGEEDDDEFDDVRSDVNAAATYRAWPPRDEPQQAPSAASLPGTPDRGAQAPWWPGPSAKGYASETEARWPPGADGRGGRRQRQRMAAREVWLERAWRTRKQRRQLQEEVPVPVVVLGGGGGDSPASRGVAMDMEEVRACRDLGLDLPCDWTVEIPSCALSVSGVDTASSGGNSPASGSWRISSPVGATICFVNECSGRSACPYARESRRSGRADEVAPRSPRVTNQVNSSPRARPFGIKPTGTGGHLHAQHLARR

SEQ ID NO: 193285 - protein, 54 aa, Zea Mays
MGRGKFKGKPTGRRNFSTLEEIAAGTSGRPRTFMKPTAFSNSYSYCPKEDHFLE

SEQ ID NO: 193286 - protein, 125 aa, Zea Mays
MEVFAVMLRSEQVKTVGKTGSKYAMAPYVSFYTPGTGIVLIFNLYILYIDVCVVCDLQNLVKQRVSKILLIQEYESWYLCIGVSSNVFMKLEVCILICTTLLVRLRVFNPSMCNTVLHLTICFSL

SEQ ID NO: 193287 - protein, 374 aa, Zea Mays
MASPPPDLLIDDATAEILLRLPPDDPACLVRASLVCKAWRELLSSPIFLRRYRRFHGAPPLLGFLYNIYDERPCARFVVAADAATTFPFSAPAFDQFDLWFIECRHGRALLQTFERHAPARLVVWDLITGDQQHIPMPVPGYPYFCRTAAVLCAADGCDHLDCHGGPYLVVVIGAYEEDTLRWASVYSSETGVWTTSSSIQIDAYVEQRPSLLAGDALYFSAQEGKIIVKYDLNGQSLHVINAPDMFEPTEGIAVTVEDGGLGLAGVKDGNLHLWSWQAGPGGIAEWVQGRIVKLRTLFPILKPLDSLDVIGFQEGTDTIFISIDMEVFAVTLRSEQVKKVGKTGSKYAMAPYILQRADCYHHEDAVIHPLTWP

SEQ ID NO: 193288 - protein, 241 aa, Zea Mays
MTSLLWKGIQLETSMGSVEFASMVAALLGLSQGIALLLSKGLLLLGDYTAYYDQYAVGFSGVLFAMKVVLNAWSEDFVYLHGMVIPAKYAAWAELILIQVFIPGTSFLGHLSGILAGLVYLWLKRALNGPDPLTLLVSSITKVVTWPVRFAQNLLWSAHPQGRFRGRGRVGRRQSARDTPRGLWRCPACTYDNSVSTDICEMCSTAREDHDFSLRQYHQAGGTGELTVDEIRRRRLQRFGR

SEQ ID NO: 193289 - protein, 470 aa, Zea Mays
MTGWHLKIVLMRMLLTNLACLMWMLMQNLRRSTLEDYLILFSSRHYLILFSSRLCWKLRGIKSLQHLRNGQRMAMHLIGVNSIMFFLIFESGIGTPKPWRGEIVYRTLLANCVSASNIKKSEQVFNRMKDLGFPVTQFSFNQLLLLYKRLDRKKIADVLAMMEKEDVKPSLFTYKILVDAKGSVGDIEAMEKVIESMEKDSIEPDLTFNATIARHYIFYGQREKAEALLKAMEGDDIQKNRAACKTLLPLHAFLGNSDAVERIWKACEDNTRVAESVSAIEAFGKLGDVEKAEKVFEDMLVHWKTLSSKFYNALLKVYADHNLLDKGKELAKRMDENRVRFGAPTLDALVKLYVEAGEVEKAESLVHKLSIQNHIKPIYNTYMTLLDSYSKKGDVRNSEKVFNKLRQSGYTGRIRMYQVLLHAYVRAKAPAYGFRERMKADNIFPNSVVSTLIAATDPFVKKKSISDLLD

SEQ ID NO: 193290 - protein, 215 aa, Zea Mays
MWALRRAGNPLRFRAQKVASAHVCASLEVLLAADAKNVEEHHEADCQKMCCCHKPRSPAFQLSFSSGQFACSRGFSSQPGANSGDKADELEDGFSDLEVPPAAVQNDDGLASEDSSDEDAADEFGLPDVDADAKPEKEHTRRLSDSILLKTLSDSILLKTVLEAPRHQVTSALEKWAKDGNAFDRGELYYVLLNLRKRHWYSKALEYIYPMYASQ

SEQ ID NO: 193291 - protein, 415 aa, Zea Mays
MLLYPKPLQFALPPRRHTAAVSFTCARHAGDGCGAQVGVLIDGVSGFPSRLSPVASRPRLRSSAHWPVTLLLSDFPGGHILRTEVTMADASPRTETSTDDTDDNNGLEPGRGGLVASDSSDRSKDKHGDQKTLRRLAQNREAARKSRLRKKAYVQQLENSRLKLTQLEQELQRARQQGIFISSSVDQSHSMSGNGALAFDMEYARWLEEHNRQISELRAGVSAHASDTDLRSVVDKIMSHYDEIFRLKGNAAKADVFHVLSGMWKTPAERCFLWLGGFRPSEVLKLLSTQLEPLTEQQLSGISNLQQSSQQAEDALSQGMEALQQSLAETLAGSLSSSGSTGNVANYMGQMAMAMGKLGTLENFLRQADNLRLQTLQQMQRILTTRQSARALLVISDYSSRLRALSSLWLARPKE

SEQ ID NO: 193292 - protein, 318 aa, Zea Mays
MADASPRTETSTDDTDDNNGLEPGRGGLVASDSSDRSKDKHGDQKTLRRLAQNREAARKSRLRKKAYVQQLENSRLKLTQLEQELQRARQQGIFISSSVDQSHSMSGNGALAFDMEYARWLEEHNRQISELRAGVSAHASDTDLRSVVDKIMSHYDEIFRLKGNAAKADVFHVLSGMWKTPAERCFLWLGGFRPSEVLKLLSTQLEPLTEQQLSGISNLQQSSQQAEDALSQGMEALQQSLAETLAGSLSSSGSTGNVANYMGQMAMAMGKLGTLENFLRQADNLRLQTLQQMQRILTTRQSARALLVIRDLTRLRQT

SEQ ID NO: 193293 - protein, 218 aa, Zea Mays
MSGNGALAFDMEYARWLEEHNRQISELRAGVSAHASDTDLRSVVDKIMSHYDEIFRLKGNAAKADVFHVLSGMWKTPAERCFLWLGGFRPSEVLKLLSTQLEPLTEQQLSGISNLQQSSQQAEDALSQGMEALQQSLAETLAGSLSSSGSTGNVANYMGQMAMAMGKLGTLENFLRQTLQQMQRILTTRQSARALLVISDYSSRLRALSSLWLARPKE

SEQ ID NO: 193294 - protein, 390 aa, Zea Mays
MSIAILPMSAEFGWNPQTVGLIQSSFFWGYLLTQIAGGIWADTVGGKTVLGFGVVWWSIATALTPVAAHLGLPFLLVVRAFMGIGEGVAMPAMNNILSKWVPVSERSRSLSLVYSGMYLGSVTGLAFSPLLIHKFGWPSVFFSFGSLGLVWFTTWATKAYSSPLEDPGISAAEKKLIASQSTAGEPVKTIPWRLILSKPPVWALIVSHFCHNWGTFILLTWMPTYYNQVLKFNLMESGLICVLPWFTMAVSANVGGWIADTLVSRGVSVTTVRKIMQSIGFLGPAFFLTQLSHVNSPAMAVLCMACSQGTDAFSQSGLYSNHQDIGPRYAGVLLGLSNTAGVLAGVFGTAATGYILQHGSWDNVFELSVVLYLVGTLVWNVFSTGEKILD

SEQ ID NO: 193295 - protein, 309 aa, Zea Mays
MGIGEGVAMPAMNNILSKWVPVSERSRSLSLVYSGMYLGSVTGLAFSPLLIHKFGWPSVFFSFGSLGLVWFTTWATKAYSSPLEDPGISAAEKKLIASQSTAGEPVKTIPWRLILSKPPVWALIVSHFCHNWGTFILLTWMPTYYNQVLKFNLMESGLICVLPWFTMAVSANVGGWIADTLVSRGVSVTTVRKIMQSIGFLGPAFFLTQLSHVNSPAMAVLCMACSQGTDAFSQSGLYSNHQDIGPRYAGVLLGLSNTAGVLAGVFGTAATGYILQHGSWDNVFELSVVLYLVGTLVWNVFSTGEKILD

SEQ ID NO: 193296 - protein, 106 aa, Zea Mays
MLNRRGCRKTRRIQLRYANNLVSKTPTLYPLGNCPRRPRSAAMDYPDFVARKLLDEMHLMEAWLSEVISGRCDIIHRYVDERCDALYLRCETIQQQVDVAALRAEE

SEQ ID NO: 193297 - protein, 187 aa, Zea Mays
MESLEQMKNSKDRNIDPCSIMIDVAMYDEGNPIMEWLCSSRSESVPTLDENDESESPNRPSGFVLEELGGLNEEEMVLLNSRIGSGRKNGRKRNDVEEDIGDDFLSDSSEGGGSPTYNESGDSDSNDGGGDDEDGEPSGPCFAARTQPKLATDQYNGPGQDEQAVPLRPRSKRQKKLSIKGLYMLQK

SEQ ID NO: 193298 - protein, 108 aa, Zea Mays
MISIINFMIFCNGRMFFHKSVNATGLIQNSDYIYGIISDVVADIGIKHVVQIITDNGSNYKKACQDFTTKYPHITWQPCAAHTINLMLKDIGRFPDVAEVVDRCKENL

SEQ ID NO: 193299 - protein, 375 aa, Zea Mays
MAEQAGAGRYWCHMCAAVVSPAEGEAEVKCPHCHSGFLEEMETVRGTPAADDGDGDGAVAQVYPGADRPSSIWAHAILSTVDSSVRRRRNRRQTEAAGDVYDGNDPEFALRRRRVTAFLRLLHELRDRQLQRLEAAAGVALEGDQLTPFGRSLFIGAAGGGEHGVALGDYFLGPSLDALVQQLAENDAGRHGTPPAKKEAVEAMPTVEIAGGNGNDDDTASCPVCLEDYAAGERAREMPCRHRFHSNCIVPWLEMHSSCPVCRFQLPATDDKGSCSSGDGGFVSVDADGEGNDNGGGDGRASIPEKNLLQPGCKRPGLQPGCNKFFSSIPGNAEPAEAEENGSRLPPSLQWLNSLFSPSAQSSGSGSGSSHHWEN

SEQ ID NO: 193300 - protein, 138 aa, Zea Mays
MAEQAGAGRYWCHMCAAVVSPAEGERAREMPCRHRFHSNCIVPWLEMHSSCPVCRFQLPATDDKGSCSSGDGGFVSVDADGEGNDNGGGDGRASNAEPAEAEENGSRLPPSLQWLNSLFSPSAQSSGSGSGSSHHWEN

SEQ ID NO: 193301 - protein, 75 aa, Zea Mays
MASMQKSREQRAQAAAQKAADELHASRQDRVPEEAPVSPRGGGGILGSLQEGKAFNDVGTMGEEGTGVPRRRRSG

SEQ ID NO: 193302 - protein, 271 aa, Zea Mays
MAAVAEEEVIVVGAGQSGLAVAACLSLRGVRALVLERDDCVGSLWRKRAYDRLHLHLTKKYCALPHAPHPAEAPAYLHRDDFARYLDGYAARFAVRPRLRREVRSARYDPASARWEVEAVDLGTGQAERYAARFLVVASGENAEKFLPEVPGLEAFPGQVMHAVEYRSAEGMRGKAVLVVGSGNSGMEIAYDLAAAGAVTSIVVRGESEDGLVGDDGMAARSYPEHWKGDHGLYCAGMVRRGIYGSCEDAELIAADISKLLHPKQEQGNGV

SEQ ID NO: 193303 - protein, 61 aa, Zea Mays
MDLLEDDDEFEEFEIDQEWDEKEEGNEAVQQWEDDWDDDDVNDDFSLQLRKELEGSNAQKS

SEQ ID NO: 193304 - protein, 160 aa, Zea Mays
MEQLDYKFHEKYTALKKRKLLDEGLERKREAELNELYDAMKDWVSELRKDNAELNEKLVEKQDELEKARQEFLEDIRTRDAEILKLKQLLDEKAEKNNSAATGFPCLAPEAVLENSTPLSPKRKTPFSHGKQLECSRRHTRISGQQRFGVLICFLCCFNL

SEQ ID NO: 193305 - protein, 195 aa, Zea Mays
MEQLDYKFHEKYTALKKRKLLDEGLERKREAELNELYDAMKDWVSELRKDNAELNEKLVEKQDELEKARQEFLEDIRTRDAEILKLKQLLDEKAEKNNSAATGFPCLAPEAVLENSTPLSPKRKTPFSHGKQLECSRRHTRISGNRTTEIRSAHMLSLLLQSLVRMKISVNDGTEIFSVSVSHEASGCIFILIEF

SEQ ID NO: 193306 - protein, 97 aa, Zea Mays
MLKMGSTTDKREQYRLMRDAMEKRFIRVAKGSLVGGVRLGMFTATFFGIQNLLIDTRGVHDVFNIAAAGSATAAAFGLICMSLTIFCLHHNFVMGRY

SEQ ID NO: 193307 - protein, 430 aa, Zea Mays
MMASDRVESTARALRPFHSPVRAITAVAMASLKTAKKHHARLNNPFPRAVPTAAIHDGDGALRLSFASTSKLAHAHDFPVGTRFRLRWDPSRGGEVSLSRVPPSSGGGAMWETVPGVAFLSVASVATEADECRGSFALRDGGARLVPDRQHVDKIRAFYRCDAEAGGSEPDLLRAAAFRPSDATRFPVLVVTGLVSAAKKAGASPSCTCCGLRLRAAGRRARSAAAAARPVLSARYWILLEEKSDTQVRFSVKIGDYQWTCSHADPAKSPPATATTTTTTPRLHRASLRLRLSARVQRATTSKRTRLAPAPSREREEASALLPAPERAEERRPEEFNRVFLTYASSRDERFFGFGEQFSHVEFKRKRVPVLVQEQGIGRGDQPITFAANLVSYRRKLEHDICPLSVLHDLKDEIFVPRRIRVLHLRPDET

SEQ ID NO: 193308 - protein, 56 aa, Zea Mays
MTTSRRRCSGPRTPRHALWRGCSTRGRQHRCSGSHFCPCSRPPTMECFHEGYKRVT

SEQ ID NO: 193309 - protein, 74 aa, Zea Mays
MTTSRRRCSGPRTPRHALWRGCSTRGRQHRCSGSHFCPCSRPPTMECFHEGLSTVGMGLPLWEKALSVSTFDNK

SEQ ID NO: 193310 - protein, 113 aa, Zea Mays
MLSVPRRGSATSNPPSTAPAPSKSATDLLSPLLGGPSSMEGAPPPPLPTIHGRCAPSSSACHPWKVHHLKCATSSNSSTRGKKGRCATSSSARAVNGRVGSSLYWVGRSRTCS

SEQ ID NO: 193311 - protein, 287 aa, Zea Mays
MIVTQDTRLEKDDKNRTSIPQAFSTEEASRISDALYCYEKLHGRCTDNQRSSQADPADADSKPTSGSKGSHIRTGTKVTEEAGQPIPRRRQNKGNRKAHSSRKQRFFAGNFVNNPDQYGGVSESPPGNSVGYFYGSTPENHSYKSSKLSSSPHGIPTGSSPVGSVPKSSPQSQHLTFHLLEKNKLQPQRYNKFKHHCLMERKKLGTGQSEIYTRILRNSHWRMLQRATDMVSSVYSDFIVMVWRKNSNPMYMKISRSLLSNSTVMVIFMDSKNTGHFTITEIQISVL

SEQ ID NO: 193312 - protein, 359 aa, Zea Mays
MIVTQDTRLEKDDKNRTSIPQAFSTEEASRISDALYCYEKLHGRCTDNQRSSQADPADADSKPTSGSKGSHIRTGTKVTEEAGQPIPRRRQNKGNRKAHSSRKQRFFAGNFVNNPDQYGGVSESPPGNSVGYFYGSTPENHSSKLSSSPHGIPTGSSPVGSVPKSSPQSQHLTFHLLEKNKLQPQRYNKFKHHCLMERKKLGTGQSEQMNSLYRFWSYYLRDNFNEDIYKDFKKLALEDAAASYRYGLECLFRFYSYGLEKKFQPNVYEDFEKLTFEFYRNGDLYGLEKYWAFHHYRNPDIGPVDKLPELERLLREEFQTLEDFKAKEKARATTEKGTGISSSSVVVAASHSKAETKQV

SEQ ID NO: 193313 - protein, 348 aa, Zea Mays
MIVTQDTRLEKDDKNRTSIPQAFSTEEASRISDALYCYEADPADADSKPTSGSKGSHIRTGTKVTEEAGQPIPRRRQNKGNRKAHSSRKQRFFAGNFVNNPDQYGGVSESPPGNSVGYFYGSTPENHSYKSSKLSSSPHGIPTGSSPVGSVPKSSPQSQHLTFHLLEKNKLQPQRYNKFKHHCLMERKKLGTGQSEQMNSLYRFWSYYLRDNFNEDIYKDFKKLALEDAAASYRYGLECLFRFYSYGLEKKFQPNVYEDFEKLTFEFYRNGDLYGLEKYWAFHHYRNPDIGPVDKLPELERLLREEFQTLEDFKAKEKARATTEKGTGISSSSVVVAASHSKAETKQV

SEQ ID NO: 193314 - protein, 333 aa, Zea Mays
MIVTQDTRLEKDDKNRTSIPQAFSTEEASRISDALYCYEKLHGRCTDNQRSSQADPADADSKPTSGSKGSHIRTGTKVTEEAGQPIPRRRQNKESPPGNSVGYFYGSTPENHSYKSSKLSSSPHGIPTGSSPVGSVPKSSPQSQHLTFHLLEKNKLQPQRYNKFKHHCLMERKKLGTGQSEQMNSLYRFWSYYLRDNFNEDIYKDFKKLALEDAAASYRYGLECLFRFYSYGLEKKFQPNVYEDFEKLTFEFYRNGDLYGLEKYWAFHHYRNPDIGPVDKLPELERLLREEFQTLEDFKAKEKARATTEKGTGISSSSVVVAASHSKAETKQV

SEQ ID NO: 193315 - protein, 107 aa, Zea Mays
MIGSALGGIAGAFYGFNHVMPVVRRHIKGPMWMHFFVGAPPVIVFSSACAGLAGGTIPATAQLVSSSCHAVSSHSFARSSRVPTHAPSFAPAASHDDMRKTRSSSPL

SEQ ID NO: 193316 - protein, 152 aa, Zea Mays
MATAAAAAAMEEPDVVNGRDVVSWVASGVVLWSTAFLLVRALFPKRSYDFCNRAVSTMHAVAAVCLACLSVDDWSCPVCPLAAASSPRQMKALAVTLAYMVYDAACCHLNGDTRLDNAVHHLVSIVGIGAGLAYQRVSERAATSHTTSHAHH

SEQ ID NO: 193317 - protein, 180 aa, Zea Mays
MATAAAAAAMEEPDVVNGRDVVSWVASGVVLWSTAFLLVRALFPKRSYDFCNRAVSTMHAVAAVCLACLSVDDWSCPVCPLAAASSPRQMLKELGVRDTELNLLVDVLFAATFSAARMGVGPYLTYVTVTADNPILIKAMATGLQLVSAYWFLRILRMVRYKLAGKKKPTPAKLAAAAAN

SEQ ID NO: 193318 - protein, 385 aa, Zea Mays
MHEYYIDENECKVSPDMKDAFVLCRVTKRSDWELDNEVGNRYPHLEQLDAAAASVASTVKPEDAVATVICPEESNRAATPVGSDELSNDVGQEPITPDSSPPNGGKELEVWLEELLDPSPSFNLVADTRSADVSLTDQYAESSNPGSVSRNIGPGHASPIQDGTDATDYLLTDDLPEDLYSMLYPGTDQFYDSMFLEQAGQEGIAFPTNQAYYMMGMESYALPTNLNGTLNAELQSDQENNTTNLANGNTDTGVTIQSRRATTSPANISLAAGKIKMQVGINRMVTSSSVSINQTMRFTDNSGRRLDLKTDDVEHQKKTTNSAISAKQSRAANPEGHSSQGYLKGFKNTFRCSSAGFKAYISFAFFVVGVAAAAVLHHHRSCANL

SEQ ID NO: 193319 - protein, 484 aa, Zea Mays
MEVLRDMHLPPGFGFHPSDTELVSHYLKRKILGQKIEYDPIPEVDIYKHEPWDLPAKCNLPIEDNKWHFFASRDRKYPTGSRSNRATLAGYWKSTGKDRAIKLKKRTLGTKKTLVFHEGRPPSGRRTEWIMHEYYIDENECKVSPDMKDAFVLCRVTKRSDWELDNEVGNRYPHLEQLDAAAASVASTVKPEDAVATVICPEESNRAATPVGSDELSNDVGQEPITPDSSPPNGGKELENLQNPGSVSRNIGPGHASPIQDGTDATDYLLTDDLPEDLYSMLYPGTDQFYDSMFLEQAGQEGIAFPTNQAYYMMGMESYALPTNLNGTLNAELQSDQENNTTNLANGNTDTGVTIQSRRATTSPANISLAAGKIKMQVGINRMVTSSSVSINQTMRFTDNSGRRLDLKTDDVEHQKKTTNSAISAKQSRAANPEGHSSQGYLKGFKNTFRCSSAGFKAYISFAFFVVGVAAAAVLHHHRSCANL

SEQ ID NO: 193320 - protein, 388 aa, Zea Mays
MHEYYIDENECKVSPDMKDAFVLCRVTKRSDWELDNEVGNRYPHLEQLDAAAASVASTVKPEDAVATVICPEESNRAATPVGSDELSNDVGQEPITPDSSPPNGGKELEVWLEELLDPSPSFNLVADTRSADVSLTDQYAESSNLQNPGSVSRNIGPGHASPIQDGTDATDYLLTDDLPEDLYSMLYPGTDQFYDSMFLEQAGQEGIAFPTNQAYYMMGMESYALPTNLNGTLNAELQSDQENNTTNLANGNTDTGVTIQSRRATTSPANISLAAGKIKMQVGINRMVTSSSVSINQTMRFTDNSGRRLDLKTDDVEHQKKTTNSAISAKQSRAANPEGHSSQGYLKGFKNTFRCSSAGFKAYISFAFFVVGVAAAAVLHHHRSCANL

SEQ ID NO: 193321 - protein, 101 aa, Zea Mays
MHEACKLTRLIQAASNSVLMMIRDTRAAHDQVLTCLASEQAFLQIPKKEEEYPVTYVLMLIPNIHKLSMVPARGNHMAAPSHQKISYRSEELSFIQAVNVY

SEQ ID NO: 193322 - protein, 96 aa, Zea Mays
MHEACKLTRLIQAASNSVLMMIRDTRAAHDQVLTCLASEQAFLQIPKKEEEYPVTYVLMLIPNIHKLSMVLYISVATHGHTPSNYICLLNSFKQLT

SEQ ID NO: 193323 - protein, 408 aa, Zea Mays
MGVMPFGPGNGVKDDHPAAVTSLVSGASGDGLSVDEASFVATTSSVTSMVAAKEETRQAVADDLNSSRSCPCEWFVCEDDQNSTIYFVVQEVDVLVHRGIYEAAKGMYHQMLPYVKAHLKSWGKSARLRFTGHSLGGSLALLVNLMLLVRGEAPASSLLPVITFGAPCIMCGGDHLLRRLGLPRSHVQSVTMHRDIVPRVFSCHYPDHVANILKLANGNFRSHPCLANQKLLYAPMGEVLILQPDERLSPHHHLLPPDSGIYHLGGGGGGGGAGTAANAGEGSLPQLRSALSAFFNSPHPLEILKDGAAYGPRGSVYRDHDVNSYLRSVRAVVRKEARRAREAERERWRLLLWWPFGVHGVSSASAGRRGGLVDAVSEAARRAHLLLVVLLPAELLALGALLAVIRFR

SEQ ID NO: 193324 - protein, 302 aa, Zea Mays
MYHQMLPYVKAHLKSWGKSARLRFTGHSLGGSLALLVNLMLLVRGEAPASSLLPVITFGAPCIMCGGDHLLRRLGLPRSHVQSVTMHRDIVPRVFSCHYPDHVANILKLANGNFRSHPCLANQKLLYAPMGEVLILQPDERLSPHHHLLPPDSGIYHLGGGGGGGGAGTAANAGEGSLPQLRSALSAFFNSPHPLEILKDGAAYGPRGSVYRDHDVNSYLRSVRAVVRKEARRAREAERERWRLLLWWPFGVHGVSSASAGRRGGLVDAVSEAARRAHLLLVVLLPAELLALGALLAVIRFR

SEQ ID NO: 193325 - protein, 156 aa, Zea Mays
MPLGKYYCDYCDKQFQDTPAARKRHLQGVQHQRARALWYDSIRHQDQHGGASSLLLPDGTLAKGICHHFVRTGACKYGDSCRYFHPKPNGVNPALAAPGLGSGPAPMVQQSDIIGNQPNFVVYQGVDINSSSERIVIYDKLDAYHILTSVSCHAMM

SEQ ID NO: 193326 - protein, 323 aa, Zea Mays
MRGARLEGFLTGKAIMPDAEPQSRDGDKIIKISNPAYEDWVALDQQVLSFLLASISKEVLIQVSSKTTAMEVWRHIETIFSSQTRARAVNTRLALSTARKGSSSVADYVGKMKALGDEMATAGRPLEDDELVEYILTGLGEEYDSVVSSVLGRTEPISVSELYSQLLAFETRVNLRNNGQSSGYLANSANRRGRGSTGRHNRGGGRNGRNFNSHGNNSSRQANQGPRNNTTTLSDPCQVCFKKGHTANKCWYRYDENFVPDPRHVAAAAMTSYTVDTNWYTDTSATDHITGDLNKLALREKYNGDDQIHTANGAGSENEAHSF

SEQ ID NO: 193327 - protein, 270 aa, Zea Mays
MAAASRGLLARLRVLSLSGGGSPWLRFPPSRLFSAEAFVSHSDDDDAGGEGGGGGRIIEARSGVMGPTSRRTGVIGVKCGMSAMWDKWGAKVPITVLWVDDNVVTQVKTAEKEGFFALQLGAGQKKEKHLTKPEVGHFRAQGVPLKRKLREFPVTEDALLPVGTSITVRHFVPGQFVDVTGITKGKGFAGVMKRYGFGGMPASHGTSLAHRSGGSTGQRDAPGRVFKNRKMPGRMGGVQRTVKNVWVYQIDPARNLLYLKGQVSLKTWSP

SEQ ID NO: 193328 - protein, 265 aa, Zea Mays
MAAASRGLLARLRVLSLSGGGSPWLRFPPSRLFSAEAFVSHSDDDDAGGEGGGGGRIIEARSGVMGPTSRRTGVIGVKCGMSAMWDKWGAKVPITVLWVDDNVVTQVKTAEKEGFFALQLGAGQKKEKHLTKPEVGHFRAQGVPLKRKLREFPVTEDALLPVGTSITVRHFVPGQFVDVTGITKGKGCNEKIWFWWDACITWNIFGASQWWLYWSKRCSWKGFQKQKNAWTHGWCATHSEECMGLSNRPSQELTVSEGPGSWSSR

SEQ ID NO: 193329 - protein, 103 aa, Zea Mays
MDDQELTESMQKLLIVMQRLDEKIGPMLEADGELFNKRWGWLSRAGLWDKSHLTRQIEKYADIYTSRVSNFLHYTPFMYFQSQEQTLAHDAHSYSGGKDIKVH

SEQ ID NO: 193330 - protein, 199 aa, Zea Mays
MVEKSLDIHGDEILYVGDHIYTDVSQSKVHLRWRTALICRELEDEFNALVKSHDQKEKLVTLIQQKEIVGDLFNQLRLALQRRSNSRPAQTLAATCMDDQELTESMQKLLIVMQRLDEKIGPMLEADGELFNKRWGWLSRAGLWDKSHLTRQIEKYADIYTSRVSNFLHYTPFMYFQSQEQTLAHDAHSYSGGKDIKVH

SEQ ID NO: 193331 - protein, 218 aa, Zea Mays
MRPCFKVNSGGLYSGGSAQMVEKSLDIHGDEILYVGDHIYTDVSQSKVHLRWRTALICRELEDEFNALVKSHDQKEKLVTLIQQKEIVGDLFNQLRLALQRRSNSRPAQTLAATCMDDQELTESMQKLLIVMQRLDEKIGPMLEADGELFNKRWGWLSRAGLWDKSHLTRQIEKYADIYTSRVSNFLHYTPFMYFQSQEQTLAHDAHSYSGGKDIKVH

SEQ ID NO: 193332 - protein, 266 aa, Zea Mays
MMNHAFNRFLPNDVGWRDLFEMVIVSARKPEFFQLSHPLYEVVTDDGLMRPCFKVNSGGLYSGGSAQMVEKSLDIHGDEILYVGDHIYTDVSQSKVHLRWRTALICRELEDEFNALVKSHDQKEKLVTLIQQKEIVGDLFNQLRLALQRRSNSRPAQTLAATCMDDQELTESMQKLLIVMQRLDEKIGPMLEADGELFNKRWGWLSRAGLWDKSHLTRQIEKYADIYTSRVSNFLHYTPFMYFQSQEQTLAHDAHSYSGGKDIKVH

SEQ ID NO: 193333 - protein, 439 aa, Zea Mays
MDYTLIHYNVMAWEGRAYDYGMDNLKSMGFPVDDLKFDPDLVIRGLVIDKEKGNLVKADRFGYIKRAMHGTQMLSTRAVSEIYGRELVDLRKEIRWEFLNTLFSVSEAVMFMQAVSKALFRAHVEGQLKREIMAEPDRFVEPDPELPLALLDQKEAGKKLLLITNSDFHYTNKMMNHAFNRFLPNDVGWRDLFEMVIVSARKPEFFQLSHPLYEVVTDDGLMRPCFKVNSGGLYSGGSAQMVEKSLDIHGDEILYVGDHIYTDVSQSKVHLRWRTALICRELEDEFNALVKSHDQKEKLVTLIQQKEIVGDLFNQLRLALQRRSNSRPAQTLAATCMDDQELTESMQKLLIVMQRLDEKIGPMLEADGELFNKRWGWLSRAGLWDKSHLTRQIEKYADIYTSRVSNFLHYTPFMYFQSQEQTLAHDAHSYSGGKDIKVH

SEQ ID NO: 193334 - protein, 593 aa, Zea Mays
MADAAEMVRLLYLQTPPRPLLPQFAVHTHRPQSLLRVSPRFRPPIRLRCRALDASRPVAVEGERDEEDGLEDEEESYFSVTSSGLSEVDYLGESTRGDLNVRRERLEALGNSKSTLHGPIEEIAWKEAGEAETLLHDLGIAAWEGRAYDYGMDNLKSMGFPVDDLKFDPDLVIRGLVIDKEKGNLVKADRFGYIKRAMHGTQMLSTRAVSEIYGRELVDLRKEIRWEFLNTLFSVSEAVMFMQMVDKLDQGLVPAELGPLDYKGLYNAVSKALFRAHVEGQLKREIMAEPDRFVEPDPELPLALLDQKEAGKKLLLITNSDFHYTNKMMNHAFNRFLPNDVGWRDLFEMVIVSARKPEFFQLSHPLYEVVTDDGLMRPCFKVNSGGLYSGGSAQMVEKSLDIHGDEILYVGDHIYTDVSQSKVHLRWRTALICRELEDEFNALVKSHDQKEKLVTLIQQKEIVGDLFNQLRLALQRRSNSRPAQTLAATCMDDQELTESMQKLLIVMQRLDEKIGPMLEADGELFNKRWGWLSRAGLWDKSHLTRQIEKYADIYTSRVSNFLHYTPFMYFQSQEQTLAHDAHSYSGGKDIKVH

SEQ ID NO: 193335 - protein, 442 aa, Zea Mays
MDNLKSMGFPVDDLKFDPDLVIRGLVIDKEKGNLVKADRFGYIKRAMHGTQMLSTRAVSEIYGRELVDLRKEIRWEFLNTLFSVSEAVMFMQMVDKLDQGLVPAELGPLDYKGLYNAVSKALFRAHVEGQLKREIMAEPDRFVEPDPELPLALLDQKEAGKKLLLITNSDFHYTNKMMNHAFNRFLPNDVGWRDLFEMVIVSARKPEFFQLSHPLYEVVTDDGLMRPCFKVNSGGLYSGGSAQMVEKSLDIHGDEILYVGDHIYTDVSQSKVHLRWRTALICRELEDEFNALVKSHDQKEKLVTLIQQKEIVGDLFNQLRLALQRRSNSRPAQTLAATCMDDQELTESMQKLLIVMQRLDEKIGPMLEADGELFNKRWGWLSRAGLWDKSHLTRQIEKYADIYTSRVSNFLHYTPFMYFQSQEQTLAHDAHSYSGGKDIKVH

SEQ ID NO: 193336 - protein, 609 aa, Zea Mays
MADAAEMVRLLYLQTPPRPLLPQFAVHTHRPQSLLRVSPRFRPPIRLRCRALDASRPVAVEGERDEEDGLEDEEESYFSVTSSGLSEVDYLGESTRGDLNVRRERLEALGNSKSTLHGPIEEIAWKEAGEAETLLHDLGIADPFSVRHSPRGIFCTRTLNLRSISVVGYDMDYTLIHYNVMAWEGRAYDYGMDNLKSMGFPVDDLKFDPDLVIRGLVIDKEKGNLVKADRFGYIKRAMHGTQMLSTRAVSEIYGRELVDLRKEIRWEFLNTLFSVSEAVMFMQAVSKALFRAHVEGQLKREIMAEPDRFVEPDPELPLALLDQKEAGKKLLLITNSDFHYTNKMMNHAFNRFLPNDVGWRDLFEMVIVSARKPEFFQLSHPLYEVVTDDGLMRPCFKVNSGGLYSGGSAQMVEKSLDIHGDEILYVGDHIYTDVSQSKVHLRWRTALICRELEDEFNALVKSHDQKEKLVTLIQQKEIVGDLFNQLRLALQRRSNSRPAQTLAATCMDDQELTESMQKLLIVMQRLDEKIGPMLEADGELFNKRWGWLSRAGLWDKSHLTRQIEKYADIYTSRVSNFLHYTPFMYFQSQEQTLAHDAHSYSGGKDIKVH

SEQ ID NO: 193337 - protein, 414 aa, Zea Mays
MKIHPMTIIAGYRMALECARNALLQNTMDNKENTDKFRADLMNIAMTTLSSKILSQDKEYFAELAVDAVLRLKGSTNLESIQILKKPGGSLKDSFLDEGFILDKKIGIGQPKRIENAKILVANTAMDTDKVKIYGAQVRVDSMSKVADIEAAEKQKMREKVQKIIAHGINCFINRQLIYNFPEELFADAGILAIEHADFEGIERLALVTGGEIASTFDNPDSVKLGHCKVIEEIMIGEDRLIHFSGVAMGQACTIVLRGASEHVLDEAERSLHDALCVLSQTVNDTRVLFGGGWPEMLMAKEVDELARKTPGKRSHAIDAFSHALQAIPTIIADNAGLDSAELISQLRAEHHKENCTAGIDVITGTVGDMQRLGIQESFKVKQAILLSATEAAEMILRVDEIISCAPRRREDRM

SEQ ID NO: 193338 - protein, 122 aa, Zea Mays
MLHQDADREKLEQCDSKYARYLCKIMGIYFDYHKDAYFIKGVYLHDPTTVIAAVNPSLLTYTEGVVRVQTVGITKGLTVFDNTKKRYGEITAWSGMPTVKVAVTVDAPAVVELMMQRLMTDD

SEQ ID NO: 193339 - protein, 172 aa, Zea Mays
MSDSRKHPYPKNNTGGPFQQSAERAVLPFGPAAAIPLLPRGTWKLVFHNHHVNCPVSVCALVASMTMNENEPVVGWLAGWLAWHAGEFAAFLTGVNLIMEYVFSNVVVARSFTAYLGTAVGVDAPSKWRIPVLGLPQVFNQVDLVAVGVILLLSVCICYRHAPSVLQGSEWT

SEQ ID NO: 193340 - protein, 197 aa, Zea Mays
MAAAASMGHPYAPAELDLPGFVPLKLSQVEILVSYLGASVFVFLAVWLVSGRCVRLSKTDRLLMCWWAFTGLTHIMIEGPFVFTPDFFKKENPNFFDEVLRETLGMLLGTLQLLRSKGSPLYWKALHHYLLSTLLHPGSPSATFSSSPSVWASSTDAWFTSSPRTWTASTSGSARSTSGRISLAQTASGSGYRCSSP

SEQ ID NO: 193341 - protein, 274 aa, Zea Mays
MAAAASMGHPYAPAELDLPGFVPLKLSQVEILVSYLGASVFVFLAVWLVSGRCVRLSKTDRLLMCWWAFTGLTHIMIEGPFVFTPDFFKKENPNFFDEVWKEYSKGDSRYVARDTATVTVEGITAVLEGPASLLAVYAIASRKSFSHILQFAVCLGQLYGCLVYFITAYLDGFNFWVGPFYFWAYFIGANSFWIWIPMLIAIRSWKKTCAAFQAEKTGLQIQGIERWGKNDFFAYQVTKRKTTIRGSMGEQSEDENLRKISPLTFLQKGSVHIG

SEQ ID NO: 193342 - protein, 86 aa, Zea Mays
MGEQAIRAVDWESQRAAHLQIGIGSMDGRWTPARRLDLLLLGRLLGWDGTGQEPSSPQLPCRAAPLLRDAGSSDWRRLEDGQTGGA

SEQ ID NO: 193343 - protein, 326 aa, Zea Mays
MGAEAAHPQQQPPSSVRPCREAAAPAVLGLQLSALIDHVARVDWSLLDRVPGDRGGSQQVSIVELNHILNEVNTHILPSHNDLTPITTIAGGSVANTIRGLSAGFGISTGIIGACGDDNQGLLFVNNMSFSGVDLTRLRAKKGHTAQNMEQIIEAIRIAKQEGLSVSLDLASFEMVRDSRSKLINLLETGNIDLCFANEDEAREVIGGGLESDPEEALAFLGKYCKWAVVTLASKGCMAKHGKQVVQVPAIGESNAVDTTGAGDLFASGFLYGLVKGLPLEECCMVGACSGGSVTRALGGEVRPENWQWMYKQMHARGMLLPELKN

SEQ ID NO: 193344 - protein, 513 aa, Zea Mays
MMMLQMITNSLSQILNFLILTNFEMQVNLEPTRSGLSMMIKVVCLDFMLESQRGLPVACGHFTHGQSETTSEIGMFSQIISLERSKTNNFYEIYPRKGEVWALFKGWDIGWSSDAGNHKKMNHRYEVVQVLSDLITSTSIIVMPLVKLKGYVSLFVQSGEAAPYVIPQGDTLRFSHCVPHYLMSGTEKEGIPEGSLELDPAALPSNLEEAFPSANPECSSVRSKEHNSKHAGLSSEDCKETMNVGQRQQTKSVNAGIATKTPNEEKIKHNTHLPEVTDVDDDNICQTEYVCAESEFYDFSRIRFLQKFSSGQIWALYSDIDKFPNYYAFIQKVDLKNGTVQVRWLDVCPRGEVEKRLSQEERTIGIGTFRLGYIFDMMTYTGTDPFSHPVKARATGRKGEYEILPRHGEIWAVYKNWEAVWTAQDFEKCEYELVEILGHTDSSIQVQLLRKVDGYKMVFMSYRAEGSVMTIRNDEYPKFSHQIPCFRLTHEKGGKLRGYLELDPLSVPEEFLD

SEQ ID NO: 193345 - protein, 261 aa, Zea Mays
METIDHLLVSYVFARNYWFKLLTKAVELMLVDALIEANDYLGISLHAHDPEDFWKLDDTIIKTIETAPNNELKKAKEIIQRIRRRELYKIHHHLIPYSYLVSTNMRNGVNLPNLRNGPMMHHHILDGFCNQYSVPKDKLEHFKNITAQDIVCSQKSSEVLLKEEDVAVSNVKIDLTRGKDNPLESIKFFKDFGCDEKFPITDDRVSHLLPAYNEDRIVRVYAKKPELVDVVSEAFENLQMRMYGEKTQVHETPKRKRIRSN

SEQ ID NO: 193346 - protein, 223 aa, Zea Mays
METIDHLLVSYVFARNYWFKLLTKAVELMLVDALIEANDYLGISLHAHDPEDFWKLDDTIIKTIETAPNNELKKAKEIIQRIRRRELYKFCNQYSVPKDKLEHFKNITAQDIVCSQKSSEVLLKEEDVAVSNVKIDLTRGKDNPLESIKFFKDFGCDEKFPITDDRVSHLLPAYNEDRIVRVYAKKPELVDVVSEAFENLQMRMYGEKTQVHETPKRKRIRSN

SEQ ID NO: 193347 - protein, 316 aa, Zea Mays
MDDPRWRRCGGPRGSVPKLVDPEQGVDAGAGRACASTTRTRGGGGGEGVREARSGGRAGEEGQLVLATEVSSRREGDGTGDGGVRVGSEEDAGATQRAPSRSSCGAVQLPRGHAIPTSERHNPHDAGALAPGVRVLGDGVGRGEPHRGADMGEFCPSPQGDSALAAPPLTLSSPSPATAVRPSYGSCDRRYVKLVFDNLHGSISVDPLALQFVDTEEFQRLRDLKQLGLTYLVYPGAVHTRFEHSLGVYSLAGKAINNLKTYQGEELGIDHVDMQTVKLAVICLSMSFFLELILAHPGLMKICQCSFWTVLLTNMQ

SEQ ID NO: 193348 - protein, 63 aa, Zea Mays
MDEGGREPSKGPLPRADAHRICRICRTEKSNKIQSMGRGNINLGILGNLAEAEESFGTFGERL

SEQ ID NO: 193349 - protein, 306 aa, Zea Mays
MSSDVNGENVMDTKSVLPVTPEAPLWSTAADEELIYAKKEITNAPLTSDDPDLYAPLFRNVSIFKRSYELMERLLKVFIYHDGAKPIFHSPELKGIYASEGWFMKLMETNQNFVVRDPNTAHLFYLPYSSRQLEHNLYVPGSNTIEPLSIFVKNYIDLISAKYPYWNRTKGADHFFVACHDWGPYTTKLHDELRKNTIKALCNADLSEGFFIRGKDVSLPETFLRSPRRPLRDIGGRPAAQRTILAFFAGQMHGRVRPVLLKYWGNKDDDMRIYSRLPHRITRKRNYVQHMKSSKYCICPMGKRCT

SEQ ID NO: 193350 - protein, 512 aa, Zea Mays
MALLSLRTPPWGYPQGDSGGRSRGRKLRGPRRLDVVAIRSAAFFLRRARIAPAAAPSMFLAPSSSPAEIFYDGSMEEPEHPDIKRNPPKESSPFLKEEPIFSGLPTMSSDVNGENVMDTKSVLPVTPEAPLWSTAADEELIYAKKEITNAPLTSDDPDLYAPLFRNVSIFKRSYELMERLLKVFIYHDGAKPIFHSPELKGIYASEGWFMKLMETNQNFVVRDPNTAHLFYLPYSSRQLEHNLYVPGSNTIEPLSIFVKNYIDLISAKYPYWNRTKGADHFFVACHDWGPYTTKLHDELRKNTIKALCNADLSEGFFIRGKDVSLPETFLRSPRRPLRDIGGRPAAQRTILAFFAGQMHGRVRPVLLKYWGNKDDDMRIYSRLPHRITRKRNYVQHMKSSKYCICPMGYEVNSPRIVEAIYYECVPVIIADHFVLPFDAALNWSTFSVVVPESDVPKLKQILLAIPESRYITLQANVKRVQKHFMWHPNPVKYDIFHMILHSVWFSRVNQIR

SEQ ID NO: 193351 - protein, 566 aa, Zea Mays
MPHHHHTNPSHPPAARKLLSWRRVVAACAVVAALALLLAAAPATEDPSRWRSYLLGPLPGDTRKETVAAAVVAGSFAGPAASTSSPSEAPLSSFGEINLSARIAPAAAPSMFLAPSSSPAEIFYDGSMEEPEHPDIKRNPPKESSPFLKEEPIFSGLPTMSSDVNGENVMDTKSVLPVTPEQAPLWSTAADEELIYAKKEITNAPLTSDDPDLYAPLFRNVSIFKRSYELMERLLKVFIYHDGAKPIFHSPELKGIYASEGWFMKLMETNQNFVVRDPNTAHLFYLPYSSRQLEHNLYVPGSNTIEPLSIFVKNYIDLISAKYPYWNRTKGADHFFVACHDWGPYTTKLHDELRKNTIKALCNADLSEGFFIRGKDVSLPETFLRSPRRPLRDIGGRPAAQRTILAFFAGQMHGRVRPVLLKYWGNKDDDMRIYSRLPHRITRKRNYVQHMKSSKYCICPMGYEVNSPRIVEAIYYECVPVIIADHFVLPFDAALNWSTFSVVVPESDVPKLKQILLAIPESRYITLQANVKRVQKHFMWHPNPVKYDIFHMILHSVWFSRVNQIR

SEQ ID NO: 193352 - protein, 310 aa, Zea Mays
MSSDVNGENVMDTKSVLPVTPEAPLWSTAADEELIYAKKEITNAPLTSDDPDLYAPLFRNVSIFKRSYELMERLLKVFIYHDGAKPIFHSPELKGIYASEGWFMKLMETNQNFVVRDPNTAHLFYLPYSSRQLEHNLYVPGSNTIEPLSIFVKNYIDLISAKYPYWNRTKGADHFFVACHDWGPYTTKLHDELRKNTIKALCNADLSEGFFIRGKDVSLPETFLRSPRRPLRDIGGRPAAQRTILAFFAGQMHGRVRPVLLKYWGNKDDDMRIYSRLPHRITRKRNYVQHMKSSKYCICPMGYEKAMYLS

SEQ ID NO: 193353 - protein, 538 aa, Zea Mays
MALLSLRTPPWGYPQGDSGGRSRGRKLRGPRRLDVVAIRSAAFFLRRDRQPFETLKSRLQIGVNPGTIVINLSARIAPAAAPSMFLAPSSSPAEIFYDGSMEEPEHPDIKRNPPKESSPFLKEEPIFSGLPTMSSDVNGENVMDTKSVLPVTPEAPLWSTAADEELIYAKKEITNAPLTSDDPDLYAPLFRNVSIFKRSYELMERLLKVFIYHDGAKPIFHSPELKGIYASEGWFMKLMETNQNFVVRDPNTAHLFYLPYSSRQLEHNLYVPGSNTIEPLSIFVKNYIDLISAKYPYWNRTKGADHFFVACHDWGPYTTKLHDELRKNTIKALCNADLSEGFFIRGKDVSLPETFLRSPRRPLRDIGGRPAAQRTILAFFAGQMHGRVRPVLLKYWGNKDDDMRIYSRLPHRITRKRNYVQHMKSSKYCICPMGYEVNSPRIVEAIYYECVPVIIADHFVLPFDAALNWSTFSVVVPESDVPKLKQILLAIPESRYITLQANVKRVQKHFMWHPNPVKYDIFHMILHSVWFSRVNQIR

SEQ ID NO: 193354 - protein, 469 aa, Zea Mays
MPHHHHTNPSHPPAARKLLSWRRVVAACAVVAALALLLAAAPATEDPSRWRSYLLGPLPGDTRKETVAAAVVAGSFAGPAASTSSPSEAPLSSFGEINLSARIAPAAAPSMFLAPSSSPAEIFYDGSMEEPEHPDIKRNPPKESSPFLKEEPIFSGLPTMSSDVNGENVMDTKSVLPVTPEAPLWSTAADEELIYAKKEITNAPLTSDDPDLYAPLFRNVSIFKRSYELMERLLKVFIYHDGAKPIFHSPELKGIYASEGWFMKLMETNQNFVVRDPNTAHLFYLPYSSRQLEHNLYVPGSNTIEPLSIFVKNYIDLISAKYPYWNRTKGADHFFVACHDWGPYTTKLHDELRKNTIKALCNADLSEGFFIRGKDVSLPETFLRSPRRPLRDIGGRPAAQRTILAFFAGQMHGRVRPVLLKYWGNKDDDMRIYSRLPHRITRKRNYVQHMKSSKYCICPMGYEKAMYLS

SEQ ID NO: 193355 - protein, 432 aa, Zea Mays
MTLQRNPPKESSPFLKEEPIFSGLPTMSSDVNGENVMDTKSVLPVTPEAPLWSTAADEELIYAKKEITNAPLTSDDPDLYAPLFRNVSIFKRSYELMERLLKVFIYHDGAKPIFHSPELKGIYASEGWFMKLMETNQNFVVRDPNTAHLFYLPYSSRQLEHNLYVPGSNTIEPLSIFVKNYIDLISAKYPYWNRTKGADHFFVACHDWGPYTTKLHDELRKNTIKALCNADLSEGFFIRGKDVSLPETFLRSPRRPLRDIGGRPAAQRTILAFFAGQMHGRVRPVLLKYWGNKDDDMRIYSRLPHRITRKRNYVQHMKSSKYCICPMGYEVNSPRIVEAIYYECVPVIIADHFVLPFDAALNWSTFSVVVPESDVPKLKQILLAIPESRYITLQANVKRVQKHFMWHPNPVKYDIFHMILHSVWFSRVNQIR

SEQ ID NO: 193356 - protein, 571 aa, Zea Mays
MPHHHHTNPSHPPAARKLLSWRRVVAACAVVAALALLLAAAPATEDPSRWRSYLLGPLPGDTRKETVAAAVVAGSFAGPAASTSSPSEAPLSSFGEINLSARIAPAAAPSMFLAPSSSPAEIFYDGSMEEPEHPDIKLLMTLQRNPPKESSPFLKEEPIFSGLPTMSSDVNGENVMDTKSVLPVTPEAPLWSTAADEELIYAKKEITNAPLTSDDPDLYAPLFRNVSIFKRSYELMERLLKVFIYHDGAKPIFHSPELKGIYASEGWFMKLMETNQNFVVRDPNTAHLFYLPYSSRQLEHNLYVPGSNTIEPLSIFVKNYIDLISAKYPYWNRTKGADHFFVACHDWGPYTTKLHDELRKNTIKALCNADLSEGFFIRGKDVSLPETFLRSPRRPLRDIGGRPAAQRTILAFFAGQMHGRVRPVLLKYWGNKDDDMRIYSRLPHRITRKRNYVQHMKSSKYCICPMGYEVNSPRIVEAIYYECVPVIIADHFVLPFDAALNWSTFSVVVPESDVPKLKQILLAIPESRYITLQANVKRVQKHFMWHPNPVKYDIFHMILHSVWFSRVNQIR

SEQ ID NO: 193357 - protein, 196 aa, Zea Mays
MMTDNSFSILKQSSWLNASRCPCPHSRRENSGSANLENHRLTVCSSYPFLERWIHPFLGSIKQKKKKKKNGESLGSVSTSSVPLHVSVLLQSDLPLVTSPYLFFSSGNSQRPSSTVAMDEIHLGCRPSAEQSSPRTLTNLQLDLVEGGPPSSRSFNKESLLALIPFDCSESVGRCNKSSRLGRYDIVGCMGRRKKT

SEQ ID NO: 193358 - protein, 243 aa, Zea Mays
MMTDNSFSILKQSSWLNASRCPCPHSRRENSGSANLENHRLTVCSSYPFLERWIHPFLGSIKQKKKKKKNGESLGSVSTSSVPLHVSVLLQSDLPLVTSPYLFFSSGNSQRPSSTVAMDEIHLGCRPSAEQSSPRTLTNLQLDLVEGGPPSSRSFNKESLLALIPFDCSEDSQLVDATNQVDWDAMILSDAWDDERRHDMPRESEIYCELGLMQEDEAEQRRREEAFAGGCSSVEDSVKKCAR

SEQ ID NO: 193359 - protein, 726 aa, Zea Mays
MFTIGELMLSGVYTHEFHFCEKVKEKLEHEAYQEFLKCLHIYSQEIITRSELKNLVNDILQHYPDLMEGFNEFLEHCENIDGFLAGVFNKRPTTRIVKTEDKEKDRDRDREDRDRDREKEREKERERLDKGSTFNSKDGSCHKPPMFSGKEKYNLSKPISELDLSNCQRCTPSYRLLPKNYPMPPASNRTDLGASVLNDHWVSVTSGSEDYSFKHMRKNQYEESLFRCEDDRFELDMLLESVNAATKRVEELIEKMQDNSVKPESPIRMDEHLTPLNLRCIERLYGDHGLDVMDVLRKNASVALPVILTRLKQKQEEWSRCRSDFNKVWAEIYAKNYHKSLDHRSFYFKQQDTKNLSTKSLLTEIKEINEKKRKEDDVLLAIAAGNRRPIVPNMSFEYVDSEIHEDLHKIIKYSCGEICNSSDQLDKVMRIWTTFVEPILGVQRKHGSEDPDLVKPKSRTTKSGIANVGESNTGAGIVSKHNNDDESEQGLPSRARIANGVAANAQNGFHDADRIARRGEESLNVTLNGRVHGAASADETPSLSTQNIASTERSAENAAVVRTEQHKANLELTPGVNGSRSSHGAVEVAGEGKAVNETLPSAVMEHLKERKVLQADHSRVGMGKWCHLLRQLVRMMLMLMMKVRKVLRGLLRTVKMLPRLVKMRRAVNLVMVRNAFVKTTMKKKRIWIMMIRIQKLKVRARQKEQLRHMMWKEEYHYHFQNALCTQ

SEQ ID NO: 193360 - protein, 1011 aa, Zea Mays
MFTIGELMLSGVYTHEFHFCEKVKEKLEHEAYQEFLKCLHIYSQEIITRSELKNLVNDILQHYPDLMEGFNEFLEHCENIDGFLAGVFNKRPTTRIVKTEDKEKDRDRDREDRDRDREKEREKERERLDKGSTFNSKDGSCHKPPMFSGKEKYNLSKPISELDLSNCQRCTPSYRLLPKNYPMPPASNRTDLGASVLNDHWVSVTSGSEDYSFKHMRKNQYEESLFRCEDDRFELDMLLESVNAATKRVEELIEKMQDNSVKPESPIRMDEHLTPLNLRCIERLYGDHGLDVMDVLRKNASVALPVILTRLKQKQEEWSRCRSDFNKVWAEIYAKNYHKSLDHRSFYFKQQDTKNLSTKSLLTEIKEINEKKRKEDDVLLAIAAGNRRPIVPNMSFEYVDSEIHEDLHKIIKYSCGEICNSSDQLDKVMRIWTTFVEPILGVQRKHGSEDPDLVKPKSRTTKSGIANVGESNTGAGIVSKHNNDDESEQGLPSRARIANGVAANAQNGFHDADRIARRGEESLNVTLNGRVHGAASADETPSLSTQNIASTERSAENAAVVRTEQHKANLELTPGVNGSRSSHGAVEVAGEGKAVNETLPSAVGGETGRLGPSFNGISEGIKGRLNNDGSAPHISKVEREEGELSPNGDFDEDHFVPFEDGTSKGKEGSTSRSFQGRHGEVVPSAEAAGENDADADDEGEESAQRSTEDSENASEAGEDASGSESGDGEECFREDHDEEEEDMDHDDQDTKAESEGEAEGTTETHDVEGGISLPLSERSLYSVKPLAKHVPTALHDREKFSRIFYGNDSFYVLFRLHQILYERLLSAKTNSFTAEKKWRNSKDTNPPDLYAKFMSALYNLLDGSSDNTKFEDDCRAIIGTQSYVLFTLDKLIYKVVKQLQAIATDEMDNKLLQLYLYEKSRSPGRFFDLVYHENARVLLHDESIYRFECCSSPTRLSIQLMEYGHEKPEVTAVSIDPNFSSYLFGEYLCSTSDKKLSEGVYLARQWMVSKL

SEQ ID NO: 193361 - protein, 439 aa, Zea Mays
MKRGARDDALMGSQLKRPNVGRSDPSAQPQHMPVPGLASAAAPPPQAGAAPPAQPQQTSGAALTNQKLTTNDALVYLKAVKDKFQDKREKYEEFLEVMRDFKSERIDTNGVIGRVKTLFNGYPELILGFNAFLPKGYAIKLQEEKKPVDFVEAINFVNKIKNRFQHDERVYKAFLDILNMYRKDNKSIQDVYHEVAGLFKDHKDLLEEFQHFLPDTSVAPQAVASSRGGLVKREDRSSLPPANRTLHNEKRERACLSHADRDFSVDRPDVDHDRQRRRLDKEKERKVERDRRDYEREDKDGEHDSRDLEIGQRKRKPFPRKMEDNAGAETHQGGPSENHGIHSVSSSSYDDKDALKSVYTHEFHFCEKVKEKLEHEAYQEFLKCLHIYSQEIITRSELKNLVNDILQHYPDLMEGFNEFLEHCENIGNLQTLYICMIIL

SEQ ID NO: 193362 - protein, 204 aa, Zea Mays
MMAISSSIAAQTSGKGGTMPRANEMLRADSRMMVVFGALSSKPEQLTFEESLIFVKKVKARDYMLYLSLFDVLGRTELPQLDAYREVRYSRCFKTTQICAKSSRGSDRRRRRRCLPQSRQQTTTSGPGSSCALLSRWSQPACSRHFETQCCGLLNTLLAKKWPSDRRTAACSTYITCAVDRTGLLLLFVPSQLNHSIVCVYILE

SEQ ID NO: 193363 - protein, 81 aa, Zea Mays
MPRANEMLRADSRMMVVFGALSSKPEQLTFEESLIFVKKVKARDYMLYLSLFDVLGRTELPQLDAYREVRYEYHPLPGHTC

SEQ ID NO: 193364 - protein, 165 aa, Zea Mays
MPRANEMLRADSRMMVVFGALSSKPEQLTFEESLIFVKKVKARDYMLYLSLFDVLGRTELPQLDAYREVRSARRAREVQTAAAAAGAYLKAGSKQQHLALGHRVRCCPVGRSQPAPVTLKPSAVACSTPCWPKNGRLIEEPLHAVHTLHVQWTEPASCCYSCHHN

SEQ ID NO: 193365 - protein, 97 aa, Zea Mays
MSFVQMVKEAFKERQPDKYGLFLRVMEDFRNQRLDIAEVASTAKALFQDNPDLALRFNVFLPKGHQIQLGLDELAAYLVRDINLGADNNDDDSDGGQ

SEQ ID NO: 193366 - protein, 504 aa, Zea Mays
MASSPSPSPITIRATSPPSTATPSPATTTPKPDSPAPVTQPNATPADPPSSPAAPPPLPPPASTPPPQLPSPPPSLPPPPPDAVPPPPVVVATPPPAPAAVVPPPSSPAAVPPPPTPAAPPKASPIRPPAAASPPPSNLPAPNPPADPTPPTVAQPPPPRRRPPRSPQTEPPPLAPPPSGIPVEPSPTSPSPTSADPSIPTPSSPSSPGTTPSTPGSDGTPSVPAPATPGDSVSPVTTGGQGSNKSSSPASQSSSSSVDSGGLSSGAKAGIGVVVAIIVLSLVGAAFWYKKKRRRVHGYHAGFVMPSPASTPTQVLGYSAKTNFSAGSPESKDSMPEFSMSNCRFFTYEELYQITNGFSSQNLLGEGGFGSVYKGCLADGREVAVKKLKDGGGQGEREFHAEVDIISRVHHRHLVSLVGYCISDDQRLLVYDFVPNDTLHYHLHGRGVPVLEWPARVKIAAGSARGIAYLHEDCQPRIIHRDIKSSNILLDNNFEALLWMLALM

SEQ ID NO: 193367 - protein, 569 aa, Zea Mays
MPRTVTPTPVPCASPYLWPPPQNWPRASQGSLAHFFPAECAVVMANASRGRVGGGGRSSVLALLLLLSAGGARASYDGEGEAARAGAEEKEKAAAWTGGLSRRSFPKGFVFGTAASAYQVEGMAHKDGRGPSIWDAFIKIPGEIANNATADVTVDEYHRYKEDVNIMKNMGFDAYRFSISWSRIFPNGTGEVNWKGVAYYNRLINYMVKKGITPYANLYHYDLPEALEVRYGGLLSREVVSFADYADFCFGAFGDRVKNWLTFNEPRVVAALGYDDGRFAPGRCTGCEAGGDSGTEPYVVAHHLILSHAAAVQRYRRRHQPTQRGRVGILLDFVWYEPLTADSAADRAAAQRSRDFHVGWFLHPIVYGEYPKSVRRSVKGRLPKFTAEEAGLVRGSIDYVGVNQYTAYYVRDRRPNATAAPPSYSSDWHAEFVYERDGVPIGPRANSDWLYIVPWGLYKAVTYVKEKYGNPTMLLSENGMDDPGNVTVGQGVRDAARVAYYRSYVAELKAAIDGGANCVGYFAWSLLDNFEWKLGYTSRFGLVYVDFRTLRRYPKSSAYWFRDVIAGTN

SEQ ID NO: 193368 - protein, 76 aa, Zea Mays
MTACSHGSLCHAGVGAAHALHTQMQMKIIQGMHKYRCAVAVPEKYKPRFVSTYIYITRKKKKIYTRQDFVVFSFVD

SEQ ID NO: 193369 - protein, 97 aa, Zea Mays
MLPPDLLLSGIWRSGFAPPHLVAGLLTSTSPRHRRLLFAIAPLASCANDPTNLAAKQGHTGWNLFDIRSFEVQLVGIDWVGCRWNFSSSAIQFTKGK

SEQ ID NO: 193370 - protein, 612 aa, Zea Mays
MAWSCSNFLKEPRKYQIVDILMVEELWSCFLDQHGSTNNVVTSVIIDIIKTIPICMWLLKSTHVFCRLVLMPLAVFVFLAHKYWKARITIDAVEKFLRMQQMLVPMRYAYTNIIAITGHFREKLGQGGYGSVYKGVLQPGEVHVAVKMLGNSNCNGEEFISEVATIGKIHHFNVVRLIGFCSEENSRALIYEFMPHGSLDKYIFSSEKSFSWDKLNEIALGIARGLNYLHHGCDMQIVHFDIKPHNILLDSNFVPKVADFGLAKLFPRDDSFVPLSAMRGTIGYIAPEMVSRSFGVISSKSDVYSFGMLLLEMTGGRRNADPHAGSSSQAYYPSLVYNQLSQGDVGEISEGVDMHELKKKLCIIGLWCIQMKPQDRPTMSEVIEMLEAGVDGIQMPSRPFFCDDEVICRFVLMPLIVFIFLAYKYWKTRITIDAIEKFLRMQQMLVPMRYAYTNNIAITAHFKDKLGQGGYDTIYKGVLQSGEVQVSIKMLGNSNYNSEEFISEVATIGKLHDVNGVRLIGFCSEENRRALIYEFMPRGSLDRYIFSSEKSFSWDKLNEIALGIARGLNYLRHGCDMQIVHFDIKPHNILLDNNFVPKVADFGLANQTIPKI

SEQ ID NO: 193371 - protein, 738 aa, Zea Mays
MFVVLISPAVVLAIYRIHSVGKVIHLGVVSNRMSWFARIQTPQFASAVEHTPCLASTPRILTSGLSMPTWTSRAVAPFPGGITMPSCGYLAMIYLGGPGIPVPKNTSYPDVVKLMRNGFGLRFPSSIGDRGIRECFAESVRNFLKEPRKYQIVDILMVEELWSCFLDQHGSTNNVVTSVIIDIIKTIPIFFCRLVLMPLAVFVFLAHKYWKARITIDAVEKFLRMQQMLVPMRYAYTNIIAITGHFREKLGQGGYGSVYKGVLQPGEVHVAVKMLGNSNCNGEEFISEVATIGKIHHFNVVRLIGFCSEENSRALIYEFMPHGSLDKYIFSSEKSFSWDKLNEIALGIARGLNYLHHGCDMQIVHFDIKPHNILLDSNFVPKVADFGLAKLFPRDDSFVPLSAMRGTIGYIAPEMVSRSFGVISSKSDVYSFGMLLLEMTGGRRNADPHAGSSSQAYYPSLVYNQLSQGDVGEISEGVDMHELKKKLCIIGLWCIQMKPQDRPTMSEVIEMLEAGVDGIQMPSRPFFCDDEVICRFVLMPLIVFIFLAYKYWKTRITIDAIEKFLRMQQMLVPMRYAYTNNIAITAHFKDKLGQGGYDTIYKGVLQSGEVQVSIKMLGNSNYNSEEFISEVATIGKLHDVNGVRLIGFCSEENRRALIYEFMPRGSLDRYIFSSEKSFSWDKLNEIALGIARGLNYLRHGCDMQIVHFDIKPHNILLDNNFVPKVADFGLANQTIPKI

SEQ ID NO: 193372 - protein, 762 aa, Zea Mays
MATMSAASHRCCASSLRALTVLFVLAALVSDVGGRHHHHVCRPYFSCGGFSNISYPFRRQGDPSGCGVQSYELVCTDTDATIRIGSGTYTVLSINSTYSYFWVVDANLDIQSSCPLPWWDYHGIPVPKNTSYPDVVKLMRNGFGLRFPSSIGDRGIRECFAESVRNFLKEPRKYQIVDILMVEELWSCFLDQHGSTNNVVTSVIIDIIKTIPIFFCRLVLMPLAVFVFLAHKYWKARITIDAVEKFLRMQQMLVPMRYAYTNIIAITGHFREKLGQGGYGSVYKGVLQPGEVHVAVKMLGNSNCNGEEFISEVATIGKIHHFNVVRLIGFCSEENSRALIYEFMPHGSLDKYIFSSEKSFSWDKLNEIALGIARGLNYLHHGCDMQIVHFDIKPHNILLDSNFVPKVADFGLAKLFPRDDSFVPLSAMRGTIGYIAPEMVSRSFGVISSKSDVYSFGMLLLEMTGGRRNADPHAGSSSQAYYPSLVYNQLSQGDVGEISEGVDMHELKKKLCIIGLWCIQMKPQDRPTMSEVIEMLEAGVDGIQMPSRPFFCDDEVICRFVLMPLIVFIFLAYKYWKTRITIDAIEKFLRMQQMLVPMRYAYTNNIAITAHFKDKLGQGGYDTIYKGVLQSGEVQVSIKMLGNSNYNSEEFISEVATIGKLHDVNGVRLIGFCSEENRRALIYEFMPRGSLDRYIFSSEKSFSWDKLNEIALGIARGLNYLRHGCDMQIVHFDIKPHNILLDNNFVPKVADFGLANQTIPKI

SEQ ID NO: 193373 - protein, 629 aa, Zea Mays
MDLALDFLLRLVTAASENVSQSLNFLKEPRKYQIVDILMVEELWSCFLDQHGSTNNVVTSVIIDIIKTIPICMWLLKSTHVFCRLVLMPLAVFVFLAHKYWKARITIDAVEKFLRMQQMLVPMRYAYTNIIAITGHFREKLGQGGYGSVYKGVLQPGEVHVAVKMLGNSNCNGEEFISEVATIGKIHHFNVVRLIGFCSEENSRALIYEFMPHGSLDKYIFSSEKSFSWDKLNEIALGIARGLNYLHHGCDMQIVHFDIKPHNILLDSNFVPKVADFGLAKLFPRDDSFVPLSAMRGTIGYIAPEMVSRSFGVISSKSDVYSFGMLLLEMTGGRRNADPHAGSSSQAYYPSLVYNQLSQGDVGEISEGVDMHELKKKLCIIGLWCIQMKPQDRPTMSEVIEMLEAGVDGIQMPSRPFFCDDEVICRFVLMPLIVFIFLAYKYWKTRITIDAIEKFLRMQQMLVPMRYAYTNNIAITAHFKDKLGQGGYDTIYKGVLQSGEVQVSIKMLGNSNYNSEEFISEVATIGKLHDVNGVRLIGFCSEENRRALIYEFMPRGSLDRYIFSSEKSFSWDKLNEIALGIARGLNYLRHGCDMQIVHFDIKPHNILLDNNFVPKVADFGLANQTIPKI

SEQ ID NO: 193374 - protein, 630 aa, Zea Mays
MRNGFGLRFPSSIGDRGIRECFADNFLKEPRKYQIVDILMVEELWSCFLDQHGSTNNVVTSVIIDIIKTIPICMWLLKSTHVFCRLVLMPLAVFVFLAHKYWKARITIDAVEKFLRMQQMLVPMRYAYTNIIAITGHFREKLGQGGYGSVYKGVLQPGEVHVAVKMLGNSNCNGEEFISEVATIGKIHHFNVVRLIGFCSEENSRALIYEFMPHGSLDKYIFSSEKSFSWDKLNEIALGIARGLNYLHHGCDMQIVHFDIKPHNILLDSNFVPKVADFGLAKLFPRDDSFVPLSAMRGTIGYIAPEMVSRSFGVISSKSDVYSFGMLLLEMTGGRRNADPHAGSSSQAYYPSLVYNQLSQGDVGEISEGVDMHELKKKLCIIGLWCIQMKPQDRPTMSEVIEMLEAGVDGIQMPSRPFFCDDEVICRFVLMPLIVFIFLAYKYWKTRITIDAIEKFLRMQQMLVPMRYAYTNNIAITAHFKDKLGQGGYDTIYKGVLQSGEVQVSIKMLGNSNYNSEEFISEVATIGKLHDVNGVRLIGFCSEENRRALIYEFMPRGSLDRYIFSSEKSFSWDKLNEIALGIARGLNYLRHGCDMQIVHFDIKPHNILLDNNFVPKVADFGLANQTIPKI

SEQ ID NO: 193375 - protein, 447 aa, Zea Mays
MQVPWNTSYPDVVKFMRSGFALGFPVWYGDNIRECLANNMRTFHKEPRNSTGIRQQILDILTFETLWFCVIEQLGSTNNGVKSVLIHIIEEIPYVLSGLKSAHVICRFILMPLAVFVFLAYKYWKTRITIDAVEKFLRMHHMLVPMRYAYTNIIAITGHFRDKLGQGGYGTVYKGVLQPGEVHVAVKMLGNSNCNGEEFISEVATIGKIHHVNVVRLIGFCSEENIRALIYEFMPRGSLDKYIFSSEKTFSWDKLNEIALGIARGLNYLHHGCDMQIVHFDIKPHNILLDSNFVPKVADFGLAKLFPRDDSFVPLSAMRGTIGYIAPEMVSRSFGVISSKSDVYSFGMLLLEMTGGRRNADPHAGSSSQAYYPSLVYRQLSQGDANRISEGVDMHELEKKLCIIGLWCIQMKPQDRPTMSEVIEMLEAGVDGIQMPPRPYFCDEEGP

SEQ ID NO: 193376 - protein, 371 aa, Zea Mays
MVITSENVSQTICVICRFILMPLAVFVFLAYKYWKTRITIDAVEKFLRMHHMLVPMRYAYTNIIAITGHFRDKLGQGGYGTVYKGVLQPGEVHVAVKMLGNSNCNGEEFISEVATIGKIHHVNVVRLIGFCSEENIRALIYEFMPRGSLDKYIFSSEKTFSWDKLNEIALGIARGLNYLHHGCDMQIVHFDIKPHNILLDSNFVPKVADFGLAKLFPRDDSFVPLSAMRGTIGYIAPEMVSRSFGVISSKSDVYSFGMLLLEMTGGRRNADPHAGSSSQAYYPSLVYRQLSQGDANRISEGVDMHELEKKLCIIGLWCIQMKPQDRPTMSEVIEMLEAGVDGIQMPPRPYFCDEEGESSYSTISELDTIEE

SEQ ID NO: 193377 - protein, 351 aa, Zea Mays
MPLAVFVFLAYKYWKTRITIDAVEKFLRMHHMLVPMRYAYTNIIAITGHFRDKLGQGGYGTVYKGVLQPGEVHVAVKMLGNSNCNGEEFISEVATIGKIHHVNVVRLIGFCSEENIRALIYEFMPRGSLDKYIFSSEKTFSWDKLNEIALGIARGLNYLHHGCDMQIVHFDIKPHNILLDSNFVPKVADFGLAKLFPRDDSFVPLSAMRGTIGYIAPEMVSRSFGVISSKSDVYSFGMLLLEMTGGRRNADPHAGSSSQAYYPSLVYRQLSQGDANRISEGVDMHELEKKLCIIGLWCIQMKPQDRPTMSEVIEMLEAGVDGIQMPPRPYFCDEEGESSYSTISELDTIEE

SEQ ID NO: 193378 - protein, 53 aa, Zea Mays
MCRCAHRLRMLERVFLFSPPSSAPVRVATAFRMRFLLVTDRGNFGSTSSRRGD

SEQ ID NO: 193379 - protein, 383 aa, Zea Mays
MDLPFGFLFRLNITPTSENVSQRICVICRFVLMPLAVFVFLAYKYWKTRITIDAVEKFLRMQHMLVPMRYAYTNIIAITAHFRDKLGQGGYGTVYKGVLQPGEVHVAVKMLGNSNCNGEEFISEVATIGKIHHVNVVRLIGFCSEENIRALIYEFMPRGSLDKYIFSSEKTFSWDKLNEIALGIARGLNYLHHGCDMQIVHFDIKPHNILLDSNFVPKVADFGLAKLFPRDDSFVPLSAMRGTIGYIAPEMVSRSFGVISSKSDVYSFGMLLLEMTGGRRNADPHAGSSSQAYYPSLVYSQLSQGDANEISEGVDMHELEKKLCIIGLWCIQMKPQDRPTMSEVIEMLEAGIDSMQMPPRPFFCDDEGDSSYSTISELNTIEE

SEQ ID NO: 193380 - protein, 55 aa, Zea Mays
MSFSFSVGLFGPCIVLLSFNAMIHNSLACSRKKNHRDYNSTLASNNLSFCEDVLE

SEQ ID NO: 193381 - protein, 95 aa, Zea Mays
MPSSYRADYALRTPCAWHAFSPPPPVEWREFRRSCLDLASFKYCNKKTEKLHCLSQHQSTSTLHVHVLPELAIGVHCAQRRFTLIHLVLMVWACL

SEQ ID NO: 193382 - protein, 188 aa, Zea Mays
MALLQKAGLRWTTSLPSAVVSMCQMLWPFGHTNWRTSTTAAMTTSRRRSTAGAPPSTTQAHCSRSADYVCGCTTCQKNKTDHLHPSGLPQPLTILLEVWSDISMDFVEGFPRAGGKTVVLTVVDRFSRYANFIAIRHPYTASSVAKAFFDDIICLHRLHCSIVSDRDTIFTSLFWTELFKLAGVNPKW

SEQ ID NO: 193383 - protein, 125 aa, Zea Mays
MLFGLMNTPSTFQALINEVLKSYIRKFVLVFFDASSSASSWADHLQHVKQAFQLLWTHKLALKCSKCLFGTHTVAYLGHVISSNGVAMDPAKIEVVEAWPSPKSLRALRGFLGLIGYYRKFIAGY

SEQ ID NO: 193384 - protein, 53 aa, Zea Mays
MGHNRSEDTCLHQTDAQGLQSRGTRRTGSLGRRSLTVDSSKLGNGSQSIRDAQ

SEQ ID NO: 193385 - protein, 140 aa, Zea Mays
MITNYKCTFGLKESKSTSVTQKQMPSQPKQYESTVHLFIGTGHSPCKITPRPFAFDNNSIVIYRGLDSLFLFKSVSSFHPTCRSFLAHSFGSVPSFVLLVFLHTAILTLSHPVLKVNRMRTIYVPGSVIHVHSDYINDSS

SEQ ID NO: 193386 - protein, 464 aa, Zea Mays
MPVPKNTSYPDVVKFMRNGFALGFTVSIPDPNIRECFAEFMRTFLKDPRSSTGIKELIVDILRVVDIFLACVIYQLQSTNNNGVTTVLIGIIETIQYVSGVLKYTAVVCRFVLMPLAVFIFLVYKYWKTRITVDAVEKFLQMQQMLVPMRYAYTNIIAITGHFRDKLGQGGYGSVYKGVLQPGEVHVAIKMLGNSNCNGDEFISEVATIGKIHHVNIVRLIGFCSEENSRALIYEFMPHGSLDKYIFSSEKSFSWDKLNEIALGIARGLNYLHHGCDMQIVHFDIKPHNILLDNNFVPKVADFGLAKLFPKDDNFVPLSAMRGTIGYIAPEMVSRSFGVISSKSDVYSFGMLLLEMTGGRRNADPHAGSSSQAYYPSLVYSQLSQGDANEISEGVDMHELEKKLCIIGLWCIQMKPQDRPTMSEVIEMFEAGVDGIQMPPRPFFCDDEGDSSYSAISKLDTIEE

SEQ ID NO: 193387 - protein, 472 aa, Zea Mays
MTPLGSPGMPVPKNTSYPDVVKFMRNGFALGFTVSIPDPNIRECFAEFMRTFLKDPRSSTGIKELIVDILRVVDIFLACVIYQLQSTNNNGVTTVLIGIIETIQYVSGVLKYTAVVCRFVLMPLAVFIFLVYKYWKTRITVDAVEKFLQMQQMLVPMRYAYTNIIAITGHFRDKLGQGGYGSVYKGVLQPGEVHVAIKMLGNSNCNGDEFISEVATIGKIHHVNIVRLIGFCSEENSRALIYEFMPHGSLDKYIFSSEKSFSWDKLNEIALGIARGLNYLHHGCDMQIVHFDIKPHNILLDNNFVPKVADFGLAKLFPKDDNFVPLSAMRGTIGYIAPEMVSRSFGVISSKSDVYSFGMLLLEMTGGRRNADPHAGSSSQAYYPSLVYSQLSQGDANEISEGVDMHELEKKLCIIGLWCIQMKPQDRPTMSEVIEMFEAGVDGIQMPPRPFFCDDEGDSSYSAISKLDTIEE

SEQ ID NO: 193388 - protein, 679 aa, Zea Mays
MNLLAMATMSAASHRCCASSLRALTVLFVLAAPVSDVEGRHHRHVCPYFSCGGLSNISYPFRRQGDPSGCGVQSCELVCTDTDATIRIGSGTYKVLSINFTYSYFWVVDANLDIQSSCPLPRWDYHAGTSGNSRLGRIEFSHDFTYFCYPNSKWAFFVNCSQPIENNDIYEPVSCLSSSSFIYMVTDFLYDGYVPADSLQPSCGYLAMTPLGSPGMPVPKNTSYPDVVKFMRNGFALGFTVSIPDPNIRECFAEFMRTFLKDPRSSTGIKELIVDILRVVDIFLACVIYQLQSTNNNGVTTVLIGIIETIQYVSGVLKYTAVVCRFVLMPLAVFIFLVYKYWKTRITVDAVEKFLQMQQMLVPMRYAYTNIIAITGHFRDKLGQGGYGSVYKGVLQPGEVHVAIKMLGNSNCNGDEFISEVATIGKIHHVNIVRLIGFCSEENSRALIYEFMPHGSLDKYIFSSEKSFSWDKLNEIALGIARGLNYLHHGCDMQIVHFDIKPHNILLDNNFVPKVADFGLAKLFPKDDNFVPLSAMRGTIGYIAPEMVSRSFGVISSKSDVYSFGMLLLEMTGGRRNADPHAGSSSQAYYPSLVYSQLSQGDANEISEGVDMHELEKKLCIIGLWCIQMKPQDRPTMSEVIEMFEAGVDGIQMPPRPFFCDDEGDSSYSAISKLDTIEE

SEQ ID NO: 193389 - protein, 496 aa, Zea Mays
MVTDFLYDGYVPADSLQPSCGYLAMTPLGSPGMPVPKNTSYPDVVKFMRNGFALGFTVSIPDPNIRECFAEFMRTFLKDPRSSTGIKELIVDILRVVDIFLACVIYQLQSTNNNGVTTVLIGIIETIQYVSGVLKYTAVVCRFVLMPLAVFIFLVYKYWKTRITVDAVEKFLQMQQMLVPMRYAYTNIIAITGHFRDKLGQGGYGSVYKGVLQPGEVHVAIKMLGNSNCNGDEFISEVATIGKIHHVNIVRLIGFCSEENSRALIYEFMPHGSLDKYIFSSEKSFSWDKLNEIALGIARGLNYLHHGCDMQIVHFDIKPHNILLDNNFVPKVADFGLAKLFPKDDNFVPLSAMRGTIGYIAPEMVSRSFGVISSKSDVYSFGMLLLEMTGGRRNADPHAGSSSQAYYPSLVYSQLSQGDANEISEGVDMHELEKKLCIIGLWCIQMKPQDRPTMSEVIEMFEAGVDGIQMPPRPFFCDDEGDSSYSAISKLDTIEE

SEQ ID NO: 193390 - protein, 80 aa, Zea Mays
MCRCAHRLRMLERVFLFSPPSSAPVRVATAFRMRFLLVTDRGNFGSTSSRRGLTALSPGIEESSFEAWWSSSAARLNGGI

SEQ ID NO: 193391 - protein, 371 aa, Zea Mays
MVITSENVSQRICGVCRFVLMPLAVFVFLVYKYWKTRITVDAVEKFLRTQQMLVPMRYAYTNIIAITGHFRDKLGQGGYGSVYKGVLQPGEVHVAIKMLGNSNCNGDEFISEVATIGKIHHVNIVRLIGFCSEENSRALIYEFMPHGSLDKYIFSSEKSFSWVKLNEIALGIASGLNYLHHGCDMQIVHFDIKPHNILLDSNFVPKVADFGLAKLFPRGDSFVPLSAMRGTIGYIAPEMVSRSFGVISSKSDVYSFGMLLLEMTGGRRNADPHAGSSSQAYYPSLVYNQLSQGDANGISEGVNMHDLEKKLCTIGLWCIQMKPQDRPTMSEVIEMLESGVDGMQMPPRPYFCDEEGDSSYSIISELDTIEE

SEQ ID NO: 193392 - protein, 567 aa, Zea Mays
MGMSAASHLCASSSLRALTVLFVLAAFVSDVEGRHRRHVCPPYFSCGGLSNISYPFRRQGDPSGCGVQSYELVCTDTDATIRIGSGTYKPSCGYLAKTPLGGPGMTVPSNTSYPDVVKFMRNGFALGFPFSIRSYPTIRECLAENMRTFHKEPRNSTGIRQQILDILTFETLWFCVIEQLGSTNNGVKSVLIDIIQQIPYVLSSLKSAHVICRFVLMPLAVFVFLAYKYWKTQITIDAVEKFLRMQNMLVPMRYAYTNIIAITGHFRDKLGQGGYGTVYKGVLLPGEIHVAVKMLGNSNCNGEEFISEVATIGKIHHVNVVRLIGFCSEENIRALIYEFMPRGSLDKYIFSSEKTFSWDKLNEIALGIARGLNYLHHGCDMQIVHFDIKPHNILLDSNFVPKVADFGLAKLFPRDDSFVPLSAMRGTIGYIAPEMVSRSFGIISSKSDVYSFGMLLLEMTGGRRNADPHAGSSSQAYYPSLVYRQLSQGDANRISEGVDMHELEKKLCIIGLWCIQMKPQDRPTMSEVIEMLEAGVDGIQMPPRPYFCDEEGDSSYSTISELDTIEE

SEQ ID NO: 193393 - protein, 353 aa, Zea Mays
MGMSAASHLCASSSLRALTVLFVLAAFVSDVEGRHRRHVCPPYFSCGGLSNISYPFRRQGDPSGCGVQSYELVCTDTDATIRIGSGTYKVLSINSTYSYFWVVDADLDIQSSCPLPRWDYPARWINRNSHRWRIEFSHYYLYSSFYTVSRWAIFVNCSQPIENNDICNNIYDDDVYGPVSCLSNSSFIYLLVTDNWDVISAGDLEPSCGYLAKTPLGGPGMTVPSNTSYPDVVKFMRNGFALGFPFSIRSYPTIRECLAENMRTFHKEPRNSTGIRQQILDILTFETLWFCVIEQLGSTNNGVKSVLIDIIQQIPYVLSSLKSAHETSSDKEATVLYTRECYCQVKFMLLSRC

SEQ ID NO: 193394 - protein, 463 aa, Zea Mays
MTVPSNTSYPDVVKFMRNGFALGFPFSIRSYPTIRECLAENMRTFHKEPRNSTGIRQQILDILTFETLWFCVIEQLGSTNNGVKSVLIDIIQQIPYVLSSLKSAHVICRFVLMPLAVFVFLAYKYWKTQITIDAVEKFLRMQNMLVPMRYAYTNIIAITGHFRDKLGQGGYGTVYKGVLLPGEIHVAVKMLGNSNCNGEEFISEVATIGKIHHVNVVRLIGFCSEENIRALIYEFMPRGSLDKYIFSSEKTFSWDKLNEIALGIARGLNYLHHGCDMQIVHFDIKPHNILLDSNFVPKVADFGLAKLFPRDDSFVPLSAMRGTIGYIAPEMVSRSFGIISSKSDVYSFGMLLLEMTGGRRNADPHAGSSSQAYYPSLVYRQLSQGDANRISEGVDMHELEKKLCIIGLWCIQMKPQDRPTMSEVIEMLEAGVDGIQMPPRPYFCDEEGDSSYSTISELDTIEE

SEQ ID NO: 193395 - protein, 392 aa, Zea Mays
MAMATAKLSSPATSLLAGGRARRSAPARRATVIRAAAGSYSDELVSTAKSVASPGRGILAIDESNATCGKRLSSIGLDNTEPNRQAYRQLLLTTAGLGEYISGAILFEETLYQSTTDGRKFVDCLKDQNIMPGIKVDKGLVPLPGSNNESWCQGLDGLASRCAEYYKQGARFAKWRTVVSIPCGPSALAAKEAAWGLARYAAIAQDNGLVPIVEPEILLDGDHGIERTLEVAEKVWSEVFFYLAQNNVLFEGILLKPSMVTPGADHKEKASPEAIAKYTLTMLRRRVPPAVPGIMFLSGGQSEVEATLNLNAMNQSPNPWHVSFSYARALQNSVLKTWQGRPENVEAAQKALLVRAKANSLAQLGRYTGEGESDEAKKAKLLVPTTSTVVKP

SEQ ID NO: 193396 - protein, 381 aa, Zea Mays
MAMATAKLSSPATSLLAGGRARRSAPARRATVIRAAAGSYSDELVSTAKSVASPGRGILAIDESNATCGKRLSSIGLDNTEPNRQAYRQLLLTTAGLGEYISGAILFEETLYQSTTDGRKFVDCLKDQNIMPGIKVDKGLVPLPGSNNESWCQGLDGLASRCAEYYKQGARFAKWRTVVSIPCGPSALAAKEAAWGLARYAAIAQDNGLVPIVEPEILLDGDHGIERTLEVAEKVWSEVFFYLAQNNVLFEGILLKPSMVTPGADHKEKASPEAIAKYTLTMLRRRVPPAVPGIMSEVEATLNLNAMNQSPNPWHVSFSYARALQNSVLKTWQGRPENVEAAQKALLVRAKANSLAQLGRYTGEGESDEAKKGMFQKGYTY

SEQ ID NO: 193397 - protein, 466 aa, Zea Mays
MRGGGEAKPGKSQKSSAQRHLNAGFVVVGLLMLLAYLVAQHFVVGSRHVVITEAQVIMDNVKAPDETEAQRIMDNTKIPSETENGKVVCNMEGRSDTCEVDGDVRTNGTALSVTLVPASRSERHEWMIRPYSRRFASVRKVTVTQLQDRADAAPCAVTHDVPAVLFAIGGYAGNYWHDYADILVPLFVASRRYNGEVKFLISNIRFQPRWLAKYKAFLQGLSLYDAVDMDGDAQVRCFPHVTVGLRLDKEFSIVPELVPGGRRLSMADFTRFLRETYALPRGSAASRDREQPHKKPRLLLIHRGHYRRITNEPEVARAAEAAGFEAVVAELRGDATEAEQARVVNSFDVVLGVHGAGLTNAVFLPPGGVLIQVVPYGKMEYIARAEFSEPATDMGLKYLDYSVSAEESSLMETLGPEHPAVKDPDSVHRSGWDQVFELYLAKQNVRINVTRFAPTLAQALDHLRQQ

SEQ ID NO: 193398 - protein, 602 aa, Zea Mays
MGMDAGGGKLPYSYAGQQDGGKLVKSVSRVEPRRFGLGLVAGFLLVTCAYFSTAKFDAIQIAMTSRPVSSNAGGVGVGSLEVGGVVAAADTYNASRQGLDLGKKGPGATSMADEGSEAEALEKDGGKASSPSGPGVPAALLPPVSSEEAANSTLESGVKATTQPPTASFTAISGLEDEELQVQDAVASGSKRSKDSAAAAAATRSANVSSPSVVHSHHAILPAPAQRIPEVKQADSETTPAREREWKPLCDVTSNRRIDWCELDGDVRVVGANASVTLVAPPGADNRTFRAESWRIKPYPRKADRGYTGNYFHAFTDVILPLFLTARRYAGEVRLLVADLQPWWVGKFLPVFRSISKYELVDLDRDPRVRCFRHVQVGLTSHADFSIDPRRAPNGYSMLDFTRFMRAAYGLPRGDVVAAAPARRPRLLVVARARTRRFVNTEEIVRGAEAVGFEAVVSEGTHEVAPFAELANGCDAIMGVHGAGLTNMVFLPTGGVVIQVVPLGGLEFVAGYFRGPSVDMGLRYLEYRIEPEESTLVDQYPRDHPIFTDPNGIKSKGWESLKDAYLDKQDVRLDMERFRPTLQEAIAHLRKAKAKANGDGNN

SEQ ID NO: 193399 - protein, 205 aa, Zea Mays
MLDFTRFMRAAYGLPRGDVVAAAPARRPRLLVVARARTRRFVNTEEIVRGAEAVGFEAVVSEGTHEVAPFAELANGCDAIMGVHGAGLTNMVFLPTGGVVIQVVPLGGLEFVAGYFRGPSVDMGLRYLEYRIEPEESTLVDQYPRDHPIFTDPNGIKSKGWESLKDAYLDKQDVRLDMERFRPTLQEAIAHLRKAKAKANGDGNN

SEQ ID NO: 193400 - protein, 593 aa, Zea Mays
MGMDAGGGKLPYSYAGQQDGGKLVKSVSRVEPRRFGLGLVAGFLLVTCAYFSTAKFDAIQIAMSKQTSRPVSSNAGGVGVGSLEVGGVVAAADTYNASRQGLDLGKKGPGATSMADEGSEAEALEKDGGKASSPSGPGSWSGVPAALLPPVSSEEAANSTLESGGLEDEELQVQDAVASGSKRSKDSAAAAAATRSANVSSPSVVHSHHAILPAPAQRIPEVKQADSETTPAREREWKPLCDVTSNRRIDWCELDGDVRVVGANASVTLVAPPGADNRTFRAESWRIKPYPRKADRGYTGNYFHAFTDVILPLFLTARRYAGEVRLLVADLQPWWVGKFLPVFRSISKYELVDLDRDPRVRCFRHVQVGLTSHADFSIDPRRAPNGYSMLDFTRFMRAAYGLPRGDVVAAAPARRPRLLVVARARTRRFVNTEEIVRGAEAVGFEAVVSEGTHEVAPFAELANGCDAIMGVHGAGLTNMVFLPTGGVVIQVVPLGGLEFVAGYFRGPSVDMGLRYLEYRIEPEESTLVDQYPRDHPIFTDPNGIKSKGWESLKDAYLDKQDVRLDMERFRPTLQEAIAHLRKAKAKANGDGNN

SEQ ID NO: 193401 - protein, 606 aa, Zea Mays
MGMDAGGGKLPYSYAGQQDGGKLVKSVSRVEPRRFGLGLVAGFLLVTCAYFSTAKFDAIQIAMTSRPVSSNAGGVGVGSLEVGGVVAAADTYNASRQGLDLGKKGPGATSMADEGSEAEALEKDGGKASSPSGPGSWSGVPAALLPPVSSEEAANSTLESGVKATTQPPTASFTAISGLEDEELQVQDAVASGSKRSKDSAAAAAATRSANVSSPSVVHSHHAILPAPAQRIPEVKQADSETTPAREREWKPLCDVTSNRRIDWCELDGDVRVVGANASVTLVAPPGADNRTFRAESWRIKPYPRKADRGYTGNYFHAFTDVILPLFLTARRYAGEVRLLVADLQPWWVGKFLPVFRSISKYELVDLDRDPRVRCFRHVQVGLTSHADFSIDPRRAPNGYSMLDFTRFMRAAYGLPRGDVVAAAPARRPRLLVVARARTRRFVNTEEIVRGAEAVGFEAVVSEGTHEVAPFAELANGCDAIMGVHGAGLTNMVFLPTGGVVIQVVPLGGLEFVAGYFRGPSVDMGLRYLEYRIEPEESTLVDQYPRDHPIFTDPNGIKSKGWESLKDAYLDKQDVRLDMERFRPTLQEAIAHLRKAKAKANGDGNN

SEQ ID NO: 193402 - protein, 240 aa, Zea Mays
MSKSRGNVINPDDVVSEYGADSLRLYEMFMGPLRDSKTWSTGGIEGVHRFLGRTWRLIVGPQLSDGSYNDGTMTTEDEPTLDQLRVLHRCIARVTEEIQETRFNTAISAMMEFVNAAYKWETQPKSVIESFVLLLSPFAPHLAEELWFRLGHPQSLAYEQFPEAKSEYLEESKLVLPVQINGKTRGTILVDKACSEDDVFQIAASDEKLSKYLDGKGIRKKIYVPGRILNVILDQQKSRT

SEQ ID NO: 193403 - protein, 404 aa, Zea Mays
MRQWMLRITSYADRLLEDLNDLDWPESIKEMQRNWIGRSKGAELIFSAVDQEGHDLGATLLVYTTRPDTIFGATYLVVAPEHVLLSSLTSEEQRAHVEEYRELSARKSELERTELQKEKTGVFSGSYAKNPATGEIIPIWVADYVLGSSYGTGAIMAVPAHDSRDHEFAVKYELPIIKVVSPPNGNCDPVEAYEDDGIMINSSSSSSGLNINGMLSQDAAKKVTEWIENNGFGKKKVNYKLRDWLFARQRYWGEPFPVSYLDDTNEMVPLTEDDLPLTLPELDDFTPTGTGEPPLTKATNWVRTIDPSSGKPARRETSTMPQWAGSCWYYLRFMDPKNCSILVDKAKERYWGPVDIYVGGAEHSVLHLLYARFWHKVLYDMGVVSTKEPFKCLINQGLILGERQ

SEQ ID NO: 193404 - protein, 495 aa, Zea Mays
MALALQWPLQFPLQLQARPPAVTAGHHRRRHRVLAVCRSPPLPARCCASAAAAADTGKAQTAARRAYPFDEIEPRWQRHWEEHRTFRTLDIGEGLDTSKPKCYILDMFPYPSGAGLHVGHPLGYTATDILSRFKRMKGFNVLHPMGWDAFGLPAEQYAIQTGTHPKITTERNIERFRTQLKSLGFSYDWDREISTTEPGYYKWTQWIFLQLLKRGLAYQAEVPVNWCPALGTVLANEEVVDGVSERGGYPVIRKPMRQWMLRITSYADRLLEDLNDLDWPESIKEMQRNWIGRSKGAELIFSAVDQEGHDLGATLLVYTTRPDTIFGATYLVVAPEHVLLSSLTSEEQRAHVEEYRELSARKSELERTELQKEKTGVFSGSYAKNPATGEIIPIWVADYVLGSYGTGAIMAVPAHDSRDHEFAVKYELPIIKVVSPPNGNCDPVEAYEDDGIMINSSSSSSGLNINGMLSQDAAKKVTEWIENNGFGKKKKMTCP

SEQ ID NO: 193405 - protein, 381 aa, Zea Mays
MPQWAGSCWYYLRFMDPKNCSILVDKAKERYWGPVDIYVGGAEHSVLHLLYARFWHKVLYDMGVVSTKEPFKCLINQGLILGEIEYTAYRDNEGRWVSADSDSSLIDCYQEKVAPDKVTKVGDHYVLKDNPNIRLNARAYKMSKSRGNVINPDDVVSEYGADSLRLYEMFMGPLRDSKTWSTGGIEGVHRFLGRTWRLIVGPQLSDGSYNDGTMTTEDEPTLDQLRVLHRCIARVTEEIQETRFNTAISAMMEFVNAAYKWETQPKSVIESFVLLLSPFAPHLAEELWFRLGHPQSLAYEQFPEAKSEYLEESKLVLPVQINGKTRGTILVDKACSEDDVFQIAASDEKLSKYLDGKGIRKKIYVPGRILNVILDQQKSRT

SEQ ID NO: 193406 - protein, 545 aa, Zea Mays
MAVPAHDSRDHEFAVKYELPIIKVVSPPNGNCDPVEAYEDDGIMINSSSSSSGLNINGMLSQDAAKKVTEWIENNGFGKKKVNYKLRDWLFARQRYWGEPFPVSYLDDTNEMVPLTEDDLPLTLPELDDFTPTGTGEPPLTKATNWVRTIDPSSGKPARRETSTMPQWAGSCWYYLRFMDPKNCSILVDKAKERYWGPVDIYVGGAEHSVLHLLYARFWHKVLYDMGVVSTKEPFKCLINQGLILGEIEYTAYRDNEGRWVSADSDSSLIDCYQEKVAPDKVTKVGDHYVLKDNPNIRLNARAYKMSKSRGNVINPDDVVSEYGADSLRLYEMFMGPLRDSKTWSTGGIEGVHRFLGRTWRLIVGPQLSDGSYNDGTMTTEDEPTLDQLRVLHRCIARVTEEIQETRFNTAISAMMEFVNAAYKWETQPKSVIESFVLLLSPFAPHLAEELWFRLGHPQSLAYEQFPEAKSEYLEESKLVLPVQINGKTRGTILVDKACSEDDVFQIAASDEKLSKYLDGKGIRKKIYVPGRILNVILDQQKSRT

SEQ ID NO: 193407 - protein, 327 aa, Zea Mays
MRQWMLRITSYADRLLEDLNDLDWPESIKEMQRNWIGRSKGAELIFSAVDQEGHDLGATLLVYTTRPDTIFGATYLVVAPEHVLLSSLTSEEQRAHVEEYRELSARKSELERTELQKEKTGVFSGSYAKNPATGEIIPIWVADYVLGSYGTGAIMAVPAHDSRDHEFAVKYELPIIKVVSPPNGNCDPVEAYEDDGIMINSSSSSSGLNINGMLSQDAAKKVTEWIENNGFGKKKVNYKLRDWLFARQRYWGEPFPVSYLDDTNEMVPLTEDDLPLTLPELDDFTPTGTGEPPLTKATNWVRTIDPSSGKPARRETSTMPQWAGSCW

SEQ ID NO: 193408 - protein, 584 aa, Zea Mays
MRQWMLRITSYADRLLEDLNDLDWPESIKEMQRNWIGRSKGAELIFSAVDQEGHDLGATLLVYTTRPDTIFGATYLVVAPEHVLLSSLTSEEQRAHVEEYRELSARKSELERTELQKEKTGVFSGSYAKNPATGEIIPIWVADYVLGSYGTGAIMAVPAHDSRDHEFAVKYELPIIKVVSPPNGNCDPVEAYEDDGIMINSSSSSSGLNINGMLSQDAAKKVTEWIENNGFGKKKVNYKLRDWLFARQRYWGEPFPVSYLDDTNEMVPLTEDDLPLTLPELDDFTPTGTGEPPLTKATNWVRTIDPSSGKPARRETSTMPQWAGSCWYYLRFMDPKNCSILVDKAKERYWGPVDIYVGGAEHSVLHLLYARFWHKVLYDMGVVSTKEPFKCLINQGLILGEIEYTAYRDNEGRWVSADSDSSLIDCYQEKVAPDKVTKVGDHYVLKDNPNIRLNARAYKMSKSRGNVINPDDVVSEYGADSLRLYEMFMGPLRDSKTWSTGGIEGVHRFLGRTWRLIVGPQLSDGSYNDGTMTTEDEPTLDQLRVLHRCIARVTEEIQETRFNTAISAMMEFVNAAYKVKPNLS

SEQ ID NO: 193409 - protein, 156 aa, Zea Mays
MPVEVVMYSAHRYSMLHSAGHLLDICVHNVGLFHLEPGKGYHFPDGPFVEYKGIIPPDQIPVKKNELEREANRLISEGAKVLASVFPYEEAAILCGGSLPSYISKDSNPRIVKFGDNPGGPCGGTHVADISIINSLKVTNIRVKKGLTKVSYSISP

SEQ ID NO: 193410 - protein, 216 aa, Zea Mays
MAQEAAPARPVGPTRLVYFDDMGALHHSSATVLSVHQVFHYGRFEGTEQGCGTVFKEGGTVSLQVDAERRSFNSRLHSAGHLLDICVHNVGLFHLEPGKGYHFPDGPFVEYKGIIPPDQIPVKKNELEREANRLISEGAKVLASVFPYEEAAILCGGSLPSYISKDSNPRIVKFGDNPGGPCGGTHVADISIINSLKVTNIRVKKGLTKVSYSISP

SEQ ID NO: 193411 - protein, 253 aa, Zea Mays
MAQEAAPARPVGPTRLVYFDDMGALHHSSATVLSVHQEEGGRVAVVLDATVFHPQGGGQPADTGVISAGGARFLVEDVRAKDGVVFHYGRFEGTEQGCGTVFKEGGTVSLQVDAERRSFNSRLHSAGHLLDICVHNVGLFHLEPGKGYHFPDGPFVEYKGIIPPDQIPVKKNELEREANRLISEGAKAAILCGGSLPSYISKDSNPRIVKFGDNPGGPCGGTHVADISIINSLKVTNIRVKKGLTKVSYSISP

SEQ ID NO: 193412 - protein, 159 aa, Zea Mays
MIWGHSTTHPPPFSPSTRLHSAGHLLDICVHNVGLFHLEPGKGYHFPDGPFVEYKGIIPPDQIPVKKNELEREANRLISEGAKVLASVFPYEEAAILCGGSLPSYISKDSNPRIVKFGDNPGGPCGGTHVADISIINSLKVTNIRVKKGLTKVSYSISP

SEQ ID NO: 193413 - protein, 161 aa, Zea Mays
MCEICLQQFRPGYTSPQQLFHYGSIPMNFRGNWEIARQDLNDSQIITMMPTERDFMDNYDDYFPIRTRSSTLCCRTIAIIFMSLLVLRHTLPLVIGDNGEYSLALFSLLVLRTAGILFPILVMVRALASFHHRRRQQVISLLSCTVSCILIMFSSAEADIA

SEQ ID NO: 193414 - protein, 87 aa, Zea Mays
MLISASHPVYFAPIMSLQLLASCWQKVACKSMASPITVIVHVYKLILIKVPIKMSKSTLYEKELNFCSKYKFKWCHRARSIKIDKNK

SEQ ID NO: 193415 - protein, 584 aa, Zea Mays
MRRSIPEDLQGRCFNCLASSHRAADCRRSVRCFTCWGLGHRAVKCKVRATPVIKASVSVWDRLGPQLVHKPVDIPRRAMEWRRVSSPIPAIQRAGVADPTLGGAKKRRHRTRGRRPKTAPVAPSEDSREVAPPPGSSSPEPVRVHAPQPVVPDMVEATHLCILDRADALAREELRLRRCALFVVVTGSRPRVAAETLADEVAAGFGLDASSFSVHRSCPEDFVLILNSEELANQVYNNGVVFDSPSGSFKFLRWSRLAHAEVVAFPSPVLVEFKGVPIHAWDLATAQNLLRDHCTDVELHPDTVNRHDFSSFKVFGWCRRPHLIPNLVELLVPEPLMMTPGSTSPERRLLAYQVTAHVSLISPPVHSAAAPPPPTFDDDQDNGTRRRRLNSSVQMGHAESGEALAARRPVRERLGVAPVSVRQVEAGLSVKDSASSVALVTGETHTEAVEPVIGCIDTGLSLAGVDVDSSVPAVETLSASPSLPGGPTIATRVGTVLKPSMKAVGAGLRMWPCSPIKYFKRKRRGAAAQQSPLSAAQSATSADFIARMSRPAARVLCVSQKQKRQRRPRAPREGALPRRSRRLA

SEQ ID NO: 193416 - protein, 259 aa, Zea Mays
MLRFIFGSVFWRMGKSQTSIQDRMGLLQVAAINTAMAALTKTVGVFPKERSIVDRERAKGSYALGPYLSSKLLAEIPIGAAFPLIFGSILYPMAKLHPTFSRFAKFCGIVTVESFAASAMGLTVGAMAPTTEAAMALGPSLMTVFIVFGGYYVNPDNTPVIFRWIPRISLIRWAFQGLCINEFKGLQFEQQHSYDIQTGEQALERFSLGGIRIADTLVAQGRILMFWYWSTYLLLKKNRPKYQQLLPPLEQDKNKPQVE

SEQ ID NO: 193417 - protein, 669 aa, Zea Mays
MEVRGLGQLLAALAAAFFVRAIAGPGPALLPPAEDTETDEADAEAGEGGGGGVPPVTIRWARITCALKNKRGEVARFLLSNVSGEAKPGRLLALMGPSGSGKTTLLNVLAGQLAASSSLHLSGFLYINGRPISKGGYKIAFVRQEDLFFSQLTVRETLSLAAELQLPDLWAPERKESYVNDLLLRMGLVNCADSIVGDAKVRGISGGEKKRLSLACELIASPSVIFADEPTTGLDAFQAEKVMETLRQLAQDGHTVICSIHQPRGSVYGKFDDIVLLSDGETVYMGPAKEEPLTYFSSLGLLYQCPDHMNPAEFLADLISIDYGSTESVQSSQKRIENLIEAFSNKSVVTEGNNLIAIPEDPELSAKLVRKTTVKKRHGWWRQFRLLFKRAWMQAFRDGPTNKVRSRMSVASAVIFGSVFWRMGKSQTSIQDRMGLLQVAAINTAMAALTKTVGVFPKERSIVDRERAKGSYALGPYLSSKLLAEIPIGAAFPLIFGSILYPMAKLHPTFSRFAKFCGIVTVESFAASAMGLTVGAMAPTTEAAMALGPSLMTVFIVFGGYYVNPDNTPVIFRWIPRISLIRWAFQGLCINEFKGLQFEQQHSYDIQTGEQALERFSLGGIRIADTLVAQGRILMFWYWSTYLLLKKNRPKYQQLLPPLEQDKNKPQVE

SEQ ID NO: 193418 - protein, 500 aa, Zea Mays
MQESGGGLEDLELQVQNAIAAAAAAAPPKESNSVSSNDPGSSSSEIFPSGPGPADQVPVPATSPEIEPLFANQIPAASSEVKAAPPFHLDPPVADAEAKQTAPLREWKPLCDLTSNRRIDWCELEGDVRVVGGSNGSVTLVAAPGADERSFHEESWSIKPYPRKADPNAMRSVRALAVRSVATAPPVACTDWHGVPALVFSARGYTGNYFHAYTDVILPLFLTARQYAGEVLLLVTGFQAWWVGKYLPVFRSLSNYEPVDLDRDRDPRVRCFRRVQVGLTSHDDFSIDPRRAPNGYSMLDFTRFMRATYGLPRDAVPRRGRGRPRPRLLVIARARTRRFLNAEDIVRGARKVGFEVVVSEVAQEVAAFAELVNTCDAVVGVHGAGLTNMVFLPPGGVVIQVLPLGPLEFVASYFRGPARDMGLSYLEYRISPEESTLLDQYPRDHPVLTDPMSVQAKDWVSFMGVYLFKQDVRLDMKRFRPVLKKALARLRAKPRNNNNK

SEQ ID NO: 193419 - protein, 569 aa, Zea Mays
MFLDAVRSRAKNAAAGTVGSPANGGDSSKQTSGPVSSFEEKQRDDAVHEKDDDDPRAGVAALPPLSSDIMQESGGGLEDLELQVQNAIAAAAAAAPPKESNSVSSNDPGSSSSEIFPSGPGPADQVPVPATSPEIEPLFANQIPAASSEVKAAPPFHLDPPVADAEAKQTAPLREWKPLCDLTSNRRIDWCELEGDVRVVGGSNGSVTLVAAPGADERSFHEESWSIKPYPRKADPNAMRSVRALAVRSVATAPPVACTDWHGVPALVFSARGYTGNYFHAYTDVILPLFLTARQYAGEVLLLVTGFQAWWVGKYLPVFRSLSNYEPVDLDRDRDPRVRCFRRVQVGLTSHDDFSIDPRRAPNGYSMLDFTRFMRATYGLPRDAVPRRGRGRPRPRLLVIARARTRRFLNAEDIVRGARKVGFEVVVSEVAQEVAAFAELVNTCDAVVGVHGAGLTNMVFLPPGGVVIQVLPLGPLEFVASYFRGPARDMGLSYLEYRISPEESTLLDQYPRDHPVLTDPMSVQAKDWVSFMGVYLFKQDVRLDMKRFRPVLKKALARLRAKPRNNNNK

SEQ ID NO: 193420 - protein, 660 aa, Zea Mays
MEGGGKLVAYRYGGGVEPRKFGLGGLVAGLLLVTCAYYFSTVKLDAVRIVMSKQPMNPSEAFRSRAKNAAAGTVGSPANGGDSSKQTSESGGLQDQGAWSSKDGDGVSSSSFGQGESGRHLFGGPVSSFEEKQRDDAVHEKDDDDPRAGVAALPPLSSDIMQESGGGLEDLELQVQNAIAAAAAAAPPKESNSVSSNDPGSSSSEIFPSGPGPADQVPVPATSPEIEPLFANQIPAASSEVKAAPPFHLDPPVADAEAKQTAPLREWKPLCDLTSNRRIDWCELEGDVRVVGGSNGSVTLVAAPGADERSFHEESWSIKPYPRKADPNAMRSVRALAVRSVATAPPVACTDWHGVPALVFSARGYTGNYFHAYTDVILPLFLTARQYAGEVLLLVTGFQAWWVGKYLPVFRSLSNYEPVDLDRDRDPRVRCFRRVQVGLTSHDDFSIDPRRAPNGYSMLDFTRFMRATYGLPRDAVPRRGRGRPRPRLLVIARARTRRFLNAEDIVRGARKVGFEVVVSEVAQEVAAFAELVNTCDAVVGVHGAGLTNMVFLPPGGVVIQVLPLGPLEFVASYFRGPARDMGLSYLEYRISPEESTLLDQYPRDHPVLTDPMSVQAKDWVSFMGVYLFKQDVRLDMKRFRPVLKKALARLRAKPRNNNNK

SEQ ID NO: 193421 - protein, 587 aa, Zea Mays
MTLLSYLNELREPTEIPLCHIPEAVIKTASDWISQRSYDALGDFVLWCIDSIMSELSGPSAGPKGSKKVAQQSPRAQVAIFVVLAMTLRRKPDVLVNVMPKIMGNNKYLGQEKLPIIVWFIAQASQGDLVTGMFCWAHFLFPTLCAKPSGNPLARDLVLQLLERILSVTKARSILLNGAVRKGERLVPPVSFDLFMRATFPVSGARVKATERFEVAYRTIKELALAGSPGSKTVKQASQQLLPLCAKAMQENNAELTREAVDVFIWCLTQNAESYKQWERIYPENTEASVAVLSKIVIDWKDVSPKLSSEALKATVKNLKAKNEAALESATDAGKQASIKKQTSTARLEQGSEQLLGGRPGPALGVLATVAECSVEPAAQTTKGPDSNGSSSPLPPVLPSVCFPPRPRAMAPCASPSALALSASTRVSSFPLTLRPRPRPEARVPRAPGGAQLRPATACSWPRPLLPELAPAFPRAGARSAGRPQPLFRPRAMMTTSQIASCAFTVGTVAVLPFYTLMVVAPNADITKRTVESSAPYVALGLLYAYLLYLSWTPDTLRAMFASKYWLPEEWDALCSCRASSGCSRAR

SEQ ID NO: 193422 - protein, 823 aa, Zea Mays
MAMEDVAGASSSSVAAAASDPTHGWQTVSYPKRHRKQAHQPPRAMAPDLALQANGKGSGVFDAVEKRSQERHRALQQQLASRAADLDDARIAPVTGGAYSDDSDSDEATAPRQVGEVKKPKKPKKPKVTVAEAAALIDAENLAAHLVEISSSYENQQDIQLMRFADYFGRAFVAVSASQFAWAKMFKESTVSKMVDIPLCHIPEAVIKTASDWISQRSYDALGDFVLWCIDSIMSELSGPSAGPKGSKKVAQQSPRAQVAIFVVLAMTLRRKPDVLVNVMPKIMGNNKYLGQEKLPIIVWFIAQASQGDLVTGMFCWAHFLFPTLCAKPSGNPLARDLVLQLLERILSVTKARSILLNGAVRKGERLVPPVSFDLFMRATFPVSGARATERFEVAYRTIKELALAGSPGSKTVKQASQQLLPLCAKAMQENNAELTREAVDVFIWCLTQNAESYKQWERIYPENTEASVAVLSKIVIDWKDVSPKLSSEALKATVKNLKAKNEAALESATDAGKQASIKKQTSTARLEQGSEQLLGGRPGPALGVLATVAECSVEPAAQTTKGPDSNGSSSPLPPVLPSVCFPPRPRAMAPCASPSALALSASTRVSSFPLTLRPRPRPEARVPRAPGGAQLRPATACSWPRPLLPELAPAFPRAGARSAGRPQPLFRPRAMMTTSQIASCAFTVGTVAVLPFYTLMVVAPNADITKRTVESSAPYVALGLLYAYLLYLSWTPDTLRAMFASKYWLPELPGIVRMFASEMTVASAWIHLLAVDLFAARQVYHDGLKNNIETRHSVSLCLLFCPVGILAHVVTKVLAGAAGRSH

SEQ ID NO: 193423 - protein, 126 aa, Zea Mays
MYVPFYSNIISDLLDERLSAMHILMSIYANATLPLVLFSHYTYLGQKNMRRKKVEKKRKRKQKSYVLEDQYHTRLLSSTSSSSNRSQQVPVSVQGRREGQGPSASCPPDRPGPCSSSPRTSAAAGR

SEQ ID NO: 193424 - protein, 50 aa, Zea Mays
MCYAIQLKFKSILDKHITPGCHIFTYCEILSNKKVYGRGMKLEIYAMLTR

SEQ ID NO: 193425 - protein, 568 aa, Zea Mays
MKKPQMGAKELQTILQDRFTCAISYDTIWKGKEKALRELFESWEESFQLLFSWKEAVLQKSPDSVIEIDLRVEDDKLFFSKFFCAFGPCISGFKEACRPYLSVDSTALNGIWDGHLASATSVDGLNWMYPVAFGFFSSETEENWTWFMTKLHQAVGDLPVLAICSDACKGLTNAVKSVFPNAEKRVCFRHLMNNYVKSYTGSEYMYPAARAYRRDVFEHHIGNVSCDPVIASWLDQYHDLLWYRSGFNTAIKCDYITNNIAELFNNWIKDYKGLPVCDLADKIREMIMHLFHKRRRISQRFHGNILPSIIHVLTTRTRGIGHLEFIKGDDYAAEIYDNSNYCAPHVVKAYLKECSCQEWQHTGKPCQHALCFITAQQMRNVRMEDFVDHYYSVEKFRQAYCRMVEPLEDKSFWPKVDIASEVGAPLDRRCVGRQRENSIKSSLEGVSGKEASEKGKKMIRRRFKCPNCGELGHRKNSSKCPLNGTKKRKRAPRKNTTKGWFPKEVPTSSQAAPNITPPSDDVPASSEIVLTMPPPPGEDVLASSQIVQPMSPPSEVVPTEPISPPKDA

SEQ ID NO: 193426 - protein, 441 aa, Zea Mays
MYPVAFGFFSSETEENWTWFMTKLHQAVGDLPVLAICSDACKGLTNAVKSVFPNAEKRVCFRHLMNNYVKSYTGSEYMYPAARAYRRDVFEHHIGNVSCDPVIASWLDQYHDLLWYRSGFNTAIKCDYITNNIAELFNNWIKDYKGLPVCDLADKIREMIMHLFHKRRRISQRFHGNILPSIIHVLTTRTRGIGHLEFIKGDDYAAEIYDNSNYCAPHVVKAYLKECSCQEWQHTGKPCQHALCFITAQQMRNVRMEDFVDHYYSVEKFRQAYCRMVEPLEDKSFWPKVDIASEVGAPLDRRCVGRQRENSIKSSLEGVSGKEASEKGKKMIRRRFKCPNCGELGHRKNSSKCPLNGTKKRKRAPRKNTTKGWFPKEVPTSSQAAPNITPPSDDVPASSEIVLTMPPPPGEDVLASSQIVQPMSPPSEVVPTEPISPPKDA

SEQ ID NO: 193427 - protein, 660 aa, Zea Mays
MENDITAAEIFGVVGMENDIAAAEFSGMVGMEDTAATPVCHGSACPVVCHSEEPGGSKVVVVNDVHTCTSSGRKKTTTPSSAWVAAKALSILMKKPQMGAKELQTILQDRFTCAISYDTIWKGKEKALRELFESWEESFQLLFSWKEAVLQKSPDSVIEIDLRVEDDKLFFSKFFCAFGPCISGFKEACRPYLSVDSTALNGIWDGHLASATSVDGLNWMYPVAFGFFSSETEENWTWFMTKLHQAVGDLPVLAICSDACKGLTNAVKSVFPNAEKRVCFRHLMNNYVKSYTGSEYMYPAARAYRRDVFEHHIGNVSCDPVIASWLDQYHDLLWYRSGFNTAIKCDYITNNIAELFNNWIKDYKGLPVCDLADKIREMIMHLFHKRRRISQRFHGNILPSIIHVLTTRTRGIGHLEFIKGDDYAAEIYDNSNYCAPHVVKAYLKECSCQEWQHTGKPCQHALCFITAQQMRNVRMEDFVDHYYSVEKFRQAYCRMVEPLEDKSFWPKVDIASEVGAPLDRRCVGRQRENSIKSSLEGVSGKEASEKGKKMIRRRFKCPNCGELGHRKNSSKCPLNGTKKRKRAPRKNTTKGWFPKEVPTSSQAAPNITPPSDDVPASSEIVLTMPPPPGEDVLASSQIVQPMSPPSEVVPTEPISPPKDA

SEQ ID NO: 193428 - protein, 262 aa, Zea Mays
MALIDAVANSIRIPLWRLFGGASDSVTTDITIPIVTPNEAAQLAAKYRGQGFQTLKLKVGKNLNSDIEVLKAIRLVHPDCSFILDANEGYTANQAIEVLDRLNEMGVTPVLFEQPVHRDDWEGLRDVSAVAMEKYKVAVAADESCRSLLDAQKIIQGNIAHVINIKLAKLGVLGALEIINAARKSNTALMIGGMVETRIAMGFAGHLAAGLGCFSFVDLDTPLLLSEDPVYGGYEAFGPLYKFTNARGHGGFLHLDNNDASK

SEQ ID NO: 193429 - protein, 376 aa, Zea Mays
MEPLPSATAAGVGAPGPGPGYPESTESSPRSRGGDSWDEPFPSSAAAAAGGGGRLRLMCSFGGRIVPRPTDKSLCYLGGETRIVAVDRHASLADVHARLSRSLLGGRPFTLKYQLPNEDLDSLISVSTDEDLDNLVDEYDRIAATSSGSGSSRTSRIRLFLFPATPESSSSLGSLLDDSSKSENWFVDALNSAISGSLDGIPRGISTDSASVNCLLGLEDDSSVHSRSGVTNSAPAEDQRASQPKLPAGATAVAAAAGAGRHPHDVQSVPDSPMLDKNSSFGSTSSAPSLSNLPPIRVRPEDRPSDARIMQPTAVEDHFAQMGISEQRPAECSLTMISPITVAEVGKHNFSSRRFRQLLIPPTEPSTIMTDLLRPT

SEQ ID NO: 193430 - protein, 576 aa, Zea Mays
MGTKCQVYTDHKSLKYIFTQKDLNLRQRRWLELIKDYDLEIHYHPGKANLVADALSRKEHVHLAIVAQLPDEIVEDFRRLNLGIVAHTEGVTIDVEPTLEQEVRKGQLEDAKIKEIKDLITEGRVPEFTKDEQGTVWFKNRMCVPDIKSLRETILKEAHDSDYSIHPGSTKMYQDLKRKYWWYGLKRDVAAHVAMCNICQRVQAEHQRPAGLLHPLKIPEWKWEEIGMDFITGLPRTQKGYDAIWVIVDRLTKVAHFTPVKTTYKGSQLAELYMARIVCLHGVPKKIVSDRGSQFTSRFWRRFHENMSTKLNFSTAYHPQTDGQTERTNQVLEDMLRACALQHGGSWDKSLPYAEFSYNNSYQASLKMSPFEALYGRKCRTPLYWDQTGERQFFGPELIQEAEEQVRIIRENLRVAQTRQKSYADNRRRPLEFEEGDYVYLKVSPLRGMRRFKVKGKLSPRYIGPFLIFRRVGEMAYQLELPDSLSDVHNVFHVSQLKKCLRVPEEQLPMEELSVQGDLTYTEYPIKILDILTRVTRNKVIKMCKVQWSHHGEDEATSEREEELRVDFPHLFPRSS

SEQ ID NO: 193431 - protein, 324 aa, Zea Mays
MTPSSPSSGRGSTLPSSPRSPTSSGTTLLASRAPSKLCRRPSYCRSSSHSSSRASGGLGGRFFYMALLEQESLTWQKPSQPRLIQHFSDLVSKWMGESEKLVANLFQMARENAPSIIFIDEIDSLCGQRGEGNESEASRRIKTELLVQMQGVGHNDDKVLVLAATNTPYALDQAVRRRFDKRIYIPLPDTKARQHMFKVHLGDTPHSLTESDFESLARRTDGFSGSDVAVCVKDVLFEPVRKTQDAMFFFKADGDMWMPCGPKQPGSVQTTMQELASKGLAAKILPPPISRTDFEKVLSRQRPTVSKKDLEVHERFTKEFGEEG

SEQ ID NO: 193432 - protein, 528 aa, Zea Mays
MPPILFSPQPKHASPFPSFPFLSLVSSRLRSPFLLRTPSSPHRVKPQHKSTARRLRSPPVPNQPLRCPIRPIPPPIRRRGGASGPTPMYSNFKEQAIEYVKQAVQEDNAGNYVKAFPLYMNALEYFKTHLKYEKNPKIKEAITAKFTEYLRRAEEIRAVLDEGGAGPGANGGDAAVATRPKTKGKDGDGGNGGDDSEQSKLRAGLNSAIITEKPNVKWNDVAGLESAKQALQEAVILPVKFPQFFTGKRRPWRAFLLYGPPGTGKSYLAKAVATEADSTFFSISSSDLVSKWMGESEKLVANLFQMARENAPSIIFIDEIDSLCGQRGEGNESEASRRIKTELLVQMQGVGHNDDKVLVLAATNTPYALDQVTKKNHAVRRRFDKRIYIPLPDTKARQHMFKVHLGDTPHSLTESDFESLARRTDGFSGSDVAVCVKDVLFEPVRKTQDAMFFFKADGDMWMPCGPKQPGSVQTTMQELASKGLAAKILPPPISRTDFEKVLSRQRPTVSKKDLEVHERFTKEFGEEG

SEQ ID NO: 193433 - protein, 327 aa, Zea Mays
MGPTTRAHFVYNRRRRRRRGGRHAVEEASDEEQQQMDSSSSSSDEEGDQEEDAEASGEDVDDEEEEEAVAAEPAPKQPPAAAAAGEKRGRRKGSITISLKKVCKACKRTGHQAGFKGAVYIDCPMKPCFLCKMPGHTTLTCPHRVTMEHGVIPAPKRNANTSLDYVFQSQVKGKIPMVKPKFLIPNQLEHGNIKFHQRRVTCLEFHPTKNSVLLSGDKKGLLGIWDYVKLHEKITYDSVHSCILNSMKIDTTNDGMIYTASSDGTISCTDLDTGIGSPLLNLNPNGWNGPSSWHMIYGMDLNTDKAWIDDQRRELDIQFLSIKRVAR

SEQ ID NO: 193434 - protein, 250 aa, Zea Mays
MGPTTRAHFVYNRRRRRRRGGRHAVEEASDEEQQQMDSSSSSSDEEGDQEEDAEASGEDVDDEEEEEAVAAEPAPKQPPAAAAAGEKRGRRKGSITISLKKVCKACKRTGHQAGFKGAVYIDCPMKPCFLCKMPGHTTLTCPHRVTMEHGVIPAPKRNANTSLDYVFQSQVKGKIPMVKPKFLIPNQLEHGNIKFHQRRVTCLEFHPTKNSVLLSGDKKGLLGIWDYVKLHEKITYDSVHSCILNSMNFL

SEQ ID NO: 193435 - protein, 178 aa, Zea Mays
MQRRVGMADGEARCRTLGAVIKEKDEEFALFLEMRRREKERGAAAAAADQLLLSGDVAAENGMLLLDPPPPAGGSFISASSSEPKPAAYKVAGGGFRRAPGGVDDFLNADASDKNDYDWLLTPPGTPLFSSLKVEPKRSLVSQAGTPKARPTALKSRGEGDDGDIESVEFPKCVVASN

SEQ ID NO: 193436 - protein, 166 aa, Zea Mays
MQRRVGMADGEARCRTLGAVIKEKDEEFALFLEMRRREKERGAAAAAADQLLLSGDVAAENGMLLLDPPPPAEPKPAAYKVAGGGFRRAPGGVDDFLNADASDKNDYDWLLTPPGTPLFSSLKVEPKRSLVSQAGTPKARPTALKSRGEGDDGDIESVEFPKCVET

SEQ ID NO: 193437 - protein, 168 aa, Zea Mays
MQRRVGMADGEARCRTLGAVIKEKDEEFALFLEMRRREKERGAAAAAADQLLLSGDVAAENGMLLLDPPPPAEPKPAAYKVAGGGFRRAPGGVDDFLNADASDKNDYDWLLTPPGTPLFSSLKVEPKRSLVSQAGTPKARPTALKSRGEGDDGDIESVEFPKCVVASN

SEQ ID NO: 193438 - protein, 223 aa, Zea Mays
MRSSRSSSRCADARRSAALRPPRRTSFCSPGTSRRRTGCCSSTRRHPLVGASFRPLLRSPNRRRTRWLAADLGGRLGEWTTSSMQTPATRTITTVRIQLVLLGRMGHGHGGCWRLLTPPGTPLFSSLKVEPKRSLVSQAGTPKARPTALKSRQLDVVMEEGQGEELEVMLSESDDSEFDHDDEFPPSTDGDELSKTEKTKRGGKRSRAGIQLSPSKCKANRVK

SEQ ID NO: 193439 - protein, 131 aa, Zea Mays
MLVRIQLVLLGRMGHGHGGCWRLLTPPGTPLFSSLKVEPKRSLVSQAGTPKARPTALKSRQLDVVMEEGQGEELEVMLSESDDSEFDHDDEFPPSTDGDELSKTEKTKRGGKRSRAGIQLSPSKCKANRVK

SEQ ID NO: 193440 - protein, 218 aa, Zea Mays
MQRRVGMADGEARCRTLGAVIKEKDEEFALFLEMRRREKERGAAAAAADQLLLSGDVAAENGMLLLDPPPPAEPKPAAYKVAGGGFRRAPGGVDDFLNADASDKNDYDWLLTPPGTPLFSSLKVEPKRSLVSQAGTPKARPTALKSRQLDVVMEEGQGEELEVMLSESDDSEFDHDDEFPPSTDGDELSKTEKTKRGGKRSRAGIQLSPSKCKANRVK

SEQ ID NO: 193441 - protein, 120 aa, Zea Mays
MSDIKFPLPYRPDSFNLVIVSDALDYLTPRYLNKTLPGLARVSTDGLVIFAGNPGQQKAKVSELPKFGRPAKLRSSSWWTRYFVQTGLTENEGPLKKFEEATSQNKYQPDCQIFHLSSPR

SEQ ID NO: 193442 - protein, 170 aa, Zea Mays
MAILGALRLAPSPPALAGAAPPATSPYTAGGGPYGKQVTRGQDLTGKDFSGQTLIKQDFKTSILRQANFKGANLLGASFFDADLTSADLSDADLRGADLSLANLTKANLSNANLEGALATGNTSFKGADITGADFTDVPLRDDQREYLCKIADGVNSTTGNPTKETLFCS

SEQ ID NO: 193443 - protein, 452 aa, Zea Mays
MRYWQLPWVPPPKEEPPSEEELARKAALKEKAGQRLRDMAAAKRSQKIVELEKQLSYLEELMEQLDEAEEEEATAILGSSGYLSQQEIRSAILKASQSLRKAKGESNGNDEKTDASAVDKYPLVSVPDETLTPEQLKEKKKQILLKTTTEGKLRAKQKRAEEEALREKQEEKRRAENPELYLEELRARYSELSDKFEQRKRQKVNGSQTNGNHSSSAGVGRGERLNAAQKERMRLLASAAFDRGKGEDTFGMRDEDWLVYNKMSKDNDDDSNDDDESELVRISSKLQEIDPTFVSKSEAVQLTPEPPKVRPLTAEDYRIAIGIERFRCPEVLFQPGMIGIDQAGIDEMVSISLRRLMEDESVKERLCQSILVTGGSSLFPGMIPRLESGIRQYRPYLAPLKLVGAADPILDAWRGAAAFAASSKFGKQTFSLADYGEHGENLFHRYNIVYSL

SEQ ID NO: 193444 - protein, 119 aa, Zea Mays
MENPELYLEELRARYSELSDKFEQRKRQKVNGSQTNGNHSSSAGVGRGERLNAAQKERMRLLASAAFDRGKGEDTFGMRDEDWLVYNKMSKDNDDDSNDDDESELVRISSKLQVPFDVP

SEQ ID NO: 193445 - protein, 310 aa, Zea Mays
MAELQIFKNNKEEADEKMRYWQLPWVPPPKEEPPSEEELARKAALKEKAGQRLRDMAAAKRSQKIVELEKQLSYLEELMEQLDEAEEEEATAILGSSGYLSQQEIRSAILKASQSLRKAKGESNGNDEKTDASAVDKYPLVSVPDETLTPEQLKEKKKQILLKTTTEGKLRAKQKRAEEEALREKQEEKRRAENPELYLEELRARYSELSDKFEQRKRQKVNGSQTNGNHSSSAGVGRGERLNAAQKERMRLLASAAFDRGKGEDTFGMRDEDWLVYNKMSKDNDDDSNDDDESELVRISSKLQVPFDVP

SEQ ID NO: 193446 - protein, 362 aa, Zea Mays
MDLDLDDYVDPYEEAEAEAAAAEDGSDDPDEDDSDAESDYEEESFGLLKSGKHRVRNPDGTFRCPFCPGKKKQGYKIKDLLQHADGIGVSSKHRRHGRERANHRAFARFVRTEPSFAEDLVGITGIQGAIKPTPANRDGSTNGDGKAKANVDTAGSSSVAAKVGLPREVERFSWPWACVLAAGAGFNTEDFAGRVAMFSSVEVVPLFVDEVEVAETFAVVRFTNDWSGFSDALTLENHFSINKLGKKEFEMRDNGIGSVEGDGGEGEVKVYGWVARAEDYDSPSVVGRFLRKHTVLKTIDEVSKTELEKSGEMVAILASKIEEKNRHLQDLETKKNATELSISRLEEDNRKLHEAYNEGKIR

SEQ ID NO: 193447 - protein, 238 aa, Zea Mays
MGRKFFVGGNWKCNGTTDQVEKIVKTLNEGNVPSSDVVEVVVSPPYVFLPVVKSQLRQEFQVAAQNCWVKKGGAFTGEISAEMLVNLGVPWVILGHSERRALLGESNEGLKVIACVGETLEEREAGSTMDVVAAQTKAIAEKIKDWSNVVLAYEPVWAIGTGKVATPAQAQEVHASLRDWVKINVSPEVSESTRIIYGGSVTAANCKELAAQPDVDGFLVGGASLKPEFIDIINAAAV

SEQ ID NO: 193448 - protein, 689 aa, Zea Mays
MAQLLHHQDSGFYDKELHGCRWGILQFFGFRRRQRSAKMQPDKKHGPEKNSRGSRRRSRSYAPLKNEDSEILDDDKNTEVTKKQKASQKNSGKASLRSLILRKLYGKEGQEEKMLPVAPKLLRTISVCSIPDGCGSDSSSSLLLKTDDISMKRKSHRSISMDGVLHKVPYGKKVSGDVISEGLPRSASATYDRDGVKPYFGTATKRHVNQGFRRSRSLSESWESYSRLLDSISSNESKRVLTSSKSTRVHSPDGPSVIASLQRTSEAFRSQGLDKRDENLVTAEDASAPHFEEKTDVDVDVEVAKGESSSDTVPGGSENPPLPDEYVDHKSEEDTCTAPSPSEAVDVSEEQTVSCDDNNQVPSSEVKLYGDCSTSSGIDIPEEHAEIYDDNQIHSSTQADSYTSLSSKGITISEEHTSTSHENQMHPFQISKPIEGTFCAPYPGGEFEADISLSCEQETESPMSILHVAFSDDPDSPVKHTPLDDTLLNPRILHLDNADASAGTAAIQKGDFDGLQVDPRHEIEFNHVKDIFKKSSFSNEILFDEWCSQNITALQEVDCQHYEAAAASFDFTDMSADQLLLFDLTNEGLLDIYKKYSVSESRFSWFSSFDRPKPVGNRVLKELWSGLSCHLDERPRSSIEVDTILSNDLVARSDPWTTFSGDADHVGNKLVDFVFDKLLTELVLQLAEF

SEQ ID NO: 193449 - protein, 202 aa, Zea Mays
MFYYLPVYKYFGHEGERAMHPVQTYAMYYWCFHYFKRIMETFFVHRFSHATSPLSNVFRNCAYYWTFGAYIAYYCNHPLYTPVSDLQMKIGFGFGVVCQVANFYCHILLRNLRSPSGSGGYQIPRGFLFNIVTCANYTTEIYQWVGFNIATQTVAGYVFLVVAAGIMTNWALGKHSRLKKLFDGKDGRPKYPRRWVILPPFL

SEQ ID NO: 193450 - protein, 167 aa, Zea Mays
MSARVGDFGISRILPEIARSNTLQNSSSTAGIRGSIGYVAPEYGEGSCVSTLGDVYSVGILLLEMFTGRSPTDEMFRGSLDLHRFSEDALPERIWEIADAKMWLHTNTNHVATAETENCLVSVVALGVSCSKKQPRERTPIQVAAIQMHDIRDSYCKFARSLVTELE

SEQ ID NO: 193451 - protein, 180 aa, Zea Mays
MGAAPSSDDSSRAGDGRAVASSAASGTGSNSHQAQSKRAPPPHKFHEIVAQEATTAGGGGGTAAAAELEDQACSTGVYLAGKTKKYWVDEKTRCNCFVLFARALSITWGDDPRYWIWHPVRETNSIRAMSVPVLSLPLLCTVTPRSSRLRRCRTCAGWRCTGGWSCRTSRRGAATTWPSR

SEQ ID NO: 193452 - protein, 464 aa, Zea Mays
MPSSYAAAAAGSSSRKPNRTSSAAAPTLRPPAPSPSPAPAPLAVNPSVISDSDPSSYSSSSADEADFAASDSATASVVSAYLSVAGEGADLSKVGIFLSSAARRRSPPCLICFDPIRPSDPVWSCSSSCFAILHLPCIQSWAHQSASGPAVPCPTWGCPKCRFAYPKSEIPSSYVCFCSKTIDPAPDPWILPHSCGDVCGRRLDANLDSGCEHTCLLLCHPGPCPPCPAVVPKATCFCGVHREPRRCAHQRYSCGGKCNKRLSCGLHHCPVDCHDGPCPPCAVLGSHKCECGEILEEKLCSERIFQCKRECGGMLDCGKHKCERGCHGGKCGECPLRGRRTCPCGKKNYPRLECDAEAATCGSTCEKVLGCGRHRCPERCHRGPCDGTCRLVVTKACRCGGLKKEVPCYQELTCERKCQRLRNCGRHACKRRCCAGDCPPCSERRLFTLSSDEDHFLRLWKNMF

SEQ ID NO: 193453 - protein, 487 aa, Zea Mays
MPSSYAAAAAGSSSRKPNRTSSAAAPTLRPPAPSPSPAPAPLAVNPSVISDSDPSSYSSSSADEADFAASDSATASVVSAYLSVAGEGADLSKVGIFLSSAARRRSPPCLICFDPIRPSDPVWSCSSSCFAILHLPCIQSWAHQSASGPAVPCPTWGCPKCRFAYPKSEIPSSYVCFCSKTIDPAPDPWILPHSCGDVCGRRLDANLDSGCEHTCLLLCHPGPCPPCPAVVPKATCFCGVHREPRRCAHQRYSCGGKCNKRLSCGLHHCPVDCHDGPCPPCAVLGSHKCECGEILEEKLCSERIFQCKRECGGMLDCGKHKCERGCHGGKCGECPLRGRRTCPCGKKNYPRLECDAEAATCGSTCEKVLGCGRHRCPERCHRGPCDGTCRLVVTKACRCGGLKKEVPCYQELTCERKCQRLRNCGRHACKRRCCAGDCPPCSELRCGNHKCLSPCHRGACSPCPLMKTISCACGKTCFEVEFGSLWD

SEQ ID NO: 193454 - protein, 532 aa, Zea Mays
MPSSYAAAAAGSSSRKPNRTSSAAAPTLRPPAPSPSPAPAPLAVNPSVISDSDPSSYSSSSADEADFAASDSATASVVSAYLSVAGEGADLSKVGIFLSSAARRRSPPCLICFDPIRPSDPVWSCSSSCFAILHLPCIQSWAHQSASGPAVPCPTWGCPKCRFAYPKSEIPSSYVCFCSKTIDPAPDPWILPHSCGDVCGRRLDANLDSGCEHTCLLLCHPGPCPPCPAVVPKATCFCGVHREPRRCAHQRYSCGGKCNKRLSCGLHHCPVDCHDGPCPPCAVLGSHKCECGEILEEKLCSERIFQCKRECGGMLDCGKHKCERGCHGGKCGECPLRGRRTCPCGKKNYPRLECDAEAATCGSTCEKVLGCGRHRCPERCHRGPCDGTCRLVVTKACRCGGLKKEVPCYQELTCERKCQRLRNCGRHACKRRCCAGDCPPCSETCDKKLRCGNHKCLSPCHRGACSPCPLMKTISCACGKTCFEVEFGFLVGLRRIRNHPNAQRNAIYLAFADTSLNAGPTNATMEPAHLAS

SEQ ID NO: 193455 - protein, 492 aa, Zea Mays
MPSSYAAAAAGSSSRKPNRTSSAAAPTLRPPAPSPSPAPAPLAVNPSVISDSDPSSYSSSSADEADFAASDSATASVVSAYLSVAGEGADLSKVGIFLSSAARRRSPPCLICFDPIRPSDPVWSCSSSCFAILHLPCIQSWAHQSASGPAVPCPTWGCPKCRFAYPKSEIPSSYVCFCSKTIDPAPDPWILPHSCGDVCGRRLDANLDSGCEHTCLLLCHPGPCPPCPAVVPKATCFCGVHREPRRCAHQRYSCGGKCNKRLSCGLHHCPVDCHDGPCPPCAVLGSHKCECGEILEEKLCSERIFQCKRECGGMLDCGKHKCERGCHGGKCGECPLRGRRTCPCGKKNYPRLECDAEAATCGSTCEKVLGCGRHRCPERCHRGPCDGTCRLVVTKACRCGGLKKEVPCYQELTCERKCQRLRNCGRHACKRRCCAGDCPPCSETCDKKLRCGNHKCLSPCHRGACSPCPLMKTISCACGKTCFEVEFGSLWD

SEQ ID NO: 193456 - protein, 748 aa, Zea Mays
MPSSYAAAAAGSSSRKPNRTSSAAAPTLRPPAPSPSPAPAPLAVNPSVISDSDPSSYSSSSADEADFAASDSATASVVSAYLSVAGEGADLSKVGIFLSSAARRRSPPCLICFDPIRPSDPVWSCSSSCFAILHLPCIQSWAHQSASGPAVPCPTWGCPKCRFAYPKSEIPSSYVCFCSKTIDPAPDPWILPHSCGDVCGRRLDANLDSGCEHTCLLLCHPGPCPPCPAVVPKATCFCGVHREPRRCAHQRYSCGGKCNKRLSCGLHHCPVDCHDGPCPPCAVLGSHKCECGEILEEKLCSERIFQCKRECGGMLDCGKHKCERGCHGGKCGECPLRGRRTCPCGKKNYPRLECDAEAATCGSTCEKVLGCGRHRCPERCHRGPCDGTCRLVVTKACRCGGLKKEVPCYQELTCERKCQRLRNCGRHACKRRCCAGDCPPCSETCDKKLRCGNHKCLSPCHRGACSPCPLMKTISCACGKTCFEVPCGTEKNQKPPKCSKKCNIPRLCRHKLECRPHKCHYGACPPCKLICGEEFPCGHTCKERCHGPISPPNSEFTLKPTKKKMGKHIECTPGTPCPPCKEVVLVSCFGQHLGQERTMPCCKWRPFPCENLCGNPLLCGNHYCTKSCHVLEVPLNHPEGDRTTSISKVNALAMPCEQCNLPCQRVREPPCSHPCPLPCHLNDCPSCKVLVKRPCHCGAMVHAFECVFYNNLNAKDQIKIRSCGGPCHRSVWLLTVSVSKIVQFFCCY

SEQ ID NO: 193457 - protein, 903 aa, Zea Mays
MPSSYAAAAAGSSSRKPNRTSSAAAPTLRPPAPSPSPAPAPLAVNPSVISDSDPSSYSSSSADEADFAASDSATASVVSAYLSVAGEGADLSKVGIFLSSAARRRSPPCLICFDPIRPSDPVWSCSSSCFAILHLPCIQSWAHQSASGPAVPCPTWGCPKCRFAYPKSEIPSSYVCFCSKTIDPAPDPWILPHSCGDVCGRRLDANLDSGCEHTCLLLCHPGPCPPCPAVVPKATCFCGVHREPRRCAHQRYSCGGKCNKRLSCGLHHCPVDCHDGPCPPCAVLGSHKCECGEILEEKLCSERIFQCKRECGGMLDCGKHKCERGCHGGKCGECPLRGRRTCPCGKKNYPRLECDAEAATCGSTCEKVLGCGRHRCPERCHRGPCDGTCRLVVTKACRCGGLKKEVPCYQELTCERKCQRLRNCGRHACKRRCCAGDCPPCSELRCGNHKCLSPCHRGACSPCPLMKTISCACGKTCFEVPCGTEKNQKPPKCSKKCNIPRLCRHKLECRPHKCHYGACPPCKLICGEEFPCGHTCKERCHGPISPPNSEFTLKPTKKKMGKHIECTPGTPCPPCKEVVLVSCFGQHLGQERTMPCCKWRPFPCENLCGNPLLCGNHYCTKSCHVLEVPLNHPEGDRTTSISKVNALAMPCEQCNLPCQRVREPPCSHPCPLPCHLNDCPSCKVLVKRPCHCGAMVHAFECVFYNNLNAKDQIKIRSCGGPCHRKLPNCPHLCSEVCHPGVCPSVDQCMKKVNTRCACSTLKQEWRCQDVLKEYRKSGRDPKEVPKSQFGVGLLACGEDCKKKLKAPDSELHLRKSQENKIPAVEVVNAPKRRKRRDRGQEVKISKFQEVKTFVLRALLIILLSIIVAAGLYLLWKGIFWLSDWMNEMEEQRASQRYPRGAML

SEQ ID NO: 193458 - protein, 521 aa, Zea Mays
MARNNEGHLQLPEMDHIQPKNTPHNEPLPLGQKLMLHHGSDAPLRIGHSSHENMRLRSNDLPPLSHTVQTQGYRVGNPGASHAPFVHCHAGSSSSHLPEPAVNYPHRSEEGFAPVGSHMDNRRAATKRKDPIVHPAGISATGYYVGSSSNTQLSNSVQPNPAPLSEPLLRQIPLSIDRSGWDGLHLIHQEGFQRNVRARQRHSHNISLEPRTASTYPLNSVHVPSFGSTTSASLSMSVERNQASVSVPTRNVPSGAPGITSRSLTRRAYYPVVGSSNSSVDVVPTICGSSGAAIFANGGYALNADAGTVSIYPNPAPATSSGSITMPMPMLHQMVIQSHPPATSAATSTSMWIAQPLPARTAAASRHARRVSAGLANNGRYRRARSSYYSLHPLMMVEAELVFYESRAAAADPHRDMRLDIDNMSYEDLLALGESMGNVNTGLADEKISKCVKEVVCCSSDQMQTDQDDQDDDGSCVICLEGYRDKDMLGILKCRHDFHAGCIKKWLQTKNSCPVCKAAAA

SEQ ID NO: 193459 - protein, 59 aa, Zea Mays
MGPSMHILLGAFLLSFASAFIFLSIFCFFMLCKVKLTLFDLLLRCIKNLEVIMSYTFWL

SEQ ID NO: 193460 - protein, 498 aa, Zea Mays
MPRARLPLDSNAPTHPTTILVYTPSRQPAFPPEPSFHSLADPPPAPAMDTAIGSVPAASDAARHPAPSASAPRDATLGRHLARRLAEVGARDVFTVPGDFNLTLLDELEAEPGGVRLVGCCNELNAAYAADGYARARAGGVGACAVTFTVGGLSAINGVAGAFSENLPVVCIVGGPNSNDYGSNRILHHTIGLPDFTQELRCFQNVTCYQAVVNNLEDAHEQIDTAISTAIKESKPVYISISCNLPSIPHPTFSRHPVPFFLSPRLSNQMNLEAAVEAAAAFLNKAVKPVLVGGPKMRVSKAWEALAELADACGYPVAVMPSAKGLVPVHHSRFIGTYWGAVSTPFCAEIVESADAYLFAGPVFNDYSSVGYSLLLKKEKAIIVQPERVVVGHGPAFGCVLMKDFLHALATRLKKNTVAYENYRRIYVPPGEPLSSEPGEPLRVNVLFKHIQAMLSGDMAVIAETGDSWFNCQKLKLPEGCTNSRCSMDQLAGQWAQL

SEQ ID NO: 193461 - protein, 254 aa, Zea Mays
MLKYLPHISFQSKKGWGTDEQAVISILAHRDATQRKQIALEYEHEYSESLIQRLQSELTGDLERAVYHWMLGPAERQAAMAHAATECVQERYAVVVEIACATNSSAELVSVKQAYHVLYRRSLEEDVAARATGNLRSVRRRRQRGRGASAVGGEDRARGREEQRGRGGGPPRPRGAHQGPGHPEQGPAQGHVQLLQGPGRAPPQRHQGAAARGRRSHGLPPRAAGGGEVRRGSDQVLRQGAEERDARGSRDRRG

SEQ ID NO: 193462 - protein, 327 aa, Zea Mays
MATITLPRVVPSPAEDAAALLKAFQGWGTDEQAVISILAHRDATQRKQIALEYEHEYSESLIQRLQSELTGDLERAVYHWMLGPAERQAAMAHAATECVQERYAVVVEIACATNSSAELVSVKQAYHVLYRRSLEEDVAARATGNLRSLLLALVSTYRYDGDDNVDAELARSEAKIVHEAVRNSAGAAGGRHDHEELIRVLGTRSKAQLRATFSCFKDQDEHRRSVTKALPRGADDPTGYLRALRAAVRCVADPTKYFAKVLRNATREAAGTDEDSLTRVVVLHAEKDDMGAICGAFQKRASCTLQQAIAKETSGDYSSFLLALLGS

SEQ ID NO: 193463 - protein, 265 aa, Zea Mays
MATITLPRVVPSPAEDAAALLKAFQGWGTDEQAVISILAHRDATQRKQIALEYEHEYSESLIQRLQSELTGDLERAVYHWMLGPAERQAAMAHAATECVQERYAVVVEIACATNSSAELVSVKQAYHVLYRRSLEEDVAARATGNLRSVRRRRQRGRGASAVGGEDRARGREEQRGRGGGPPRPRGAHQGPGHPEQGPAQGHVQLLQGPGRAPPQRHQGAAARGRRSHGLPPRAAGGGEVRRGSDQVLRQGAEERDARGSRDRRG

SEQ ID NO: 193464 - protein, 669 aa, Zea Mays
MNPAPRHPSTKIETFFTATPSAQTQNQTNERYGTYPVAARNLREDELGGVIFGCKHNTIGECLSKQLFGLPSSHFSYVKNVKPGMPLFLFNYSDRKMHGIYEAASAGKLNIDQFAWSDGGRIKTQFPAQVLISMKTACLPVPESQFQSVISGNYYKPRHFFFELDHEQTRALIFLFKPAPVHDVSNKCHPSKSIQSPIVEAYVNPDGEYASESRTSTSHLDKEASNWDDVTTKEGTEFVNNDHPHINPPHKQQDMFVLRQHEAESSKDTVDSASNKSMPQEAQFDATLPTDPSNSTSVGDVCIKDLTSLGQSRGNAELLHIVKELSKRNQAMEKKLSESDKEILFLRESMKDTGRRIQELEYQYEKLQSNYNSLVPLLGSRHDNMEGPSIILMGGYRGSTCLSSLDSFCPTTDRVVPLCSMSSARAYAAAVALKDHLYIFGGGNGSSWYHTVECYRMGSNKWIACPRLKHAKGSLAGTTLNDKIFAIGGGDGSAVFSEVEMFDPALGRWIDNVSMRQKRFAAAAAVLSGTLYVTGGYDGNTYLQSAERYDPREGFWTLLPSMSARRGSHSVAVMGESLFAVGGYDGNSNISTVEIFDPRANSWRIGRSCSIARGYGCAVTMDGNLYFIGGVNDAGETLGTVEVYNERQGWSISGCKSVGKRAFACAITV

SEQ ID NO: 193465 - protein, 680 aa, Zea Mays
MHIIVAILHVFHDFQKMGAGRKIETFFTATPSAQTQNQTNERYGTYPVAARNLREDELGGVIFGCKHNTIGECLSKQLFGLPSSHFSYVKNVKPGMPLFLFNYSDRKMHGIYEAASAGKLNIDQFAWSDGGRIKTQFPAQVLISMKTACLPVPESQFQSVISGNYYKPRHFFFELDHEQTRALIFLFKPAPVHDVSNKCHPSKSIQSPIVEAYVNPDGEYASESRTSTSHLDKEASNWDDVTTKEGTEFVNNDHPHINPPHKQQDMFVLRQHEAESSKDTVDSASNKSMPQEAQFDATLPTDPSNSTSVGDVCIKDLTSLGQSRGNAELLHIVKELSKRNQAMEKKLSESDKEILFLRESMKDTGRRIQELEYQYEKLQSNYNSLVPLLGSRHDNMEGPSIILMGGYRGSTCLSSLDSFCPTTDRVVPLCSMSSARAYAAAVALKDHLYIFGGGNGSSWYHTVECYRMGSNKWIACPRLKHAKGSLAGTTLNDKIFAIGGGDGSAVFSEVEMFDPALGRWIDNVSMRQKRFAAAAAVLSGTLYVTGGYDGNTYLQSAERYDPREGFWTLLPSMSARRGSHSVAVMGESLFAVGGYDGNSNISTVEIFDPRANSWRIGRSCSIARGYGCAVTMDGNLYFIGGVNDAGETLGTVEVYNERQGWSISGCKSVGKRAFACAITV

SEQ ID NO: 193466 - protein, 673 aa, Zea Mays
MNPAPRHPSTAQTQNQTNERYGTYPVAARNLREDELGGVIFGCKHNTIGECLSKQLFGLPSSHFSYVKNVKPGMPLFLFNYSDRKMHGIYEAASAGKLNIDQFAWSDGGRIKTQFPAQVLISMKTACLPVPESQFQSVISGNYYKPRHFFFELDHEQTRALIFLFKPAPVHDVSNKCHPSKSIQSPIVEAYVNPDGEYASESRTSTSHLDKEASNWDDVTTKEGTEFVNNDHPHINPPHVEQYGEVAVTQKQQDMFVLRQHEAESSKDTVDSASNKSMPQEAQFDATLPTDPSNSTSVGDVCIKDLTSLGQSRGNAELLHIVKELSKRNQAMEKKLSESDKEILFLRESMKDTGRRIQELEYQYEKLQSNYNSLVPLLGSRHDNMEGPSIILMGGYRGSTCLSSLDSFCPTTDRVVPLCSMSSARAYAAAVALKDHLYIFGGGNGSSWYHTVECYRMGSNKWIACPRLKHAKGSLAGTTLNDKIFAIGGGDGSAVFSEVEMFDPALGRWIDNVSMRQKRFAAAAAVLSGTLYVTGGYDGNTYLQSAERYDPREGFWTLLPSMSARRGSHSVAVMGESFLCFRFAVGGYDGNSNISTVEIFDPRANSWRIGRSCSIARGYGCAVTMDGNLYFIGGVNDAGETLGTVEVYNERQGWSISGCKSVGKRAFACAITV

SEQ ID NO: 193467 - protein, 107 aa, Zea Mays
MRSLIAIYLMDKHDGKHIKKNILSWASFSGGGCVLDLFRTRLDPTMVEALVCTKDWIDGARKGSKAKCVAIPDMVCEMEELEAIAINLSLEDEDLDDDHDEGPKASL

SEQ ID NO: 193468 - protein, 254 aa, Zea Mays
MTKLAIIPCTVILETLFFRKKFSRNIKLSLSVLLLGVGVATITDLQLNLVGSVLSLLAIITTCIAQIMTNTIQKKFKVSSTQLLYQSCPYQALTLFLVGPFLDGFLTNQNVFAFDYTTQVLFFIVLSCLISVSVNFSTFLVIGKTSPVTYQVLGHLKTCLVLAFGYVLLHDPFSWRNILGILIAVIGMVLYSYFCTRETQQKPAEASPQAILQAKEGESNPLILDSLSAAENGGSATDDEPLKVPMWSSKYSKA

SEQ ID NO: 193469 - protein, 727 aa, Zea Mays
METPPHSPRRAKRVLPLPPKPMRFIHKAKRSIPFDVTKALDSITSINMLKEQRPSAKMCSILDEAGYERREQFNCYLPDSSKSLNADLYVEDEDMFYEPQAEKDWQSKHSRSDGNLADENYDGLWRMDEFNSEDHLFTQRDKHVDISGYGFKDGYSPERRNSTRPVTVFENTGIQSSHDLFSDHSLMDDEDTELFKWESHPPSKKKSNSNSNFGPSAWPYDMVDGSEKRSPISEESCSSAAAMKDRTCKKQSPSMKNDMNENDEFHIRLDKLDIPNMDAPLHGRSLFNNPEKLDRKETAPRKKLETNWLQSVTGQPRTQEPSCRLSLNEKFSNWDSPTFRSKSTTGLTDKSSCTMLHKDKSSFDAAPDLDMYQTVESTQKRPVSKVHSIYQRPEKPIFEDEIHMQHTVSDMFHDKIELSNPYQNKNLQSDIDMSTFIGQKVEKQEDEFPCFSSSSADTFRAEKAARSVRQTVDRHSTCSQPSGRDSFRHGFSPGFNFQESEPNTFWADSYVCNGTFQAGLEFSGVVARKDSDKNEVKIEASEKPDTKILTGTCWLSADNRNVINGTETCSDGSEAFNCSEAQKETSAVVTQIPANLSSLRETSAELFQVRNHVIPVKREKIDNPGVDFDAVMHSKSKIHDVRDHSKLNTTFRSPFIGEVVGIEKKIVANVSPDNSDVQYQFMLEQRVLRRLCVQKIVVPTPMKDRLDKDTNFTIAEDGSLHVLPKSV

SEQ ID NO: 193470 - protein, 105 aa, Zea Mays
MKLLAVDIPMASGPDQRLFLVGDEQEYKVGGGLISELRDPIVKAMAAEKEFDYLDEREDEEDERREREEAEQEEAEALRREEERLRQAGEERRRREEAESLEKAT

SEQ ID NO: 193471 - protein, 221 aa, Zea Mays
MAAALSSRRALHSLHRRLLFHPSPSPAAARRALPTSTRSPIPAHSPTFSFSFYSSSRFFTTARPDARLRHGMLPQRLIGGVRSVANGGSKLGPLGQGVKGLGRPMEAARSAAARYRAAVGLQVEAFWRRNSMILVGAGGVIVCFLLWRIMFGIASTFVGLSEGMAKYGFLALATAIVAFAGMYARARLTINPDKVYRLAMTKLNTSAAILEVMGAPLTAWQ

SEQ ID NO: 193472 - protein, 101 aa, Zea Mays
MAHRHARFRRTPPTATIPGGRGLHLPTTQSVPPPWLLLLPLLLPTSRRMRNTTSGRGRRWKGEGERPSRDSGKGRSGEGCLCEGRPEVAACVGTHGHGAGH

SEQ ID NO: 193473 - protein, 269 aa, Zea Mays
MGFGVVHLLDAVFRRMFRSAGLRPGSATVNAEDDTVIHYWAHPSLLRPPPSDSDSEQRQPVVVLIHGFGPDPTWQWAAQAGPLSRHFRLVVPTLLFFGASGTRAPARSDASQAAALAALLAGPGQQHLPGLGAGRTVHVVGTSYGGLVAYHLARELERQGGGVRVGKVVLCDSDACKGAEDDRALAARSGVAEVAELLAPADTRALRRLMAVCAHRPVKDTSRTRGRRRWRSSEGSPPEKASSLLRCLRRCSSSGESSTRSSRWTKRTR

SEQ ID NO: 193474 - protein, 325 aa, Zea Mays
MSSSSGCNRGRAVLPVTASLVPFLLLLVVVSCQAALVVSATHTHGHGGGKHAGAARAAFRAGDEQEAYARIMARMARMDKDSNMTIQSPDGDVIHCVPAHLQPAFDHPRLRGQEPEDEPVERPMSKGGAAEEEAGVFPQAWSDGGSKRCPAGTVPIRRTAARDVLRASSARRFGMKARGGGSSSSNARRDSTSSGHEVSESLCLISHRLRLRLAATCPPAISVATRETHTHHALKRHARPVIKSWWCCNIKAGLVGGENTGVSGSNCRDSLRNQMAQPCMPACLRFCRPRSCSAPAATPHPQATVQLGWRTVHYWRMQCAVRPWP

SEQ ID NO: 193475 - protein, 203 aa, Zea Mays
MSKGGAAEEEAGVFPQAWSDGGSKRCPAGTVPIRRTAARDVLRASSARRFGMKARGGGSSSSNARRDSTSSGHEHAVGYVTGDQFYGAKASLNVWPAKVASAAEFSLSQIWVISGSFGNDLNTIEAGWQVSPELYGDSSPRFFTYWTTDAYQETGCYNLHCSGFVQTNSRIAIGAAISPTSVYNGRQFDISLLIWKTDVRARA

SEQ ID NO: 193476 - protein, 135 aa, Zea Mays
MQCMQQLDEGRWSLMESACRRIQQEVRSFSEAQALGVDDDETHQGGSVIVGRCSRPWRCRCRSISCIGCVVGVVRHGSYGPCRGYTTYYSAGTLRAAQTTAGRPGSSEATAQAQDQGGTDDWLWGLGSNDCGGCC

SEQ ID NO: 193477 - protein, 374 aa, Zea Mays
MNRVSLHQVSYLVLDEADRMLDMGFEPQIRKIVKQIPPKRQTLMYTATWPREVRKIASDLLANPVQVNIGNTDQLVANKSITQHVEVIPHMEKSRRLDQILRSQDPGSKSIIFCSTKRMCDQLARNLSRQYRASAIHGDKSQAERDSVLNDFRSGRCPVLVATDVAARGLDIKDIRVVVNYDFPTGVEDYVHRIGRTGRAGATGSAYTFFGDQDSKYASDLVKILEGANQSVPPQLKEMALRGGYGGRSRRWASSDDSYGGQGYGAKRSTDSFNNNNFGNQAGGGSSFHSSLYNSSSGGQFGDTTSFHGSVRNNQTGDNASFPPSSSNNQAGDGLSFHERFYGSRGRDQSRTSNDGFRARSRSPPGKPVEVSNW

SEQ ID NO: 193478 - protein, 378 aa, Zea Mays
MNRVSLHQVSYLVLDEADRMLDMGFEPQIRKIVKQIPPKRQTLMYTATWPREVRKIASDLLANPVQVNIGNTDQLVANKSITQHVEVIPHMEKSRRLDQILRSQDPGSKSIIFCSTKRMCDQLARNLSRQYRASAIHGDKSQAERDSVLNDFRSGRCPVLVATDVAARGLDIKDIRVVVNYDFPTGVEDYVHRIGRTGRAGATGSAYTFFGDQDSKYASDLVKILEGANQSVPPQLKEMALRGGYGGRSRRWASSDDSYGGQGYGAKRSTDSFNNNNFGNQAGGGSSFHSSLYNSSSGGQFGDTTSFHGSFDNSVRNNQTGDNASFPPSSSNNQAGDGLSFHERFYGSRGRDQSRTSNDGFRARSRSPPGKPVEVSNW

SEQ ID NO: 193479 - protein, 96 aa, Zea Mays
MVEEEITEGLKNLTVTGDAAASGGEGQRRGGGISSNRIQVSNTKKPLFFYVNLAKRYMQQHGDVELSALGMATVVTVAEILKNNGFAVEKRHLLLT

SEQ ID NO: 193480 - protein, 269 aa, Zea Mays
MLDPADRSRPIWSPPADNPGLVTRSRLAREASAPKSSLPASSRHGIPGRRLLVSRHKSAASIRPAAAPITVPALGLGFGGLKRTENMERERNAATAGAGRWEAPDGVIVLPVGSAAPQQGRQKEHQYQQRKREMEREREQQDPGAREGVLGLDPQPPEKVYYKTRLCEKFEAGKCAYEGGCTFAHGSEELRPPLPLPLLTSLVRRKSPLPSSSPGAAASSPHGGYCVRVCFEFRDTGACHRGDRCAFVHASTTAQRCPFLGGQGLWSML

SEQ ID NO: 193481 - protein, 51 aa, Zea Mays
MTPSLCCSLTPLVSALPSLLRQCSHTDQIELRLMLLAPNVSLLLLLVLLAF

SEQ ID NO: 193482 - protein, 637 aa, Zea Mays
MDAAELPLVYHIGLVLAALWAAAAVGFRGSLLYLLAFLYLYMVNARCAVRLRKRIQHEEMKSAYQRRLLSDAESARWLNHAIDKMWPVCMEKIVSKLLRPIIPWFLDKFKPWTVSKASIQELYMGRNPPIFTSMRVLPETSDDDHLILVGVKFVRSWPFLGRVRLCFVEPPYFQMAVKPLINHGLDVTEFPGISGWLDKLMDTAFGQTLVEPNVIVINVEKFASTPSENNWFSIEERPPIAYVKLEILEGTDMKPSDINGLADPYVKGHLGPFKFQTQIQRKTLSPKWFEEFKIPITSWEATNELVMEVRDKDPMFDDSLGQCTISLHDLRGGQRHDKWISLNNVKKGRIHLAVTIDDISEDQNTSSLDQSLKQADTELPVSTSVCSEVDASEPPEEKKVLMDEVEHINIDGQEQPGGLYVHRPGTGVPRTWESRKGRARNPDTQIHQEVDKQKEVPTPKGSGQGGLFNVGSFFRWNSRKGSSRNLDASPPATPGSQSVTELDPKLPQTPRPNLKELGEKRTSIKIVVDEEASPADKVGGAENSGEDVAKVIEKNAGEPGRSLTSTLSRKICRRRADDRLSDIPEKIEARGSKPVSEGPILVRGEPMITVDHPTTEHSDGGGTEQDAVGAKVATQTS

SEQ ID NO: 193483 - protein, 634 aa, Zea Mays
MDAAELPLVYHIGLVLAALWAAAAVGFRGSLLYLLAFLYLYMVNARCAVRLRKRIQHEEMKSAYQRRSKASIQELYMGRNPPIFTSMRVLPETSDDDHLVLELGLNFLSAEDMSAVLAMQLHKSVGLGMTAKMHLTSMHVEGKILVGVKFVRSWPFLGRVRLCFVEPPYFQMAVKPLINHGLDVTEFPGISGWLDKLMDTAFGQTLVEPNVIVINVEKFASTPSENNWFSIEERPPIAYVKLEILEGTDMKPSDINGLADPYVKGHLGPFKFQTQIQRKTLSPKWFEEFKIPITSWEATNELVMEVRDKDPMFDDSLGQCTISLHDLRGGQRHDKWISLNNVKKGRIHLAVTIDDISEDQNTSSLDQSLKQADTELPVSTSVCSEVDASEPPEEKKVLMDEVEHINIDGQEQPGGLYVHRPGTGVPRTWESRKGRARNPDTQIHQEVDKQKEVPTPKGSGQGGLFNVGSFFRWNSRKGSSRNLDASPPATPGSQSVTELDPKLPQTPRPNLKELGEKRTSIKIVVDEEASPADKVGGAENSGEDVAKVIEKNAGEPGRSLTSTLSRKICRRRADDRLSDIPEKIEARGSKPVSEGPILVRGEPMITVDHPTTEHSDGGGTEQDAVGAKVATQTS

SEQ ID NO: 193484 - protein, 402 aa, Zea Mays
MVRMNCAASVLLLIGVTQLMIQCTGLADPYVKGHLGPFKFQTQIQRKTLSPKWFEEFKIPITSWEATNELVMEVRDKDPMFDDSLGQCTISLHDLRGGQRHDKWISLNNVKKGRIHLAVTIDDISEDQNTSSLDQSLKQADTELPVSTSVCSEVDASEPPEEKKVLMDEVEHINIDGQEQPGGLYVHRPGTGVPRTWESRKGRARNPDTQIHQEVDKQKEVPTPKGSGQGGLFNVGSFFRWNSRKGSSRNLDASPPATPGSQSVTELDPKLPQTPRPNLKELGEKRTSIKIVVDEEASPADKVGGAENSGEDVAKVIEKNAGEPGRSLTSTLSRKICRRRADDRLSDIPEKIEARGSKPVSEGPILVRGEPMITVDHPTTEHSDGGGTEQDAVGAKVATQTS

SEQ ID NO: 193485 - protein, 613 aa, Zea Mays
MDAAELPLVYHIGLVLAALWAAAAVGFRGSLLYLLAFLYLYMVNARCAVRLRKRIQHEEMKSAYQRRSKASIQELYMGRNPPIFTSMRVLPETSDDDHLLHKSVGLGMTAKMHLTSMHVEGKILVGVKFVRSWPFLGRVRLCFVEPPYFQMAVKPLINHGLDVTEFPGISGWLDKLMDTAFGQTLVEPNVIVINVEKFASTPSENNWFSIEERPPIAYVKLEILEGTDMKPSDINGLADPYVKGHLGPFKFQTQIQRKTLSPKWFEEFKIPITSWEATNELVMEVRDKDPMFDDSLGQCTISLHDLRGGQRHDKWISLNNVKKGRIHLAVTIDDISEDQNTSSLDQSLKQADTELPVSTSVCSEVDASEPPEEKKVLMDEVEHINIDGQEQPGGLYVHRPGTGVPRTWESRKGRARNPDTQIHQEVDKQKEVPTPKGSGQGGLFNVGSFFRWNSRKGSSRNLDASPPATPGSQSVTELDPKLPQTPRPNLKELGEKRTSIKIVVDEEASPADKVGGAENSGEDVAKVIEKNAGEPGRSLTSTLSRKICRRRADDRLSDIPEKIEARGSKPVSEGPILVRGEPMITVDHPTTEHSDGGGTEQDAVGAKVATQTS

SEQ ID NO: 193486 - protein, 590 aa, Zea Mays
MDAAELPLVYHIGLVLAALWAAAAVGFRGSLLYLLAFLYLYMVNARCAVRLRKRIQHEEMKSAYQRRSKASIQELYMGRNPPIFTSMRVLPETSDDDHLILVGVKFVRSWPFLGRVRLCFVEPPYFQMAVKPLINHGLDVTEFPGISGWLDKLMDTAFGQTLVEPNVIVINVEKFASTPSENNWFSIEERPPIAYVKLEILEGTDMKPSDINGLADPYVKGHLGPFKFQTQIQRKTLSPKWFEEFKIPITSWEATNELVMEVRDKDPMFDDSLGQCTISLHDLRGGQRHDKWISLNNVKKGRIHLAVTIDDISEDQNTSSLDQSLKQADTELPVSTSVCSEVDASEPPEEKKVLMDEVEHINIDGQEQPGGLYVHRPGTGVPRTWESRKGRARNPDTQIHQEVDKQKEVPTPKGSGQGGLFNVGSFFRWNSRKGSSRNLDASPPATPGSQSVTELDPKLPQTPRPNLKELGEKRTSIKIVVDEEASPADKVGGAENSGEDVAKVIEKNAGEPGRSLTSTLSRKICRRRADDRLSDIPEKIEARGSKPVSEGPILVRGEPMITVDHPTTEHSDGGGTEQDAVGAKVATQTS

SEQ ID NO: 193487 - protein, 167 aa, Zea Mays
MPAVSQLEKDEKYQLVYELLKIFLTKKLDSYLEFQSANSDLLKDYGLVHDECVTKMRLMSLLDLSSRCSGEIPYSAITVELRINDDEVEQWIVKAIASKILDCKVDQLNQTVIVSRHTERIFGMEHWHALRTKLGAWRGNIARAINTIQANKVTEEGAQGMQGLAIH

SEQ ID NO: 193488 - protein, 117 aa, Zea Mays
MCRSFCSLYCSITCLLRKWFRGVKPNWFKEILVIPLNQCSITLSHSFAYQLNFSVISTTLNVSLILVNRYHYTSLARHLVRSEDWLTNLVNHTIAISPRYPHTSIRIALGIILSGIL

SEQ ID NO: 193489 - protein, 57 aa, Zea Mays
MQMSWKTKDGSQFHARHFLKVGTTYQKWFSCKLWTVPSFFQASRFLYWRACQLLSKM

SEQ ID NO: 193490 - protein, 77 aa, Zea Mays
MRESPSGEKVRATDRPQIEQRNRIRGRGSADLCQKPLAWAIQCGRIRISSVPREPRVCSSRAFFPLFSVACFPFCLF

SEQ ID NO: 193491 - protein, 117 aa, Zea Mays
MDFNQMDTRDWNVSHRSSSDVMAIALIVHLLENQPLASVRKFQAPFSTTFPHHGMCIAVCGPRLQNLTDLVSILGPFSKFHAYPPFTLTIGIHCDLGIILPPTSITHCNKNICNASQ

SEQ ID NO: 193492 - protein, 135 aa, Zea Mays
MRATVALWRARSAFCIRQWAFSLLSLAMAAACCAAPAASRSFSSSTSTREEPGKRCFEFCQSWIAAFQWSCALRFALWGRQEGDGWWSSEKARAALLLVLLLFLENLGVELRSEDSNARGESVLVENLGEYPVGE

SEQ ID NO: 193493 - protein, 349 aa, Zea Mays
MFLSTVKARKVHDCRNSWHSEWWPAKLALWLGLTAVTFLAPSPLVQLYGGAFRSRGFPGDPADQRHQVHHVAQRLVPRRDDPEEIPLADSGGVHRHVRGVAPGDRAHVRVVRAQPGLQAQHPLHHRHAGARAAHDLRLHELQGEGRVRGAGADGDLRRVPVLVGDQKRAAHGGLQQEGRSRHERRLGEHRELCDRRRRHRGGDLLDGDRLQVPPVQAGGGGVGGGGGGRHPLRPRLLPPGVLHGRHVLRHDLRRLEREREPHHGEVDDRRRVGEHVGARRQRVAGGNRVHMDDDRARHLEDEAGGIGGGDVSSFSADSEFLTAGIYIYIQTQEQIKGTGNGKRCSGSFC

SEQ ID NO: 193494 - protein, 465 aa, Zea Mays
MTFGSADMEAGGGGERRHGQQEEQSSDERRARFAEDWGCCACACAGLFLGPNPMVARYMYALIFLVTNLLAWTLRDYGDSALAELQRLKVCQGALYCLGAEGVLRVSLGCFVFFFVMFLSTVKARKVHDCRNSWHSEWWPAKLALWLGLTAVTFLAPSPLVQLYGGAFRSRGFPGDPADQRHQVHHVAQRLVPRRDDPEEIPLADSGGVHRHVRGVAPGDRAHVRVVRAQPGLQAQHPLHHRHAGARAAHDLRLHELQGEGRVRGAGADGDLRRVPVLVGDQKRAAHGGLQQEGRSRHERRLGEHRELCDRRRRHRGGDLLDGDRLQVPPVQAGGGGVGGGGGGRHPLRPRLLPPGVLHGRHVLRHDLRRLEREREPHHGEVDDRRRVGEHVGARRQRVAGGNRVHMDDDRARHLEDEAGGIGGGDVSSFSADSEFLTAGIYIYIQTQEQIKGTGNGKRCSGSFC

SEQ ID NO: 193495 - protein, 285 aa, Zea Mays
MPHCYTALEELIYTFGGPWLFGLFLSGLLILLALVLSVARMKFVGTDELPGPAPTHQGSQIDHSFPFLESLNEVIETNRAEESQGHVHRMYFMGPNTFSEPWHLPHSPPEQITEIVYEDAFNRFVDEINTLAAYQWWEGSIYSILCILAYPLAWSWQQWRRRKKLQRLREFVRSEYDHSCLKSCRSRALYEGLKVTATPDLMLGYLDFFLGGDEKRPDLPPRLRQRFPMSLIFGGDGSYMAPFSLNSDSVLTSLMSQAVPSWIWHRLVAGLNAQLRLVRGGNLKH

SEQ ID NO: 193496 - protein, 1282 aa, Zea Mays
MAAVSRVWDCNFRNFGLLNSALITLLPKLEGAALVKDFRPISLIHSFAKLVTKMMANRLAGHLGAMVSPNQTAFIKKRFILDNFILVQRTARYLHQQRQARILFKLDISKAFDSVSWPFLIEVLRKMGFGQIWCDVVCGLLASSSTRILLNGVPGEIISHQRGLRQGDPLSPMLFILVMDVLNLLIQKASDEGLLQQLSSGTLHHRLSLYADDAVVFLRPVASDISLVLEILRLFGEASGLKTNVLKSSVFPIRCTEDDLLRVQASLPCPISDFPCQYLGLPLSLGKLSKAQLQALVDKAASVLPGWKADLMTKAGRAVYVQFVLTAKMIYAAMALDLPIWTIKAIDKIRRGFLWKGRKQANGGHCLVAWGKVTRPKALGGLGITDLWLLSVALRARWPWLQRTDHSKPWSVLPVQACGTVEALINVAVVSQLGDGQDILFWKDRWLNGRSISEVAPEVLEHVSKCVVSKRLVKDALTNLNWVADIRGALSVRALAQVLDLCDLLEGLVLQPGIPDKHSWKFSASGDYSSSSAYQVLLLGAVEFRPAERIWKTWAPRKCKFFMWLVVHDRCWTADRLAKRGMDHPVCCPLCDQADETINHLLVECSFARQFWFLFLRSGDFQVLCPSAGDGCFDSWWEKSAEVVGKPLSDGFNSLKLQECPLGTYKNVTGSSKSLCFPCPPGELPHRAIYTNVRGGAAETPCPYRCVSDRYRMPHCYTALEELIYTFGGPWLFGLFLSGLLILLALVLSVARMKFVGTDELPGPAPTHQGSQIDHSFPFLESLNEVIETNRAEESQGHVHRMYFMGPNTFSEPWHLPHSPPEQITEIVYEDAFNRFVDEINTLAAYQWWEGSIYSILCILAYPLAWSWQQWRRRKKLQRLREFVRSEYDHSCLKSCRSRALYEGLKVTATPDLMLGYLDFFLGGDEKRPDLPPRLRQRFPMSLIFGGDGSYMAPFSLNSDSVLTSLMSQAVPSWIWHRLVAGLNAQLRLVRGGNLKVTFLPVINWLESHANPSLAENGIRVDLAWFQATALGYCQLGLLVYAVEGEAALTEPDGSPRVKIEQHTPTQNMLADTQLSQSRIKDALMRKRITGGVLNSNSLRTLKDRRDLFYPFSHILHNSKPVGHQDLVGLVISILLLADFSLVLLTFLQLYSYSMVDVLLVLFILPLGILSPFPAGINALFSHGPRRSAGLARVYALWNITSLVNVVVAFICGFVHYKLSTKTHPSVQPWNLGTDESGWWLFPTGLMLLKCIQARLVDWHVANLEIQDRAVYSNDPNIFWQS

SEQ ID NO: 193497 - protein, 1071 aa, Zea Mays
MAEELLMSDSIIKVFGALRMSVKMLLMWNSRMEIDGGGDSIVATSLLDASNLIVLKESSVIHSNANLGVRGQGVLNLSGDGDTIEAQRLILSLFYSIQVGPGSVLRGPLVNRSSDDVAPKLNCEADSCPVEIIHPPEDCNLNSSLSFTLQVCRVEDIDVWGVVQGTVIHFNRARSVTVHTSGTISATGFGCRSGVGQGKMLRSGVCGGGGHGGKGGNGFYKGDLAEGGAIYGNADLPCELGSGSGNDSTELSTAGGGIIVMGSWDYSLPSLALYGSVESNGGSYASGSVGGPGGGSGGTILLFVHTLSLAESSVLSSVGGFGSTGSGGGGGGRIHFHWSNIPTGDEYVPVAAVKGSILTSGGVSKGLGYSGGNGTVTGKACPKGLYGTFCKECPLGTYKNVTGSSKSLCFPCPPGELPHRAIYTNVRGGAAETPCPYRCVSDRYRMPHCYTALEELIYTFGGPWLFGLFLSGLLILLALVLSVARMKFVGTDELPGPAPTHQGSQIDHSFPFLESLNEVIETNRAEESQGHVHRMYFMGPNTFSEPWHLPHSPPEQITEIVYEDAFNRFVDEINTLAAYQWWEGSIYSILCILAYPLAWSWQQWRRRKKLQRLREFVRSEYDHSCLKSCRSRALYEGLKVTATPDLMLGYLDFFLGGDEKRPDLPPRLRQRFPMSLIFGGDGSYMAPFSLNSDSVLTSLMSQAVPSWIWHRLVAGLNAQLRLVRGGNLKVTFLPVINWLESHANPSLAENGIRVDLAWFQATALGYCQLGLLVYAVEGEAALTEPDGSPRVKIEQHTPTQNMLADTQLSQSRIKDALMRKRITGGVLNSNSLRTLKDRRDLFYPFSHILHNSKPVGHQDLVGLVISILLLADFSLVLLTFLQLYSYSMVDVLLVLFILPLGILSPFPAGINALFSHGPRRSAGLARVYALWNITSLVNVVVAFICGFVHYKLSTKTHPSVQPWNLGTDESGWWLFPTGLMLLKCIQARLVDWHVANLEIQDRAMGKTIILLTCSMVFADSKAGKAVRNRCGLGDVPFAALQFIEGCKNLLTYLTLCHLQTCSGGWMAKWVT

SEQ ID NO: 193498 - protein, 1429 aa, Zea Mays
MACHLSPLFNLRLLLLLGAVLGNAVLVRAGGAEASDRAEPDPYSILTWHDYSPPSPPLPPPDPASSTATCEGDLHGKGDFRTHCEVFEEVELGDDIYITGNGSLVLLSGASLTCEKVGCVISANLSGEVHLSRGVRVRAGRVSLVATNITVADTVVVNTTALAGAPPDRTSGVPTGTHGDGGGHGGRGASCFVKEGQTQEDSWGGDAYAWSDLEHPWSYGSKGGSTSVEKDYGGAGGGIVWLFADDLVMNGTVLAAGGDSNEKGGGGSGGSIFIRAASMYGGGKISASGGDGLAGGGGGRVSINVFSRHDDTQIFVHGGRSSGCPDNAGAAGTLYEAVPKSLIVSNNNLSTQTDTLLLEFPNQPLWTNVFVRNRAKVAVPLLWSRVQVQGQLSLLSGAILTFGLTGYPYSEFELMAEELLMSDSIIKVFGALRMSVKMLLMWNSRMEIDGGGDSIVATSLLDASNLIVLKESSVIHSNANLGVRGQGVLNLSGDGDTIEAQRLILSLFYSIQVGPGSVLRGPLVNRSSDDVAPKLNCEADSCPVEIIHPPEDCNLNSSLSFTLQVCRVEDIDVWGVVQGTVIHFNRARSVTVHTSGTISATGFGCRSGVGQGKMLRSGVCGGGGHGGKGGNGFYKGDLAEGGAIYGNADLPCELGSGSGNDSTELSTAGGGIIVMGSWDYSLPSLALYGSVESNGGSYASGSVGGPGGGSGGTILLFVHTLSLAESSVLSSVGGFGSTGSGGGGGGRIHFHWSNIPTGDEYVPVAAVKGSILTSGGVSKGLGYSGGNGTVTGKACPKGLYGTFCKECPLGTYKNVTGSSKSLCFPCPPGELPHRAIYTNVRGGAAETPCPYRCVSDRYRMPHCYTALEELIYTFGGPWLFGLFLSGLLILLALVLSVARMKFVGTDELPGPAPTHQGSQIDHSFPFLESLNEVIETNRAEESQGHVHRMYFMGPNTFSEPWHLPHSPPEQITEIVYEDAFNRFVDEINTLAAYQWWEGSIYSILCILAYPLAWSWQQWRRRKKLQRLREFVRSEYDHSCLKSCRSRALYEGLKVTATPDLMLGYLDFFLGGDEKRPDLPPRLRQRFPMSLIFGGDGSYMAPFSLNSDSVLTSLMSQAVPSWIWHRLVAGLNAQLRLVRGGNLKVTFLPVINWLESHANPSLAENGIRVDLAWFQATALGYCQLGLLVYAVEGEAALTEPDGSPRVKIEQHTPTQNMLADTQLSQSRIKDALMRKRITGGVLNSNSLRTLKDRRDLFYPFSHILHNSKPVGHQDLVGLVISILLLADFSLVLLTFLQLYSYSMVDVLLVLFILPLGILSPFPAGINALFSHGPRRSAGLARVYALWNITSLVNVVVAFICGFVHYKLSTKTHPSVQPWNLGTDESGWWLFPTGLMLLKCIQARLVDWHVANLEIQDRAVYSNDPNIFWQS

SEQ ID NO: 193499 - protein, 791 aa, Zea Mays
MWWWWTWWQSGSGNDSTELSTAGGGIIVMGSWDYSLPSLALYGSVESNGGSYASGSVGGPGGGSGGTILLFVHTLSLAESSVLSSVGGFGSTGSGGGGGGRIHFHWSNIPTGDEYVPVAAVKGSILTSGGVSKGLGYSGGNGTVTGKACPKGLYGTFCKECPLGTYKNVTGSSKSLCFPCPPGELPHRAIYTNVRGGAAETPCPYRCVSDRYRMPHCYTALEELIYTFGGPWLFGLFLSGLLILLALVLSVARMKFVGTDELPGPAPTHQGSQIDHSFPFLESLNEVIETNRAEESQGHVHRMYFMGPNTFSEPWHLPHSPPEQITEIVYEDAFNRFVDEINTLAAYQWWEGSIYSILCILAYPLAWSWQQWRRRKKLQRLREFVRSEYDHSCLKSCRSRALYEGLKVTATPDLMLGYLDFFLGGDEKRPDLPPRLRQRFPMSLIFGGDGSYMAPFSLNSDSVLTSLMSQELVPYLLQAVPSWIWHRLVAGLNAQLRLVRGGNLKVTFLPVINWLESHANPSLAENGIRVDLAWFQATALGYCQLGLLVYAVEGEAALTEPDGSPRVKIEQHTPTQNMLADTQLSQSRIKDALMRKRITGGVLNSNSLRTLKDRRDLFYPFSHILHNSKPVGHQDLVGLVISILLLADFSLVLLTFLQLYSYSMVDVLLVLFILPLGILSPFPAGINALFSHGPRRSAGLARVYALWNITSLVNVVVAFICGFVHYKLSTKTHPSVQPWNLGTDESGWWLFPTGLMLLKCIQARLVDWHVANLEIQDRAVYSNDPNIFWQS

SEQ ID NO: 193500 - protein, 833 aa, Zea Mays
MACHLSPLFNLRLLLLLGAVLGNAVLVRAGGAEASDRAEPDPYSILTWHDYSPPSPPLPPPDPASSTATCEGDLHGKGDFRTHCEVFEEVELGDDIYITGNGSLVLLSGASLTCEKVGCVISANLSGEVHLSRGVRVRAGRVSLVATNITVADTVVVNTTALAGAPPDRTSGVPTGTHGDGGGHGGRGASCFVKEGQTQEDSWGGDAYAWSDLEHPWSYGSKGGSTSVEKDYGGAGGGIVWLFADDLVMNGTVLAAGGDSNEKGGGGSGGSIFIRAASMYGGGKISASGGDGLAGGGGGRVSINVFSRHDDTQIFVHGGRSSGCPDNAGAAGTLYEAVPKSLIVSNNNLSTQTDTLLLEFPNQPLWTNVFVRNRAKVAVPLLWSRVQVQGQLSLLSGAILTFGLTGYPYSEFELMAEELLMSDSIIKVFGALRMSVKMLLMWNSRMEIDGGGDSIVATSLLDASNLIVLKESSVIHSNANLGVRGQGVLNLSGDGDTIEAQRLILSLFYSIQVGPGSVLRGPLVNRSSDDVAPKLNCEADSCPVEIIHPPEDCNLNSSLSFTLQVCRVEDIDVWGVVQGTVIHFNRARSVTVHTSGTISATGFGCRSGVGQGKMLRSGVCGGGGHGGKGGNGFYKGDLAEGGAIYGNADLPCELGSGSGNDSTELSTAGGGIIVMGSWDYSLPSLALYGSVESNGGSYASGSVGGPGGGSGGTILLFVHTLSLAESSVLSSVGGFGSTGSGGGGGGRIHFHWSNIPTGDEYVPVAAVKGSILTSGGVSKGLGYSGGNGTVTGKACPKGLYGTFCKEVLLKLHVHTDACLTDIACLTVIQLWRS

SEQ ID NO: 193501 - protein, 852 aa, Zea Mays
MGPSKGSRTINKIIVKGSEYQQQHDDPSSSSKAKQKRRKLSDFDPKWSKDELTNFYEAYRQYGMDWRKISIAIGTKSSDMVQSLFTLHRTFLSLPEHQATAMGFIALVTGHHNASEKTTTHRGYDHVVRASGKARKHGEKPKSIDGPDLPNCQEAKISGFSDLFQSRYYGELVRYIRNHAVRRRTPRIPAIVSADRSTIDEATPGIENVISSTKRKYEAANNDSAIVPTNKYSPDRVSGFAEAHKAGQDHCLLETIGTGHVATCQQHSKKTRIQQTMEEGQTGVVDHETTMASKEGNKPVDLLNNNQLFIDNISEGSVGKTDSTLSQRREEGHPTIDLSKQGKPVGKSSASKTRKKKYKILDAEVPAVAQNVCGNSLALPETLRVVITDDSSLCTDSGRVGIPEASEDIPAEVPSAQTETKPEVRMSGRTRRKSQMHCKTKHMSCNEGSDNLQAKKLLHCLSSEPLRRWCTYEWFYSAVDYPWFSSNEFVHYLDHAKLSHLSRLTIPEWGTIRSSLGIPRRFSNYFLAVEKENLEDYREKVRKIYAQLSDGSRDFLPADLARPFSIGQQVIVRHPNSRELCDGKVVMMGPDCYKVHFDDPDIGVDIVKDTDCMPVNWLYNRPDNMRSCLSNDAYSILEMDHIPDLTASENEDHAVNGSTVLEGLKSLRLTSDRQPKAESIVNSERPPYRSTSDSPAKSRDCPDNNSAGHYDELESYIAAFAERSLSQARQMVDKAMQANPGGNEDEKVCTSNQVAGCAGPGFEPARGAQLPSDLISNGIATVLSIKSLSDSRHPFANVAGVLDHACSMLRPSCPQNLALYDQIKRDIGIIKTQIFALMPTALGNCSPPVPPM

SEQ ID NO: 193502 - protein, 74 aa, Zea Mays
MQIRMLLISTINKDSKTLGGKMYSVPYMIKKYGQMYHHKDIFFSNKFMGILVLQESLTMCLLFPRRHYLGKNCT

SEQ ID NO: 193503 - protein, 95 aa, Zea Mays
MCSSFSFVVSFHLVGILFQIPSWIRSTLLSSRSSCFFSEMEIGTEKINTCSQVNTYRLCLLLRKECHLGTRTTISNHWSFVWQGQPYLRGTTTSS

SEQ ID NO: 193504 - protein, 77 aa, Zea Mays
MICTKLRLRFILFMDASRFQHAVIFLRWFSNEEIPFTALILGFRVLTDIFLKVVPLWSQLHTMVCKFAASLFFSGKL

SEQ ID NO: 193505 - protein, 106 aa, Zea Mays
MIDFWLLNTSTRAAATIQIQTSVLGPAHLSPNLMALAASSPLHAVPPAPALHTPPEKRDGTPSTGCTAGRHSAAHPSRWSGPPPSQHDSTSGDQVPGSQRPAVPAV

SEQ ID NO: 193506 - protein, 260 aa, Zea Mays
MEAVGVTPAPVAAPEKKKLLDLKDPFPAAANSGAKASSASKWATKKKLVGGDAGYVLEDVPHLTDYMPQLPTYPNPLQDNPAYSVVKQYFVNPDDTVTQKIVVHKTSARGTHFRRAGPRQRVYFQSDEVNAAIVTCGGLCPGLNTVIRELVCGLYDMYGVSSVVGIEGGYKGFYSKNTVALTPKSVNDIHKRGGTVLGTSRGGHDTAKIVDCLQDRGINQVYIIGGDGTQKGASVIYESGDGVSSALLSVSQRLLITTSR

SEQ ID NO: 193507 - protein, 469 aa, Zea Mays
MGKAARWFRSLLGGGRKDQERQASPAPAPADRKRWSFARPSRDSAEASAAATEGFVRGAAGSAAIAEAAWLRSLDDDTGRRQSKHAIAVAAATAAAADAAVAAAQAAVEVVRLTSQGPAFGGGGVVLDLDPRGRAGAAVKIQTAFRGFLAKKALRALKALVRLQALVRGYLVRRQATVTLQSMQALVRAQATVRAARCGRALPSLQPRLHHPPARPRFSLQERHADDARSEHGVAACGRRLSASVAVESASYDRSPKTVEMDTARPRSRAPSLRTEDEWCAQPVSSPPPPCQQQHHHHLPPCIEVPTPRHFPDHGWCTPEKPRPATAQCTPRCAPPTPTPAAKTLCGGPASCLAASPSCPGYMSSTQSSEAKSSSRSQSAPKQRPARKRVPLSEVVVLQARASLGGAGGGAGTHIKPCNARAQAQAPDACDLRAAVVSRFEQRASEEDAAAAAERGRDVFFLQRRCFFS

SEQ ID NO: 193508 - protein, 281 aa, Zea Mays
MDEVFAQSKKFFDLPHSEKMKLLRDEKNRGYTPMLDEILDPENQVNGDYKEGYYIGVEVPADDPEANRPFYGPNQWPSKEVLPKWREVMEQYHREALIVAKSVARIIALALDLDVDFFDRPEMLGESIATLRLLHYEGKVSDPAKGVYGAGAHSDYGLITLLATDDVVGLQICKDKNAQPQLWEYVAPLKGGFIVNLGDMLERWSNGVFRSTLHRVVLDGRERYSIAYFVEPSHDCVVECLPTCKSESNPPKFPPITCSAYLSQRYKDTHADLKSYDDSKA

SEQ ID NO: 193509 - protein, 170 aa, Zea Mays
MPSCQTGILPRKEHDESCRLMFFLSPGKVSDPAKGVYGAGAHSDYGLITLLATDDVVGLQICKDKNAQPQLWEYVAPLKGGFIVNLGDMLERWSNGVFRSTLHRVVLDGRERYSIAYFVEPSHDCVVECLPTCKSESNPPKFPPITCSAYLSQRYKDTHADLKSYDDSKA

SEQ ID NO: 193510 - protein, 205 aa, Zea Mays
MESPISRTNLNCISLADPNVQKSVALLKQACLDSGFFYVVDHGISQEFMDEVFAQSKKFFDLPHSEKMKLLRDEKNRGYTPMLDEILDPENQVNGDYKEGYYIGVEVPADDPEANRPFYGPNQWPSKEVLPKWREVMEQYHREALIVAKSVARIIALALDLDVDFFDRPEMLGESIATLRLLHYEGGQETGHAFVSDGYFTPQGT

SEQ ID NO: 193511 - protein, 267 aa, Zea Mays
MESPISRTNLNCISLADPNVQKSVALLKQACLDSGFFYVVDHGISQEFMDEVFAQSKKFFDLPHSEKMKLLRDEKNRGYTPMLDEILDPENQVNGDYKEGYYIGVEVPADDPEANRPFYGPNQWPSKEVLPKWREVMEQYHREALIVAKSVARIIALALDLDVDFFDRPEMLGESIATLRLLHYEGGQETGKVSDPAKGVYGAGAHSDYGLITLLATDDVVGLQVIHLEPMPSLAVLFGSVSAGGFTRLDSCRYARTRTLSLNCGNT

SEQ ID NO: 193512 - protein, 287 aa, Zea Mays
MESPISRTNLNCISLADPNVQKSVALLKQACLDSGFFYVVDHGISQEFMDEVFAQSKKFFDLPHSEKMKLLRDEKNRGYTPMLDEILDPENQVNGDYKEGYYIGVEVPADDPEANRPFYGPNQWPSKEVLPKWREVMEQYHREALIVAKSVARIIALALDLDVDFFDRPEMLGESIATLRLLHYEGGQETGKVSDPAKGVYGAGAHSDYGLITLLATDDVVGLQICKDKNAQPQLWEYVAPLKGGFIVNLGDMLERWSNGVFRSTLHRVVLDGRERYSWRRGVLALS

SEQ ID NO: 193513 - protein, 282 aa, Zea Mays
MESPISRTNLNCISLADPNVQKSVALLKQACLDSGFFYVVDHGISQEFMDEVFAQSKKFFDLPHSEKMKLLRDEKNRGYTPMLDEILDPENQVNGDYKEGYYIGVEVPADDPEANRPFYGPNQWPSKEVLPKWREVMEQYHREALIVAKSVARIIALALDLDVDFFDRPEMLGESIATLRLLHYEGKVSDPAKGVYGAGAHSDYGLITLLATDDVVGLQICKDKNAQPQLWEYVAPLKGGFIVNLGDMLERWSNGVFRSTLHRVVLDGRERYSWRRGVLALS

SEQ ID NO: 193514 - protein, 900 aa, Zea Mays
MSDSNVKWIDGLQFTSLYWPPPLDAEQKQAQILAYVEYFGQFTADTDQFPEDIAQLIQSSYPSKENRLVDEVLATFVLHHPEHGHAVAHPILSRIIDGTLCYDRHGPPFSSFISLFSHNSEQEYSEQWALACGEILRVLTHYNRPIFKVERQHTEAECSSTSDQATSSDSTDKRSNNSPGNESDWKPLRPLTPWITDILLAAPLGIRSDYFRWCGGVMGKYAAGGELKPPTTACSRGSGKHPQLMPSTPRWAVANGAGVILSVCDEEVARYETANLTAAAVPALLLPPPTTPLDEHLVAGLPPLEPYARLFHRYYAIATPSATQRLLFGLLEAPPSWAPDALDAAVQLVELLRAAEDYASGMRLPKNWMHLHFLRAIGTAMSMRAGIAADTAAALLFRILSQPTLLFPPLRHAEGVEVHHEPLGGYVSSYKKQLEVPASEATIDATAQGIASLLCAHGPDVEWRICTIWEAAYGLLPLSSSAVDLPEIVVAAPLQPPTLSWSLYLPLLKVFEYLPRGSPSEACLMRIFVATVEAILRRTFPSETSEQSRKPRSQSKNLAVAELHTMIHSLFVESCASMDLASRLLFVVLTVCVSHQALPGGSKRPTGSDNHSHEEATEHSRLTNGRSRCKKRQGPVATFDSYVLAAVCALSCELQLFPFITKNGSHSNLKDSMKIIISGKNNGMNNELHNSISSAILHTRRILGILEAVFSLKPSSVGTSWSYSSNEIVAAAMVAAHVSELFRRSRPCLNALSALMRCKWDAEISTRASSLYHLIDLHGKTVSSIVNKAEPLEAHLTLTPVKRDNQHHREESNTSSLDSVKLENKNGSTSHKKNGFSRPLLKCAEEVLLNGDVASTSGKSIASLQVEASDLANFLTMDRNGGYRDVCRKYISSPRMEEGC

SEQ ID NO: 193515 - protein, 801 aa, Zea Mays
MRLPKNWMHLHFLRAIGTAMSMRAGIAADTAAALLFRILSQPTLLFPPLRHAEGVEVHHEPLGGYVSSYKKQLEVPASEATIDATAQGIASLLCAHGPDVEWRICTIWEAAYGLLPLSSSAVDLPEIVVAAPLQPPTLSWSLYLPLLKVFEYLPRGSPSEACLMRIFVATVEAILRRTFPSETSEQSRKPRSQSKNLAVAELHTMIHSLFVESCASMDLASRLLFVVLTVCVSHQALPGGSKRPTGSDNHSHEEATEHSRLTNGRSRCKKRQGPVATFDSYVLAAVCALSCELQLFPFITKNGSHSNLKDSMKIIISGKNNGMNNELHNSISSAILHTRRILGILEAVFSLKPSSVGTSWSYSSNEIVAAAMVAAHVSELFRRSRPCLNALSALMRCKWDAEISTRASSLYHLIDLHGKTVSSIVNKAEPLEAHLTLTPVKRDNQHHREESNTSSLDSVKLENKNGSTSHKKNGFSRPLLKCAEEVLLNGDVASTSGKSIASLQVEASDLANFLTMDRNGGYRGSQTLLRSVLSEKQELCFSVVSLLWQKLIASPEMQMSAESTSAHQGWRKVVDALCDVVSASPTKASAAIVLQAEKDLQPWIARDDEQGQKMWRVNQRIVKLIAELMRNHDSPEALVILASASDLLLRATDGMLVDGEACTLPQLELLEVTARAVHLIIEWGDSGLSVADGLSNLLKCRLSTTIRCLSHPSAHVRALSMSVLRDILSNGSVNPNKTIQGEQQRNGIQSPSYRCLAAGIINWQADVERCIEWEAHSRRATGLTLAFLSAAAKELGCPLPS

SEQ ID NO: 193516 - protein, 1062 aa, Zea Mays
MSDSNVKWIDGLQFTSLYWPPPLDAEQKQAQILAYVEYFGQFTADTDQFPEDIAQLIQSSYPSKENRLVDEVLATFVLHHPEHGHAVAHPILSRIIDGTLCYDRHGPPFSSFISLFSHNSEQEYSEQWALACGEILRVLTHYNRPIFKVERQHTEAECSSTSDQATSSDSTDKRSNNSPGNESDWKPLRPLTPWITDILLAAPLGIRSDYFRWCGGVMGKYAAGGELKPPTTACSRGSGKHPQLMPSTPRWAVANGAGVILSVCDEEVARYETANLTAAAVPALLLPPPTTPLDEHLVAGLPPLEPYARLFHRYYAIATPSATQRLLFGLLEAPPSWAPDALDAAVQLVELLRAAEDYASGMRLPKNWMHLHFLRAIGTAMSMRAGIAADTAAALLFRILSQPTLLFPPLRHAEGVEVHHEPLGGYVSSYKKQLEVPASEATIDATAQGIASLLCAHGPDVEWRICTIWEAAYGLLPLSSSAVDLPEIVVAAPLQPPTLSWSLYLPLLKVFEYLPRGSPSEACLMRIFVATVEAILRRTFPSETSEQSRKPRSQSKNLAVAELHTMIHSLFVESCASMDLASRLLFVVLTVCVSHQALPGGSKRPTGSDNHSHEEATEHSRLTNGRSRCKKRQGPVATFDSYVLAAVCALSCELQLFPFITKNGSHSNLKDSMKIIISGKNNGMNNELHNSISSAILHTRRILGILEAVFSLKPSSVGTSWSYSSNEIVAAAMVAAHVSELFRRSRPCLNALSALMRCKWDAEISTRASSLYHLIDLHGKTVSSIVNKAEPLEAHLTLTPVKRDNQHHREESNTSSLDSVKLENKNGSTSHKKNGFSRPLLKCAEEVLLNGDVASTSGKSIASLQVEASDLANFLTMDRNGGYRGSQTLLRSVLSEKQELCFSVVSLLWQKLIASPEMQMSAESTSAHQGWRKVVDALCDVVSASPTKASAAIVLQAEKDLQPWIARDDEQGQKMWRVNQRIVKLIAELMRNHDSPEALVILASASDLLLRATDGMLVDGEACTLPQLELLEVTARAVHLIIEWGDSGLSVADGLSNLLKVN

SEQ ID NO: 193517 - protein, 101 aa, Zea Mays
MFIALSQTVCSMTCDASELLLSWRPSEAIFSSFSQKEKGNGKAATSSSWALCHGDAKDNTSTQRRMSWCLALSSVPLAVPVSFHLWSTVSSQIRSLQKSLL

SEQ ID NO: 193518 - protein, 467 aa, Zea Mays
MMLKDLAAIQHQQQQLAADENMSNLTSASGDLQASVSSHPAPPPAKKKRSLPGNPDPDAEVIALSPRTLMATNRYVCEVCGKGFQRDQNLQLHRRGHNLPWKLKQRNPKEAVRKKAYVCPEPGCVHHDPARALGDLTGIKKHFSRKHGEKKWKCDRCAKRYAVHSDWKAHSKVCGTREYRCDCGTHFSRRDSFITHRAFCDALAEESARAVTAAAAVVVGQQQAAGGGDGSAGLHLPPDVLDPSQTLGGGHGMSLQELCLKREQQQQFAPSSWLTAHHQQELPGSARLLEQHEYIGSSTPESTAGLSGFVGLSPSAAGEAAASAHMSATALLQKAAQMGATLSRPSNQEQMASTHSHSSTTNAGTGSASAAAAAAINVPGTGAGAFGFGAPHHFGAEERTTTSADRDACGNAAAVSVVGANDGFTRDFLGLRAFSHGDILTMAGFDPCMSSAAYEQGHHQSSKQWHV

SEQ ID NO: 193519 - protein, 54 aa, Zea Mays
MAASCALTSSHGELAHGGSSCSAYSPLQELAQPLSARNSSTSLHGCLVVDLCNS

SEQ ID NO: 193520 - protein, 68 aa, Zea Mays
MDDLIKCQDGRCSPSGHHLTTLSVIPGFSGEEAQSNMTPAGCSTKWETKELSSFLQEKSSRIMMWYVI

SEQ ID NO: 193521 - protein, 72 aa, Zea Mays
MLGDEVSVSHRTRSPISLGHGHALFSSSGHDLFGSLLVIILTCGVSHCILSPLLNPFVPHEISYWLHLVMVL

SEQ ID NO: 193522 - protein, 474 aa, Zea Mays
MDLSFHVPTSNTQFVGDESRPPAHILWETILKFADVGSSEEPVVTFEGIAILTPRGRYSVELHLSFLRLQGQANDFKIQYSSIVRLFLLPKSNNPHTFVVITLDPPIRKGQTLYPHIVIQFETEAVVERDLALSKELLVEKYKDRLEESYKGLIHEVFTKVLRGLSGAKVTRPGSFRSCQDGYAVKSSLKAEDGLLYPLEKGFFFLPKPPTLILHEEIEFVEFERHGAGGASISSHYFDLLVKLKNDQEHLFRNIQRNEYHNLFNFINGKNIKIMNLGGDGQGASGVVTDVLRDTDDDAVDPHLERIKNQAGDEESDEEDEDFVADKDDSGSPTDDSGDEESDASDSGGEKEKSSKKEASSSKPVQKRKHKGRDDEGQEKKKPKKKKDPNAPKRAMTPFMYFSMAERGNMKSSNPDLPTTEIAKKLGEMWQKMSGEEKQPYIQQAQVDKKRYEKESAVYRGEATVDVDSGNESD

SEQ ID NO: 193523 - protein, 269 aa, Zea Mays
MCSNTTYIDKVENRKITTSYTVNRFHANFVLSEAPAKRRRGGRSCPFSCCCCFCWTLLVVVLLAVLAAVAGGAFYLLYRPHRPAFTLTAARVTRLSLSSSATAPALSDAIDVTLTARNPNKKLVYVYDDFAVTAATAANAVPLGAATAPGFAHEAGNVTVIRATVSASALAVDPAAAGSDVKRSGEFPIVLDLETRAGVRVGALRTKKIGILVHCDGVKVAAPAPAPAKKTKKLAKAAADTPAPAAAAVDDAPAPPAASATATVARACQ

SEQ ID NO: 193524 - protein, 501 aa, Zea Mays
MDMDSGSWLHGYATTNASGNNGFMCGYAAGSSCSPAEQQQCMEDEQQQFLVSSQIQHHLNQISMRMNMDDEAAVVYHMSSNGGATAIDMHDPIVDGLLDDPHHGAGGRACSSFPSSSSCSSLSLPAASASLSCSPDDPDSSSAHHILAAPAAGGGNQQYPEVSSHVPLLPPPPPPPVVPSYDHHHQYTDLHAPAPAKPTGAFKHYARHLGPKRPPKPGACGQRMFKTAMSVLSKMHVAARYSQQQYYYQAAAAAEAAQPPPSVNQLQHMFSERKRREKLNDSFHALKAALPPGAKKDKTSILIRARDYVRSLEAKVAELEEKNKSLESRLTRRTDGSSDDDDNGSGETTKVEVEITRTANEELCTVKIEVRSPPAAAASPCNRTDVVVRTLQCLKEQIGDGVSLVAMSTSGGAEPAATGVKNAFPRAVLTMQIKSPGTDWEEQPVKDAVAKVVADALTTTTTPPLPPAAATTVPPAASPGLLINDSSSANNSLTIRPAIMK

SEQ ID NO: 193525 - protein, 221 aa, Zea Mays
MAPRPAANHQATAEQGAKHLGRPSGAPSARAPRPPPAAPERPTGRRAEQSFNSVPDRVFLIQVAASKTKIYMVLELVNGGELLDRIVSRPGRSFFLPCDHRRPVRESSRSRSSPGANSLCRMPAGSAEQRIVLYLELYASCVEYITPLRDSMSSVFPSAHLAFASIDLNAHTVFAITTALAILQTVCLRNLSLLSYLSADGVMATIAVILCLFWVACSGLL

SEQ ID NO: 193526 - protein, 74 aa, Zea Mays
MVLELVNGGELLDRIQAASEGKLPEQEARRLFQHLVLSSTLLYSLTHHSQAAKQLPRLYFTWSFMQAVWSTSRR

SEQ ID NO: 193527 - protein, 100 aa, Zea Mays
MPAGSAEQRIVLYLELYASCVEYITPLRDSMSSVFPSAHLAFASIDLNAHTVFAITTALAILQTVCLRNLSLLSYLSADGVMATIAVILCLFWVACSGLL

SEQ ID NO: 193528 - protein, 210 aa, Zea Mays
MAPRPAANHQATAEQGAKHLGRPSGAPSARAPRPPPAAPERPTGRRAEQSFNSVPDRVFLIQVAASKTKIYMVLELVNGGELLDRIVSRPGRSFFLPCDHRRPVRESSRSRRQGGSSSTWSFPLLYSTHSLITPRRPNSSPDCTLLGALCKLCGVHHAAKRQHVISVSLSTFSFCQHRPECTHCLCDHNGLGNSPNSLSQEPQSPLVSFC

SEQ ID NO: 193529 - protein, 128 aa, Zea Mays
MAPRPAANHQATAEQGAKHLGRPSGAPSARAPRPPPAAPERPTGRRAEQSFNSVPDRVFLIQVAASKTKIYMVLELVNGGELLDRIAASEGKLPEQEARRLFQHLVLQNRGLYFTWSFMQAVWSTSRR

SEQ ID NO: 193530 - protein, 145 aa, Zea Mays
MAPRPAANHQATAEQGAKHLGRPSGAPSARAPRPPPAAPERPTGRRAEQSFNSVPDRVFLIQVAASKTKIYMVLELVNGGELLDRIQAASEGKLPEQEARRLFQHLVLSSTLLYSLTHHSQAAKQLPRLYFTWSFMQAVWSTSRR

SEQ ID NO: 193531 - protein, 195 aa, Zea Mays
MAPRPAANHQATAEQGAKHLGRPSGAPSARAPRPPPAAPERPTGRRAEQSFNSVPDRVFLIQVAASKTKIYMVLELVNGGELLDRIAASEGKLPEQEARRLFQHLIVLYLELYASCVEYITPLRDSMSSVFPSAHLAFASIDLNAHTVFAITTALAILQTVCLRNLSLLSYLSADGVMATIAVILCLFWVACSGL

SEQ ID NO: 193532 - protein, 119 aa, Zea Mays
MVLELVNGGELLDRILYYVSDSPPVASLLLQRQLTSRRPVRESSRSRSSPDCTLLGALCKLCGVHHAAKRQHVISVSLSTFSFCQHRPECTHCLCDHNGLGNSPNSLSQEPQSPLVSFC

SEQ ID NO: 193533 - protein, 114 aa, Zea Mays
MAPRPAANHQATAEQGAKHLGRPSGAPSARAPRPPPAAPERPTGRRAEQSFNSVPDRVFLIQVAASKTKIYMVLELVNGGELLDRIAASEGKLPEQEARRLFQHLVLQNRGYDG

SEQ ID NO: 193534 - protein, 161 aa, Zea Mays
MQMMISSSSLLSILVIERVDERVGLSCLVSLLSLILVSSACERVLDDMRLWVILNFVPCIAIPAMLFLFPPKYTHSRFWFLATGLYLLARFEGLADRKVYSVNRYFISGHSLEHLCFALVTVMLTVMLTFRNIKIARKFCEKIASLEGRLRDDTEIRLDDA

SEQ ID NO: 193535 - protein, 484 aa, Zea Mays
MTMARATTSTVAALCFLLSCVSATPSTLAASSAIIHDIIRGLADTTAARVRTDAEATARASTDFGTNATADDAARPAAVFYPSCAADIAALLRASSASASPFPVSARGRGHSTRGQATAPGGVVVDMASLAVAAGRDETATTNASSTSASARLAVSVDGRYIDAGGEQLWVDVLHAALAHGLTPRSWTDYLRLTVGGTLSNAGISGQAFRHGPQISNVLELDVVTGDMVTCSKEKDADLFDAVLGGLGQFGIITRARIPLAPAPARARWLRLLYTGAADLTADQERLIADDERRGGALAGLMDYVEGSVVTDLQQGLIGSWRSQPPPSSSSFYSATDAARIAALAEEAGGVLYFLEGAVYYGGASDTTAADVDKVTRSTYDPPPVSTCIRQCHRSHVICGWLIWIVVFSLWLVMHACLVGQHRQSCSVNIVLAWPAVVGPSSCISFQSFLGIPPPPCLPIVFNFIRPARIHLKSQNLVILKRQL

SEQ ID NO: 193536 - protein, 285 aa, Zea Mays
MATSPESLCGICPQPFRDFVEYVVNLKFGEEPNYAKCISLFDGIVGPNPDIRPINTDGAQKLIYQVGQKRGRLIVDENDDEQPKKKIRMGMPATQWISVYNARRPMKQRYHYNVADNRLLQHIQKGNEDGLFISSVASSSNLWALIMDAGTGFTSQVYELSNYFLHKEWIMEQWERNFYITALAGANNGSSLVIMSRGTQYAQQSYKVSDTFPFKWINKKWKEGFYVTAMATAGSRWAVVMSRNAGFTSQWSLISYIRVRASTCVGTMAIASRQRLPHGTRQPLS

SEQ ID NO: 193537 - protein, 328 aa, Zea Mays
MATSPESLCGICPQPFRDFVEYVVNLKFGEEPNYAKCISLFDGIVGPNPDIRPINTDGAQKVGQKRGRLIVDENDDEQPKKKIRMGMPATQWISVYNARRPMKQRYHYNVADNRLLQHIQKGNEDGLFISSVASSSNLWALIMDAGTGFTSQVYELSNYFLHKEWIMEQWERNFYITALAGANNGSSLVIMSRGTQYAQQSYKVSDTFPFKWINKKWKEGFYVTAMATAGSRWAVVMSRNAGFTSQVVELDFLYPSEGIHMRWDNGYRITATAATWDQAAFILSIPRRKPSDETQETLRTSAFPSQHVKDKWSKNLYLASICYGRSVS

SEQ ID NO: 193538 - protein, 323 aa, Zea Mays
MATSPESLCGICPQPFRDFVEYVVNLKFGEEPNYAKCISLFDGIVGPNPDIRPINTDGAQKLIYQVGQKRGRLIVDENDDEQPKKKIRMGMPATQWISVYNARRPMKQRLLQHIQKGNEDGLFISSVASSSNLWALIMDAGTGFTSQVYELSNYFLHKEWIMEQWERNFYITALAGANNGSSLVIMSRGTQYAQQSYKVSDTFPFKWINKKWKEGFYVTAMATAGSRWAVVMSRNAGFTSQVVELDFLYPSEGIHMRWDNGYRITATAATWDQAAFILSIPRRKPSDETQETLRTSAFPSQHVKDKWSKNLYLASICYGRSVS

SEQ ID NO: 193539 - protein, 845 aa, Zea Mays
MVTAKEAAAAAAAMDASKYVRYTPEQVEALERLYYECPKPSSLRRQQLVRDCPVLASVDPKQIKVWFQNRRCREKQRKESSRLQAVNRKLTAMNKLLMEENDRLQKQVSQLVYENGYYRQQTQSAGLATTDTSCESVVTSGPQNVAAVLPQAQPRDAGPAGLMSIAEETLTEFLSKATGTAVEWVQMPGMKPGPDSIGIIAISHGCPGVAARACGLVGMEPAKVAEVLKDRPLWLRDCRSMEVVNVLPAGTSGTVELLYMQLYAPTTLAPARDFWLLRYTSILDDGSLVVCERSLGANQGGPSMPLVQPFVRGEMLPSGFLVRPSDGGGSVIHIVDHMDLEPWSVPEVVRPLYESSAMVAQKMSMAALRYLRQVAHEDTAHSVVTGGWGRQPASLRALSQKLTRGFNEALNGLADDGWSVVGSDGVDDVCVSVSSSPSRVVSCNATFSNGPVVGTGSSSVLCAKASMLLQDVSPPELLRFMREQRSQWADSNLDAFFASAMKPDFCSLPIPPRLGGFGGQFLEVIKVGNAGNYQDALLHRDLFLLQMYNGVDENMAGTCSELIFAPIDASFSDDSPLLPSGFRIIPIDAPLDTSSPKCTLDLASTLEAGTPRSRTSGSGGPGTAAAACAGSKAVMTIVFQFAFESHLQDSVAAMARQYVRSIVASVQRIALALSSARLVVPHGSGVSHGAPAAGPEAATLARWICQSYRFHFGAELIKSADGSGCGEAVLKTLWHHAGAILCCSLKALPVFTFANQSGLDMLETTLVALQDIALERVFDDQGRKNLCAELPGVMEQGFACVPGGMCVSGLGRPVSYEKALAWKVLDDGSGGVHCVCFMFVNWSFV

SEQ ID NO: 193540 - protein, 272 aa, Zea Mays
MEVATATEASAPAASGGAAGQGHPFPWLDAAISEPYYFLHLLAFFSYFAARSAALSADDGGELHDRLLRREIQAVLVFLVLFVVKQIVKEETWEAVIADSLLYAKGLLLAVTLVIDWWLAFAYFLGFLVIYAVAQQPPYDGLGHSNHLTPLQLESLLTEEPTSRFWLVEFRTSFSAKCVQASSILPELSIVYSNKNISFGTIDLGHFPNAAAKFGISMWDHLPTYILFDKVTEVSRFPEITSESKVFVPKVTKKLLCQHFDLDRRLIGYLST

SEQ ID NO: 193541 - protein, 152 aa, Zea Mays
MEVATATEASAPAASGGAAGQGHPFPWLDAAISEPYYFLHLLAFFSYFAARSAALSADDGGELHDRLLRREIQAVLVFLVLFVVKIVKEETWEAVIADSLLYAKGLLLAVTLVIDWWLAFAYFLGFLVIYAVAQQPPYDGLGMYAHIGYRIL

SEQ ID NO: 193542 - protein, 371 aa, Zea Mays
MEEQNSWLRTKFSNTVYARVDPRRVPVAPLSKDVERKLHKFFKMKKTVSMPVDRDDGDTGTAFKHCASLPLVRSQPQLDREKVNKPERASLEIPSSSQMISESCKTPKARSLVKTPSSMMLLSYLNKSPSNQGHSSHKAYGSRPRSKSPLPSIVPSEVFREAKSSSQRFASPPPQRGGSAKSIYGKSFGRQVSDMGQSPRWRSTPVVSGKHKSQKDNAWTRKYSGGRRVSAVNPADDRRAQMVRMNQAVQTTVDWTLDPSKLLVGHRFASGAYSRLYRGYYDDNPVAIKFIRQPDDDDNGKMAAMLEKQYNSEINSLSHLYHKNVIKLVAAYKCPPVFYIITEFLPGGSIRRPYAMCSWRTKALTGGWRPR

SEQ ID NO: 193543 - protein, 70 aa, Zea Mays
MHVVSLLRERKHSSSTQVFLDYWYIQISAILLSFFIIGILRSALKRITDLNHIVESYIQICTCFFHAMYS

SEQ ID NO: 193544 - protein, 67 aa, Zea Mays
MALLGARRDGRHTHLQRGARVCCACLRAVEKRGQSGSEPSARILQLLLENGIRVNELTRIEVALVVP

SEQ ID NO: 193545 - protein, 118 aa, Zea Mays
MALSAKGKEVCHRSCDVLDINADEWGNENRSMTTELREQQYRLRKALEDRVQVSRETAKMWRWDKLHQIWIGGPYKTQQAQFKIQEEQQHATSSDAREEGVPNGDYNEDQTTKDMSEY

SEQ ID NO: 193546 - protein, 146 aa, Zea Mays
MALSAKGKEVCHRSCDVLDINADEWGNENRSMTTELREQQYRLRKALEDRVQVSRETAKMWRWDKLHQIWIGGPYKTQQAQFKIQEEQQHATSSDAREEGVPNGDYNEDQTTKDMSEGLLAAPPRSCNGPTGSSTRWTTHSPTEGS

SEQ ID NO: 193547 - protein, 102 aa, Zea Mays
MRIGSPRTSNSGWLLAVILVFAWPSICVFFLLFIPFCRCRHMAMLVVSVVFYNATFSFSGPSKHDCGLNLFYIVFTSILVFSFAIISLHPKVPSHSLFSSFY

SEQ ID NO: 193548 - protein, 117 aa, Zea Mays
MALSAKGKEVCHRSCDVLDINADEWGNENRSMTTELREQQYRLRKALEDRVQVSRETAKMWRWDKLHQIWIGGPYKTQQAQFKIQEEVLKPNRDLMCGRRRQINSGRSGTLRSGLWT

SEQ ID NO: 193549 - protein, 324 aa, Zea Mays
MCMLAGEVDMTEIRHQASCKHVQEGSINQRSGKSKVQASPSENSGPNQCSSKGQPGRRNHQIERHCQHHHHHHHTMLNMMVKEQVAAAPTGSGDRQGQGRGKIEIKRIENTTNRQVTFCKRRNGLLKKAYELSVLCDAEVALVVFSSRGRLYEYANNSVKSTIERYKKANSDSSNSGTVAEVNAQYYQQESSKLRQMIHSLQNANTRNIVGDSIHTMGLRDLKQMEGKLEKAIIKIRARKNELLYAEVDYMQKREMDLQTDNMYLRSKIAESNETGQPAMHMTMGAPPTSEYDHMAPFDSRNFLQVSMPQHYSHQLQPTTLQLG

SEQ ID NO: 193550 - protein, 334 aa, Zea Mays
MCMLAGEVDMTEIRHQASCKHVQEGSINQRSGKSKVQASPSENSGPNQCSSKGQPGRRNHQIERHCQHHHHHHHTMLNMMTDLSCGPSSKVKEQVAAAPTGSGDRQGQGRGKIEIKRIENTTNRQVTFCKRRNGLLKKAYELSVLCDAEVALVVFSSRGRLYEYANNSVKSTIERYKKANSDSSNSGTVAEVNAQYYQQESSKLRQMIHSLQNANTRNIVGDSIHTMGLRDLKQMEGKLEKAIIKIRARKNELLYAEVDYMQKREMDLQTDNMYLRSKIAESNETGQPAMHMTMGAPPTSEYDHMAPFDSRNFLQVSMPQHYSHQLQPTTLQLG

SEQ ID NO: 193551 - protein, 339 aa, Zea Mays
MAERVVGTGSFGIVFQAKCLETGETFAIKKVLQDRRYKNRELQLMRAMEHPNVICLKHCFFSTTSRDELFLNLVMEFVPETLYRVLKHYSNANQRMPLIYVKLYMYQLFRGLAYIHNVPGVCHRDVKPQNVLVDPLTHQVKLCDFGSAKVLIPGEPNISYICSRYYRAPELIFGATEYTTSIDIWSAGCVLAELLLGQPLFPGESAVDQLVEIIKVLGTPTREEIRCMNPNYTEFRFPQIKAHPWHKIFHKRMPPEAIDLASRLLQYSPSLRCSALDACAHPFFDELRAPNARLPNGRPFPPLFNFKHELANASPDLINRLVPEQIRRQNGVNFGHTGS

SEQ ID NO: 193552 - protein, 230 aa, Zea Mays
MEAPPVPELMDLDAPPPAAADAAAAAPVPPAVSDKKKEGEGGDTVTGHIISTTIGGKNGEPKRTISYMAERVVGTGSFGIVFQAKCLETGETFAIKKVLQDRRYKNRELQLMRAMEHPNVICLKHCFFSTTSRDELFLNLVMEFVPETLYRVLKHYSNANQRMPLIYVKLYMYQLFRGLAYIHNVPGVCHRDVKPQNVLVDPLTHQVKLCDFGSAKVLSSYLERRSIQLQ

SEQ ID NO: 193553 - protein, 88 aa, Zea Mays
MLNTIVFTHAKADATHVWNSTLMRRNRSRKKRKWFRQILRPSCGPLIHPWYFCLGPGPTLPLERVSFYSCMPQPGPAKITFVQSLSAA

SEQ ID NO: 193554 - protein, 91 aa, Zea Mays
MLCLSKELSSVQAAPSQSLYPFNAELVAAMQEMIQPRCTSTFFQLEKIFKTTFSSFVLHMGLVSRHLKEGGNDGVKFGQYIYTSMKCTTTM

SEQ ID NO: 193555 - protein, 114 aa, Zea Mays
MLCLSKELSSVQSPPSHLSYAGSSISVVVPIQRRAGGSDAGDDPAEVYKYMLVDVTCQRYTVSTVFQLEKIFKTTFSSFVLHMGLVSRHLKEGGNDGVKFGQYIYTSMKCTTTM

SEQ ID NO: 193556 - protein, 218 aa, Zea Mays
MAAVAEGSASAAAKEVEYQAGVQKLVDLLSNLNPAAKEFVPSSAPAAAASPPKKALSADAPVFDYRSTAGGNGATDDPFYVGFGNQQRKRGNGYINQGRRRTNDRLRRADREDSVRRTVYVSELDHTRRDLLISLLPVGMLLIAEFVVIPTQFLGLHLLSSLMKRVQELHLTSEAQFLVSTLLEFCLQRQLSYPLIQSFFPGRTMRRKWSCELSIVQT

SEQ ID NO: 193557 - protein, 324 aa, Zea Mays
MVVLAKGELEQIALPAAEPPPADVRSVDLSAPAGPAREAAARALVAACEEHGFFRVTGHGVPARLVRAAEAAAAGFFARPQGEKEEEGPTLGYGSKRIGGNGDLGWVEYLLLGGTPAAAPSSALLPCAAAPSPSAPAGPLRDLLDEYTVAVRRMACAVLELMAEGLGIAGGAGDAVLARLVARADSDCMLRVNHYPPRPALNPSLTGFGEHTDPQIISVLRANGTSGLEIALRDGAWASVPPDGDAFFVNVGDTLQVYIPPLLTVTHSINYSFLLPYVPSSARHLDRYMMSNQPPAVLEIFRSISQQQTASVKHDGAHDRHVRD

SEQ ID NO: 193558 - protein, 152 aa, Zea Mays
MDVLNRTGMADALRMARSVLHRVASAAPPDPLAVANTMWSVLVFVPVAGGGVQSCIGPQPRPPPSAPRSHTLPWHSALGVLEGAHYLTTGKLEVLSEQEFVNCDHEILVPTSSVKGGSISIGGSLQLLGFCTFEACVGILAVNHEDEISVHS

SEQ ID NO: 193559 - protein, 555 aa, Zea Mays
MEDNQILVQSEHNLIPGSRTLVIGQEFADVDTCRRAVKDMAIALHYELRVVKSDRSRFIAKCSKEGCPWRVHIAKCPGVPTFTVRTLHGEHKCEGVLNLHHQQATVGWVARSVEARLRDNPQIKPKEILQDIREQHGVAVSYMQAWRGKERSMAAVNGTLEDGYRLLPAYCEQIVKTNPGSVATYRGIGPGNAFQRLFVSFRASIYGFLNGCRPLLEIDKADLKGKYLGTLLCASAIDADHMMFPLAFGVVDCESDDNWNWFISELRKMLGVNTDKMPVLTIVSERKRQVVAAVGSNFPTAFHGFCLRHVQDVMPWLQRFPPNLWAFSYFQGIRYGHFSLGITEILYNLSLDCHELPIVQTIEHIRHQLACWFAERQNLAQSYNSVLVPSAEKVILEAIHDSQCYQVLRANKVEFEIVSSERTNIVDTQARFCSCRRWQIYGIPCAHAAAALLSCGEDPRLYADDCFSVMKYRETYSQPIYPIPDRSHWNDSSPWSQGAVSKADVVLGPPNIRRPPGRPKMKILKIESMKRPKRIVQCGRCHLLGHSQKKCSLRS

SEQ ID NO: 193560 - protein, 126 aa, Zea Mays
MTYVALNPCICQLATGFLKTRTGSRDPRAQHPTIQPLARWADVTLAISPLPVCVSCSVIGSTEAKLTHDEACGQLKDPRSSGQQSERSLIDTNGDLSCSTSGLILFKPFPNLWYLTKVLLRMLNPS

SEQ ID NO: 193561 - protein, 283 aa, Zea Mays
MSHRQPAPMPDTLSDAFAAAVLLSSTDKPDTLPPGRLSPVSPLPHSSSKHGHQHPHPTPSSSSGSSGSVSRSLLAPASSLASRRSHSGEIPLPSDAPPRGTARPGHRRTGSGPLIFTSGACSSSATSPLTNALPAGNICPSGRLAKPLPSSCSAATPPPPPRASRHDVLGSGTANYGHGSIVRSRAATDDDAVLRRAMSAADPEELKRAGNDQYRKGCFEEALRLYDRALALCPDNAACRGNRAAALIGLHRLGEAVKECEEALRIDPSYGRAHHRLASLHIR

SEQ ID NO: 193562 - protein, 590 aa, Zea Mays
MSHRQPAPMPDTLSDAFAAAVLLSSTDKPDTLPPGRLSPVSPLPHSSSKHGHQHPHPTPSSSSGSSGSVSRSLLAPASSLASRRSHSGEIPLPSDAPPRGTARPGHRRTGSGPLIFTSGACSSSATSPLTNALPAGNICPSGRLAKPLPSSCSAATPPPPPRASRHDVLGSGTANYGHGSIVRSRAATDDDAVLRRAMSAADPEELKRAGNDQYRKGCFEEALRLYDRALALCPDNAACRGNRAAALIGLHRLGEAVKECEEALRIDPSYGRAHHRLASLHIRLGHIEDALKHLSLAIPQPDLLELHKLQTVEKHFGRCLDARKAGDWKSVLRESDAAIAAGADSSALLLAARAEALFRLNLLDEADVAISSASKLNYTSSCSPDTKFCGFIANAYLFYVHAQVDMALGRFDHAVSSIDKARIIDPGNTEVITMHNKVKSVARARSLGNELFNSGKFSEACVAYGEGLKQHPVNKVLYCNRAACRFKLEQWEKSIEDCNEALKIQPNYTKALLRRAASYGKMERWAESVKDYEILRKELPSDTEVAEAYFHAQIALKSSRGEEVSNMKFGGEVEAIIGMEQFQLATSLSG

SEQ ID NO: 193563 - protein, 533 aa, Zea Mays
MMISAHSLERHLHSLSHFSMLLWTWYHSATSSMESIHHCLLFLLCTLLGVLLLVSSLNLVNLNFMQEKKEADFRYGLVRVRENAESIAFYGGEENELQLLLDRFRRAFENLSELLIASRNLEFFTNGYRYLIQILPAAVVAPMYFSGKIEFGVINQSVSAFNHILSDFSLIVFQFQSISAFSAVIDRLGEFDDLLDGNESSQSSQRDSIDGINIVFKSSGPCVPSSNGSLTQSDPCMVLEIRNLTLLTPRSGNVLITGLTMELKDKDHLLVMGPSGSGKTSLLRALAGLWTSGTGEIIYHVRGSTQLQKPNPSSDKPSSMNLKGEEESLQSSKQRRDNGIFFVPQRPYMVLGTLRQQLLYPTWTEEVQHSPDNDDKNSDPLPFLSEVSTSDLVGAKSEVPSTAELIEVLEDVKLGYILPRFNGLDSTHDWASVLSLGEQQRLAFARLLLATPTLVLLDESTSALDEANEAHLYSQIEAAGITYVSIGHRKTLHKFHNKALYISMSDSTDTNPRNWELKPADKLPAEEPSQFPS

SEQ ID NO: 193564 - protein, 534 aa, Zea Mays
MMISAHSLERHLHSLSHFSMLLWTWYHSATSSMESIHHCLLFLLCTLLGVLLLVSSLNLVNLNFMQEKKEADFRYGLVRVRENAESIAFYGGEENELQLLLDRFRRAFENLSELLIASRNLEFFTNGYRYLIQILPAAVVAPMYFSGKIEFGVINQSVSAFNHILSDFSLIVFQFQSISAFSAVIDRLGEFDDLLDGNESSQSSQRDSIDGINIVFKSSGPCVPSSNGSLTQSDPCMVLEIRNLTLLTPRSGNVLITGLTMELKDKDHLLVMGPSGSGKTSLLRALAGLWTSGTGEIIYHVRGSTQLQKPNPSSDKPSSMNLKGEEESLQSSKQRRDNGIFFVPQRPYMVLGTLRQQLLYPTWTEEVQHSPDNDDKNSADPLPFLSEVSTSDLVGAKSEVPSTAELIEVLEDVKLGYILPRFNGLDSTHDWASVLSLGEQQRLAFARLLLATPTLVLLDESTSALDEANEAHLYSQIEAAGITYVSIGHRKTLHKFHNKALYISMSDSTDTNPRNWELKPADKLPAEEPSQFPS

SEQ ID NO: 193565 - protein, 566 aa, Zea Mays
MTSYYMKRYFKNRTFYKIQSQSIIDNPDQRINDDLSAFTGTALAFSLTLFNAAVDLVSFSNILYGIYPPLFIVLVVYSLGGTAISVFLGKNLVNLNFMQEKKEADFRYGLVRVRENAESIAFYGGEENELQLLLDRFRRAFENLSELLIASRNLEFFTNGYRYLIQILPAAVVAPMYFSGKIEFGVINQSVSAFNHILSDFSLIVFQFQSISAFSAVIDRLGEFDDLLDGNESSQSSQRDSIDGINIVFKSSGPCVPSSNGSLTQSDPCMVLEIRNLTLLTPRSGNVLITGLTMELKDKDHLLVMGPSGSGKTSLLRALAGLWTSGTGEIIYHVRGSTQLQKPNPSSDKPSSMNLKGEEESLQSSKQRRDNGIFFVPQRPYMVLGTLRQQLLYPTWTEEVQHSPDNDDKNSDPLPFLSEVSTSDLVGAKSEVPSTAELIEVLEDVKLGYILPRFNGLDSTHDWASVLSLGEQQRLAFARLLLATPTLVLLDESTSALDEANEAHLYSQIEAAGITYVSIGHRKTLHKFHNKALYISMSDSTDTNPRNWELKPADKLPAEEPSQFPS

SEQ ID NO: 193566 - protein, 392 aa, Zea Mays
MYFSGKIEFGVINQSVSAFNHILSDFSLIVFQFQSISAFSAVIDRLGEFDDLLDGNESSQSSQRDSIDGINIVFKSSGPCVPSSNGSLTQSDPCMVLEIRNLTLLTPRSGNVLITGLTMELKDKDHLLVMGPSGSGKTSLLRALAGLWTSGTGEIIYHVRGSTQLQKPNPSSDKPSSMNLKGEEESLQSSKQRRDNGIFFVPQRPYMVLGTLRQQLLYPTWTEEVQHSPDNDDKNSADPLPFLSEVSTSDLVGAKSEVPSTAELIEVLEDVKLGYILPRFNGLDSTHDWASVLSLGEQQRLAFARLLLATPTLVLLDESTSALDEANEAHLYSQIEAAGITYVSIGHRKTLHKFHNKALYISMSDSTDTNPRNWELKPADKLPAEEPSQFPS

SEQ ID NO: 193567 - protein, 610 aa, Zea Mays
MLLLDQEKFTTQLLYYLGAFAGGIPFFVLRDYARETLSLRWRSWMTSYYMKRYFKNRTFYKIQSQSIIDNPDQRINDDLSAFTGTALAFSLTLFNAAVDLVSFSNILYGIYPPLFIVLVVYSLGGTAISVFLGKNLVNLNFMQEKKEADFRYGLVRVRENAESIAFYGGEENELQLLLDRFRRAFENLSELLIASRNLEFFTNGYRYLIQILPAAVVAPMYFSGKIEFGVINQSVSAFNHILSDFSLIVFQFQSISAFSAVIDRLGEFDDLLDGNESSQSSQRDSIDGINIVFKSSGPCVPSSNGSLTQSDPCMVLEIRNLTLLTPRSGNVLITGLTMELKDKDHLLVMGPSGSGKTSLLRALAGLWTSGTGEIIYHVRGSTQLQKPNPSSDKPSSMNLKGEEESLQSSKQRRDNGIFFVPQRPYMVLGTLRQQLLYPTWTEEVQHSPDNDDKNSDPLPFLSEVSTSDLVGAKSEVPSTAELIEVLEDVKLGYILPRFNGLDSTHDWASVLSLGEQQRLAFARLLLATPTLVLLDESTSALDEANEAHLYSQIEAAGITYVSIGHRKTLHKFHNKALYISMSDSTDTNPRNWELKPADKLPAEEPSQFPS

SEQ ID NO: 193568 - protein, 678 aa, Zea Mays
MAFRKRPLQITSRSANLSLRLLANRHCVVIAVVIAYHPRFQRKGSKGVSRCFVGTVKSITLQLLQSKQYCGICKKIWHHTDGGNWVCCDECQIWVHVECDLTCNNMEDLENADYFCPDCKSKCKTVPATEKMNTSHSSECASTSKGKSTPMIAVFCNGEEALYVPEKHMILCQCKACKERMMSLNEWEKHTGSRKKNWKMSIRQKSTGEPLINLLDDIPCGTSKSSKPGIKKGELLQLQANAYSPVCAKWTTERCAVCRWVEDWDYNKIIICNRCQIAVHQECYGARAVQDLTIWLCRACEFSQQKRECCLCPVKGGALKPTDVDGLWVHVTCAWFQPKVSFPVEETMEPAMGIMSIPAEYFKKTCVICKQMHGACTQCYKCSTYYHAMCASRAGYRMELQHYERSGRHITKMVSYCDFHSTPDPDNVLIVKTPEGVFSTKFFVQNGEKQTAARLARKENYQEKVLPPIVSDCLVAKCLTYEMLKYKKEPGEAIAHRIMGPRHHSQDFIDGLNAYMGHKDDQSFSTFKERLGYLQKTENLRVSCGRSGIHGWGLFAARNIQEGQMVIEYRGEQVRQRVADLREARYHREKKDCYLFKISEDVVIDATGKGNIARLINHSCMPSCYARIVTVSGDRSQIILIAKRDVSAGEELTYNYLFDPDESEDCKLPAEEPSQFPS

SEQ ID NO: 193569 - protein, 575 aa, Zea Mays
MQQHGDYFCPDCKSKCKTVPATEKMNTSHSSECASTSKGKSTPMIAVFCNGEEALYVPEKHMILCQCKACKERMMSLNEWEKHTGSRKKNWKMSIRQKSTGEPLINLLDDIPCGTSKSSKPGIKKGELLQLQANAYSPVCAKWTTERCAVCRWVEDWDYNKIIICNRCQIAVHQECYGARAVQDLTIWLCRACEFSQQKRECCLCPVKGGALKPTDVDGLWVHVTCAWFQPKVSFPVEETMEPAMGIMSIPAEYFKKTCVICKQMHGACTQCYKCSTYYHAMCASRAGYRMELQHYERSGRHITKMVSYCDFHSTPDPDNVLIVKTPEGVFSTKFFVQNGEKQTAARLARKENYQEKVLPPIVSDCLVAKCLTYEMLKYKKEPGEAIAHRIMGPRHHSQDFIDGLNAYMGHKDDQSFSTFKERLGYLQKTENLRVSCGRSGIHGWGLFAARNIQEGQMVIEYRGEQVRQRVADLREARYHREKKDCYLFKISEDVVIDATGKGNIARLINHSCMPSCYARIVTVSGDRSQIILIAKRDVSAGEELTYNYLFDPDESEDCKVPCLCKAPNCRGYMN

SEQ ID NO: 193570 - protein, 963 aa, Zea Mays
MPASRIPFKRCTAAVPGVGKPGPAASMPPAKRRRDRVVPSRSRDSMPPPAPHVEEGDNRHGEVYNVELLMAEPKVDSFGPVETALWTQARTAPTDADLYRACRNINKRGSCGGAASGSVLTSVSNAASDACAGGNGTIVRVSNAALEGGAGSNGGLEGRPAVVECKPKREGSDKKEDFYWPEDFVLGDVVWARSGKKSPMWPALVIDPLQHAPEVVLNSCVPGALCVMFFGYSANGHGRDYGWVKQGMIFPFVDYLDRFQGQPLYKLRPTKFRAAIEEAFLAERGFFDLDMDGACSPRKFVDKQSDPNGFQEEAASNNEQECQSESQVVGKSALCCDSCGNRLPSKVSKKRKQGGEQVLCRHCEKLLQSKQYCGICKKIWHHTDGGNWDLENADYFCPDCKSKCKTVPATEKMNTSHSSECASTSKGKSTPMIAVFCNGEEALYVPEKHMILCQCKACKERMMSLNEWEKHTGSRKKNWKMSIRQKSTGEPLINLLDDIPCGTSKSSKPGIKKGELLQLQANAYSPVCAKWTTERCAVCRWVEDWDYNKIIICNRCQIAVHQECYGARAVQDLTIWLCRACEFSQQKRECCLCPVKGGALKPTDVDGLWVHVTCAWFQPKVSFPVEETMEPAMGIMSIPAEYFKKTCVICKQMHGACTQCYKCSTYYHAMCASRAGYRMELQHYERSGRHITKMVSYCDFHSTPDPDNVLIVKTPEGVFSTKFFVQNGEKQTAARLARKENYQEKVLPPIVSDCLVAKCLTYEMLKYKKEPGEAIAHRIMGPRHHSQDFIDGLNAYMGHKDDQSFSTFKERLGYLQKTENLRVSCGRSGIHGWGLFAARNIQEGQMVIEYRGEQVRQRVADLREARYHREKKDCYLFKISEDVVIDATGKGNIARLINHSCMPSCYARIVTVSGDRSQIILIAKRDVSAGEELTYNYLFDPDESEDCKVPCLCKAPNCRGYMN

SEQ ID NO: 193571 - protein, 995 aa, Zea Mays
MPASRIPFKRCTAAVPGVGKPGPAASMPPAKRRRDRVVPSRSRDSMPPPAPHVEEGDNRHGEVYNVELLMAEPKVDSFGPVETALWTQARTAPTDADLYRACRNINKRGSCGGAASGSVLTSVSNAASDACAGGNGTIVRVSNAALEGGAGSNGGLEGRPAVVECKPKREGSDKKEDFYWPEDFVLGDVVWARSGKKSPMWPALVIDPLQHAPEVVLNSCVPGALCVMFFGYSANGHGRDYGWVKQGMIFPFVDYLDRFQGQPLYKLRPTKFRAAIEEAFLAERGFFDLDMDGACSPRKFVDKQSDPNGFQEEAASNNEQECQSESQVVGKSALCCDSCGNRLPSKVSKKRKQGGEQVLCRHCEKHYSAVIAVETILWHMQENLAPHRWWELGKGLEEYMLWLYILLNILGTDLKGTLFQDLENADYFCPDCKSKCKTVPATEKMNTSHSSECASTSKGKSTPMIAVFCNGEEALYVPEKHMILCQCKACKERMMSLNEWEKHTGSRKKNWKMSIRQKSTGEPLINLLDDIPCGTSKSSKPGIKKGELLQLQANAYSPVCAKWTTERCAVCRWVEDWDYNKIIICNRCQIAVHQECYGARAVQDLTIWLCRACEFSQQKRECCLCPVKGGALKPTDVDGLWVHVTCAWFQPKVSFPVEETMEPAMGIMSIPAEYFKKTCVICKQMHGACTQCYKCSTYYHAMCASRAGYRMELQHYERSGRHITKMVSYCDFHSTPDPDNVLIVKTPEGVFSTKFFVQNGEKQTAARLARKENYQEKVLPPIVSDCLVAKCLTYEMLKYKKEPGEAIAHRIMGPRHHSQDFIDGLNAYMGHKDDQSFSTFKERLGYLQKTENLRVSCGRSGIHGWGLFAARNIQEGQMVIEYRGEQVRQRVADLREARYHREKKDCYLFKISEDVVIDATGKGNIARLINHSCMPSCYARIVTVSGDRSQIILIAKRDVSAGEELTYNYLFDPDESEDCKVPCLCKAPNCRGYMN

SEQ ID NO: 193572 - protein, 58 aa, Zea Mays
MRRTHRFIRLQTQKNFVVVVIACSSSKFSVTELHHQVGNHPSCQRNVAQTIPEVQKSK

SEQ ID NO: 193573 - protein, 78 aa, Zea Mays
MQSRFTNLETLKFKFEKIQVYGQFLPLSSKTVSSNILYIHPLYPSFTVFSKIFHLLYILSLQQRPLYINTYIKDIFNF

SEQ ID NO: 193574 - protein, 118 aa, Zea Mays
MVVDNGAPEAPHAGATGSVMSSEMAVSPSSAASSNHAPFMPPEIPGMAMDVPGLDSTFGSDVGNGPLQLGPDGSSRDSIRSLGQLWNFSLSDLTADLTSLGDYGPTSVLVVATPLMIK

SEQ ID NO: 193575 - protein, 331 aa, Zea Mays
MKDSQDIQSTTELQSSAQGTNEVQSQQPNPMTTDAPAGNSGSLSIASNDSKKVSREDIELVQNLIERCLQLYMNKGEVVRTLSTRARIEPGFTTLVWQKLEEENSEFFRAYYIRLKLKRQIILFNHLLQHQYNLMKYPAPPNVPLAPIQNGIHHMPVSNLPMGYPVLPQPIMPAPGQPHMDPMACGLSNGHVVNGIPAPGGYHPMRMNSGNDMVVDNGAPEAPHAGATGSVMSSEMAVSPSSAASSNHAPFMPPEIPGMAMDVPGLDSTFGSDVGNGPLQLGPDGSSRDSIRSLGQLWNFSLSDLTADLTSLGEDYGPTSVLVVATPLMIK

SEQ ID NO: 193576 - protein, 361 aa, Zea Mays
MKDSQDIQSTTELQSSAQGTNEVQSQQPNPMTTDAPAGNSGSLSIASNDSKKVSREDIELVQNLIERCLQLYMNKGEVVRTLSTRARIEPGFTTLVWQKLEEENSEFFRAYYIRLKLKRQIILFNHLLQHQYNLMKYPAPPNVPLAPIQNGIHHMPVSNLPMGYPVLPQPIMPAPGQPHMDPMACGLSNGHVVNGIPAPGGYHPMRMNSGNDMVVDNGAPEAPHAGATGSVMSSEMAVSPSSAASSNHAPFMPPEIPGMAMDVPGLDSTFGSDVGNGPLQLGPDGSSRDSIRSLGQLWNFSLSDLTADLTSLGDLDVLENYTGTPFLPSDSDILLDSPDQDDIVEYFADAINGSQSDEERS

SEQ ID NO: 193577 - protein, 227 aa, Zea Mays
MKYPAPPNVPLAPIQNGIHHMPVSNLPMGYPVLPQPIMPAPGQPHMDPMACGLSNGHVVNGIPAPGGYHPMRMNSGNDMVVDNGAPEAPHAGATGSVMSSEMAVSPSSAASSNHAPFMPPEIPGMAMDVPGLDSTFGSDVGNGPLQLGPDGSSRDSIRSLGQLWNFSLSDLTADLTSLGDLDVLENYTGTPFLPSDSDILLDSPDQDDIVEYFADAINGSQSDEERS

SEQ ID NO: 193578 - protein, 372 aa, Zea Mays
MKDSQDIQSTTELQSSAQGTNEVQSQQPNPMTTDAPAGNSGSLSIASNDSKKVQNLIERCLQLYMNKGEVVRTLSTRARIEPGFTTLVWQKLEEENSEFFRAYYIRLKLKRQIILFNHLLQHQYNLMKYPAPPNVPLAPIQNGIHHMPVSNLPMGYPVLPQPIMPAPGQPHMDPMACGLSNGHVVNGIPAPGGYHPMRMNSGNDMVVDNGAPEAPHAGATGSVMSSEMAVSPSSAASSNHAPFMPPEIPGMAMDVPGLDSTFGSDVGNGPLQLGPDGSSRDSIRSLGQLWNFSLSDLTADLTSLGADLDVLENYTGTPFLPSDSDILLDSPDQDDIVRRGEVIAKLAQGFSGRAQGCVFSWPAARDAAANVM

SEQ ID NO: 193579 - protein, 56 aa, Zea Mays
MTPRGDEAAASAIVEKNDLSPHSATKTNTNVLAIVPAADMTPAPFPENFDTANSAS

SEQ ID NO: 193580 - protein, 84 aa, Zea Mays
MTPRGDEAAASAAKVLENSVNVDCAHGNLTIYKEEFGDVPIVEKNDLSPHSATKTNTNVLAIVPAADMTPAPFPENFDTANSAS

SEQ ID NO: 193581 - protein, 115 aa, Zea Mays
MSCPYTSPQNGRAERMIRTTNDVVRPLLFQASLPVSYWAEALGTATYLLNRLPTKAVAHPTPYFALFGVHPSYDHLRVFGCACYPNLASTTPHKLAPRSTRCVFLGYSPDHKGYR

SEQ ID NO: 193582 - protein, 89 aa, Zea Mays
MTTTTWTESSGFQFFCPIPMSVSFPHVHRSIWFVKVCEPTCRGRPWFSCDLKRGVFSCSLARNASDCFFHPMQAARYEEKLIRTIQGIL

SEQ ID NO: 193583 - protein, 90 aa, Zea Mays
MVLATSSVYDFVIHLCFASWTSVSFPHVHRSIWFVKVCEPTCRGRPWFSCDLKRGVFSCSLARNASDCFFHPMQAARYEEKLIRTIQGIL

SEQ ID NO: 193584 - protein, 615 aa, Zea Mays
MLLTFGIRLLASWKIARMEAAMQQILDAMAYMELRLTDALVGRGGDRVEDTVSGLQSSNSATSSVATPMYDDVFDSSVAPMYPGDLHATAILDVLSRVHTLDKCMTSQDKLVIDLDPDDMETPLSESALPVVPSANEMETPTTCSTPVLTEHAPAEAAHNCTLRVPRGEPLPRLLHAFLAHDWLDHSADTDDSVLTSMSGCTKLVELQPRGVNLRGCIPDALFDVELETLNVPSHALSGILPLGSTKLAEMLQSLDLSVHQLTYGILTEMSLFFKLRVDLYCAIPVDLCESVTQGVVPAGEDEDDPKQLWHHLHARWPSDQQKQHLRSQTQHTQRHHRATTAEERTNYLSGLIPKLVKPNSVAMVTIASKPTSDSIAAQVVFDEMQQGFRTWIQRQPDTWCQSCCPSSLIDALLGGCSSVGAHCVCYLLKVYALATKLPDWIGRTQSQKLRSYRGNIPGLRPIPWPSFILLSRENKLTKSSVMVTASAIQAFVNLVLTSCDAGYSIVMFTPNYFITYMSFQMTGATDILVGGCDSRTLHYDVDWLEKVLKDKEHVPKLVTVLNSRNPSRAFIPRPMLERISDLCKSVGQHTGQLSLHGQYYLIIITTVCWLVWSS

SEQ ID NO: 193585 - protein, 797 aa, Zea Mays
MEAAMQQILDAMAYMELRLTDALVGRGGDRVEDTVSGLQSSNSATSSVATPMYDDVFDSSVAPMYPGDVFGSSAASPPGFDGEPTFDEEHNNSITEYVDVSCHDHLFLLDTTWDSSQQHNASIPGRRQHPGCSARLQRRPLQHLTVDPVSAVDTMPLDFNLTLDEFNQRFDASASVPPSPVAVIADNWGGCFDSEQYHTRPSVVADSWGGFFGGEDLASSGNATRFVLPIASTDEPSIDIALARANSEVTDDSVFVTTEPAGYDDSELHATAILDVLSRVHTLDKCMTSQDKLVIDLDPDDMETPLSESALPVVPSANEMETPTTCSTPVLTEHAPAEAAHNCTLRVPRGEPLPRLLHAFLAHDWLDHSADTDDSVLTSMSGCTKLVELQPRGVNLRGCIPDALFDVELETLNVPSHALSGILPLGSTKLAEMLQSLDLSVHQLTYGILTEMSLFFKLRVDLYCAIPVDLCESVTQGVVPAGEDEDDPKQLWHHLHARWPSDQQKQHLRSQTQHTQRHHRATTAEERTNYLSGLIPKLVKPNSVAMVTIASKPTSDSIAAQVVFDEMQQGFRTWIQRQPDTWCQSCCPSSLIDALLGGCSSVGAHCVCYLLKVYALATKLPDWIGRTQSQKLRSYRGNIPGLRPIPWPSFILLSRENKLTKSSVMVTASAIQAFVNLVLTSCDAGYSIVMFTPNYFITYMSFQMTGATDILVGGCDSRTLHYDVDWLEKVLKDKEHVPKLVTVLNSRNPSRAFIPRPMLERISDLCKSVGQHTGQLSLHGQYYLIIITTVCWLVWSS

SEQ ID NO: 193586 - protein, 196 aa, Zea Mays
MWPMEEEEVFVTVRRTEHVDVTSRAVVVAAGRAAVAGPRTVRVFCDDYDATDSSGDEAEEEEEKKAARRRVKRYVQEIHLERAAKEEEEATAAASLGAVLPGPKRKRKPDGEASEPRFRGVRRRPWGKYAAEIRDPWRRVRVWLGTFDTAEEAAKVYDSAAVQLRGRDATTNFQQQVDELFQDITDLFQIDPLPVA

SEQ ID NO: 193587 - protein, 112 aa, Zea Mays
MDAIKLEGGAPSRITAAKAIVEAGIAVMGHVGLTPQAISVLGGFRPQGKTVDSAIKVVETALALQEAGCFSVVLECVPAPVAAAATSALKIPTIGIGAGPFCSGQVRLFFAP

SEQ ID NO: 193588 - protein, 441 aa, Zea Mays
MDCPSGGGRRRRRAAWALGSGHTQFDYSPIFPNFDYLDDVKFRPKFKGPPAAPPVFYSNSKHSPVPVAPHPTPTLCASVPPPVRATRDTMRRSLPLLLARQVARRRRLSNVPESTVYGGPRPQESSAARRVTVTTLRGKHRRGEPITVVTAYDYPSAVHVDSAGIDVCLVGDSAAMVVHGHDTTLPITLDIMLEHCRAVARGAPRPLLVGDLPFGCYESSAAQAVDSAVRVLKEGGMDAIKLEGGAPSRITAAKAIVEAGIAVMGHVGLTPQAISVLGGFRPQGKTVDSAIKVVETALALQEAGCFSVVLECVPAPVAAAATSALKIPTIGIGAGPFCSGQVLVYHDLLGMLQHPHHAKVTPKFCKQFGNVGDVINKALSEYKQEVEAQAFPGPSHTPYKITPTDVDGFADALQKMGLSDAADAAAAAAENREKGGEPKGE

SEQ ID NO: 193589 - protein, 397 aa, Zea Mays
MKLEATDDALKAAEKATAPTTAKSETKSATSLPPARAPAAAAAAPASAPAPRIESKTELEKKDNPPPVAKAPEVTPDNEFEKRIRPEVIPANEIGVSFDDIGALDDIKESLQELVMLPLRRPDLFKGGLLKPCRGILLFGPPGTGKTMLAKAIANEAQASFINVSMSTITSKWFGEDEKNVRALFTLAAKVSPTIIFVDEVDSMLGQRNRAGEHEAMRKIKNEFMTHWDGLLSRPDQRILVLAATNRPFDLDEAIIRRFERSRELIMRRLLSKEKVDEGLDFKELATMTEGYSGSDLKNLCTTAAYRPVRELIQKERKKELEKLKCEKGETPSDPPKKEKEETIILRPLNMTDLKEAKNQVAASFAAEGAIMSELRQWNELYGEGGSRKKQQLTYFL

SEQ ID NO: 193590 - protein, 407 aa, Zea Mays
MKLEATDDALKAAEKATAPTTAKSETKSATSLPPARAPAAAAAAPASAPAPRIESKTELEKKDNPPPVAKAPEVTPDNEFEKRIRPEVIPANEIGVSFDDIGALDDIKESLQELVMLPLRRPDLFKGGLLKPCRGILLFGPPGTGKTMLAKAIANEAQASFINVSMSTITSKWFGEDEKNVRALFTLAAKVSPTIIFVDEVDSMLGQRNRAGEHEAMRKIKNEFMTHWDGLLSRPDQRILVLAATNRPFDLDEAIIRRFERRIMVGLPSMGSRELIMRRLLSKEKVDEGLDFKELATMTEGYSGSDLKNLCTTAAYRPVRELIQKERKKELEKLKCEKGETPSDPPKKEKEETIILRPLNMTDLKEAKNQVAASFAAEGAIMSELRQWNELYGEGGSRKKQQLTYFL

SEQ ID NO: 193591 - protein, 576 aa, Zea Mays
MEAKSVVMSALGIGIGVGVGLGLASAPWAAGASASSRAAGVTVDRVEQDLRRLLVDGADTKVTFDEFPYYLSEQTRVVLTSAAYVHLKQADISKYTRNLAPASRTILLSGPAELYQQMLARALAHYFQAKLLLLDPTDFLIKIHSKYGTGGSTEKTVKRSISETTLERVSGLLGSLSILPQKEQPKGTIRRQSSMMDVKLRSSESMSNLTKLRRNASTSSDMSSMASQGPSTSTAPLRRSSSWTFDEKILVQALYKVLLSVSKKYPVVLYIRDVEKFLHKSPKMYLLFEKLLNKLEGPVLILGSRIVDMNSDEESDDRLTVLFPYNIEIKPPENENHLVSWNSQLEEDMKMIQFQDNRNHIMEVLAENDLECDDLGSICLSDTMCLSKYIEEIVVSAVSYHLMNNKDPEYRNGKLVLSTKSLSHALEIFQGNKISDKDSMKLEATDDALKAAEKATAPTTAKSETKSATSLPPARAPAAAAAAPASAPAPRIESKTELEKKDNPPPVAKAPEVTPDNEFEKRIRPEVIPANEIGVSFDDIGALDDIKESLQELVMLPLRRPDLFKGGLLKPCRVVW

SEQ ID NO: 193592 - protein, 785 aa, Zea Mays
MEAKSVVMSALGIGIGVGVGLGLASAPWAAGASASSRAAGVTVDRVEQDLRRLLVDGADTKVTFDEFPYYLSEQTRVVLTSAAYVHLKQADISKYTRNLAPASRTILLSGPAELYQQMLARALAHYFQAKLLLLDPTDFLIKIHSKYGTGGSTEKTVKRSISETTLERVSGLLGSLSILPQKEQPKGTIRRQSSMMDVKLRSSESMSNLTKLRRNASTSSDMSSMASQGPSTSTAPLRRSSSWTFDEKILVQALYKVLLSVSKKYPVVLYIRDVEKFLHKSPKMYLLFEKLLNKLEGPVLILGSRIVDMNSDEESDDRLTVLFPYNIEIKPPENENHLVSWNSQLEEDMKMIQFQDNRNHIMEVLAENDLECDDLGSICLSDTMCLSKYIEEIVVSAVSYHLMNNKDPEYRNGKLVLSTKSLSHALEIFQGNKISDKDSMKLEATDDALKEVTPDNEFEKRIRPEVIPANEIGVSFDDIGALDDIKESLQELVMLPLRRPDLFKGGLLKPCRGILLFGPPGTGKTMLAKAIANEAQASFINVSMSTITSKWFGEDEKNVRALFTLAAKVSPTIIFVDEVDSMLGQRNRAGEHEAMRKIKNEFMTHWDGLLSRPDQRILVLAATNRPFDLDEAIIRRFERRIMVGLPSMGSRELIMRRLLSKEKVDEGLDFKELATMTEGYSGSDLKNLCTTAAYRPVRELIQKERKKELEKLKCEKGETPSDPPKKEKEETIILRPLNMTDLKEAKNQVAASFAAEGAIMSELRQWNELYGEGGSRKKQQLTYFL

SEQ ID NO: 193593 - protein, 563 aa, Zea Mays
MYLLFEKLLNKLEGPVLILGSRIVDMNSDEESDDRLTVLFPYNIEIKPPENENHLVSWNSQLEEDMKMIQFQDNRNHIMEVLAENDLECDDLGSICLSDTMCLSKYIEEIVVSAVSYHLMNNKDPEYRNGKLVLSTKSLSHALEIFQGNKISDKDSMKLEATDDALKAAEKATAPTTAKSETKSATSLPPARAPAAAAAAPASAPAPRIESKTELEKKDNPPPVAKAPEVTPDNEFEKRIRPEVIPANEIGVSFDDIGALDDIKESLQELVMLPLRRPDLFKGGLLKPCRGILLFGPPGTGKTMLAKAIANEAQASFINVSMSTITSKWFGEDEKNVRALFTLAAKVSPTIIFVDEVDSMLGQRNRAGEHEAMRKIKNEFMTHWDGLLSRPDQRILVLAATNRPFDLDEAIIRRFERRIMVGLPSMGSRELIMRRLLSKEKVDEGLDFKELATMTEGYSGSDLKNLCTTAAYRPVRELIQKERKKELEKLKCEKGETPSDPPKKEKEETIILRPLNMTDLKEAKNQVAASFAAEGAIMSELRQWNELYGEGGSRKKQQLTYFL

SEQ ID NO: 193594 - protein, 721 aa, Zea Mays
MEAKSVVMSALGIGIGVGVGLGLASAPWAAGASASSRAAGVTVDRVEQDLRRLLVDGADTKVTFDEFPYYLSEQTRVVLTSAAYVHLKQADISKYTRNLAPASRTILLSGPAELYQQMLARALAHYFQAKLLLLDPTDFLIKIHSKYGTGGSTEKTVKRSISETTLERVSGLLGSLSILPQKEQPKGTIRRQSSMMDVKLRSSESMSNLTKLRRNASTSSDMSSMASQGPSTSTAPLRRSSSWTFDEKILVQALYKVLLSVSKKYPVVLYIRDVEKFLHKSPKMYLLFEKLLNKLEGPVLILGSRIVDMNSDEESDDRLTVLFPYNIEIKPPENENHLVSWNSQLEEDMKMIQFQDNRNHIMEVLAENDLECDDLGSICLSDTMCLSKYIEEIVVSAVSYHLMNNKDPEYRNGKLVLSTKSLSHALEIFQGNKISDKDSMKLEATDDALKAAEKATAPTTAKSETKSATSLPPARAPAAAAAAPASAPAPRIESKTELEKKDNPPPVAKAPEVTPDNEFEKRIRPEVIPANEIGVSFDDIGALDDIKESLQELVMLPLRRPDLFKGGLLKPCRGILLFGPPGTGKTMLAKAIANEAQASFINVSMSTITSKWFGEDEKNVRALFTLAAKVSPTIIFVDEVDSMLGQRNRAGEHEAMRKIKNEFMTHWDGLLSRPDQRILVLAATNRPFDLDEAIIRRFERRSAIDGKSGTHNAATSVKGES

SEQ ID NO: 193595 - protein, 315 aa, Zea Mays
MESLGVLLLHPFNAYLEQELDRRFRLYRFWETPREEFLRAHAGAVRAVVGNASYGADAALIDALPALEIVASFSVGIDRVDLAKCRDRGIRVTNTPDVLTDDVADLAVGLAIAVLRRIPQADRYVRAGLWKSRGDYTLTTRFSGKRVGIIGLGRIGQAVAKRVEAFDCPVSYHQRTEQRATYPSYTYYPSVVELAANSDVLVVACPLNAQTRHIVSREVMEALGPSGVLINVGRGPHVDEREMVAALADGRLGGAGLDVFEDEPNVPEALLGMDNVVLLPHVGSGTNETRKAMADLVLGNLEAHVLSKPLLTPVV

SEQ ID NO: 193596 - protein, 510 aa, Zea Mays
MAAAPYDREDGLQPSAPPHAVDAYDPSYVPDSVKTFVVHLYRHIRDKNVYEIHQMYEGGFQRLSDRLFRDAPWPSAEAVAPYCDGDPVFLLLYRELWYRHAHARLSPLTAAHRAESWTNYCDLFRVVLHGVVNMQLPNQWLWDMVDEFVYQFQSCCQYRAKLKTKTEDELNQLKQFDKVALVEKSMITQILEREKEGLEQFTATDGYDYEGGSNVLKVLGYYSMIGLLRIHCLLGDYHTGLKCLGPIDLNQQGVYSIVIGSHISTIYHYGFANLMMRRYVEATREFNKILLYILKYKQYHQKSPQYDQILKKNEQMYALLVICLSLCPQNKLIDENVSTQLKEKYNDKMTKMQRYDDEAYAAYDELFSYACPKFITPSPPVLDQPLTNYNQDAYRLQLKLFLYEVKQQQLLSGIRSYLKLYSTITISKLAQYMEVDEATLRSILMTYKHKMHAVDSDGKMVSSADFDFYIVEDVIHVVESKPTKRHGDYFLRQILKFEEMIGGLDKVQLD

SEQ ID NO: 193597 - protein, 325 aa, Zea Mays
MITQILEREKEGLEQFTATDGYDYEGGSNVLKVLGYYSMIGLLRIHCLLGDYHTGLKCLGPIDLNQQGVYSIVIGSHISTIYHYGFANLMMRRYVEATREFNKILLYILKYKQYHQKSPQYDQILKKNEQMYALLVICLSLCPQNKLIDENVSTQLKEKYNDKMTKMQRYDDEAYAAYDELFSYACPKFITPSPPVLDQPLTNYNQDAYRLQLKLFLYEVKQQQLLSGIRSYLKLYSTITISKLAQYMEVDEATLRSILMTYKHKMHAVDSDGKMVSSADFDFYIVEDVIHVVESKPTKRHGDYFLRQILKFEEMIGGLDKVQLD

SEQ ID NO: 193598 - protein, 436 aa, Zea Mays
MSTRLLLKPHHGHYQFRVMPFGLTNAPATFQCAMNSILEPFLRKFVLVFIDDILIYSPTLQDHVQHLKQVFTVLRHHQFYLKRKKCVFAQAELQYLGHIISKEGVATDPSKTEAMVRWPVPTSVTELRGFLGLTGYYRKFVRHYGTLAKPLTILLQGKKAWVWTLEAQKAFEHLKKAMTQTPVLALPRFEIPFVVETDACDEGIGAVLMQEHKPLAFLSKALGMKNKQLSIYEKEFLALIMAVDRWRPYLQRSSFTIMTDHQSLSFLGEQQLQSELQRKAMAKLMGLQFKIVYKKGKENVVADALSRVGAAMILALVSEVQPVWLQEILNSYATDLQAQQLLQKLVIQSPDEDGYFLQQGVIRKDQQIWVGENSALRTKIIAALHDSSLGGHSGITATYHRIKKLFCWSGLKTDVELFVKQCAVCQQAKSPKQYPS

SEQ ID NO: 193599 - protein, 76 aa, Zea Mays
MLAPSGVLLRSRLPSSQLHQYHAMTAAQSRSIMFLCLPLSMCQVVLLPWYPTAVSCLLDVQEIQFLLMRRCRLVTP

SEQ ID NO: 193600 - protein, 276 aa, Zea Mays
MAAITAPPAPHPASTSCRRRAPLIRFAASSSPSSRFRPSSSSSFPGAAGSSSGGGGEILHVSPLPPPAAPPGAPVYVTLPADVVGPGGRVARRRAMGASLAALAAAGVAGIAVELWWGVIERHRPGEYDWAGYLELAAMARRHGLRVRAILAFHQCGAGPHDPPWIPLPQWVLEEMDKVPDLSYTNRYQKRNREYISLGCDILPVLKGRSPMQAYSDFMRSFRNTFEDYLGAIVTEVQVGMGPGGELRYPSCPTEKLNQPGSSSELGEFQCYDKVW

SEQ ID NO: 193601 - protein, 224 aa, Zea Mays
MQAQVPRQIDFSAGSSSKPGVLVTRAGVLDGESAEVDGLCKEEGPPPVMEDRRPRKRGRKPANGREEPLNHVEAERQRREKLNQRFYALRAVVPNISKMDKASLLGDAITYITDLQKKLKEMETERERLLESGMVDPRERAPRPEVDIQVVQDEVLVRVMSPMENHPVKKVFQAFEEAEVRVGESKVTSNNNGTAVHSFIIKCPGTEQQTREKVIAAMSRAMSS

SEQ ID NO: 193602 - protein, 165 aa, Zea Mays
MQKAMSREVQICLLTETGAKQATAEIIWKNKDEALVFLDSLKEAHLFFLEGMTNADAKKQYPELYTKWREDPANFHVNGIYPIRKLWGMIARQTCEQILLTPGENFLVVTHKSILRALICTALGIPPERFRAIDVNNGGMCVFSLHGEQARRSYASSPQHDSTHV

SEQ ID NO: 193603 - protein, 157 aa, Zea Mays
MSRIVNSSRMAASHVRGTMPAKSRPRRVGSPPTSALLTCRARVHRGKNSSRGRIGAPPPADLRRPVCSAQRTWTATAARGGYRRWASPSSASTAGWPSTAPGTTPTPSPSSSPRTPPSSSSSAASTFWSAAGTSASSSPSGASPRSSHSCSRTRSPP

SEQ ID NO: 193604 - protein, 293 aa, Zea Mays
MSALGTLSGGAAGVSGLIRLRRRVAPALAAPSHHAAGTLNCAALPDAAPLVWGRQLRPSLLLPATLLPSSSQGARRHTPRRPAAAAGEAKSVGFLEKYPALVTGFFFFMWYFLNVIFNILNKKIYNYFPYPYFVSLIHLVVGVVYCLISWSVGLPKRAPINGTLLKLLFPVALCHGIGHITSNVSFAAVAVSFAHTIKALEPFFSAAATQFILGQQVPFSLWLSLAPVVIGVSMASLTELSFNWTGFINAMISNISFTYRSIYSKKAMTDMDSTNVYAYIKAKIEEEKRKKSA

SEQ ID NO: 193605 - protein, 86 aa, Zea Mays
MEFAEMPFQACPICATRVGMDLIGHLTMQHGSYFKISFFNYAAVADHLHFYIFHIILQLKIHRCHGRAHVTVMLNCNFSLVLEPAT

SEQ ID NO: 193606 - protein, 80 aa, Zea Mays
MKYKAKQIKSLIFFQEGKGNDRKVRRVRGVQIWMRAEKRSRKACPICATRVGMDLIGHLTMQHGSYFKIGVMVGRTSRSC

SEQ ID NO: 193607 - protein, 180 aa, Zea Mays
MPDMDGFKLLELVGLEMDLPGITSAQNPIPIDMVLLLDYALVPARHQSDLPLKCGIQMLCFLTSCIIFEEMPVYPDGRVCISILHPPSEDPNGYELAKRKLPCSLIVSVYGPIYNGFTVNGKTTRDYYIVFGLDLEWFGVHNDDASELFQGLDDFHSPAVNLTRLAVSALPNWHQAANGT

SEQ ID NO: 193608 - protein, 285 aa, Zea Mays
MPPSDPVAPCVAAPVMDAALLAVIVPPRRSIRAHHGWCSHAMWRGEVTAGVAEVEGEGEDEGTGKRAHRGGRSRGTLGDPGAWFLGSAAFAAVGFAESEPPEMTVDELKLQARASGGHGLRTSSPSACACSPSTTTRPASSDNNGTGSHGPELLREKKDQFDLVISNVHMPDMDGFKLLELVGLEMDLPGITSAQNPIPIDMVLLLDYALVPARHQSDLPLKCGIQMLCFLTSCIIFEEMPVYPDGRVCISILHPPSEDPNGYELASERWTPVHTFMVQFTMASL

SEQ ID NO: 193609 - protein, 273 aa, Zea Mays
MPPSDPVAPCVAAPVMDAALLAVIVPPRRSIRAHHGWCSHAMWRGEVTAGVAEVEGEGEDEGTGKRAHRGGRSRGTLGDPGAWFLGSAAFAAVGFAESEPPEMTVDELKLQARASGGHGLRTSSPSACACSPSTTTRPASSDNNGTGSHGPELLREKKDQFDLVISNVHMPDMDGFKLLELVGLEMDLPGITSAQNPIPIDMVLLLDYALVPARHQSDLPLKCGIQMSILMGGFASLFFIHPVKIQTVMSSQRENYLVVSLFQFMVQFTMASL

SEQ ID NO: 193610 - protein, 216 aa, Zea Mays
MPRAPVLFPCAPPCPQLAGCDPCSGFPGAVLLRALAPARISSAQPDSSTPRPYSTARPWVPARRRSSPAAHGSHVCRTRGHGLALLPQPRLLPRTACSVVSALLPRRARPCTPRSRAALPARRCSQLALSARRAPLSWFSASLSRATRLVVPRRAEFSSARSRVLFSACQCALSARSALIPNRVVEPVIPCSTPTSPARSKHDLVVRKSPKNPRIG

SEQ ID NO: 193611 - protein, 109 aa, Zea Mays
MNPNYTEFKFPQIKAHPWHKIFHKRMPSEAVDFVSRLLQYSPNLRCTALEALIHPFFDELRYPNSRLPNGRSLPHLFNFKPNELRGVPEEFVVQLIPQHAKKQCAFLGV

SEQ ID NO: 193612 - protein, 228 aa, Zea Mays
MNQRMPLIYVKLYMYQICRALAYLHNCVGVCHRDIKPQNILVNPHTHQLKLCDFGSAKVLVQGEPNISYICSRYYRAPELIFGATEYTTAIDVWSAGCVLAELLLGQVLGTPTRDEIKRMNPNYTEFKFPQIKAHPWHKIFHKRMPSEAVDFVSRLLQYSPNLRCTALEALIHPFFDELRYPNSRLPNGRSLPHLFNFKPNELRGVPEEFVVQLIPQHAKKQCAFLGV

SEQ ID NO: 193613 - protein, 148 aa, Zea Mays
MSICTCIFSQLMIKGTNKIMPTLLHVLLVSQVLNALFNLCKINKRRHEQATENRIIPHLMKFVMSDSPLRQKVEKTLLKKEAIQNLVKFFQDCPEQFFGHILDAFLKIITKSSRLNTTMATNGLTTLLIARLDHSNLVVAKVWRLEFI

SEQ ID NO: 193614 - protein, 119 aa, Zea Mays
MYTDYQHHLYDWQELLHYLCMIFFLKPILLLHFILFCITHVWITSQIRKAYVSSSPEVSVFITFLLTSKISLVVLNTRFYSTCLCFKVFEVLHVQHHLYYSSLLLTSNTVGRPYGRLMV

SEQ ID NO: 193615 - protein, 53 aa, Zea Mays
MQVPLVLHARGMPQRDVLNQGDPLAGAQAVAAGGEGRNAAAQFVHYPRALIGG

SEQ ID NO: 193616 - protein, 120 aa, Zea Mays
MQVPLVLHARGMPQRDVLNQGDPLAGAQAVAAGGEGRNAAAQFVHYPRLYIDHLSSISNASSIGSPCKRDAAARCSPSWRSTSWRSGCGSRRRRTKCCCSIRALSQSLDWWSGSRYPRAK

SEQ ID NO: 193617 - protein, 75 aa, Zea Mays
MKPAGPYLHSWYRFKDEVLRSFIYLRQLELTPTLWCGVHVRNRIMNAVFSAFHKLLYFHQNNLPSIGSEEIHNDL

SEQ ID NO: 193618 - protein, 184 aa, Zea Mays
MFYNITGDKTAGSLQKIYLDRIKLRLLYNERFGKYPSLEPLLDDLLPKKSPMIVVKCQNHLNLVVVNNVPLFFNIRDGPYMPTLRLLHQYPDIMKKFQVDRGAIKFVLSGANIMCPGLTSPGGALDDEVEEETPVAIMAEGKQHALAIGYTKMSAKDIRTINKGIGVDNMHYLNDGLWKMERLE

SEQ ID NO: 193619 - protein, 129 aa, Zea Mays
MSQNHLNLVVVNNVPLFFNIRDGPYMPTLRLLHQYPDIMKKFQVDRGAIKFVLSGANIMCPGLTSPGGALDDEVEEETPVAIMAEGKQHALAIGYTKMSAKDIRTINKGIGVDNMHYLNDGLWKMERLE

SEQ ID NO: 193620 - protein, 307 aa, Zea Mays
MEELIVLRRLIDLCFLFSKKPFPVFRELAGFSQEDVLIEEPKAGILKPAHTIIRDECTKSFLVLIRGTHSMKDTLTAATGAVVPFHLSLLDEGDVSKLVLGYAHCGMVAAARWIARGVTPCLREAVRQCPEYQIKIVGHSLGGGTAALLTYILREHKEFSSTTCVAFAPASCMTWELAESGKHFVTTVVNGADLVPTVSTASIDDLRSEVTASSWLNDLRDQIQQTRFLNVVYRSATALGTRLQSFSGARERVAGAGAFLRPVSNKTQVVMKQAQNVAQAVARSRSAFSSWSCMGARRRGNIVAPRP

SEQ ID NO: 193621 - protein, 175 aa, Zea Mays
MGTATMATAVGAAMLLYFVLSRRLAGEDVSARGGGGGGVGSGKRRRGRALRRPVQPPATWIEAVGTLAETLRFTYSETLGKWPIGDLAFGIKYLMRRQGNLHVASVYAGSDCIELKGPQIMEELIVLRRLIDLCFLFSKKPFPVFRELAGFSQEDVLIEEPKAGVNFEACPYNYT

SEQ ID NO: 193622 - protein, 77 aa, Zea Mays
MCEKWILAHISYAFGLPPKPAVTASLAHGHMLSCAQSVCSFVHVAVLFRTRRRVSFASAARTVRTRCRASLARNARY

SEQ ID NO: 193623 - protein, 89 aa, Zea Mays
MGRAPCCGKVGLKKGRWTREEDEILARYIEEHGEGSWRSLPKNAGLLRCGKSCRLRWINYLRAGLKRGNITEEEEDVIVKLHATLGNSH

SEQ ID NO: 193624 - protein, 207 aa, Zea Mays
MTRWQGLCETQRLENYLRTQESCAHAFDVTCPRRNVPQKLDTHLLRVECAESRAVCVRPFVYPRTAEEPQKLFTFPLHSTAQARQAHASCRISCSCTSQTDGEGAVLREGGVEEGEVDQGGGRDPGEVHRGARGRLMEITAQECWVAAVREELQAAVDQLPEGGSQEGEHHGGGGGRDRQASRHAWQQSYISRSWRSRFFKMQRPSR

SEQ ID NO: 193625 - protein, 140 aa, Zea Mays
MTEEAEMLVEKVKENGAEFDTKTCELFLDHYMGTEDMNSALNWLENMTKLSKKAEKLDQDRIYKFQKYFEEHKDADGAERFCNCLRTLGCIDGKAYESLLRTYLAAGKKSCSLRQQIKNDKVEICYDIGKLLKRLGDKGR

SEQ ID NO: 193626 - protein, 150 aa, Zea Mays
MMIRSHLKVGMTEEAEMLVEKVKENGAEFDTKTCELFLDHYMGTEDMNSALNWLENMTKLSKKAEKLDQDRIYKFQKYFEEHKDADGAERFCNCLRTLGCIDGKAYESLLRTYLAAGKKSCSLRQQIKNDKVEICYDIGKLLKRLGDKGR

SEQ ID NO: 193627 - protein, 81 aa, Zea Mays
MLRCALLTAASPPERLLPVSRVALSFSVKWLSRAPLTRAAFSSPARRDLSTPSPTMRKLILSFAHKYRLGLWKPQAEPRKV

SEQ ID NO: 193628 - protein, 291 aa, Zea Mays
MRTRGGSGFAGLQVACVVAALCLLLPTGSRAQLQVGFYNTSCPNAEALVRQVVTAAFANNSGVAPGLIRLHFHDCFVRGCDASVLLSVNPAGGKTERESPANDNLLGPDSTAEILIDGFGKKNLSIEDMVVLSGSHTIGRSHCFSFLSTNRQRLANGTISPAYQALLEALCPPNPGQFTPNTTEIDVSTPTVLDNNYYKLLPLNLGLHFSDDQLIRNGTLAPFASAFAANETLWKDKFAAAMIKMGNIEVKTGTTDEIRLNCSVVNPSSSSSTAGVIEMLFPAADEVATSS

SEQ ID NO: 193629 - protein, 248 aa, Zea Mays
MAAADQVLLAGCSAGGLAVILHCDQFQAFFPRSNNAAAAGGTTTTTTVKCLADAGLFLDAIDVSGGRSLRSYYSDIVAMQGVGPNLPPACTARLDTASCFFPQNVIDGVNTPIFLLNAAYDAWQIQESLAPSGADPSGAWRACKSNHSACDATQMKFLQGFRDQMVASVLGGRFAGSRSNNGLFINSCFAHCQSELPATWSWSHAAGASPAIQSRGIAKSVGDWYFGRAQVKAIDCPYPCDGTCRNII

SEQ ID NO: 193630 - protein, 115 aa, Zea Mays
MSRRLGFLTGEEPEVMLDAHVQAAFIVGVPFSKPGGHDFRANNITHSVSNLGATMLKHRLTPPPDEVYSLHRKLSGAFLACIKIGAVVPCREILFQVYEQYNFSDGHSDVESSAG

SEQ ID NO: 193631 - protein, 242 aa, Zea Mays
MSSGLRSLPPPTSPASPEAPRAVRRTLQAQDRCPPPNPPAPPPSCTSPTMKPRRRRKIMHWSVRRQRKRPRTPRGRRRPSELVQPPPLQPNLLPSRRTGPNLRHLLPIPRLCPNRRPLWPQRRLGRRGGGCGNGRFHPRPSPEHSGLGAGLAWGTVQESARRVMMRGAALKVGQMLSIQDESLVPPPVLAALDIVRQGADVMPRKQLNSVLDAELGPDWSSRLRSFDYEPLAAASIGQVGSA

SEQ ID NO: 193632 - protein, 220 aa, Zea Mays
MKDSSADVADDEDDSDAVSDNGEEDEDDYDEEDDGHMYHSHLTSRQHSGGGRRRGKREHGEDSAAAEDLEDEAAGGGKRARTGAAPDPSAMLQQLKSELAAAAAAAMDPQQARCWVRRRAVEVEEQQILLESHAYDLERQRLKWDRFRANKERDMERARLQNDRLRIQSRRLLLMLRHKEVELDMAEANSSSVDHHPGASPLAAHQQTIGSSPSTAGHPN

SEQ ID NO: 193633 - protein, 409 aa, Zea Mays
MYHEAKSSFAHHGVKFSNLEVDLPAMMAQKDKAVAGLTKGIEGLFKKNKVTYVKGFGKLSSPSEVSVDLIDGGSTVVKGKNIIIATGSDVKSLPGITIDEKKVVSSTGALCLSEIPKKLVVIGAGYIGLEMGSVWNRLGSEVTVVEFAPDIVPSMDGEVRKQFQRMLEKQKFKFMLKTKVVGCDTSGDGVKLTLEPAAGGEQNILEADVVLVSAGRTPFTSGIGLETLGVETDKAGRILVDKRFMTNVKGVYAIGDAIPGPMLAHKAEEDGVACVEFIAGKEGHVDYDTVPGVVYTHPEVASVGKTEEQVTALGIPYRVGKFPLLANSRAKAIDDAEGVVKVIAEKETDKILGVHIMAPNAGEIIHEAVIALQYGASSEDVARTCHAHPTVSEALKEACLQTFDKAIHI

SEQ ID NO: 193634 - protein, 139 aa, Zea Mays
MRWWCSTDRSWFKKLQECILPCTRTRVSFPSTHYRQMREEDLLAEDINKAAKISRIADILEQSDESSSMLTRKKECQVSLVDTELRRSLRLKKINPMFKNEGCLKKNCLMCAHDSSSLLAMSVKVIRNLATQFCSIDPQ

SEQ ID NO: 193635 - protein, 71 aa, Zea Mays
MLTRKKECQVSLVDTELRRSLRLKKINPMFKNEGCLKKNCLMCAHDSSSLLAMSVKVIRNLATQFCSIDPQ

SEQ ID NO: 193636 - protein, 147 aa, Zea Mays
MERLQEEVACSEERDRELSGIRAKTECLEAEATHLRSGRDEAHKDAKRLRGERTRLQQDLREVTPRAEEAESIVRVANTRLEEANSDLRREREMAGDLQKKFSEALDAMKAIQEVPKAAEDEVRKLSIACDGAIATQISFISGAYKP

SEQ ID NO: 193637 - protein, 644 aa, Zea Mays
MQPKVGYIAIDILTDTVEAATKPSVAAIDGLALGGGLEVAMACHARIATPTAQLGLPELQLGIIPGFGGTQRLPRLVGLTKSLEMMLLSKPIKGGEAHQLGLVDALVSPNDLVNTARQWALDIYECRRPWIKSLYKTDKLEPLGEAREILKFARAQAQKQAANLHHPLVCIDVIEEGIVAGPRAGLWKEATSFQELLFSDTCKSLVHVFFSQRATSKIPGATDLGLMPRKITKVAILGGGLMGSGIATAMVLSNYPVLLKEVNEKFLTAGINRIQANLQSRVKKGKMTEERYEKAMSLVTGVLDYERFKDVDLVIEAVIENVKLKQQIFSDLEKYCPSHCILATNTSTIDLNLIGEKTKAQDRIAGAHFFSPAHVMPLLEIVRTQHTSPQVVVDLLDVGKKIKKTPIVVGNCTGFAVNRMFFPYTQSALFYVDLGMDVYKIDRACTKFGMPMGPFRLADLVGFGVAVATGMQYLENFPERVYKSMLLPLMMEGNRAGEATQKGFYKYEGKRKATPDPEIMKYIEKSRSMAGVTPDPELMKLSEKDIVEMVFFPVINEACRVLDEGIAVKASDLDIASIFGMGFPPYRGGVMHWADSIGAKYIHGKLEEWTKRYGGFFKPCSYLAERAAKGIPLSAPTKKVQARL

SEQ ID NO: 193638 - protein, 461 aa, Zea Mays
MAAKVRTELDVGADGVAVITIYNPPVNSLSIDVLHSLKESYEEALRRNDVKAIVVTGKGGKFSGGFDISSFGGVQGGQTMQPKVGYIAIDILTDTVEAATKPSVAAIDGLALGGGLEVAMACHARIATPTAQLGLPELQLGIIPGFGGTQRLPRLVGLTKSLEMMLLSKPIKGGEAHQLGLVDALVSPNDLVNTARQWALDIYECRRPWIKSLYKTDKLEPLGEAREILKFARAQAQKQAANLHHPLVCIDVIEEGIVAGPRAGLWKEATSFQELLFSDTCKSLVHVFFSQRATSKIPGATDLGLMPRKITKVAILGGGLMGSGIATAMVLSNYPVLLKEVNEKFLTAGINRIQANLQSRVKKGKMTEERYEKAMSLVTGVLDYERFKDVDLVIEAVIENVKLKQQIFSDLEKYCPSHCILATNTSTIDLNLIGEKTKAQDRIAGAHFFSSYSAHFTTSCC

SEQ ID NO: 193639 - protein, 283 aa, Zea Mays
MLRTEVVKLCQDNNFQTGFFEGTDNSTVVDAYELKVRLEHILERISLISDAASTERPSQITDYLYIGGALAARSTHTLKHLGITHILCLCANEIGQSESQKPDLFEYRNFSINDDDNADIGDLFQDGSDFISYVDHLRGKVLVHCFEGKSRSATVVLAYLMLRKNCTLLEAWNMLKKVHRRAHPNDGFAKILLDLDKKLHGKISMEWQHKRPAMKVCPICGKNAGLSSSSLKLHLQKAHKKISSGSVDSAMTLEIQKALEAIKAGWGGSDSPVHKSQSHIEGF

SEQ ID NO: 193640 - protein, 591 aa, Zea Mays
MEEGTTEPGSFSRSSSFVGFEEWVALVRKRNGKASSCGRLGLRSTASSEVLELADPDSNVINPDPCDQVPEGILWERLGRVSMMDIESSDFSWTSLTSLHHTKHTATSTDPSEDDISRSFEVTVNSGGIVFIALFKAIENVDLPSKETAAVIKIAPSRMATQSERFGYELAKWLGVRTPQGRVIHSSSDEWQQVKDAVENARNASIASGDELEEMICAEVLEALELSRCLFLMNYVHGSALLENVMPFESRQAAEKTAEALGRVLILDLVLRNEDRLRCRPLGWRGNYANLLVANREAYANLDSLDDVYDSAIIRYKPEIIRSPQKQKQRRAVSISGSIGSDVSDLTLEDSYASSGHVFSSFNIVAIDSGVPRRPPASKRAKDQESYPKLVELTLNNFDYSSKLLFEVSFGKLGTPGHEEFDVPSDYSYNSPLSESDMVATVHSFRGGFRSALRDLQRFHIFLITLYQKLDGLLKIFFNLMYKCSNEYAREDAGTSDSPLCSVEPQGDSNDTDVPRHLRKPSRTLSRESLDQSSPCRDSFITRHFKGNGDSSRGLRLTMKLRDFNKYAKTTIFKQVFLKALIIALLLMLTS

SEQ ID NO: 193641 - protein, 587 aa, Zea Mays
MEEGTTEPGSFSRSSSFVGFEEWVALVRKRNGKASSCGRLGLRSTASSEVLELADPDSNVINPDPCDQVPEGILWERLGRVSMMDIESSDFSWTSLTSLHHTKHTATSTDPSEDDISRSFEVTVNSGGIVFIALFKAIENVDLPSKETAAVIKIAPSRMATQSERFGYELAKWLGVRTPQGRVIHSSSDEWQQVKDAVENARNASIASGDELEEMICAEVLEALELSRCLFLMNYVHGSALLENVMPFESRQAAEKTAEALGRVLILDLVLRNEDRLRCRPLGWRGNYANLLVANREAYANLDSLDDVYDSAIIRYKPEIIRSPQKQKQRRAVSISGSIGSDVSDLTLEDSYASSGHVFSSFNIVAIDSGVPRRPPASKRAKDQESYPKLVELTLNNFDYSSKLLFEVSFGKLGTPGHEEFDVPSDYSYNSPLSESDMVATVHSFRGGFRSALRDLQRFHIFLITLYQKLDGLLKIFFNLMYKCSNEYAREDAGTSDSPLCSVEPQGDSNDTDVPRHLRKPSRTLSRESLDQSSPCRDSFITRHFKGNGDSSRGLRLTMKLRDFNKYAKVKTFEVWIDKLSIINCLT

SEQ ID NO: 193642 - protein, 693 aa, Zea Mays
MGRPLRAGVWVSVQQPEGILWERLGRVSMMDIESSDFSWTSLTSLHHTKHTATSTDPSEDDISRSFEVTVNSGGIVFIALFKAIENVDLPSKETAAVIKIAPSRMATQSERFGYELAKWLGVRTPQGRVIHSSSDEWQQVKDAVENARNASIASGDELEEMICAEVLEALELSRCLFLMNYVHGSALLENVMPFESRQAAEKTAEALGRVLILDLVLRNEDRLRCRPLGWRGNYANLLVANREAYANLDSLDDVYDSAIIRYKPEIIRSPQKQKQRRAVSISGSIGSDVSDLTLEDSYASSGHVFSSFNIVAIDSGVPRRPPASKRAKDQESYPKLVELTLNNFDYSSKLLFEVSFGKLGTPGHEEFDVPSDYSYNSPLSESDMVATVHSFRGGFRSALRDLQRFHIFLITLYQKLDGLLKIFFNLMYKCSNEYAREDAGTSDSPLCSVEPQGDSNDTDVPRHLRKPSRTLSRESLDQSSPCRDSFITRHFKGNGDSSRGLRLTMKLRDFNKYAKIDSELSKEIEQWNDMLRTEVVKLCQDNNFQTGFFEGTDNSTVVDAYELKVRLEHILERISLISDAASTERPSQITDYLYIGGALAARSTHTLKHLGITHILCLCANEIGQSESQKPDLFEYRNFSINDDDNADIGDLFQDGSDFISYVDHLRGKVLVHCFEGKSRSATVVLAYLMLRK

SEQ ID NO: 193643 - protein, 632 aa, Zea Mays
MEEGTTEPGSFSRSSSFVGFEEWVALVRKRNGKASSCGRLGLRSTASSEVLELADPDSNVINPDPCDQVPEGILWERLGRVSMMDIESSDFSWTSLTSLHHTKHTATSTDPSEDDISRSFEVTVNSGGIVFIALFKAIENVDLPSKETAAVIKIAPSRMATQSERFGYELAKWLGVRTPQGRVIHSSSDEWQQVKDAVENARNASIASGDELEEMICAEVLEALELSRCLFLMNYVHGSALLENVMPFESRQAAEKTAEALGRVLILDLVLRNEDRLRCRPLGWRGNYANLLVANREAYANLDSLDDVYDSAIIRYKPEIIRSPQKQKQRRAVSISGSIGSDVSDLTLEDSYASSGHVFSSFNIVAIDSGVPRRPPASKRAKDQESYPKLVELTLNNFDYSSKLLFEVSFGKLGTPGHEEFDVPSDYSYNSPLSESDMVATVHSFRGGFRSALRDLQRFHIFLITLYQKLDGLLKIFFNLMYKCSNEYAREDAGTSDSPLCSVEPQGDSNDTDVPRHLRKPSRTLSRESLDQSSPCRDSFITRHFKGNGDSSRGLRLTMKLRDFNKYAKIDSELSKEIEQWNDMLRTEVVKLCQDNNFQTGFFEGTDNSTVVDAYELKVNLNVHSVLTTCTH

SEQ ID NO: 193644 - protein, 708 aa, Zea Mays
MATQSERFGYELAKWLGVRTPQGRVIHSSSDEWQQVKDAVENARNASIASGDELEEMICAEVLEALELSRCLFLMNYVHGSALLENVMPFESRQAAEKTAEALGRVLILDLVLRNEDRLRCRPLGWRGNYANLLVANREAYANLDSLDDVYDSAIIRYKPEIIRSPQKQKQRRAVSISGSIGSDVSDLTLEDSYASSGHVFSSFNIVAIDSGVPRRPPASKRAKDQESYPKLVELTLNNFDYSSKLLFEVSFGKLGTPGHEEFDVPSDYSYNSPLSESDMVATVHSFRGGFRSALRDLQRFHIFLITLYQKLDGLLKIFFNLMYKCSNEYAREDAGTSDSPLCSVEPQGDSNDTDVPRHLRKPSRTLSRESLDQSSPCRDSFITRHFKGNGDSSRGLRLTMKLRDFNKYAKIDSELSKEIEQWNDMLRTEVVKLCQDNNFQTGFFEGTDNSTVVDAYELKVRLEHILERISLISDAASTERPSQITDYLYIGGALAARSTHTLKHLGITHILCLCANEIGQSESQKPDLFEYRNFSINDDDNADIGDLFQDGSDFISYVDHLRGKVLVHCFEGKSRSATVVLAYLMLRKNCTLLEAWNMLKKVHRRAHPNDGFAKILLDLDKKLHGKISMEWQHKRPAMKVCPICGKNAGLSSSSLKLHLQKAHKKISSGSVDSAMTLEIQKALEAIKAGWGGSDSPVHKSQSHIEGF

SEQ ID NO: 193645 - protein, 429 aa, Zea Mays
MATQSERFGYELAKWLGVRTPQGRVIHSSSDEWQQVKDAVENARNASIASGDELEEMICAEVLEALELSRCLFLMNYVHGSALLENVMPFESRQAAEKTAEALGRVLILDLVLRNEDRLRCRPLGWRGNYANLLVANREAYANLDSLDDVYDSAIIRYKPEIIRSPQKQKQRRAVSISGSIGSDVSDLTLEDSYASSGHVFSSFNIVAIDSGVPRRPPASKRAKDQESYPKLVELTLNNFDYSSKLLFEVSFGKLGTPGHEEFDVPSDYSYNSPLSESDMVATVHSFRGGFRSALRDLQRFHIFLITLYQKLDGLLKIFFNLMYKCSNEYAREDAGTSDSPLCSVEPQGDSNDTDVPRHLRKPSRTLSRESLDQSSPCRDSFITRHFKGNGDSSRGLRLTMKLRDFNKYAKVKTFEVWIDKLSIINCLT

SEQ ID NO: 193646 - protein, 234 aa, Zea Mays
MICFCSLVPSILNQDDPQGPSTAPPPPDSPSNDNDDMKSVLSLDDGRWSVSADEHTSFTSANLEEELLQLNIKQPSPPPVLAEVQRPISPSRVADPTPGLPTSGTARFQNLHVPIKLMDCFLRVAESNTKRSLETCGVLAGTLKNRTFYVTTLIIPKQKSTSVTCEATNEEELFEVQDMGSLFTLGWIHTHPTQSCFLSSVDLHNHYSYQVMLPEAIAIVMAPTDTTRWYGRDP

SEQ ID NO: 193647 - protein, 212 aa, Zea Mays
MMVDVLAEVQRPISPSRVADPTPGLPTSGTARFQNLHVPIKLMDCFLRVAESNTKRSLETCGVLAGTLKNRTFYVTTLIIPKQKSTSVTCEATNEEELFEVQDMGSLFTLGWIHTHPTQSCFLSSVDLHNHYSYQVMLPEAIAIVMAPTDTTRKHGIFHLTDPGGMGVIHDCQERGFHPHKAPLDGSPIYKQCSHVYMDTDIKFDMIDLRER

SEQ ID NO: 193648 - protein, 201 aa, Zea Mays
MHLTVMSLSAAVANGAAAYRYDTIQPVARLRFCGLRRKAHRLHSPRYSRHLVAARRSVVVAATAGNGAAASGTFDYDLVIIGAGVGGHGAALHAVEKGLKTAIIEGDVVGGTCVNRGCVPSKALLAVSGRMRELQDEHHMKSLGLQVSSPGYDRQVVADHANNLASKIRSNLTNSMKALGVDILTGIGTIVVKLYLLVIMH

SEQ ID NO: 193649 - protein, 321 aa, Zea Mays
MHLTVMSLSAAVANGAAAYRYDTIQPVARLRFCGLRRKAHRLHSPRYSRHLVAARRSVVVAATAGNGAAASGTFDYDLVIIGAGVGGHGAALHAVEKGLKTAIIEGDVVGGTCVNRGCVPSKALLAVSGRMRELQDEHHMKSLGLQVSSPGYDRQVVADHANNLASKIRSNLTNSMKALGVDILTGIGTIVGKQKVRYGKVGFPDNEITARNIIIATGSVPFVPKGIEIDGKTVFTSDHALKLESVPEWIAIVGSGYIGLEFSDVYTALGSEVTFVEALDQLMPGFDPEIAKLAQRILISPRKIDYHTGVFASKQRMVSLF

SEQ ID NO: 193650 - protein, 1187 aa, Zea Mays
MNPNKILSWNVRGMNSSVRQDSVRELVVSSQVDVVCVQETKMQNISTRTILSMLGAEFTDYVYLPSTGASGGILITWKRHIGHTGQQRIDNHSVSVQLRMEQGQAWWLTCVYGPQGDDEKILFLQELRDVRTACAGPWLVAGDFNLIYKTSDKNNSNFNRAMMGRFRDLINDLGLKEIPLVGRKFTWSNQQDNSVLVKLDRVFCTVDWELTFPRVLLHSVASLDSDHCPLLLGLSDNRPGKRRFHFESFWPKLEGFQEEVHSAWNSVEAVRCPFQTLEKKLKMTARRLQGWSDKQVGHVRLQLALAKELLHRLEMAHDERPLTPAEIWLINRLKKQSLMLSSFKRTMARLRSRISWLKEGDANTRFFHIHARHRKRKNFVAMLVDGDRILTNHCEKAAAVDQFYTNLIGQCGNRERTIDLDAIGLSRHNLENLDSPFSEQEVLETIKGLPLDKAPGPDGFTGRFYRECWGSIKAEVMAAVRAVWSRNFNNFHKLNTAFITLIPKKEGAEQVKDFRPISLVHSFAKLITKILANRLAKRLNELVSPIQSAFIKGRFIQDNFMLVQQTARLFHQQKLPRLLLKLDITKAFDSVAWPFLIEVMQQIGFGQIWRDIVCGLLASSTTQVLLNGSLGERLAHRRGLRQGDPLSPMLFILVMDVLGLLFAKAEEAGLLQQLSRRKKLHRFSIYADDVAVFLHPTAAETSITLDILQLFGDASGLINNVQKSNAYPIQCSEEILMDVQSLLPCEMATFPCKYLGLPLSLHKLSRQQFQPFVERIADQLPNWKADLMSRAGRRIQVQHVLTGMTVYLAMAIDIPQWTLDAIDKIRKGFLWRGTKEAKGGHCLVAWGKVCRPLQLGGLGISSLPELCWALRMRWLWLQKTDMGRPWANLPIQVPNKARAFFSMALVSMIGDGSNTLFWNDRWLHGTRIADIAPSLHKSIPRRIANKRTVKEALVNRKWISDIKGALTVRVLVDYLNLWESLSGIELQPNIRDKHVFSLAADGKYTAKAAYNGLFLGSASFDHYKRIWRSWAPSKCRFFMWLVAHNRCWTADRLAKKGLNHPQRCLLCDQDDETMNHLLISCVFTRIFWYMLLRKFGLHALAPQPALTSFLEWWKGAAEAVQGMVKKGLNSLIMLGAWKIWNLRNRCVFDGETPSLSRILQQAEEERNLWVLAGAKGLSFLAAPLLVV

SEQ ID NO: 193651 - protein, 430 aa, Zea Mays
MVSVMEDNFSRMQTANHLLLITDYAALLSATMRRYGYPVGMLLDVLAKHRDKYHDLLLADCRRQVAEALAADKFDQMLMRKEYEYSMNVLAFGIQSSDITPAFPYVAPFSCTVPDICRIVRSFIEDSVSFMAQGGGGDTYAAVKKYLGRILSEVVDASIQKLVDSGSGLSVSQAMQVAANMSVMERACEFFTRHAAQLCGVPLRAVDRGRRDFPLRRSRDAAEALLLRLLCAKVDEFMRQSDGVNWMADDAPPGGNEYANEVIIYLETLTSTAQQILPLPVLRRVLVAVLAHISERIIELFLNDSVKRFNANAVTGIDTDLKMFETFAEGMSSLFVDSGQESAKNEMKAALVEARQLVNLLMSNSPETFLNPVIREKSYNKLDYRKVAIISEKFRDTSESYFSTFGTRGARQNPKKKSLDTLIKRLREAS

SEQ ID NO: 193652 - protein, 499 aa, Zea Mays
MGALTDSRKRLSADRCLSADHRLPYPSFPPPPLTPPSKRTKLATFPELDPSTSAVPPIRPSPQIIHSAAAASASFTPGPSSSSTIASTPLPHRRRLPPPPPLPRPIHGPQRILRVFRLGGAARTHAAGRSLFSPSSPLPCSLGFQQYVELVNSVSHPAPSTPAATTDATRQAVPLEVVAIEEEEEGEEEEEDEDERKQQDEEEVRGSVVVRRVPQYKELYEKSRKRDAKLKTLEFEVRLAQVGRLSLERLAEALPRITPKKEEVPEPFVPLTDEDEEMVRRALHGKNSRERLAVHEPSNIVITREILQCLNNQEWLNDEVINLYLDLLKERELREPRKFLKCHFFNTFFYKKLISSGYDYKAVRRWTTKRRLGYSLIDCDKIFVPIHKEVHWCLAVINIRDKKFQYLDSLGGMDTRVLRILAKYIVDEVKDKSDQQIDALSWKQESVENLPLQENGWDCGMFMLKYIDFYSRDMDLIFGQQMHYFRRRTAKEILSLRAE

SEQ ID NO: 193653 - protein, 1507 aa, Zea Mays
MALASQPPWWLTTEACDLPSAPAAGLGEWVAFLFLSTCSQQMLLSAASAVFLVALLCLGAAKLISTRRRRHGGGALNGDKQPLLDRAGGRAGVRVGAGFVVALAASGVLAAFYASLLVLSLVNRGGGEGEALEAVFLALQCAAHLAAAAVVAHEKRFRAAAHPLALRLYWLAAPALTALLAGTSVARLVVAAARLPDDALAIAALVLSLPLPVLSILGSTGISVAVVNDATGAAEEETASNKATEKNVTPYATASWASRATWAWMNPLVQRGHRAALELSDVPTLAPSHRPERMHELFTLHWPSAWASKDNNPVRHTLFRTFWAQFLLNALLALLRLTVMYVGPTLIQSFVDFTSAGGQRPFGEGARLVATLLAAKCAEALCSHQYNFHCQKLGMQIRGALIVALYRKGLRLSCSARQKHGLGMIVNYMAVDAQQLSDMMLQIHYLWLMPLQVGVALGLLYTYLGPPVTSALIGVAGVMVFVLLGTRRNNRYQFSLMKERDQRMKATNEMLNYMRVIKFQAWEEHFNARIGRFRRLEFGWLSRFMYSISGNIIALWSAPVVVSALVFATCVLAGVRLDAGLVFTATSFFKILQEPMRNFPQAMIQASQAMISLQRLDSYMTSAELDEGSVERDPAAASGGMAVQVKDGVFAWDDEVDAGQEVLRGIDLDIRTGALAAVVGMVGSGKSSLLGCILGEMRKFSGKVCGSTAYVAQTAWIQNGTIEENILFGKPMHRERYKEVIRVCCLEKDLEMMEFGDQTEIGERGINLSGGQKQRIQLARAVYQDFNIYLLDDVFSAVDAHTGTEIFKECVRGALKNKTIVLVTHQVDFLHNADIIYVMKDGMIVQSGKYDELLQAGTDFAALVAAHDSSMELVESAAPASERELPLSRQPSSKNAASNGDSSSSSIVAPKAEKASARLIKDEERASGHVSFTVYKQYMTEAWGWWGPLVVVAVSVVWQCSLMASDYWLADQTSDGNETSFQPSLFINVYAIIAAVSVVLVAARSFIVAFIGLQTADRFFKQILNSILHAPMSFFDTTPSGRILSRASSDQTNVDLFLPFFVWMSVSMYITVISVLIVTCQVAWPSVIAIIPLVILNIWYRGYYLSTSRELTRLESITKAPVIHHFSETVQGVMTIRCFRKEENFLQENLNRVNSSLRMDFHNNGANEWLGFRLELIGSFVLCFTAVLMVTLPSNFVKPEYVGLSLSYGLSLNQVLFWAIWISCFIENKMVSVERIKQFTNIPSEATWRIKDCLPDSNWPTKGDINVIDLKFRYRHNTPLVLKGITISIHGGEKIGVVGRTGSGKSTLIQALFRIVEPSEGRIIIDGVDICTLGLHDLRSRFGIIPQEPVLFEGTIRSNIDPLEQYSDDEIWQALGRCQLKEAVASKPEKLDASVVDNGENWSVGQRQLLCLGRVMLKHSRILFMDEATASVDSQTDAVIQKIIREDFAACTIISIAHRIPTVMDCDRVLVIDAGLAKEFDRPANLIERPSLFGALVQEYANRSSDV

SEQ ID NO: 193654 - protein, 1237 aa, Zea Mays
MALASQPPWWLTTEACDLPSAPAAGLGEWVAFLFLSTCSQQMLLSAASAVFLVALLCLGAAKLISTRRRRHGGGALNGDKQPLLDRAGGRAGVRVGAGFVVALAASGVLAAFYASLLVLSLVNRGGGEGEALEAVFLALQCAAHLAAAAVVAHEKRFRAAAHPLALRLYWLAAPALTALLAGTSVARLVVAAARLPDDALAIAALVLSLPLPVLSILGSTGISVAVVNDATGAAEEETASNKATEKNVTPYATASWASRATWAWMNPLVQRGHRAALELSDVPTLAPSHRPERMHELFTLHWPSAWASKDNNPVRHTLFRTFWAQFLLNALLALLRLTVMYVGPTLIQSFVDFTSAGGQRPFGEGARLVATLLAAKCAEALCSHQYNFHCQKLGMQIRGALIVALYRKGLRLSCSARQKHGLGMIVNYMAVDAQQLSDMMLQIHYLWLMPLQVGVALGLLYTYLGPPVTSALIGVAGVMVFVLLGTRRNNRYQFSLMKERDQRMKATNEMLNYMRVIKFQAWEEHFNARIGRFRRLEFGWLSRFMYSISGNIIALWSAPVVVSALVFATCVLAGVRLDAGLVFTATSFFKILQEPMRNFPQAMIQASQAMISLQRLDSYMTSAELDEGSVERDPAAASGGMAVQVKDGVFAWDDEVDAGQEVLRGIDLDIRTGALAAVVGMVGSGKSSLLGCILGEMRKFSGKVKVCGSTAYVAQTAWIQNGTIEENILFGKPMHRERYKEVIRVCCLEKDLEMMEFGDQTEIGERGINLSGGQKQRIQLARAVYQDFNIYLLDDVFSAVDAHTGTEIFKECVRGALKNKTIVLVTHQVDFLHNADIIYVMKDGMIVQSGKYDELLQAGTDFAALVAAHDSSMELVESAAPASERELPLSRQPSSKNAASNGDSSSSSIVAPKAEKASARLIKDEERASGHVSFTVYKQYMTEAWGWWGPLVVVAVSVVWQCSLMASDYWLADQTSDGNETSFQPSLFINVYAIIAAVSVVLVAARSFIVAFIGLQTADRFFKQILNSILHAPMSFFDTTPSGRILSRASSDQTNVDLFLPFFVWMSVSMYITVISVLIVTCQVAWPSVIAIIPLVILNIWYRGYYLSTSRELTRLESITKAPVIHHFSETVQGVMTIRCFRKEENFLQENLNRVNSSLRMDFHNNGANEWLGFRLELIGSFVLCFTAVLMVTLPSNFVKPSMLVCHYHMVYLSTRCCSGPSGSVASLKIKWSQLRG

SEQ ID NO: 193655 - protein, 77 aa, Zea Mays
MVLECHRNLHYSPYSAGNYNSHARVPACIYMVHYQIPLPRLYAAVQLFLPSMSVFVTALCVGSPLRINIKVVCRILD

SEQ ID NO: 193656 - protein, 114 aa, Zea Mays
MEDVHLSPKNTHAHALLDLRSSEAKLFIKMALFRLVVWHVMMASNHQGSGLLEKAKEEFGSHFDDYFQILGVVCISFCSEKETYLSGSLDHTVLLWDQRAEKSQVKLMMLCTIV

SEQ ID NO: 193657 - protein, 85 aa, Zea Mays
MALFRLVVWHVMMASNHQGSGLLEKAKEEFGSHFDDYFQILGVVCISFCSEKETYLSGSLDHTVLLWDQRAEKSQVKLMMLCTIV

SEQ ID NO: 193658 - protein, 85 aa, Zea Mays
MVLECHRNLHYSPYSAGNYNSHARVPACIYMVHYQIPLPRLYAAVQLFLPSMSVFVTALCVGSPLRINIKLVIILLVLGFLSQMM

SEQ ID NO: 193659 - protein, 93 aa, Zea Mays
MLVAPPLPLSPPLEMPSCPRPRSAPPVPPSHFHPHSSRHRTPVRDRRRWTWTGICDGRSGGWCHARRSTQTAAACAGPRRRLGTRPWTTTQTR

SEQ ID NO: 193660 - protein, 171 aa, Zea Mays
MERLKINLLLQGNFHLPESQRGKRNCASRYAITAGGRCHGRWREGGGDGSSVVGPPRVVPPLRCSCTGAASAVHHQPRLNGHRRQRAPRRGRLPGYGPLPPRGARLYPALRRRVCQRRHALGGLAPLHARRRLRRPPLGARPRRRRRLRVPDESLPRASVALPSSRQGERL

SEQ ID NO: 193661 - protein, 523 aa, Zea Mays
MAADAAAAAMSATSLCDDLEPATVRTRIRDVLAAGAARAGDRVVVGGWVRTGREQGKGSFAFLELSDGSCAATLQAIVDAAVHPLARLTATGTSVLVEGVIKEPPEGTKQNVELKVSRVLEVGEVDAAVYPLPKGKVKLTLEKLRDVVHLRSRTNTIGAVARIRHQLAYASHRFFDENGFLYVHTPIITTSDCEGAGEMFQVTTLFSQAEKTEKELRENPKPSDSEIEAAKVLVKEKGDVVAQLKAAKASKQEISTAVDELNRAKEIVSKLEERFKLKPGIPRKDDGSIAFENDFFKRQAFLTVSGQLQVETYACALSSVYTFGPTFRAENSHTSRHLAEFWMVEPEIAFANLQDDMNCAEKYVQYLCKWLLDHCQEDMEFMVKNYDKSAIERLELVSSTPFVRISYTKAVELLKNVTDKKFDNKVEWGIDLASEHERYLTEDIFKKPVIVYNYPKGIKAFYMRLNDDDKTVAAMDVLVPKVGELIGGSQREERLDVLKQSHRLHLHAKTRWNLAYFTWQLIT

SEQ ID NO: 193662 - protein, 88 aa, Zea Mays
MLGMRWRCFGVEHSVARKPSIKHGDQPAAGESLVVVVQHAGSAPPRERVYLRCRPREDTCHLRSKLVPGISSPRQVVPLITSFYSLMF

SEQ ID NO: 193663 - protein, 114 aa, Zea Mays
MLNIRSNTFIVLVRKRHTIWYFITTIFINIPKVSMRKFLNYTPATSIFGVLQIKTIVACGARMKGSFLYQQLERLMLFNNPSSFILPFLLSVSNQSHRKITTHRCPPLSALYCN

SEQ ID NO: 193664 - protein, 124 aa, Zea Mays
MKRETMPSWLELLLATQFFTTCANHLLASRNECNLFCTQCETKPAAFCNYCRSSDHSTHRVIQIRRSSYHDVVRVSEIEDILDVSDVQTYVINSARIVFLNERPQLRASSVPICKAPTSSTQLQ

SEQ ID NO: 193665 - protein, 395 aa, Zea Mays
MCFNCDEPYVRGHHCKRLFYLESSDFDMEDGAVDAAPNAKPDDNLPPQDVTTATACVVSLHALEGIRTENTMIMLVVLKGVRFLALLDTGSTHNFLQGAAMARLGLTPLNGDQLRVTVANGDRLRCAGIARHVPISIAGDEYTITWVDIDLGCFDFLRTLGDITWNLETVTLAFQCDVHRIVWNGVQGKEATCTTTPTTVVAVAEPQQPLLDRLLQEHSAIFEEPRGLPPARPYDHRIHLLSGTAFVVVRLYRYPQLQKDELEHQCAAMLAQGIIRPSTSPFSALMLLVRKADKTWRFCINYRSLNAKTSKDKFSISMVDELHGAHFFTKLDLRSGYHQVRMWPDDIANTAFHTHHSHYEFLVMPFSLSNAPATFQALMNDVLRPLPEAICLGIF

SEQ ID NO: 193666 - protein, 110 aa, Zea Mays
MGRAAAPLLPRPIIAQFHLHPHHLVHQSCLPYLHATAPVAAASALFAPGPTSSPSVRVSRPRRHASMSAAADSSSSIVSGDAAVSSLSPDSIEHNDLLIVGPGVLGRIRR

SEQ ID NO: 193667 - protein, 198 aa, Zea Mays
MARGPHPSGPRGPFSFSTQRRRLAVRAPRPRPLLFPAPVTAAATSPTPSPLNLLVSEEMAAINVEVMVASINGRPTVFSPPGALSLSIKGLDRALLSLPPYPCSLSLSPTRAVAGAAPCSPPELAVVPRRSSFGCWRRARAPLNLVVPAQSVVDRVVPAPCPRASPPSVRPRLKTTQNFDLFFKACFELVYEFVIIVL

SEQ ID NO: 193668 - protein, 203 aa, Zea Mays
MLDIRDGNSWYNMGNAYLTSFFVGGAWDHTKLHHSVKAYQNAEKDKTMNLNPDLYYNWATGQLRSKRLASFVSSLSGVKLKSSHKKATISTLSVGLNKAVAVLGKVILFIRHDNVAPLYYLICDLERSYFILSVYGLHNDAIKDGDQVVLFEPYYRILDASCKDKHYQFKSIRVDFPEQILVNERVPAPHHVARASIHAHNKS

SEQ ID NO: 193669 - protein, 231 aa, Zea Mays
MLERSMAQGSVDQALLVEESIKHAKEAIMLDIRDGNSWYNMGNAYLTSFFVGGAWDHTKLHHSVKAYQNAEKDKTMNLNPDLYYNWATGQLRSKRLASFVSSLSGVKLKSSHKKATISTLSVGLNKAVAVLGKVILFIRHDNVAPLYYLICDLERSYFILSVYGLHNDAIKDGDQVVLFEPYYRILDASCKDKHYQFKSIRVDFPEQILVNERVPAPHHVARASIHAHNKS

SEQ ID NO: 193670 - protein, 250 aa, Zea Mays
MSTQNLLTGACTSSAPAPSEAEEGDRTPLADAANAAEELYRLRDTFFPRDPSEKVAALRARADAALALLDAFPSEQKKSRQLRGVYEFLRGKILDVFPDYHKEAEDHLSKAVKLNPSLVDAWLCLGNCIWKKGDLSAAKNCFSLALSKGSDKKILCQISMLERSMAQGSVDQALLVEESIKHAKEAIMLDIRDGNSWYNMGNAYLTSFFVGGAWDHTKLHHSVKAYQNAEKDKTMNLNPDLYYNWATTNI

SEQ ID NO: 193671 - protein, 249 aa, Zea Mays
MSTQNLLTGACTSSAPAPSEAEEGDRTPLADAANAAEELYRLRDTFFPRDPSEKVAALRARADAALALLDAFPSEQKKSRQLRGVYEFLRGKILDVFPDYHKEAEDHLSKAVKLNPSLVDAWLCLGNCIWKKGDLSAAKNCFSLALSKGSDKKILCQISMLERSMAQGSVDQALLVEESIKHAKEAIMLDIRDGNSWWTITIQKISIICVILEWSQIEIIAQESHHKHSISGFEQSRCCFGKSNSVHKT

SEQ ID NO: 193672 - protein, 419 aa, Zea Mays
MKKIEDNNTLVFIVDLKADKKIKAAVKKMYDIQAKKVNTLIRPDGKKKAYVKLPCMGVAYETTKSGVGVASMGVMRLKLVMKSIVLIVMARVLGIYDLIIAAIISAGINPKAKPKPYFLDGYAHLSFELACSLAGLVAGMAISIVRDTRVSVADCEGYPYLFLSISIEWNGGSDTMDEILVRIQQLEEAVVKRERAMAYTFNHQWRARSATSLGNFSYEVGKGGWGWSWMDRWIVARPWESRSMVHPENPKKAQAKKENTTNPLALKLQGSITLSNNINDRKTLKKKPLPSASLTDQKKPSPSPSSDQKKPVPKEQRAKAAGTPPKPKAKYMKGSQEKKPQPQQRVSPPLSQEAKAYAQENGLFFMETSAKIATNVNDVFYEIGGIQWEAVHIDQARWHGGQPENGGKKQGKDNATKPP

SEQ ID NO: 193673 - protein, 408 aa, Zea Mays
MKKIEDNNTLVFIVDLKADKKIKAAVKKMYDIQAKKVNTLIRPDGKKKAYVKLPCMGVAYETTKSGVGVASMGVMRLKLVMKSIVLIVMARVLGIYDLIIAAIISAGINPKAKPKPYFLDGYAHLSFELACSLAGLVAGMAISIVRDTRVSVADCEGYPYLFLSISIEWNGGSDTMDEILVRIQQLEEAVVKRERAMAYTFNHQWRARSATSLGNFSYEVGKGGWGWSWMDRWIVARPWESRSMVHPENPKKAQAKKENTTNPLALKLQGSITLSNNINDRKTLKKKPLPSASLTDQKKPSPSPSSDQKKPVPKEQRAKAAGTPPKPKAKYMKGSQEKKPQPQQRVSPPLSQEAKAYAQENGLFFMETSAKIATNVNDVFYEIAKKLLQGQQVQNPQGGMVLNQRPPE

SEQ ID NO: 193674 - protein, 289 aa, Zea Mays
MSQNVQPYRHAMKPSTNMLYPKEETLSRHSILGPNGLQGNLGQWARPVTGIRIEYPHNPELTQSDISSLMPTTLNQDGLRGPSTASQGKSDDMLSVLSLDDGRWSLPLEPASVSPGLEAEFSHLNIRQPSPPPVLAQVHPEHGQIPPSRVADPRPGLATSATGRYQNLHVPVALMECFLRLAELNTAKNLETCGILAGTLKKRTFYVTTLIIPKQKSTSDSCQATNEEEIFEVQDKGSLLSLGWIHTHPTQTCFLSSIDLHNHYAYQIMLPEAIAIVMAPTDTTRYYFH

SEQ ID NO: 193675 - protein, 293 aa, Zea Mays
MSQNVQPYRHAMKPSTNMLYPKEETLSRHSILGPNGLQGNLGQWARPVTGIRIEYPHNPELTQSDISSLMPTTLNQDGLRGPSTASQGKSDDMLSVLSLDDGRWSLPLEPASVSPGLEAEFSHLNIRQPSPPPVLAQVHPEHGQIPPSRVADPRPGLATSATGRYQNLHVCQATNEEEIFEVQDKGSLLSLGWIHTHPTQTCFLSSIDLHNHYAYQIMLPEAIAIVMAPTDTTRKHGIFHLTEPCGMGVIHDCDATGFHPHEEPLDGTPIYEHCSHVYMNPNVRFEMTDLREA

SEQ ID NO: 193676 - protein, 399 aa, Zea Mays
MASELSHGTRRDVCIESMARPIAVDHRISIHYYFRIADNLLRQANVYREEKNVLDLYILLLRYSSLLLETIPKHRDYNAFKAREKEFLKKGPHNSEKILGIVNELESLKPVVQQQIATGNSRGADEPNGVYGTYAASSELEHHTPGPYVSKSLSGSPTRLLQKPLPGSKHQAAMSQNVQPYRHAMKPSTNMLYPKEETLSRHSILGPNGLQGNLGQWARPVTGIRPVALMECFLRLAELNTAKNLETCGILAGTLKKRTFYVTTLIIPKQKSTSDSCQATNEEEIFEVQDKGSLLSLGWIHTHPTQTCFLSSIDLHNHYAYQIMLPEAIAIVMAPTDTTRKHGIFHLTEPCGMGVIHDCDATGFHPHEEPLDGTPIYEHCSHVYMNPNVRFEMTDLREA

SEQ ID NO: 193677 - protein, 345 aa, Zea Mays
MASELSHGTRRDVCIESMARPIAVDHRISIHYYFRIADNLLRQANVYREEKNVLDLYILLLRYSSLLLETIPKHRDYNAFKAREKEFLKKGPHNSEKILGIVNELESLKPVVQQQIATGNSRGADEPNGVYGTYAASSELEHHTPGPYVSKSLSGSPTRLLQKPLPGSKHQAAMSQNVQPYRHAMKPSTNMLYPKEETLSRHSILGPNGLQGNLGQWARPVTGIRIEYPHNPELTQSDISSLMPTTLNQDGLRGPSTASQGKSDDMLSVLSLDDGRWSLPLEPASVSPGLEAEFSHLNIRQPSPPPVLAQVHPEHGQIPPSRVADPRPGLATSATGRYQNLHVWH

SEQ ID NO: 193678 - protein, 307 aa, Zea Mays
MGFRGIWVNGQDLLLIEYPHNPELTQSDISSLMPTTLNQDGLRGPSTASQGKSDDMLSVLSLDDGRWSLPLEPASVSPGLEAEFSHLNIRQPSPPPVLAQVHPEHGQIPPSRVADPRPGLATSATGRYQNLHVPVALMECFLRLAELNTAKNLETCGILAGTLKKRTFYVTTLIIPKQKSTSDSCQATNEEEIFEVQDKGSLLSLGWIHTHPTQTCFLSSIDLHNHYAYQIMLPEAIAIVMAPTDTTRKHGIFHLTEPCGMGVIHDCDATGFHPHEEPLDGTPIYEHCSHVYMNPNVRFEMTDLREA

SEQ ID NO: 193679 - protein, 279 aa, Zea Mays
MEPVQTPQYALFQDSKKIGEVQHANQFMFPGYGYPPAYPFPTIPLVSNIQAEGYQTKPAGTSYRTSEDYLKQSSSTEMSQDIPSRPLTMTPQEKIEKLRRRQQMQALIAIQQQQQQFGQQGPGSDTMVSQAYTPGNKNPDSLGSSIVIDENTNKLDTKTRLCIRDSLLRLVHSATERKIDGDRSTNKTNKDEDEASEDASTRKTRSPNKEAETTTNPIDRIVAHLLFHRHCSKVAKATKEIISSIPLTLEPEPKVPLGTPRVPSKDQRDEQEIVLQPSQ

SEQ ID NO: 193680 - protein, 334 aa, Zea Mays
MDTAVLSIPVPVEAHKRPVWSRRKPEERGKSKISSSTSGFSHSKVESSSTNLQTPMEPVQTPQYALFQDSKKIGEVQHANQFMFPGYGYPPAYPFPTIPLVSNIQAEGYQTKPAGTSYRTSEDYLKQSSSTEMSQDIPSRPLTMTPQEKIEKLRRRQQMQALIAIQQQQQQFGQQGPGSDTMVSQAYTPGNKNPDSLGSSIVIDENTNKLDTKTRLCIRDSLLRLVHSATERKIDGDRSTNKTNKDEDEASEDASTRKTRSPNKEAETTTNPIDRIVAHLLFHRHCSKVAKATKEIISSIPLTLEPEPKVPLGTPRVPSKDQRDEQEIVLQPSQ

SEQ ID NO: 193681 - protein, 447 aa, Zea Mays
MQYGLNSMSVMTILGFAQRGQKKTQYLFPGSPKTMRKRWLVLLPSLNSLQVFKMDIKGRKKQTASHTSAHISPTQIDMESWPGLPSLNPTLDRNYSDDNIASTYLDFCAATSLQEVTRNSTEQLDGKSEVFGNDQEEKSNSFLDCDWGNIGGFDDFDRLFSHSDSIFGNEIVANDSDFLSASSNLMDTAVLSIPVPVEAHKRPVWSRRKPEERGKSKISSSTSGFSHSKVESSSTNLQTPMEPVQTPQYALFQDSKKIGEVQHANQFMFPGYGYPPAYPFPTIPLVSNIQAEGYQTKPAGTSYRTSEDYLKQSSSTEMSQDIPSRPLTMTPQEKIEKLRRRQQMQALIAIQQQQQQFGQQGPGSDTMVSQAYTPGNKNPDSLGSSIVIDENTNKLDTKTRLCIRDSLLRLVHSATERKIDGDRSTNKTNKDEDEASEDASTRKTSLY

SEQ ID NO: 193682 - protein, 70 aa, Zea Mays
MERLHPSNYYNKLCTLGTIRTCNNYNSSYVVKLELCKCKICFVKSSALSPKCVCIECDYCNMHECARSLG

SEQ ID NO: 193683 - protein, 531 aa, Zea Mays
MGRRRRFAQLDDDDDDDEDVPINFKPSGGASSSDAKPRKPQPPPQQRREQEAETKTRRRRGRPKRRRDPGSEDEEPEELELQTEDPREEEITEAVPVAVGDPVKITGKGKKQKKHYASFEYEGNSFELEDPVLLTPEDSNQKPYVAILKDITETDGSLYVTGQWFYRPEEADKKEGGFWVARDTRELFYSFHTDDVPAESVMHKCVVHFIPQQKQIPSRKQHPGFIVQKVYDAVEKKLWNLTDKDYEDNKQQEIDLLVKKTIDRIGQLPDLEPEETPLENNYLSNKRGLRKKPVNPIDVTREPPVGKSEQFAKAETPGSDKIRNYDTLVKYKVLTGHSHRDRWLDKLIESIPLASKENAGTSADANSTAKSSISGSPAKDVGSAENEKSYGLDVVVEIMTALERSAYEALGTDFGKYNQKLRQLQFNIKNISKLRRRLMDKELDPPVLLTMSPDELKTSLGDPCLVVQDCARRSAVQHLLREANQIKHLHRGGTQLFQILLAGSKDTAPARKCSYADFAEYSPEDVGSHRC

SEQ ID NO: 193684 - protein, 83 aa, Zea Mays
MTVILSLLPRSAASVANLFEHIPGSLTVSLIIDSTSWLLTTSHRPSLAITRNSSSADKAVSITSGCAVTAGLRSSSPIDLVTC

SEQ ID NO: 193685 - protein, 59 aa, Zea Mays
MPLSLLPSSLSLYLSLSSSPCSSSLLPWSWRPNPPMLLPHLGSAPMASPPPLRQQGVEC

SEQ ID NO: 193686 - protein, 58 aa, Zea Mays
MPLSLLPSSLSISLSSSPCSSSLLPWSWRPSPPMLLPHLGSPPMASPPPLRQQGVDTP

SEQ ID NO: 193687 - protein, 77 aa, Zea Mays
MPLSLLPSSLSISLSSSPCSSSLLPWSWRPSPPMLLPHLGSPPMASPPPLRQQGVGPREDERASDVVPPTRCSWWTT

SEQ ID NO: 193688 - protein, 111 aa, Zea Mays
MKGEVAGEYARSIAARQPGSEGLGVIVPRWGFHSARQADELWTGAVGISPDRAFIAKSSRASGILTTKLLRSRGFSRRRLLSWSSLKASYALDHFFYPVMFLLIIIICIIN

SEQ ID NO: 193689 - protein, 135 aa, Zea Mays
MHSSCMSQIIAAASSFAGACPQQQSRRDTVTLGEAPCCPSRWIELCPSPQLAIVEYWACRRCRACHAQQEPQRHDLFQLDESSHIVVDPCPCRHASRIPCSTKAPSCGQHADMRDTSRPGPRDDDRASDVVPTTR

SEQ ID NO: 193690 - protein, 88 aa, Zea Mays
MELDTPKIIAAASSFAGACPQQQSRRDTVTLGEAPCCPSRWIELCPSPQLAIVEYWACRRCRACHAQQEPQRHDLFQLDESSHIVVDP

SEQ ID NO: 193691 - protein, 186 aa, Zea Mays
MEYYWMLDKLGGAFAPKPSSGPHKSRECLPLILIIRNRLKYAPTYREVISILMQHHVLVDGKMSFPSLRQTRTTGCFRLHPIRDEDAKFKLYKVRSVQFGQKDIPYLNTYDDRTIRYPDPLIKANDTIKIDLETNKIMDFIMFDVGNVVMVIGRRNTGRVGVIKIREKHKGNFETIHVLLGAFCYV

SEQ ID NO: 193692 - protein, 362 aa, Zea Mays
MNLELQKFFIYRLMKHEDRPLCWVEHMSLDNETGLDKPGIRVRSVTGLVAANYFVPRYFVWAVLIANLARIGYEEKTMYMVAYDWRLSFQNTEVRDQTLSRIKSNIELIVATNGGNRVVVIPHSMGVLYFLHFTKWVEAPPPVGGSGGPNWCENHIKAVMNIGGSFLGVPKAVAGLFSSEAKDVAVARYKAPKPSSGPHKSRECLPLILIIRNRLKYAPTYREVISILMQHHVLVDGKMSFPSLRQTRTTGCFRLHPIRDEDAKFKLYKVRSVQFGQKDIPYLNTYDDRTIRYPDPLIKANDTIKIDLETNKIMDFIMFDVGNVVMVIGRRNTGRVGVIKIREKHKGNFETIHVLLGAFCYV

SEQ ID NO: 193693 - protein, 238 aa, Zea Mays
MGVLYFLHFTKWVEAPPPVGGSGGPNWCENHIKAVMNIGGSFLGVPKAVAGLFSSEAKDVAVARYKAPKPSSGPHKSRECLPLILIIRNRLKYAPTYREVISILMQHHVLVDGKMSFPSLRQTRTTGCFRLHPIRDEDAKFKLYKVRSVQFGQKDIPYLNTYDDRTIRYPDPLIKANDTIKIDLETNKIMDFIMFDVGNVVMVIGRRNTGRVGVIKIREKHKGNFETIHVLLGAFCYV

SEQ ID NO: 193694 - protein, 359 aa, Zea Mays
MHINTSCICILPLAVRPLCWVEHMSLDNETGLDKPGIRVRSVTGLVAANYFVPRYFVWAVLIANLARIGYEEKTMYMVAYDWRLSFQNTEVRDQTLSRIKSNIELIVATNGGNRVVVIPHSMGVLYFLHFTKWVEAPPPVGGSGGPNWCENHIKAVMNIGGSFLGVPKAVAGLFSSEAKDVAVARYKAPKPSSGPHKSRECLPLILIIRNRLKYAPTYREVISILMQHHVLVDGKMSFPSLRQTRTTGCFRLHPIRDEDAKFKLYKVRSVQFGQKDIPYLNTYDDRTIRYPDPLIKANDTIKIDLETNKIMDFIMFDVGNVVMVIGRRNTGRVGVIKIREKHKGNFETIHVLLGAFCYV

SEQ ID NO: 193695 - protein, 143 aa, Zea Mays
MYLLMARSGLTRPTLLGSWMSFPSLRQTRTTGCFRLHPIRDEDAKFKLYKVRSVQFGQKDIPYLNTYDDRTIRYPDPLIKANDTIKIDLETNKIMDFIMFDVGNVVMVIGRRNTGRVGVIKIREKHKGNFETIHVLLGAFCYV

SEQ ID NO: 193696 - protein, 377 aa, Zea Mays
MGNNRSILCHGSCALLLWPLTLTFSFWSNLHSFRPLCWVEHMSLDNETGLDKPGIRVRSVTGLVAANYFVPRYFVWAVLIANLARIGYEEKTMYMVAYDWRLSFQNTEVRDQTLSRIKSNIELIVATNGGNRVVVIPHSMGVLYFLHFTKWVEAPPPVGGSGGPNWCENHIKAVMNIGGSFLGVPKAVAGLFSSEAKDVAVARYKAPKPSSGPHKSRECLPLILIIRNRLKYAPTYREVISILMQHHVLVDGKMSFPSLRQTRTTGCFRLHPIRDEDAKFKLYKVRSVQFGQKDIPYLNTYDDRTIRYPDPLIKANDTIKIDLETNKIMDFIMFDVGNVVMVIGRRNTGRVGVIKIREKHKGNFETIHVLLGAFCYV

SEQ ID NO: 193697 - protein, 203 aa, Zea Mays
MPHSPHHEMSPPAANTVDRPPLKMREVSRRVTPTPRPTRCRRLPTQGAPAAEEEGGLAARDSATAPPNTSTGRSASLLPHSSPARIGYEEKTMYMVAYDWRLSFQNTEVRDQTLSRIKSNIELIVATNGGNRVVVIPHSMGVLYFLHFTKWVEAPPPVGGSGGPNWCENHIKAVMNIGGSFLGVPKAVAGLFSSEAKDVAVAR

SEQ ID NO: 193698 - protein, 336 aa, Zea Mays
MSLDNETGLDKPGIRVRSVTGLVAANYFVPRYFVWAVLIANLARIGYEEKTMYMVAYDWRLSFQNTEVRDQTLSRIKSNIELIVATNGGNRVVVIPHSMGVLYFLHFTKWVEAPPPVGGSGGPNWCENHIKAVMNIGGSFLGVPKAVAGLFSSEAKDVAVARYKAPKPSSGPHKSRECLPLILIIRNRLKYAPTYREVISILMQHHVLVDGKMSFPSLRQTRTTGCFRLHPIRDEDAKFKLYKVRSVQFGQKDIPYLNTYDDRTIRYPDPLIKANDTIKIDLETNKIMDFIMFDVGNVVMVIGRRNTGRVGVIKIREKHKGNFETIHVLLGAFCYV

SEQ ID NO: 193699 - protein, 247 aa, Zea Mays
MACRAKVVGQVERVDGESLSYAEFVRRFMAPNRPVVLTGLTSSWRAHKDWTLSGSGDLRRPNLGFFTQNFPSSLVQVDDCSSSDFTDQKRLEMSMQEFIDHWVGGPHCGSSDGDRDGSLLYLKDWHFVKEYPDYIAYTTPTFFVDDWLNMYLDSHPIHRDSDIANHKNEINCSDYRFVYMGAKGTWTPLHADVFRSYSWSANVCGQKQWLFLPPSQSHCIFDRNMRSSVYNLHDVSEKQFPEFSKNG

SEQ ID NO: 193700 - protein, 83 aa, Zea Mays
MCYFFLHARATRAFYLVYYKRSSFLLCITTGRFIFLLRLYDSGRLSLISPGKHLINWNTFSFYIMCFFLNFFLQKSNQVLNFF

SEQ ID NO: 193701 - protein, 78 aa, Zea Mays
MWSCLLTEFCHRGGHWWWCPPPSSCGCLRSSPSGAVASDPQHSENDIEDIQKVAMSPYALYCMLGCNRSTYLVHICSS

SEQ ID NO: 193702 - protein, 113 aa, Zea Mays
MWSCLLTEFCHRGGHWWWCPPPSSCGCLRSSPSGAVASDPQHSENDIEDIQKLQAGPPLDEMSIPYIPRNLLHAIEYLHSEGLVWNRGPQVKASGQWSRQQLNQMADWSLMLG

SEQ ID NO: 193703 - protein, 53 aa, Zea Mays
MYIYTSACNRNERSLQKFRKFVYATIFICSSLESCSKQIYVGIQSQRLISFFY

SEQ ID NO: 193704 - protein, 112 aa, Zea Mays
MATVPGDLIWQIVRKNNSFLVKQFGNGNAKVQFTKEPNNLYNVHSYKYSGLANKKTVTIQPAAGKDSAVVLSTTKTKKQNTPAKLSHKSVMRKEFRKMAKSGVKKKNRQPTH

SEQ ID NO: 193705 - protein, 113 aa, Zea Mays
MWLSTHSAQYFLVFASLAWSQSIMKSSVGTHVTFYELQVNNALMDLIKATGSAMKPEEWSAQPENTSETGALISARPITVTMRTDEGVIVMGFEHIRNIVRIMKPARVAPIDS

SEQ ID NO: 193706 - protein, 154 aa, Zea Mays
MQSNCGFEGQINACWTHNMTTKELDTIRSAGFLVSVIHGRYDIIAQLCHAKRLAESLLPVARMVELHGAHLVSHERPDEVNNALMDLIKATGSAMKPEEWSAQPENTSGKLKKTKHLRFLFKANCSGSNLLRCVLIRDRGTHFREAHYRHDANR

SEQ ID NO: 193707 - protein, 196 aa, Zea Mays
MFCPETLIWEYVKGISSTGMQSNCGFEGQINACWTHNMTTKELDTIRSAGFLVSVIHGRYDIIAQLCHAKRLAESLLPVARMVELHGAHLVSHERPDEVNNALMDLIKATGSAMKPEEWSAQPENTSETGALISARPITVTMRTDEGANAAVAVYNLLGKLQLSFLYLIGVIVMGFEHIRNIVRIMKPARVAPIDS

SEQ ID NO: 193708 - protein, 385 aa, Zea Mays
MPYCEVGRYADGDKWEGVRVYYRRYGRGATKVLLIIGLAGTHDSWGPQIKGLTGSLEPADDEALRPDEEAAGGDGDGIEVCCFDNRGAGRSSVPPNKSYYSTAIMATDALALMDHLGWKKAHVFGHSMGAMIACKLAAIAPHRLCSLALLNVTGGGFQCFPKVDGQMLSLAFRFLRAKTPEERALVDLETHYTKEYLEETVGSCTRRMVLYQEYVKGISSTGMQSNCGFEGQINACWTHNMTTKELDTIRSAGFLVSVIHGRYDIIAQLCHAKRLAESLLPVARMVELHGAHLVSHERPDEVNNALMDLIKATGSAMKPEEWSAQPENTSETGALISARPITVTMRTDEGVIVMGFEHIRNIVRIMKPDQNTCKLFFETLLWESR

SEQ ID NO: 193709 - protein, 102 aa, Zea Mays
MPCREPLLVQPTLIGRKQVLSNSGIASISVVLIALVIRGIDRCLDSKESTLVIALIDGVIGHYACCNGDTWSSELDILCKAEPRIITTFKVLLSLFYDCTNH

SEQ ID NO: 193710 - protein, 75 aa, Zea Mays
MPKLRLIFTVILVVSLLFSGVSSGQTAATQASDADLSEAVERRSGKVLTYVQDYDYGGSNPKHDPRRKPGSGHPP

SEQ ID NO: 193711 - protein, 73 aa, Zea Mays
MPKLRLIFTVILVVSLLFSGQTAATQASDADLSEAVEVERRSGKVLTYVQDYDYGGSNPKHDPRRKPGSGHPP

SEQ ID NO: 193712 - protein, 71 aa, Zea Mays
MELASSMAALCPLPCVLSLSSWRRLGGRCPGLLGTLRRRQAPPGTPNPVFPSCGAKPSTQTLTRYLYSDLV

SEQ ID NO: 193713 - protein, 348 aa, Zea Mays
MAAGGNGAGGDTRAAFARIYKTLKEELLTDPAFEFTEESRQWIDRMVDYNVLGGKCNRGLSVVDSYKLLKGADALGEEETFLACTLGWCIEWLQAFFLVLDDIMDDSHTRRGQPCWFRVPQVGLIAANDGIILRNHISRILRRHFKGKPYYADLLDLFNEVEFKTASGQLLDLITTHEGEKDLTKYNITVHGRIVQYKTAYYSFYLPVACALLLSGENLDNYGDVENILVEMGTYFQDDYLDCYGDPEFIGKIGTDIEDYKCSWLVVQALERADESQKRILFENYGKKDPACVAKVKNLYKELDLEAVFQEYENESYKKLIADIEAQPSIAVQKVLKSFLHKIYKRQK

SEQ ID NO: 193714 - protein, 291 aa, Zea Mays
MAAGGNGAGGDTRAAFARIYKTLKEELLTDPAFEFTEESRQWIDRMVDYNVLGGKCNRGLSVVDSYKLLKGADALGEEETFLACTLGWCIEWLQAFFLVLDDIMDDSHTRRGQPCWFRVPQVGLIAANDGIILRNHISRILRRHFKGKPYYADLLDLFNEVEFKTASGQLLDLITTHEGEKDLTKYNITVHGRIVQYKTAYYSFYLPVACALLLSGENLDNYGDVENILVEMGTYFQVQDDYLDCYGDPEFIGKIGTDIEDYKCSWLVVQALERADESQKRILFIQPVWQK

SEQ ID NO: 193715 - protein, 305 aa, Zea Mays
MVDYNVLGGKCNRGLSVVDSYKLLKGADALGEEETFLACTLGWCIEWLQAFFLVLDDIMDDSHTRRGQPCWFRVPQVGLIAANDGIILRNHISRILRRHFKGKPYYADLLDLFNEVEFKTASGQLLDLITTHEGEKDLTKYNITVHGRIVQYKTAYYSFYLPVACALLLSGENLDNYGDVENILVEMGTYFQVQDDYLDCYGDPEFIGKIGTDIEDYKCSWLVVQALERADESQKRILFENYGKKDPACVAKVKNLYKELDLEAVFQEYENESYKKLIADIEAQPSIAVQKVLKSFLHKIYKRQK

SEQ ID NO: 193716 - protein, 247 aa, Zea Mays
MDDSHTRRGQPCWFRVPQVGLIAANDGIILRNHISRILRRHFKGKPYYADLLDLFNEVEFKTASGQLLDLITTHEGEKDLTKYNITVHGRIVQYKTAYYSFYLPVACALLLSGENLDNYGDVENILVEMGTYFQVQDDYLDCYGDPEFIGKIGTDIEDYKCSWLVVQALERADESQKRILFENYGKKDPACVAKVKNLYKELDLEAVFQEYENESYKKLIADIEAQPSIAVQKVLKSFLHKIYKRQK

SEQ ID NO: 193717 - protein, 111 aa, Zea Mays
MGKSPPQPRNKCKIQLETKLRESKVRSLLRQHITRAETLNPSLETEREKEKLISPNQTPNPIVSITTPPRNRTDRDTGAIASEPTTKYRPPRVRFRSRRVGMRERTRWRRG

SEQ ID NO: 193718 - protein, 1211 aa, Zea Mays
METDGIHPRLKSFTLLFQVCLKFFYLAIGSWFVCFLQVACWMITGERQAARIRGLYLKALLRQDIAFFDKEMTTGQLVESMSGDTILIQDAIGEKVGKFIQLTATFVGGFAVAFSKGWLLAAVMMSSVPPIVVAGAAISWTVSKLASQGQAKYNEAGIVVEQTIGAIRTVASFNGENRAIALYNKYIRNAYVAAVQEGTVTGLGFGFVMLILFCAYGLTAWYGAKLIIDKGYEGGQVVSVWMAFMAGAMSLGEATPCVTAFASGRAAGYRMMQIIQRKPQIDPNGTDGIVLANMKGDIELRDVYFSYPSRRDQLVFDGFSLHVISGKTMAIVGESGSGKSTVINLVERFYDPQAGEVSIDGVNIKSLRLGWLRETIGLVSQEPLLFATSIRENIAYGKEDATAEEIMAATKLANAANFIDKLPYGLDTMVGEHGAQLSGGQKQRIAITRAILKNPKILLLDEATSALDVESERVVQEALNRIMEGKTTIIVAHRLSTIKDADTISVVHRGKVVELGTHTELLQDPNGAYSQLIQLQDRTGEPDTSDIDYQRSTSAVRNVESLSKSMHTPSLKRSIIGGASFGSTSAHLVAIANTIVPENTDTEPLPKESDEGEECRKVALCRLISLNKPEMPVLLLGTVVAAISGVFFPMLGLLISSSINSFYEPPHQLKKDSRFWTLMYVALGVGSFIFLPVEHFLFGVAGGKLVERVRSLCFQRIVCQEISWFDRPSNASGNVGARLSVDASNIRRLVGDSLALMVRSTVTVIAGFVIAMAANWRLALVATVVLPLGGLQGFLQVKFLEGFSADAKAMYEEATQVANDAVSGIRTIASFCAEPKVMKTYYGKCKAPVRQGIRQGVVSGLGFGLSFFVLYSTYALCFYVGANFMLDGKATFTDVFRVFFALLMATIGVSQTSALGPNSAKAKASASTIFALIDSKSNIDPSSDEGMVLADVTGELELRHICFSYPSRPGTQIFRDLNLRIPSGKTVVLVGESGCGKSTVIALLERFYDPDSGTITLDGVDIKDLKTGWLRRQMGLVSQEPVLFNDTIRANIAYGREGEATEEEIVAAAEAANAHEFVSALPQGYGTLAGERGAQLSGGQKQRVAIARAVLRDPKILLLDEATSALDAESERAVQEALDRAAVGRTTVVVAHRLSTIRGADVIAVLGNGEVVAQGTHEQLMAARAGVYASLVELRMTSERAGASSSSAPDV

SEQ ID NO: 193719 - protein, 208 aa, Zea Mays
MENGEDTFASPTAAAADFSTNGGDGTPKLHDAADEIESLRAAKRDLEEKLDAVRHENQFLSSESRRLEVLVSQAREEVAAAEQGAATNESEAATLRSEVERLQDLLAAEKASHEEEMRRGARLGDQLQTAYQEKAALEEEIETLKGSATAEGKGVEEGCDSIAARAGTPKDQGVVPPALVAAAAAGAAATAGIAVVLFNLKRKSVMDG

SEQ ID NO: 193720 - protein, 539 aa, Zea Mays
MSAPLDRLARPWFVHNDERKESRSDADNSEGDKKTKIGSFKKKAINAGNKFRHSLRRRSKKKTERGDSIKDIRDIKELQDVETFRQCLIDEDLLPPQHDDYHMMLRFLKARKFDVEKAKNMWSDMLKWRKEFGVDKIEEFEYAELDEVKKYYPQFYHGVDKEGRPVYIELIGKVDANKLVQVTTLDRYVKYHVKEFERCFQMRFPACSIAAKKHIDSSTSIFDVQGVGFKNFSKSARELITRLQKIDNDNYPETLCQMYIINAGQGFKMLWSTIKSFLDPKTASKIHVLGNKYQHKLLEIIDECELPEFLGGKCKCIEGCERSDKGPWKDPNIIKRVLNGEANYGRQIVTISSTDGRIVSYAWPVHPNRKGSDASAESGSEVEDVTSPTASRNLITHPILTPVHEESKLSAHGSSSVVHASIGENIPVVDKIVDDGWGSPRSSPQAASSGSLSLRNLHGTFEGLRAQTITWLTFLMMTLFAMLCSVPSKMARRISNQSDGWVSWRTRCRCLKRSRLRCRLKRKNCSMQPSAVWMHWKLS

SEQ ID NO: 193721 - protein, 505 aa, Zea Mays
MSAPLDRLARPCFEGFVHNDERKESRSDADNSEGDKKTKIGSFKKKAINAGNKFRHSLRRRSKKKTERGDSIKDIRDIKELQDVETFRQCLIDEDLLPPQHDDYHMMLRFLKARKFDVEKAKNMWSDMLKWRKEFGVDKIEEFEYAELDEVKKYYPQFYHGVDKEGRPVYIELIGKVDANKLVQVTTLDRYVKYHVKEFERCFQMRFPACSIAAKKHIDSSTSIFDVQGVGFKNFSKSARELITRLQKIDNDNYPETLCQMYIINAGQGFKMLWSTIKSFLDPKTASKIHVLGNKYQHKLLEIIDECELPEFLGGKCKCIEGCERSDKGPWKDPNIIKRVLNGEANYGRQIVTISSTDGRIVSYAWPVHPNRKGSDASAESGSEVEDVTSPTASRNLITHPILTPVHEESKLSAHGSSSVVHASIGENIPVVDKIVDDGWGSPRSSPQAASSGSLSLRNLHGTFEGLRAQTITWLTFLMMTLFAMLCSVPSKMARRISNQSGAGA

SEQ ID NO: 193722 - protein, 529 aa, Zea Mays
MSAPLDRLARPCFEGFVHNDERKESRSDADNSEGDKKTKIGSFKKKAINAGNKFRHSLRRRSKKKTERGDSIKDIRDIKELQDVETFRQCLIDEDLLPPQHDDYHMMLRFLKARKFDVEKAKNMWSDMLKWRKEFGVDKIEGFKNFSKSARELITRLQKIDNDNYPETLCQMYIINAGQGFKMLWSTIKSFLDPKTASKIHVLGNKYQHKLLEIIDECELPEFLGGKCKCIEGCERSDKGPWKDPNIIKRVLNGEANYGRQIVTISSTDGRIVSYAWPVHPNRKGSDASAESGSEVEDVTSPTASRNLITHPILTPVHEESKLSAHGSSSVVHASIGENIPVVDKIVDDGWGSPRSSPQAASSGSLSLRNLHGTFEGLRAQTITWLTFLMMTLFAMLCSVPSKMARRISNQSGKHDDYHVEYPQEQECKEEFRPPSPAPSYTENDVISSMLRRLGELEDKVQVLETKPSEMPFEKEELLNAAVRRVDALEAELISTKKALYDALMRQDELLAYIDRQELIKFRKKKFCF

SEQ ID NO: 193723 - protein, 542 aa, Zea Mays
MSAPLDRLARPCFEGFVHNDERKESRSDADNSEGDKKTKIGSFKKKAINAGNKFRHSLRRRSKKKTERGDSIKDIRDIKELQDVETFRQCLIDEDLLPPQHDDYHMMLRFLKARKFDVEKAKNMWSDMLKWRKEFGVDKIEEFEYAELDEVKKYYPQFYHGVDKEGRPVYIELIGKVDANKLVQVTTLDRYVKYHVKEFERCFQMRFPACSIAAKKHIDSSTSIFDVQGVGFKNFSKSARELITRLQKIDNDNYPETLCQMYIINAGQGFKMLWSTIKSFLDPKTASKIHVLGNKYQHKLLEIIDECELPEFLGGKCKCIEGCERSDKGPWKDPNIIKRVLNGEANYGRQIVTISSTDGRIVSYAWPVHPNRKGSDASAESGSEVEDVTSPTASRNLITHPILTPVHEESKLSAHGSSSVVHASIGENIPVVDKIVDDGWGSPRSSPQAASSGSLSLRNLHGTFEGLRAQTITWLTFLMMTLFAMLCSVPSKMARRISNQSDGWVSWRTRCRCLKRSRLRCRLKRKNCSMQPSAVWMHWKLS

SEQ ID NO: 193724 - protein, 67 aa, Zea Mays
MDVITSVFLTRLAYRRARKWAGVIGIRRQSSDAAAHRAVPRVGVITSSSQRGYESIEEQVSTLNLKS

SEQ ID NO: 193725 - protein, 94 aa, Zea Mays
MDVITSVFLTRLAYRRARKWAGVIGIRRQSSDAAAHRAVPRVGVITSSSQVKSQPIGSLRCEHRSTVTDVVGTLARWFAVLRRVRRHEVASSTI

SEQ ID NO: 193726 - protein, 657 aa, Zea Mays
MKSGTASAPSGGGGGLAITERQKPAPSRVAALFQMFAKRKLFSSSSKKSKLLPPVRAHKFSPGRPLAGGDKTRPLLIDSADYSRSRTECNGTSHYPQPQPGQDRNCSENGMRAPGVVARLMGLSSMPAAASHQRQTRATTNSPEPGDHWNSGRQDRSGSSRGIYTSPQQQQQQKTRQQPVDDRHHGNAGQFSAPDTRPLWPRRHAHRAASPVKSPRSLSSRNRARLIEAAVRVLEPGLQSRNRRLSKRHAYLEYPCSNGDGAPSSAAAAAVRHNVSDQFLRNICDADIPASGAHNLGAASLHNSISNRRTEEDTCKKSIPPSRRSDQSTSCQLQPEYLLIGSTEKAAGFADTNQDAPREQLKSNISRDSAPRGPLKQNNLKQNALPAADPGCVIQSKKHGSGERNVRNRTQDFVSLNKRMDGSASLRSKRKALDRFGEPRCSAEDRNMMSTKGCRASSLHGGTSNKLELRTGTPKAMVTAKGAGLISEKPKPASPNRARSGLQRQTVPHNVSRANKEPGTISLTSGSPVKAARGDSASGTGAGTAVQVDSCPERRSRRDCQKTCPQGEIVFWEDLKRTSNPSHTEPGFSSQDEVKNRVILGGTAASSLSGKKSGGQVTEESLSEGLLRQRNSLDCAVYDNKDPYEVASLRGTRWCKR

SEQ ID NO: 193727 - protein, 912 aa, Zea Mays
MKSGTASAPSGGGGGLAITERQKPAPSRVAALFQMFAKRKLFSSSSKKSKLLPPVRAHKFSPGRPLAGGDKTRPLLIDSADYSRSRTECNGTSHYPQPQPGQDRNCSENGMRAPGVVARLMGLSSMPAAASHQRQTRATTNSPEPGDHWNSGRQDRSGSSRGIYTSPQQQQQQKTRQQPVDDRHHGNAGQFSAPDTRPLWPRRHAHRAASPVKSPRSLSSRNRARLIEAAVRVLEPGLQSRNRRLSKRHAYLEYPCSNGDGAPSSAAAAAVRHNVSDQFLRNICDADIPASGAHNLGAASLHNSISNRRTEEDTCKKSIPPSRRSDQSTSCQLQPEYLLIGSTEKAAGFADTNQDAPREQLKSNISRDSAPRGPLKQNNLKQNALPAADPGCVIQSKKHGSGERNVRNRTQDFVSLNKRMDGSASLRSKRKALDRFGEPRCSAEDRNMMSTKGCRASSLHGGTSNKLELRTGTPKAMVTAKGAGLISEKPKPASPNRARSGLQRQTVPHNVSRANKEPGTISLTSGSPVKAARGDSASGTGAGTAVQVDSCPERRSRRDCQKTCPQGEIVFWEDLKRTSNPSHTEPGFSSQDEVKNRVILGGTAASSLSGKKSGGQVTEESLSEGLLRQRNSLDCAVYDNKDPYEVASLRGTRKKKHAAGAKGSKPSPSPCISSPTSTPHSGHAGDACVPGIPRRTAEATSTTSHPWQDTAAERNPRGGDPNNSGQHGVQFQTSEPHAGEATITTSVELLLANVRASTTPRKPEESPKAFLLRTTERALAALTAGSKQGFGSTAIEGKGASPLRNLALDCVWDCLDSTCSRLCDSGYRSFSELLALVCTEKRLADRVGKEVARCCGAAGKGLDELAVGEVERAVEAGMGSSMLEAVQIGAQIEQDLVQDLIDEIGADVFRRW

SEQ ID NO: 193728 - protein, 88 aa, Zea Mays
MEMDYYIVICYEDFVTFELQSKNELLHFQIVSCLGFSKYITSTVYLDIMYMETRGKKRYVSVHKSMLFWTKSPIWITLSCFLEFTYCF

SEQ ID NO: 193729 - protein, 74 aa, Zea Mays
MHSHLRPLMARVGACVPDNLGGLSQQRSRRRVVETRIQSSSGPTQSFRPGSATPKHSFRSGGRVQRFEPARVRL

SEQ ID NO: 193730 - protein, 395 aa, Zea Mays
MDKGTDAVDILEGRSYRLQTPWVGVVNRSQQDINKNVDMIAARRREREYFATTPEYKHMASRMGSEYLGKMLSKHLEQVIKSRIPGIQSLITKTIAELETELNRLGKPIANDAGGKLYTIMEICRMFDSIYKEHLDGVRPGGEKVYHVFDNQFPVAIKRLQFDKQLSMENVKKLITEADGYQPHLIAPEQGYRRLIESCLISIRGPAEAAVDAVHAILKDLVRKAINETHELKQFPTLRVEVGNAAFESLDRMRDESKKNTLKLVDMECSYLTVDFFRKLPQDVERGGNPSHSIFDRYNDSYLRRIGQTVLSYVNMVCSTLRNSIPKSIVYCQVREAKRSLLDHFFTELGAREMKQLSKLLDEDPAVMERRTNLAKRLELYRSAQSEIDAVAWSK

SEQ ID NO: 193731 - protein, 521 aa, Zea Mays
MHLPRKRFTDFAAVRKEIADETDRETGRSKQISPVPIHLSIFSPYVVNLTLIDLPGLTKVAVEGQPENIVQDIENMVRSYIEKPNCIILAVSPANQDLATSDAIKISREVDPKGERTFGVLTKIDLMDKGTDAVDILEGRSYRLQTPWVGVVNRSQQDINKNVDMIAARRREREYFATTPEYKHMASRMGSEYLGKMLSKHLEQVIKSRIPGIQSLITKTIAELETELNRLGKPIANDAGGKLYTIMEICRMFDSIYKEHLDGVRPGGEKVYHVFDNQFPVAIKRLQFDKQLSMENVKKLITEADGYQPHLIAPEQGYRRLIESCLISIRGPAEAAVDAVHAILKDLVRKAINETHELKQFPTLRVEVGNAAFESLDRMRDESKKNTLKLVDMECSYLTVDFFRKLPQDVERGGNPSHSIFDRYNDSYLRRIGQTVLSYVNMVCSTLRNSIPKSIVYCQVREAKRSLLDHFFTELGAREMKQLSKLLDEDPAVMERRTNLAKRLELYRSAQSEIDAVAWSK

SEQ ID NO: 193732 - protein, 368 aa, Zea Mays
MDNLITLVNKLQRACTALGDHGEESALPTLWDSLPAIAVVGGQSSGKSSVLESVVGKDFLPRGSGIVTRRPLVLQLHRIDGDREYAEFMHLPRKRFTDFAAVRKEIADETDRETGRSKQISPVPIHLSIFSPYVVNLTLIDLPGLTKVAVEGQPENIVQDIENMVRSYIEKPNCIILAVSPANQDLATSDAIKISREVDPKGERTFGVLTKIDLMDKGTDAVDILEGRSYRLQTPWVGVVNRSQQDINKNVDMIAARRREREYFATTPEYKHMASRMGSEYLGKMLSKHLEQVIKSRIPGIQSLITKTIAELETELNRLGKPIANDAGGKLYTIMEICRMFDSIYKEHLDGGALAEKKFTTSSTINFL

SEQ ID NO: 193733 - protein, 897 aa, Zea Mays
MGEGRGRRDLTPRFLSTSQMAPPSANRSHQQLVVLPVLLLLLIRIPASAVAAADTSLSTLSYSHHCPNLPSALDLPGGEVSALGPDARVPVPEVSTGYFVGGDRIFGPDPSSQPRSFSLLPSSVARTTNASLLHVSATLTVSGGRRPFRDRGGRNLFEYDGRARHFRPRLPRFTGRRGSITFGLEGYYSTGSGDLCMVGTGSGRAADGSPVHFLPVVLRLGFPSPANVTRPFVTGRLENVDTISPIEPISLVAYTQEGYAYGESASCPPPPAGRLDALQVFENRNFSCAHLSSMLKSPFRLDYPSGSESTASSLGIHQSYMYVNRMHCNDDGAVRAYVAFTNQTELSRYYFMLGEKAVVVDGFWDQKSSRLCLKGCHVVKSGPSRADLAVGECGIGMSFWFPAVWSLQQRSFSAGLVWNASLKSGEAMKYYEKSGLNKNRKGKFPDSNSYQDLVFRFFVKRGGGSGYASPVTIGSMLFDGNSLVVQDPFSRHVTAEMKQRLLNVSYDIYYVGKWSLESFHRRHISAEGVYDTKTGSLCMIACRELNVSSDCEILVTAQFSSLDAKVAQHVKGAIKSLRKKTDPLFFETLDIASYGMYVEQVDASIWRMDIESTMTLISMTLACVFIAVQLFHVNKVPEALPAMSITMLVVLALGYMIPLVLNFDALFKNSNKQTVPLSGGGWLEVNEVMVRIITMVTFLLQLRLLQQAWSARSVDASKAESWAAEKKVLWICLPLYIIGGAITWVVHMRSNHSRRMLRQVVHLKPVEQHAFWEDLVSYCGLILDGFLLPQVILNVFSDSKVRALSPGFYIGSTLIRVLPHVYDVFRRQHFVPSLRPSYMYAGPRDDLFSLAWDIVIPCGALLLSALLFFQQWRGGAFFLCSKNRRTREYEMVSVASS

SEQ ID NO: 193734 - protein, 499 aa, Zea Mays
MSYLCAGSSSFDDPDVVEVSSATAAAAGWASGHHKRKRSQVVPQEVIEIDDDDPDGVIIIGDKAPLDKNKQTVVCPMDWPKHAKDIAGPSTYASKYIDSCVDLKVFQDEAVYNYSDDCPYAGFEDYMYDEDEFEVDGYDALLIESEFKFGLSAKFDNLHAPPVLEVSLPWMQKTAIDIANKTKPTKVVDDKIEEKYKAFKRFDTVDDHSDHYYSKPTSRKVQVVKKPSKDWVKRIQHEWKVLERDLPDTIFVRAYEDRMDLLRGVIMGPAGTPYHDGLFFFDIYFPPRYPNVPPMVNYRAGGLRLNPNLYDCGKVCLSLLNTWDGSGCEKWNPANSTMLQVLVSIQALVLNAKPFFNEPGYAMHANTAHGEKKSLAYNEDTFLLSCRTMLYSLRNPPKNFEDFVAGHFRQHGRNILVACRAYLDGAQVGCLSGDGVQDVDEGDTSCSVRFKQSLKKLVEELLTEFTVKGADCGKFLTEEKAKRSSGACSTWTADTTLRL

SEQ ID NO: 193735 - protein, 515 aa, Zea Mays
MSYLCAGSSSFDDPDVVEVSSATAAAAGWASGHHKRKRSQVVPQEVIEIDDDDPDGVIIIGDKAPLDKNKQTVVCPMDWPKHAKDIAGPSTYASKYIDSCVDLKVFQDEAVYNYSDDCPYAGFEDYMYDEDEFEVDGYDALLIESEFKFGLSAKFDNLHAPPVLEVSLPWMQKTAIDIANKTKPTKVVDDKIEEKYKAFKRFDTVDDHSDHYYSKPTSRKVQVVKKPSKDWVKRIQHEWKVLERDLPDTIFVRAYEDRMDLLRGVIMGPAGTPYHDGLFFFDIYFPPRYPNVPPMVNYRAGGLRLNPNLYDCGKVCLSLLNTWDGSGCEKWNPANSTMLQVLVSIQALVLNAKPFFNEPGYAMHANTAHGEKKSLAYNEDTFLLSCRTMLYSLRNPPKVLGKVGLVLMNQFVSKNFEDFVAGHFRQHGRNILVACRAYLDGAQVGCLSGDGVQDVDEGDTSCSVRFKQSLKKLVEELLTEFTVKGADCGKFLTEEKAKRSSGACSTWTADTTLRL

SEQ ID NO: 193736 - protein, 422 aa, Zea Mays
MSYLCAGSSSFDDPDVVEVSSATAAAAGWASGHHKRKRSQVVPQEVIEIDDDDPDGVIIIGDKAPLDKNKQTVVCPMDWPKHAKSGWVQDIAGPSTYASKYIDSCVDLKVFQDEAVYNYSDDCPYAGFEDYMYDEDEFEVDGYDALLIESEFKFGLSAKFDNLHAPPVLEVSLPWMQKTAIDIANKTKPTKVVDDKIEEKYKAFKRFDTVDDHSDHYYSKPTSRKVQVVKKPSKDWVKRIQHEWKVLERDLPDTIFVRAYEDRMDLLRGVIMGPAGTPYHDGLFFFDIYFPPRYPNVPPMVNYRAGGLRLNPNLYDCGKVCLSLLNTWDGSGCEKWNPANSTMLQVLVSIQALVLNAKPFFNEPGYAMHANTAHGEKKSLAYNEDTFLLSCRTMLYSLRNPPKKHLEPHQQEWKSFYSQYPK

SEQ ID NO: 193737 - protein, 249 aa, Zea Mays
MASRRCLLRLLSSRLVPQRSQPFAPGSIATRTLTTSSEALGPPAPGALPSPRLYYLSRCHFATRSSGDEDDEYEDEEEHYDEEDSEGEWGDDEEAVAAKKPSGKTEEEKVAEAAEIGYKVLAPLGADEKPFKPYEPVFAIIGSHQFKVSNGDSIFTERLKFCDVNDKLFLNRVLMLGSQTQTVIGRPILPDAAVHAVVEEHALDAKVIIFKKKRRKNYRRTKGHRQELTKLRIINIEGIDKPETAAVAA

SEQ ID NO: 193738 - protein, 325 aa, Zea Mays
MPSTDHGVPSTYPPLGYLHHSSAQLERTKRTHLGPLLLCFCFPTESPQPQALALCPLPSSPPMPPPPPLLEPRDYLGAGATSSCCSSCCSSGREGAGPHLALRLGLPGSDDSPGRGADTEHARAHVDAALTLGPGPGPAPPRGSAKRGFADSLDRSAKLDGVAADDAAGGVTRVAGAAAGAPPAAKAQVVGWPPVRSYRKNTLAASATKTNGGDEGRSEAGCCYVKVSMDGAPYLRKVDLKTYSSYEDLSLGLEKMFSCFITVILQVKTVHARLQEGIGLLMVLGLMPFRTKNMSLLTKIKMLTGCSLVICPGTCSPHFAGNLGS

SEQ ID NO: 193739 - protein, 274 aa, Zea Mays
MPSTDHGVPSTYPPLGYLHHSSAQLERTKRTHLGPLLLCFCFPTESPQPQALALCPLPSSPPMPPPPPLLEPRDYLGAGATSSCCSSCCSSGREGAGPHLALRLGLPGSDDSPGRGADTEHARAHVDAALTLGPGPGPAPPRGSAKRGFADSLDRSAKLDGVAADDAAGGVTRVAGAAAGAPPAAKAQVVGWPPVRSYRKNTLAASATKTNGGDEGRSEAGCCYVKVSMDGAPYLRKVDLKTYSSYEDLSLGLEKMFSCFITACSPHFAGNLGS

SEQ ID NO: 193740 - protein, 201 aa, Zea Mays
MVATEMDLEREKAARAEIEKTSSREAPKAPLPDQTRNAPLRKLSSSGSINSLEESHFLQASLDLSDNASLERRMSSESNMSYYLKTMTPSAFESALRQKDGELASYMSRLASLESIRNSLAEELVKLTEQCEKLRTEATAVPGLRAELEALKQRHFQALELMGERDEELEELRNDIVDLKEMYREQVDLLVSQLQSLGARV

SEQ ID NO: 193741 - protein, 999 aa, Zea Mays
MAWWSGKVSLGGLQDIAGAVNKISESVKNIEKNFDSALGLEEKRDDEDASGSQTSNSDRIGFFNPVMAFMGHNGEEDGTEVSEKPQSLKNLSAEEGINSTPTKKHISEVDPSEVSGTTSPKLPSKSEEVHSISNGSPVSKADVSEQSITPQTPTHPSVAEEKLDSSTEAPASKVGDAEASETSQSAGHPSTVEENQHHQVSKHSDPSDEAEPNQLRESVRDLPDGSASSSPTKIHQSGDTETGESIHTGKEDTSDRNILQSQPAESALASSDDITEAEDNIAQEYDAPKELSGPQESSDMVDKGTHLEVKLHDSNINTEKSEEESNKMESGESSVVVQEDNAMEQPQDLTLKSLTAEHDSNSQNESVINSTDIPVGLGEGPPNDFTKEEKILESVRGTDSQTLDSVVSVDELEKLRRELKMMEAALQGAARQSQSKADEIARLINENEQLKSTIDDLKSKSSEAEMDSLKDEYHQRVATLERKVYALTKERDTLRREQNKKSDAAALLKEKDEIINQIREFEEEKQRLNSKIQVEEAKVESIKRDKAATEKLLQETIERNQTELAAQKEFYTNALNAAKEAEALAEARVNSEAKIELENLLGEAGEKENMLIKTIEELRHFLTRQEQEAAFREKRLKGDYDDLQKRYQASELRYNELVTQVPESTRPLLRQIEAMQETTARREDAWAGVERTLNSRLQEAEAKAASSEEKERSVNERLSQSLSRITVLETQITILRTEQTQLSRSLEKERQRASESRQEYLAIKEEAAIQEGRAKQFEEEMKELRARHKEELQEAAEHRDLLEKDLEREKAARAEIEKTSSREAPKAPLPDQTRNAPLRKLSSSGSINSLEESHFLQASLDLSDNASLERRMSSESNMSYYLKTMTPSAFESALRQKDGELASYMSRLASLESIRNSLAEELVKLTEQCEKLRTEATAVPGLRAELEALKQRHFQALELMGERDEELEELRNDIVDLKEMYREQVDLLVSQLQSLGARV

SEQ ID NO: 193742 - protein, 545 aa, Zea Mays
MAWWSGKVSLGGLQDIAGAVNKISESVKNIEKNFDSALGLEEKRDDEDASGSQTSNSDRIGFFNPVMAFMGHNGEEDGTEVSEKPQSLKNLSAEEGINSTPTKKHISEVDPSEVSGTTSPKLPSKSEEVHSISNGSPVSKADVSEQSITPQTPTHPSVAEEKLDSSTEAPASKVGDAEASETSQSAGHPSTVEENQHHQVSKHSDPSDEAEPNQLRESVRDLPDGSASSSPTKIHQSGDTETGESIHTGKEDTSDRNILQSQPAESALASSDDITEAEDNIAQEYDAPKELSGPQESSDMVDKGTHLEVKLHDSNINTEKSEEESNKMESGESSVVVQEDNAMEQPQDLTLKSLTAEHDSNSQNESVINSTDIPVGLGEGPPNDFTKEEKILESVRGTDSQTLDSVVSVDELEKLRRELKMMEAALQGAARQSQSKADEIARLINENEQLKSTIDDLKSKSSEAEMDSLKDEYHQRVATLERKVYALTKERDTLRREQNKKSDAAALLKEKDEIINQVMAEGEELSKKQAAQEATIRKLRAQLDS

SEQ ID NO: 193743 - protein, 848 aa, Zea Mays
MAWWSGKVSLGGLQDIAGAVNKISESVKNIEKNFDSALGLEEKRDDEDASGSQTSNSDRIGFFNPVMAFMGHNGEEDGTEVSEKPQSLKNLSAEEGINSTPTKKHISEVDPSEVSGTTSPKLPSKSEEVHSISNGSPVSKADVSEQSITPQTPTHPSVAEEKLDSSTEAPASKVGDAEASETSQSAGHPSTVEENQHHQVSKHSDPSDEAEPNQLRESVRDLPDGSASSSPTKIHQSGDTETGESIHTGKEDTSDRNILQSQPAESALASSDDITEAEDNIAQEYDAPKELSGPQESSDMVDKGTHLEVKLHDSNINTEKSEEESNKMESGESSVVVQEDNAMEQPQDLTLKSLTAEHDSNSQNESVINSTDIPVGLGEGPPNDFTKEEKILESVRGTDSQTLDSVVSVDELEKLRRELKMMEAALQGAARQSQSKADEIARLINENEQLKSTIDDLKSKSSEAEMDSLKDEYHQRVATLERKVYALTKERDTLRREQNKKSDAAALLKEKDEIINQIREFEEEKQRLNSKIQVEEAKVESIKRDKAATEKLLQETIERNQTELAAQKEFYTNALNAAKEAEALAEARVNSEAKIELENLLGEAGEKENMLIKTIEELRHFLTRQEQEAAFREKRLKGDYDDLQKRYQASELRYNELVTQVPESTRPLLRQIEAMQETTARREDAWAGVERTLNSRLQEAEAKAASSEEKERSVNERLSQSLSRITVLETQITILRTEQTQLSRSLEKERQRASESRQEYLAIKEEAAIQEGRAKQFEEEMKELRARHKEELQEAAEHRDLLEKGSRPCVQNVVLASGRGRAHLVLGWVFSPPRPAVSAPLGVSTVIR

SEQ ID NO: 193744 - protein, 498 aa, Zea Mays
MAWWSGKVSLGGLQDIAGAVNKISESVKNIEKNFDSALGLEEKRDDEDASGSQTSNSDRIGFFNPVMAFMGHNGEEDGTEVSEKPQSLKNLSAEEGINSTPTKKHISEVDPSEVSGTTSPKLPSKSEEVHSISNGSPVSKADVSEQSITPQTPTHPSVAEEKLDSSTEAPASKVGDAEASETSQSAGHPSTVEENQHHQVSKHSDPSDEAEPNQLRESVRDLPDGSASSSPTKIHQSGDTETGESIHTGKEDTSDRNILQSQPAESALASSDDITEAEDNIAQEYDAPKELSGPQESSDMVDKGTHLEVKLHDSNINTEKSEEESNKMESGESSVVVQEDNAMEQPQDLTLKSLTAEHDSNSQNESVINSTDIPVGLGEGPPNDFTKEEKILESVRGTDSQTLDSVVSVDELEKLRRELKMMEAALQGAARQSQSKADEIARLINENEQLKSTIDDLKSKSSEAEMDSLKDEYHQRVATLERKTMFNAKRRNNSKMHV

SEQ ID NO: 193745 - protein, 822 aa, Zea Mays
MAWWSGKVSLGGLQDIAGAVNKISESVKNIEKNFDSALGLEEKRDDEDASGSQTSNSDRIGFFNPVMAFMGHNGEEDGTEVSEKPQSLKNLSAEEGINSTPTKKHISEVDPSEVSGTTSPKLPSKSEEVHSISNGSPVSKADVSEQSITPQTPTHPSVAEEKLDSSTEAPASKVGDAEASETSQSAGHPSTVEENQHHQVSKHSDPSDEAEPNQLRESVRDLPDGSASSSPTKIHQSGDTETGESIHTGKEDTSDRNILQSQPAESALASSDDITEAEDNIAQEYDAPKELSGPQESSDMVDKGTHLEVKLHDSNINTEKSEEESNKMESGESSVVVQEDNAMEQPQDLTLKSLTAEHDSNSQNESVINSTDIPVGLGEGPPNDFTKEEKILESVRGTDSQTLDSVVSVDELEKLRRELKMMEAALQGAARQSQVYALTKERDTLRREQNKKSDAAALLKEKDEIINQIREFEEEKQRLNSKIQIDGIKLVWRPEQDVMSVFFLLSKVEEAKVESIKRDKAATEKLLQETIERNQTELAAQKEFYTNALNAAKEAEALAEARVNSEAKIELENLLGEAGEKENMLIKTIEELRHFLTRQEQEAAFREKRLKGDYDDLQKRYQASELRYNELVTQVPESTRPLLRQIEAMQETTARREDAWAGVERTLNSRLQEAEAKAASSEEKERSVNERLSQSLSRITVLETQITILRTEQTQLSRSLEKERQRASESRQEYLAIKEEAAIQEGRAKQFEEEMKELRARHKEELQEAAEHRDLLEKGSRPCVQNVVLASGRGRAHLVLGWVFSPPRPAVSAPLGVSTVIR

SEQ ID NO: 193746 - protein, 885 aa, Zea Mays
MAWWSGKVSLGGLQDIAGAVNKISESVKNIEKNFDSALGLEEKRDDEDASGSQTSNSDRIGFFNPVMAFMGHNGEEDGTEVSEKPQSLKNLSAEEGINSTPTKKHISEVDPSEVSGTTSPKLPSKSEEVHSISNGSPVSKADVSEQSITPQTPTHPSVAEEKLDSSTEAPASKVGDAEASETSQSAGHPSTVEENQHHQVSKHSDPSDEAEPNQLRESVRDLPDGSASSSPTKIHQSGDTETGESIHTGKEDTSDRNILQSQPAESALASSDDITEAEDNIAQEYDAPKELSGPQESSDMVDKGTHLEVKLHDSNINTEKSEEESNKMESGESSVVVQEDNAMEQPQDLTLKSLTAEHDSNSQNESVINSTDIPVGLGEGPPNDFTKEEKILESVRGTDSQTLDSVVSVDELEKLRRELKMMEAALQGAARQSQSKADEIARLINENEQLKSTIDDLKSKSSEAEMDSLKDEYHQRVATLERKFSIFYSVKGRPGVVVYALTKERDTLRREQNKKSDAAALLKEKDEIINQIREFEEEKQRLNSKIQIDGIKLVWRPEQDVMSVFFLLSKVEEAKVESIKRDKAATEKLLQETIERNQTELAAQKEFYTNALNAAKEAEALAEARVNSEAKIELENLLGEAGEKENMLIKTIEELRHFLTRQEQEAAFREKRLKGDYDDLQKRYQASELRYNELVTQVPESTRPLLRQIEAMQETTARREDAWAGVERTLNSRLQEAEAKAASSEEKERSVNERLSQSLSRITVLETQITILRTEQTQLSRSLEKERQRASESRQEYLAIKEEAAIQEGRAKQFEEEMKELRARHKEELQEAAEHRDLLEKGSRPCVQNVVLASGRGRAHLVLGWVFSPPRPAVSAPLGVSTVIR

SEQ ID NO: 193747 - protein, 904 aa, Zea Mays
MAWWSGKVSLGGLQDIAGAVNKISESVKNIEKNFDSALGLEEKRDDEDASGSQTSNSDRIGFFNPVMAFMGHNGEEDGTEVSEKPQSLKNLSAEEGINSTPTKKHISEVDPSEVSGTTSPKLPSKSEEVHSISNGSPVSKADVSEQSITPQTPTHPSVAEEKLDSSTEAPASKVGDAEASETSQSAGHPSTVEENQHHQVSKHSDPSDEAEPNQLRESVRDLPDGSASSSPTKIHQSGDTETGESIHTGKEDTSDRNILQSQPAESALASSDDITEAEDNIAQEYDAPKELSGPQESSDMVDKGTHLEVKLHDSNINTEKSEEESNKMESGESSVVVQEDNAMEQPQDLTLKSLTAEHDSNSQNESVINSTDIPVGLGEGPPNDFTKEEKILESVRGTDSQTLDSVVSVDELEKLRRELKMMEAALQGAARQSQSKADEIARLINENEQLKSTIDDLKSKSSEAEMDSLKDEYHQRVATLERKVYALTKERDTLRREQNKKSDAAALLKEKDEIINQVMAEGEELSKKQAAQEATIRKLRAQIREFEEEKQRLNSKIQVEEAKVESIKRDKAATEKLLQETIERNQTELAAQKEFYTNALNAAKEAEALAEARVNSEAKIELENLLGEAGEKENMLIKTIEELRHFLTRQEQEDRVQVVVVVSGVHDADLHGESFVIRMSMWLMAAFREKRLKGDYDDLQKRYQASELRYNELVTQVPESTRPLLRQIEAMQETTARREDAWAGVERTLNSRLQEAEAKAASSEEKERSVNERLSQSLSRITVLETQITILRTEQTQLSRSLEKERQRASESRQEYLAIKEEAAIQEGRAKQFEEEMKELRARHKEELQEAAEHRDLLEKGSRPCVQNVVLASGRGRAHLVLGWVFSPPRPAVSAPLGVSTVIR

SEQ ID NO: 193748 - protein, 873 aa, Zea Mays
MAWWSGKVSLGGLQDIAGAVNKISESVKNIEKNFDSALGLEEKRDDEDASGSQTSNSDRIGFFNPVMAFMGHNGEEDGTEVSEKPQSLKNLSAEEGINSTPTKKHISEVDPSEVSGTTSPKLPSKSEEVHSISNGSPVSKADVSEQSITPQTPTHPSVAEEKLDSSTEAPASKVGDAEASETSQSAGHPSTVEENQHHQVSKHSDPSDEAEPNQLRESVRDLPDGSASSSPTKIHQSGDTETGESIHTGKEDTSDRNILQSQPAESALASSDDITEAEDNIAQEYDAPKELSGPQESSDMVDKGTHLEVKLHDSNINTEKSEEESNKMESGESSVVVQEDNAMEQPQDLTLKSLTAEHDSNSQNESVINSTDIPVGLGEGPPNDFTKEEKILESVRGTDSQTLDSVVSVDELEKLRRELKMMEAALQGAARQSQSKADEIARLINENEQLKSTIDDLKSKSSEAEMDSLKDEYHQRVATLERKVYALTKERDTLRREQNKKSDAAALLKEKDEIINQVMAEGEELSKKQAAQEATIRKLRAQIREFEEEKQRLNSKIQVEEAKVESIKRDKAATEKLLQETIERNQTELAAQKEFYTNALNAAKEAEALAEARVNSEAKIELENLLGEAGEKENMLIKTIEELRHFLTRQEQEAAFREKRLKGDYDDLQKRYQASELRYNELVTQVPESTRPLLRQIEAMQETTARREDAWAGVERTLNSRLQEAEAKAASSEEKERSVNERLSQSLSRITVLETQITILRTEQTQLSRSLEKERQRASESRQEYLAIKEEAAIQEGRAKQFEEEMKELRARHKEELQEAAEHRDLLEKGSRPCVQNVVLASGRGRAHLVLGWVFSPPRPAVSAPLGVSTVIR

SEQ ID NO: 193749 - protein, 285 aa, Zea Mays
MDRSWIKDRLFSDAHLDGVKEFMNLVSQRFDKNEELLCPCRRCLNRVHQHKGEVYDHLLIHGMTSTYTRCVHHGEPFEAEINENYDHVDEYIGINEDDSMNENEEDEPDNRIHDMIRELYPTNDQSRGKSMFAALLEEMKHELYPGAPYTRFSFLVKLLHIKSFYRFSNVAFTAMLKLLSAAFPDCSLPASYHEAKNVINALGLGYDSIHVCPNNCVLFRKEYAKHDECLVCGASRWKDTTDGKKHIPQKVLRHFPIIPRLKRFFASKKISEETQWHLLKRKAVE

SEQ ID NO: 193750 - protein, 576 aa, Zea Mays
MARPFQKIGHGLERFSFRRRRSASSPPLPPLASDGTDASSMEAQAQAQVQAPPFSKRALSRSCGSKGSRLSVDLPPPLAGGPSDRGAAGTSSSSSLAVPPKPVRHEGPPSDADIVREKFSKLLLGEDMSGTGKGVTSALALSNAITNLAASVFGEQRRLQPMAAEQKSRWKKEIYWLLSVADHIVEFVPSQQVAENGTCMEIMVTQQRQDLKMNIPALRKLDAMLLEYLDSFEGEQEFWYASKDADEPGKGNVPRQDDRWWLPTVRVPPSGLSYAYRKWLQNHKDLVAQVLKAAMAINANILMEMEVPESYMESLPKNGKSTLGDSAYKLITDDCFDAEELLRSVDLSDEHSIVDLKNRVEASVVIWQKKMTHKDSKLSWGHNARHEKRGMFEGRAENVLLLIKHRFPGIAQSALDISKIQCNKTRHIASLTNALHHAYLPSTMHLLLFRQDVGLAILESYSRALESLAFTVMSRIEDVLGADLATRDDPKNAAGLMRIASLPCSDDTDKVVSDAKAEVERMRRMEPVPPAPMLYDFVGPRDQDLGPRVTKISSVATKRFSYLENLGGTRSPIARH

SEQ ID NO: 193751 - protein, 739 aa, Zea Mays
MTGPILAGLTQSFLDAINSGAVPTISSSWQSVEEAECRRAFDSAVGTYNSSFDHKTYIEEDSLREAHEDAMRKAISVFNASAVGAGSARLKFEKLLHSSLKKAFEDYKRNAFLEADLQCSNRVQNMESKVRAACNRPDAKLDDIIRLLDGLLTEYESKAYGPGKWKMLVTFLQQCIAGPVLDFFKRQLEHIDAERNALRLKCNSSDDKLALLRKQLEASEGHRAEYVRRYEEVLNDKQKISKDYSTRITELQIKSSKLEERSLSLSSSLETAKRESNDWKSKYDHGILQQKADESKLKSQIASLESRVNISEGRLSATREQADSAQEEASEWKRKYEVAVSEAKTALQRAAVAQERTNKKVQEREDALRSELANQLSEKEEEIARLHAKLSQTEIHATSLISRLEATEAKLKSHESDSLALKEEIRLLTDNLESVRSEAMSREKEVRILEQEKNHLEEKYLSQCKKFDEIDIRCKEAEREARRATELADVARTEASSAQKDKGEAQRLAMERLALIERIERQVEALERDKAKMVEEIERLHQSEKDAVSKVALLERSVDEREKEIDEMLKRNNQQRSSTVQVLESLLATEREACAEANKRAEDLSLMLQATQGKLDMLQQETTLDSKLKTSARRLRGEGTESVHDMDIDEDNGRRRKRSKSTTSPLKSNHTEDGGSVFIGEDTCNGSQQGTETEDYTKFTVLKLKQELTKRGFGAQLLQLKNPNKKDIVALYEKHVVGK

SEQ ID NO: 193752 - protein, 214 aa, Zea Mays
MNRAPKTCTGRILISRALKTQNTGTIYLSHEKVGPGSLESGPELPGRRPDLAVHKRELDLGVVELLGVVPLAQLEVDRRCLDDLYAGGPHAVAGGHLVVHLLHCAVQGGVAVLLVHVVVTSPALVAQPDAIVLDGGRVALKDLVDGKHLAIALLHLLELSQEVPRWWPRASCGRSWGAHRLGSAARDPPPGTDGTCGRPFRRARVAGGTPKVSW

SEQ ID NO: 193753 - protein, 338 aa, Zea Mays
MESFSDADRYIPQEIIGRGSYGVVCSAIDRRTGEKVAIKKIGGVFDDLSDAARTLREIKLLRLLRHPDIVEIKHVMLPPARRDYKDIYVVFELMEADLHQVIKANPDLTTEHHQYFLYQMLRALKYMHAANVYHWDLKPKNILLNADCKLKICDFGLARVAFDDSPTTVFCTDYIATRWYRAPELCGSFFSKYSPAIDMWSIGCIFAEILTGEPLFPGKNVFHQFTLMTNLLGTPSTDTISQIQNEKARKFLSCMRKQPIPFSEKFPGADPSALKLLQRLLAFDPKDRPTAEEALGKWRGNHPVSQFRKWNLSLKKSLPKRTSRNLYSWRYCSTILNF

SEQ ID NO: 193754 - protein, 379 aa, Zea Mays
MWIFLQQEILTGEPLFPGKNVFHQFTLMTNLLGTPSTDTISQIQNEKARKFLSCMRKQPIPFSEKFPGADPSALKLLQRLLAFDPKDRPTAEEALADPYFEGIGEVEREPSCQPIPKMEFEFEEKFTEEDVKELIFLEILQYHPQLLKDYKNSSEKTSFLYPSAVDKFHRQFTSLEENRGSNVMLVRKNASLPRTTTVHSTPIPAKEGPTATSQAAQRIPAARPGRVVGPVLPFESASVTDQHIARQVARNPAVPPATNTSSAYCYHLKPDSADRQEQQLELEEDHMQYRTGQHPMDAKGLAQSDLTDRANLHRSPLHGVAPFKGVAAVAGVLHRKSEGCPMTGMLDELQQICNGMVKLVQLTLGLELMFLNSKEFLEA

SEQ ID NO: 193755 - protein, 426 aa, Zea Mays
MESFSDADRYIPQEIIGRGSYGVVCSAIDRRTGEKVAIKKIGGVFDDLSDAARTLREIKLLRLLRHPDIVEIKHVMLPPARRDYKDIYVVFELMEADLHQVIKANPDLTTEHHQYFLYQMLRALKYMHAANVYHWDLKPKNILLNADCKLKICDFGLARVAFDDSPTTVFCTDYIATRWYRAPELCGSFFSKYSPAIDMWSIGCIFAEILTGEPLFPGKNVFHQFTLMTNLLGTPSTDTISQIQNEKARKFLSCMRKQPIPFSEKFPGADPSALKLLQRLLAFDPKDRPTAEEALADPYFEGIGEVEREPSCQPIPKMEFEFEEKFTEEDVKELIFLEILQYHPQLLKDYKNSSEKTSFLYPSAVDKFHRQFTSLEENRGSNVMLVRKNASLPRTTTVHSTPIPAKEGPTATSQAAQRIPADQEEW

SEQ ID NO: 193756 - protein, 122 aa, Zea Mays
MELGLALRLVAPPPLLPCLSRRALSLPPDFVSSRVLRGRRIHASRLKHGAGVVCNAIMTYSGVEEEEMVEEEMEEEAEPAVSTRPRLELIEKPDRSLALLDEYESEELGTSLCANHRSDYTL

SEQ ID NO: 193757 - protein, 173 aa, Zea Mays
MELGLALRLVAPPPLLPCLSRRALSLPPDFVSSRVLRGRRIHASRLKHGAGVVCNAIMTYSGVEEEEMVEEEMEEEAEPAVSTRPRLELIEKPDRSLALLDEYESEELGTSLCANHRSGYVAVLGKPNVGKSTLINQMVGQKLSIVTDKPQTTRHRILGICSEPEYQFADYTL

SEQ ID NO: 193758 - protein, 337 aa, Zea Mays
MAAPSSAATACFVSPLPPPRRPRHFLRHLARAAAAEPTPASASSFALPSPWPWARRLRDLVPAEAAGRLLSSAAGSLIVALASASLVLGDAGAASAFVVSTPRKLQADELATVRLFQENTPSVVYITNLAVRQDAFTLDVLEVPQGSGSGFVWDKSGHIVTNFHVIRGASDLRVTLADQSVYEAQVVGFDQDKDVAVLRIEAPKDKLRPIPVGVSADLLVGQKVYAIGNPFGLDHTLTTGVISGLRREISSAATGRPIQDVIQTDAAINPGWGHCGPTYKVWQGDKAYFGSKICPRSICGAAWIKWSACPGCSSKRTSRQSGSAANQTRSLWSAYPG

SEQ ID NO: 193759 - protein, 389 aa, Zea Mays
MAAPSSAATACFVSPLPPPRRPRHFLRHLARAAAAEPTPASASSFALPSPWPWARRLRDLVPAEAAGRLLSSAAGSLIVALASASLVLGDAGAASAFVVSTPRKLQADELATVRLFQENTPSVVYITNLAVRVTLADQSVYEAQVVGFDQDKDVAVLRIEAPKDKLRPIPVGVSADLLVGQKVYAIGNPFGLDHTLTTGVISGLRREISSAATGRPIQDVIQTDAAINPGNSGGPLLDSSGNLIGVNTAIYSPSGASSGVGFSIPVDTVGGIVDQLIRFGKVTRPILGVKFAPDQSVEQLGLSGVLVLDAPPNGPAGKAGLQPTKRDPYGRLILGDIITSVNGTKVTNGSDLYRILDQCKVGETVTVEVLRGDHKEKIPVVLEPKADES

SEQ ID NO: 193760 - protein, 187 aa, Zea Mays
MAAPSSAATACFVSPLPPPRRPRHFLRHLARAAAAEPTPASASSFALPSPWPWARRLRDLVPAEAAGRLLSSAAGSLIVALASASLVLGDAGAASAFVVSTPRKLQADELATVRLFQENTPSVVYITNLAVRTRSRSTCSRCRRGPGPALSGIRAATSSPISMSSVARQTLGWSGLRRASCFPSTFS

SEQ ID NO: 193761 - protein, 523 aa, Zea Mays
MLQEILGCDLINEGRDLSLLDKSPVSISEDDTESSLLLNFLSQLKEEKEMQAAKLSAELGSLQTDITEIDRRHSAGMRLSLEDMDVLPSSSLPGASVSALQGALLSGLLPASCKSSIYEERVMRNLVQLENAYYSMRSSVDTCETNVIKRPDNEALRVRENFHQRHSDSDAKGEKTDRLGCFFDGLCKYARHNRFEVRGILKNADVLSSPNVICSLSFDRDEEYFAAAGVSKKIKIFEFDALLNDRVDIHYPLVEMPSKSKLSCVCWNSYIKNYLASTDYDGTVQLWDAGSGQGFTQFTEHRKRAWSVSFSQVDPTKLASGSDDCCVKVWSINQKNSIDTIRNVANVCCVQFSPYSSRMLAFGSADYKIYCYDLRNTRIPWCTISGHGKAVSYVRFLDPETLISASTDNTLKIWDLNQTNCSGLSADSCSLTLNGHSNEKNFVGLSVHDGYITCGSETNEVFSYYKDFPMPITSHRFGSIDPITGQVTNEDNQQFVSSVCWRGKSNMVVAANSSGSIKVLELV

SEQ ID NO: 193762 - protein, 578 aa, Zea Mays
MEGAAAAEVGGGGEDVQIKGAKESGQPAAAAQQPPPLPSGSEALEMPATPLPRDMDWSEHFSFFTSPGGFAGSSDGARGLASVGLSNSESRPDSVTQRGVDHGAEERVEELTLKNCISADAAQPEASAGGSTSGGDRPAVIKGLWGNFTRMARRTSYLASRENAALSYGDIASSRAGDASSRENLATSLANNIISRNNDVSGNEAPTSRVGYVNNEFKTPFHSQQILLSPWSNQDNALKVSSFSNRILDQMRSKTVAPPSGVLGSPLKSKSKGKGVAYQRAREEIRVQANARPRDPLDKIPTIPTSIHDSVARVDMLFSTSGDVSKSHSEGTSLRELIKPGRQTMSKFEKLHLFKQILDLVDNCHAQGFTLQHLRPSYFTILSSNQVKYIGSYTTQDLPTSIKQEFAREDLVSRKRAFGHRIDYQDSNGHGNLMLKHQKVGEQGLVAVRRLANTFLTDKIRDNQIEDNDPGISRQENFSYTTREHFKFVESYGSNMSSAQHVSSSGTQQPAFELRNIEESWYKSPEELSQFKGTPPSNIYSLGVLLFEKVPRRLASAFGYCIQILVQDQKQKRFLDVT

SEQ ID NO: 193763 - protein, 1046 aa, Zea Mays
MEGAAAAEVGGGGEDVQIKGAKESGQPAAAAQQPPPLPSGSEALEMPATPLPRDMDWSEHFSFFTSPGGFAGSSDGARGLASVGLSNSESRPDSVTQRGVDHGAEERVEELTLKNCISADAAQPEASAGGSTSGGDRPAVIKGLWGNFTRMARRTSYLASRENAALSYGDIASSRAGDASSRENLATSLANNIISRNNDVSGNEAPTSRVGYVNNEFKTPFHSQQILLSPWSNQDNALKVSSFSNRILDQMRSKTVAPPSGVLGSPLKSKSKGKGVAYQRAREEIRVQANARPRDPLDKIPTIPTSIHDSVARVDMLFSTSGDVSKSHSEGTSLRELIKPGRQTMSKFEKLHLFKQILDLVDNCHAQGFTLQHLRPSYFTILSSNQVKYIGSYTTQDLPTSIKQEFAREDLVSRKRAFGHRIDYQDSNGHGNLMLKHQKVGEQGLVAVRRLANTFLTDKIRDNQIEDNDPGISRQENFSYTTREHFKFVESYGSNMSSAQHVSSSGTQQPAFELRNIEESWYKSPEELSQFKGTPPSNIYSLGVLLFELFCCSETWEMHCAAMSNLRQRILPPNFLSESPKEAGFCLWLLHPDPCSRPKAKEILGCDLINEGRDLSLLDKSPVSISEDDTESSLLLNFLSQLKEEKEMQAAKLSAELGSLQTDITEIDRRHSAGMRLSLEDMDVLPSSSLPGASVSALQGALLSGLLPASCKSSIYEERVMRNLVQLENAYYSMRSSVDTCETNVIKRPDNEALRVRENFHQRHSDSDAKGEKTDRLGCFFDGLCKYARHNRFEVRGILKNADVLSSPNVICSLSFDRDEEYFAAAGVSKKIKIFEFDALLNDRVDIHYPLVEMPSKSKLSCVCWNSYIKNYLASTDYDGTVQLWDAGSGQGFTQFTEHRKRAWSVSFSQVDPTKLASGSDDCCVKVWSINQKNSIDTIRNVANVCCVQFSPYSSRMLAFGSADYKIYCYDLRNTRIPWCTISGHGKAVSYVRFLDPETLISASTDNTLKIWDLNQTNCSGLSADSCSLTLNGHSNEKGYLFMMDT

SEQ ID NO: 193764 - protein, 170 aa, Zea Mays
MAPDYVTLAEDSIHVEANGHNETQVRVSVNDDANSTTIVIKVAEKSCNISIHSAITRETAGSGRVIRMPLTPTYTLLPVFLLLVAVAVCIVVRRWRNQDGDPAYQKLDMSDLPVSVGGKKEHDDRSDKWDDNWGDDWDDEEAPVTPSKPLPNPSSKGLAPRRSAKDGWKD

SEQ ID NO: 193765 - protein, 534 aa, Zea Mays
MPHLDILRARNIRGFFFCTKSVIDKERRGDYLGKTVQVVPHITDEIQDWIQRVAMNPVDDTEEPADVCVIELGGTIGDIESMPFIEALGQFSYRVGPGNFCLVHVSLVPVLNVVGEQKTKPTQHSVRGLRGLGLMPDILACRSTQPLEEHVKVKLAQFCHVPIPNIINLHDVTNIWHIPLLLRDQKAHEAILKVLDLQCASKVAREPQLSEWTERVSRCDRLKSPVRIAMVGKYTGLSDSYLSVIKALLHASVALDRKLVVDWVPSCDLEDSTAKETPDAYEKAWESLKGADGVLVPGGFGDRGVQGKILAAKYARENNVPYLGICLGMQIAVIEFARSVMKLHGANSTEFDPTTKTPCVVFMPEGSKTHMGATMRLGSRRTFFQATNCKSAKLYGNACYVDERHRHRYEVNPDMVPEFEKAGLSFVGRDESGERMEIIELPTHRFFVGAQFHPEFKSRPGKPSPLFLGLVAASSGQLDHLLQRGLTSSAGRDICGKGGAQKPKACQNGHVMKPLNGLVHGHYSATRCNGVIPI

SEQ ID NO: 193766 - protein, 560 aa, Zea Mays
MSPFEHGEVFVLDDGGEVDLDLGNYERFLDIKLTRDNNITTGKIYQSVIDKERRGDYLGKTVQVVPHITDEIQDWIQRVAMNPVDDTEEPADVCVIELGGTIGDIESMPFIEALGQFSYRVGPGNFCLVHVSLVPVLNVVGEQKTKPTQHSVRGLRGLGLMPDILACRSTQPLEEHVKVKLAQFCHVPIPNIINLHDVTNIWHIPLLLRDQKAHEAILKVLDLQCASKVAREPQLSEWTERVSRCDRLKSPVRIAMVGKYTGLSDSYLSVIKALLHASVALDRKLVVDWVPSCDLEDSTAKETPDAYEKAWESLKGADGVLVPGGFGDRGVQGKILAAKYARENNVPYLGICLGMQIAVIEFARSVMKLHGANSTEFDPTTKTPCVVFMPEGSKTHMGATMRLGSRRTFFQATNCKSAKLYGNACYVDERHRHRYEVNPDMVPEFEKAGLSFVGRDESGERMEIIELPTHRFFVGAQFHPEFKSRPGKPSPLFLGLVAASSGQLDHLLQRGLTSSAGRDICGKGGAQKPKACQNGHVMKPLNGLVHGHYSATRCNGVIPI

SEQ ID NO: 193767 - protein, 305 aa, Zea Mays
MVGKYTGLSDSYLSVIKALLHASVALDRKLVVDWVPSCDLEDSTAKETPDAYEKAWESLKGADGVLVPGGFGDRGVQGKILAAKYARENNVPYLGICLGMQIAVIEFARSVMKLHGANSTEFDPTTKTPCVVFMPEGSKTHMGATMRLGSRRTFFQATNCKSAKLYGNACYVDERHRHRYEVNPDMVPEFEKAGLSFVGRDESGERMEIIELPTHRFFVGAQFHPEFKSRPGKPSPLFLGLVAASSGQLDHLLQRGLTSSAGRDICGKGGAQKPKACQNGHVMKPLNGLVHGHYSATRCNGVIPI

SEQ ID NO: 193768 - protein, 549 aa, Zea Mays
MPEPCPHSSTAKCLFWTMVVDLDLGNYERFLDIKLTRDNNITTGKIYQSVIDKERRGDYLGKTVQVVPHITDEIQDWIQRVAMNPVDDTEEPADVCVIELGGTIGDIESMPFIEALGQFSYRVGPGNFCLVHVSLVPVLNVVGEQKTKPTQHSVRGLRGLGLMPDILACRSTQPLEEHVKVKLAQFCHVPIPNIINLHDVTNIWHIPLLLRDQKAHEAILKVLDLQCASKVAREPQLSEWTERVSRCDRLKSPVRIAMVGKYTGLSDSYLSVIKALLHASVALDRKLVVDWVPSCDLEDSTAKEGADGVLVPGGFGDRGVQGKILAAKYARENNVPYLGICLGMQIAVIEFARSVMKLHGANSTEFDPTTKTPCVVFMPEGSKTHMGATMRLGSRRTFFQATNCKSAKLYGNACYVDERHRHRYEVNPDMVPEFEKAGLSFVGRDESGERMEIIELPTHRFFVGAQFHPEFKSRPGKPSPLFLGLVAASSGQLDHLLQRGLTSSAGRDICGKGGAQKPKACQNGHVMKPLNGLVHGHYSATRCNGVIPI

SEQ ID NO: 193769 - protein, 562 aa, Zea Mays
MPEPCPHSSTAKCLFWTMVVDLDLGNYERFLDIKLTRDNNITTGKIYQSVIDKERRGDYLGKTVQVVPHITDEIQDWIQRVAMNPVDDTEEPADVCVIELGGTIGDIESMPFIEALGQFSYRVGPGNFCLVHVSLVPVLNVVGEQKTKPTQHSVRGLRGLGLMPDILACRSTQPLEEHVKVKLAQFCHVPIPNIINLHDVTNIWHIPLLLRDQKAHEAILKVLDLQCASKVAREPQLSEWTERVSRCDRLKSPVRIAMVGKYTGLSDSYLSVIKALLHASVALDRKLVVDWVPSCDLEDSTAKETPDAYEKAWESLKGADGVLVPGGFGDRGVQGKILAAKYARENNVPYLGICLGMQIAVIEFARSVMKLHGANSTEFDPTTKTPCVVFMPEGSKTHMGATMRLGSRRTFFQATNCKSAKLYGNACYVDERHRHRYEVNPDMVPEFEKAGLSFVGRDESGERMEIIELPTHRFFVGAQFHPEFKSRPGKPSPLFLGLVAASSGQLDHLLQRGLTSSAGRDICGKGGAQKPKACQNGHVMKPLNGLVHGHYSATRCNGVIPI

SEQ ID NO: 193770 - protein, 580 aa, Zea Mays
MKYVLVTGGVVSGLGKGVTASSIGVVLKACGLRVTSIKIDPYLNTDAGTMSPFEHGEVFVLDDGGESVIDKERRGDYLGKTVQVVPHITDEIQDWIQRVAMNPVDDTEEPADVCVIELGGTIGDIESMPFIEALGQFSYRVGPGNFCLVHVSLVPVLNVVGEQKTKPTQHSVRGLRGLGLMPDILACRSTQPLEEHVKVKLAQFCHVPIPNIINLHDVTNIWHIPLLLRDQKAHEAILKVLDLQCASKVAREPQLSEWTERVSRCDRLKSPVRIAMVGKYTGLSDSYLSVIKALLHASVALDRKLVVDWVPSCDLEDSTAKETPDAYEKAWESLKGADGVLVPGGFGDRGVQGKILAAKYARENNVPYLGICLGMQIAVIEFARSVMKLHGANSTEFDPTTKTPCVVFMPEGSKTHMGATMRLGSRRTFFQATNCKSAKLYGNACYVDERHRHRYEVNPDMVPEFEKAGLSFVGRDESGERMEIIELPTHRFFVGAQFHPEFKSRPGKPSPLFLGLVAASSGQLDHLLQRGLTSSAGRDICGKGGAQKPKACQNGHVMKPLNGLVHGHYSATRCNGVIPI

SEQ ID NO: 193771 - protein, 116 aa, Zea Mays
MASSAATTAKLIALPPAPTRGGCCCWRTRRPAIPAAAARLKVSASAASSDVPDFLSSNWLETRKRKPFGPRLNFSAEEAVEYQLESLKYNDLPRPDYGIEALTPSRGQLTLDDSLI

SEQ ID NO: 193772 - protein, 110 aa, Zea Mays
MYRFAGFDPFERSTYFGRQFDLGQFERFRRLFHHSTYRVLLGHRERRILSSLWVEENQFKQRVWIQGARPEEEEIFQFTMVQRVGGSWDGYWLTESLINDGDAFSGGIAY

SEQ ID NO: 193773 - protein, 86 aa, Zea Mays
MHSETFADVLKQAGGKVELQLYKGKTHTDVFLQDPLRGGRDKLVEDVLSVIHVDDASARERDASAPTPERLVYEWQIKLARQISPF

SEQ ID NO: 193774 - protein, 310 aa, Zea Mays
MDNGAHSIYDLSIYLPYPCNSQIQLLLLPNHVKLLDWGEDGHRSEQDIAALRAAFSQEVSVWHKLDHPNVTKFIGAIMGARDLNIQTENGHIGMPTNICCVVVEYLPGGALKSFLIKNRRKKLAFKVVVQIALDLARGLSYLHSKKIVHRDVKTENMLLDKTRTVKIADFGVARLEASNPSDMTGETGTLGYMAPEVLNGNPYNRKCDVYSFGICLWEIYCCDMPYPDLSFSEVTSAVVRQNLRPEIPRCCPSSLSNVMKRCWDANPDKRPEMAEAVSMLEAIDTSKGGGMIPVDQRPGCLACFRQYRGP

SEQ ID NO: 193775 - protein, 231 aa, Zea Mays
MGARDLNIQTENGHIGMPTNICCVVVEYLPGGALKSFLIKNRRKKLAFKVVVQIALDLARGYLHSKKIVHRDVKTENMLLDKTRTVKIADFGVARLEASNPSDMTGETGTLGYMAPEVLNGNPYNRKCDVYSFGICLWEIYCCDMPYPDLSFSEVTSAVVRQNLRPEIPRCCPSSLSNVMKRCWDANPDKRPEMAEAVSMLEAIDTSKGGGMIPVDQRPGCLACFRQYRGP

SEQ ID NO: 193776 - protein, 250 aa, Zea Mays
MHLHVPSEVPFGAWLVGRKGSLSAGVQYKPLSGSKYPMPFTELENWNYAISYGVGSTSPLSPSFIFSLELARSTQLTASFYQHLVVQRRVKNPFEDDQVVGITNYIDFGLELAAKVDKDKVSGDGNSFQLAASWQANKNFLLKGKLGPSTSSVALAFKSWWRPSFTFSVTAVNDHSKGTTSYGFGLRVEDLRRASYQRADPNYVMLTPSKEHLAPGVLREYGKRPMFQTQIDSGNYDHLPTELKPLGRIF

SEQ ID NO: 193777 - protein, 316 aa, Zea Mays
MGMFFSKAEPPPPMVLVPPLFDYPPIAARTRMAVPAYELMFGKVSLHNLFEDYFDQAGNMTSRIMLKPLEDPHVDLIATVSAAADRNSGTEVKGDALFRWQRELDDPHTFVDLLVSTSNPLLQLRLCAYHPKYRIGAFGTLPLLMGNRVRSEDYGVMGVRYGSENLSVGASFVPISLPSEVPFGAWLVGRKGSLSAGVQYKPLSGSKYPMPFTELENWNYAISYGVGSTSPLSPSFIFSLELARSTQLTASFYQHLVVQRRVKNPFEDDQVVGITNYIDFGLELAAKVDKDKVSGDGNSFQLAASWQANKNFLLKL

SEQ ID NO: 193778 - protein, 229 aa, Zea Mays
MGMFFSKAEPPPPMVLVPPLFDYPPIAARTRMAVPAYELMFGKVSLHNLFEDYFDQAGNMTSRIMLKPLEDPHVDLIATVSAAADRNSGTEVKGDALFRWQRELDDPHTFVDLLVSTSNPLLQLRLCAYHPKYRIGAFGTLPLLMGNRVRSEDYGVMGYPVRYPLVHGWLGEKGAYLQEYNTSHLVAANILCHLQNWRTGIMQSVMVLAQLARSALHSFSPWNLPEAHS

SEQ ID NO: 193779 - protein, 266 aa, Zea Mays
MGVRYGSENLSVGASFVPISLPSEVPFGAWLVGRKGSLSAGVQYKPLSGSKYPMPFTELENWNYAISYGVGSTSPLSPSFIFSLELARSTQLTASFYQHLVVQRRVKNPFEDDQVVGITNYIDFGLELAAKVDKDKVSGDGNSFQLAASWQANKNFLLKGKLGPSTSSVALAFKSWWRPSFTFSVTAVNDHSKGTTSYGFGLRVEDLRRASYQRADPNYVMLTPSKEHLAPGVLREYGKRPMFQTQIDSGNYDHLPTELKPLGRIF

SEQ ID NO: 193780 - protein, 179 aa, Zea Mays
MIAAIPNIIGWLAISFAKDSSFLFMGRLLEGFGVGVISYTVPVYIAEIAPQDQRGALGSVNQLSVTIGILLAYLFGMFVPWRILAVLGILPCSILIPGLFFVPESPRWLAKMGKMEDFEYSLQVLRGFQTDITAEVNEIKRSLASSRRRTTIRFADIKQKRYSVPLVVGDLLFVSLFTY

SEQ ID NO: 193781 - protein, 313 aa, Zea Mays
MSFRDQESGGEDGGRTSSASDLRKPLINTGSWYRMPPAGGVMGSRQSSLMERLGSSAFSLRDVAISATLCTLIVALGPIQFGFTCGYSSPTQDAIIADLGLSLSEFSLFGSLSNVGAMVGAISSGQLAEYIGRKGSLMIAAIPNIIGWLAISFAKDSSFLFMGRLLEGFGVGVISYTVPVYIAEIAPQDQRGALGSVNQLSVTIGILLAYLFGMFVPWRILAVLGILPCSILIPGLFFVPESPRWLAKMGKMEDFEYSLQVLRGFQTDITAEVNEIKRSLASSRRRTTIRFADIKQKRYSVPLVESVSLSCSS

SEQ ID NO: 193782 - protein, 277 aa, Zea Mays
MSFRDQESGGEDGGRTSSASDLRKPLINTGSWYRMPPAGGVMGSRQSSLMERLGSSAFSLRDVAISATLCTLIVALGPIQFGFTCGYSSPTQDAIIADLGLSLSEFSLFGSLSNVGAMVGAISSGQLAEYIGRKGSLMIAAIPNIIGWLAISFAKDSSFLFMGRLLEGFGVGVISYTVPVYIAEIAPQDQRGALGSVNQLSVTIGILLAYLFGMFVPWRILAVLGILPCSILIPGLFFVPESPRWLIVCFRQKWGRWRILNIHCKFCEDFRQISQQK

SEQ ID NO: 193783 - protein, 73 aa, Zea Mays
MPLQNPAHSTLLACCVIAVNHPIFQHDGISQLLRAKEAHELACFSTPRRYCLSMGDGPIIMNRNPCKSLGSGR

SEQ ID NO: 193784 - protein, 58 aa, Zea Mays
MQPRVSLMAVSQIIKSACKHCFPLYFIQAPLHTHTQYILATGIACCSLISNWLKRTQD

SEQ ID NO: 193785 - protein, 77 aa, Zea Mays
MVSMFCGLQLQKVILVSYRTEGAMLPFCTKRNATALKHYCTHQKRVAAVSCSDFLMAITLQVPRPCRSYSWTIRVCC

SEQ ID NO: 193786 - protein, 213 aa, Zea Mays
MEAPLLLPISTASSCIEIAEGAVPSGPRARSSSSMPSAQSFVLRVVTVVAVACASLFAQHEAGKGFAVSVANDLPRGSAAARRFDLLLVSNARAVPGPVVPAPARVTESMVDYLASAAAEVEVEVEAPPSAAGCGMSARLLRLLEARREGFVARLNRAMRDRWSDAAVDAALGAPARLACHDQKKGATALTGRGTTTSPRRTPDAARGSSVAT

SEQ ID NO: 193787 - protein, 100 aa, Zea Mays
MAMAPCSSGPLSSRRRRRKRCRLRLGSVGAHEAAALWLAGPLEWLGDVPPSSRSAPVYIEVREDVRCKKGGGIERKMVCVCVYYEGLTNLNNIDQRENWI

SEQ ID NO: 193788 - protein, 154 aa, Zea Mays
MLRQDPKERLTAAEILNHPWIREDGEAPDKPLDITVISRMKQFRAMNKLKKVALKVVAENLSEEEIVGLKEMFKSLDTDNSGTITLEELRAGLPKLGTKISESEIRQLMEAADVDGNGTIDYVEFISATMHMNRLEKEDHIFKAFEYFDKDHSG

SEQ ID NO: 193789 - protein, 215 aa, Zea Mays
MLRQDPKERLTAAEILNHPWIREDGEAPDKPLDITVISRMKQFRAMNKLKKVALKVVAENLSEEEIVGLKEMFKSLDTDNSGTITLEELRAGLPKLGTKISESEIRQLMEAADVDGNGTIDYVEFISATMHMNRLEKEDHIFKAFEYFDKDHSGHITVDELEEALKKYDMGDEATVKEIIAEVDTDHDGRINYQEFVAMMKNNSPEIVPNRRRMF

SEQ ID NO: 193790 - protein, 119 aa, Zea Mays
MHQGSRRQHLALQGARRREALRPPGRRRRRRVPQERPRRDAVLRRARRREAVPGRGLYQERAREDGALRPPRRRQAVQGRGLRQERAGEHRLLQGSWRRETLRVGPGGLEPRGRRAAVR

SEQ ID NO: 193791 - protein, 433 aa, Zea Mays
MDKEQQESHLDSFAPLDGAAAPEDQQHQPACGGGPEMVDYMLGRHHVNAHAPPSPTQSQAVSFDKLSFSDVLQFADFGPKLALNHPVAASVGGGEDADADDDDDGYFFRFQSLPQRHADREAAGSKTTAEDGGGTGVVVSEGTTLVQQQADHGRADKAGDQGKSGRRKRPRTVKTSEEVESQRMTHIAVERNRRRQMNEYLRILRSLMPGSYVQRGDQASIIGGAIEFIRELEQLIQCLESQKRRRLYGGSGDAPRPPVVDAAAGSGGALITSSTQPLALQPPHLFPPTPSHPFPVAGADAKITLDLEAAGGAVVDDAGGGLREEVAENKSCLADIEVRALGADAMIKILSRRRPGQLIKTIAALEDMQMSILHTNITTIEQTVLYSFNVKIVGEARYSAEDIAGAVHQILSFIDVNYSLTLTFNGLTNRGVL

SEQ ID NO: 193792 - protein, 94 aa, Zea Mays
MFQNGESWKTRLETTTSVEYMSSSRCGLVKGSVRFFHMSHHTPPWPSMVPFSPVMKTSCRPWPWIKLMYLPPGSSRPLPYDGSGSMSGQLDVSW

SEQ ID NO: 193793 - protein, 102 aa, Zea Mays
MSRAFGNRLLKQFVIADPEIQEQEINDELEFLIIASDGLWDVVPNEDAVSLVKMEEDPEAAARKLTETAFSRGSGDNITCIVVKFEHDKPGGGGYSPPGDKS

SEQ ID NO: 193794 - protein, 243 aa, Zea Mays
MVYDGAVKDQDQESAAASTALAASVVAASPEQVVVGSTRVSARPPQDKRLGVRHPLKHRWFRARGKVMVELGGVPPAHAVPEGEEEEEEEEGVSESEVEEELVEVEVEQASSAGTGMRGVEVEVLSAPATGVQEMDVEVGEMEVSPEPAVAVGGTELEPQPDDEDEVSSVTLARGERKQEAAPAPASSAVLAVEAPREKDQDGERVEKEKRDKEREMQKERERVDEVGYMSGGWKRSWRFTCC

SEQ ID NO: 193795 - protein, 71 aa, Zea Mays
MKHPEFMTNTKLAINETYRKTDSEFLDAERNSHRDDGSTASTAVLVGDHLYVANVGDSRAVISKAGKAFGF

SEQ ID NO: 193796 - protein, 347 aa, Zea Mays
MVEKAKTHFTLAGSANQSDPAEWQKLHEVEIHQGRCMDARKIGDWKSALREADAAIAVGADSSRLLLALRSEALLWLHKLEEADLTITSLLKLDDASLPSTPTRVSGMSADSYVHIVQAKVNVTFGRFDSAVALAEKAKLIDGVSSEVEVILNNVRLVALARARGNDLFKAACWSKLGRWAKAVEDCSEALRVQPNYTKALLRRAASYAKLERWADCVRDYEVLRKDLPGDTEVAESLFHAQVALKTARGEVVSNMKFGGVVEEIISLEQLQDVIRSPGEFLLYMHLACCRHFTSFLVLVVLRSGQLTRCIRSLLHGYNEQAMCTNYPVCGLPLLRVPCIEFPEGKR

SEQ ID NO: 193797 - protein, 650 aa, Zea Mays
MAEADLTLHDAGGGARDKPDRKADVFADLGSPVSPLRLRPAATPSTSSSSSGSAKSPAPGNAAAGRGGRGNHSGELAQESTNPPGHRRAGSGPLIFSGASSSTTASSPLTNALPTGNICRVAGAAAAAAATQPPRARPAVLGSGTGHYGHGSIMRRGGGATPARTSGDAAPLLHGHGSNSSRSRSPASCPAPAPPATSGGLQEITRAGNEWYKKGRHADALRHYDRAVALCPDSAACRGNRAAALIGLGRLAEAFRECEEAVRLDPASGRAHGRLAGLCLRLGMVEKAKTHFTLAGSANQSDPAEWQKLHEVEIHQGRCMDARKIGDWKSALREADAAIAVGADSSRLLLALRSEALLWLHKLEEADLTITSLLKLDDASLPSTPTRVSGMSADSYVHIVQAKVNVTFGRFDSAVALAEKAKLIDGVSSEVEVILNNVRLVALARARGNDLFKAACWSKLGRWAKAVEDCSEALRVQPNYTKALLRRAASYAKLERWADCVRDYEVLRKDLPGDTEVAESLFHAQVALKTARGEVVSNMKFGGVVEEIISLEQLQDVIRSPGVSVLYFMATMNKQCAQITPSVDSLCSECPALNFLKVNVDERPLVASAENVRVVPSFKIYKDGTRVKEMVCPSLQVLRYSVRHYAVSSS

SEQ ID NO: 193798 - protein, 112 aa, Zea Mays
MKFGGVVEEIISLEQLQDVIRSPGVSVLYFMATMNKQCAQITPSVDSLCSECPALNFLKVNVDERPLVASAENVRVVPSFKIYKDGTRVKEMVCPSLQVLRYSVRHYAVSSS

SEQ ID NO: 193799 - protein, 197 aa, Zea Mays
MSYYGSSSSGGRSSRRVDYGRTYVVRPKGRHLATIVWLHGIGDNGASWSQLLDSLPLPNIKWICPTAATRPVAAFGGFPCTAWFDVEDTSIDGRDDIEGLDASAAHIANLLSSEPSDVKLGIGGFSMGAAVALHSAACYAHGKFTSGIPYPIALNAVISLSGWLPCSRTLRSKMEGSHIAVRRAGSLPILLSHGRGG

SEQ ID NO: 193800 - protein, 223 aa, Zea Mays
MSYYGSSSSGGRSSRRVDYGRTYVVRPKGRHLATIVWLHGIGDNGASWSQLLDSLPLPNIKWICPTAATRPVAAFGGFPCTAWFDVEDTSIDGRDDIEGLDASAAHIANLLSSEPSDVKLGIGGFSMGAAVALHSAACYAHGKFTSGIPYPIALNAVISLSGWLPCSRTLRSKMEGSHIAVRRAGSLPILLSHGRGDDDADSKEKEIQYMLLLDRMARDQLRF

SEQ ID NO: 193801 - protein, 273 aa, Zea Mays
MSYYGSSSSGGRSSRRVDYGRTYVVRPKGRHLATIVWLHGIGDNGASWSQLLDSLPLPNIKWICPTAATRPVAAFGGFPCTAWFDVEDTSIDGRDDIEGLDASAAHIANLLSSEPSDVKLGIGGFSMGAAVALHSAACYAHGKFTSGIPYPIALNAVISLSGWLPCSRTLRSKMEGSHIAVRRAGSLPILLSHGRGDDDADSKEKEIQYMLLLDMDEVVVYRDGERSAEVLRNSGFSFLTFKPYNGLGHYTIPEELDDLCKWLSSSLGLGRSR

SEQ ID NO: 193802 - protein, 104 aa, Zea Mays
MGAAVALHSAACYAHGKFTSGIPYPIALNAVISLSGWLPCSRTLRSKMEGSHIAVRRAGSLPILLSHGRGDDDADSKEKEIQYMLLLDWMKLSSTGMARDQLRF

SEQ ID NO: 193803 - protein, 340 aa, Zea Mays
MVSYDKAFESYKKALTTATSVAGLATSMMMDHTIVVEKKNDGLANNHVYCVVKTYLAMCMNIDIQQRLRVSSMDEDDKMMVSMDEGDKMLDVYQGTEFKWCLVCKDSSKDSLNNGSQNESQLFELTFNKRHKDKAIKAQERTLMIYMTEYDDWSAIDLNHPSTFDTLAMDHKLKQSIIDDLNRFIKRKDYYKKIGKAWKRGYLLYGPPGTGKSSLIATMANQLRFDIYDLELTAVTSNSDLERLLVGMGNRSILVIEDIDCTIELEQREEGEGHDKSNSTEQNRREEKVTMSGLLNFVDGLWPTSGEERIIVFTTNYKERLDPTLLRPGRMDMHIHMGGC

SEQ ID NO: 193804 - protein, 81 aa, Zea Mays
MLSLPRGSHLSSWTSVKIAPHNGAPLQPRTSRDLLRGRLSAHKGSRVAPPKTCSSPLSSLKSERSSLATRCRRRGESPLCW

SEQ ID NO: 193805 - protein, 1084 aa, Zea Mays
MVNAEPCSMGGIMDYGVGVGTKSSPRSMAIEKAQEELRQESDVRDEWRRELEFLEKVCPHQGGNPLDFNFAHLETVGVHSASLTNQVEAQTVISDAKGSFSASPLGDSVESTDKPGGSMCRETNTADNLMLLGGGKNDIAEEKVVKRGTKRLNAAQPKHSLPSDGHKNTKKPAASGLSHLGVKSQAYVRRNRSKPSRESGNVTSIRSSMIPAKVYEPNDEKVTAQKNNADDHGVLSVSSIKQSGPNRDIAPKSIASDDHAAMELDGIQTILESECVVNDKVNKAGNNNKAKQLSSNDTNHDRFLVGCGEIAAEVSSAETPDANLKVVIKPCYSSASTYDEKESCAVHEKADDGHLDECMAHIREGELGHSRTLPCVVEASTSHNDVVGPSCEGTVNIVDEHADGDINTVAGKIDSHEDLDSSRHSNMILKVSGTSIDFSRPASLKESSDLVRPEASNISHVKDEIEVCNSAIVAQKDTECLSSGRSMNIEESPVSVRKNSYVGNSNSAHPISVGIDLSDALSPPKNDESNVESEIKKYENLNKMEKKAYEDSILKNARVIEANIKKAGQRSPCNIALEKRRKSHWDFVLEEMTWMANDFMQERLWKSVAAAQVCHWIASDAHAKFEKASILKKQKAVIKIIAKGIMSFWRSAEALQTADRTAKVMPHNSTMLEEIDPSGVKAGKEQGHNSLEAKESSQQRSQIHDYAVRFLEYNRTADLHVLPEAPPTPDRLNDFGVLKVSDHLSEESLFYTVAAPGAVLAYRDSLESLFMYHKEDGNAELNDDYEASACDSVADLPQENAYEEDEGETCTFLSPKAYVGGSISNMVHKKKHVMPQRISLARPYEIGTYVPYQPCMESKSRNQPLLSNGKRPTSFLAIPPKRTRTAARQQVVSPFHAGASVPPQDFSSGNTNSYQDDQSSLHSESLPWRNMDFESTVDSDRQLPYDAGEMCTKVNNKKKLKNSGYKIAQNAANLYVPTSAKFQGHIYDPRKQMQVDLVNKYEQEYLKKRTDVHQYGSNGNKVAYGGQHASKKLKMGKQGIDISQETSVASQMSNMAHPARFIKIIANRDRGRKCKALKITRILG

SEQ ID NO: 193806 - protein, 1079 aa, Zea Mays
MVNAEPCSMGGIMDYGVGVGTKSSPRSMAIEKAQEELRQESDVRDEWRRELEFLEKGGNPLDFNFAHLETVGVHSASLTNQVEAQTVISDAKGSFSASPLGDSVESTDKPGGSMCRETNTADNLMLLGGGKNDIAEEKVVKRGTKRLNAAQPKHSLPSDGHKNTKKPAASGLSHLGVKSQAYVRRNRSKPSRESGNVTSIRSSMIPAKVYEPNDEKVTAQKNNADDHGVLSVSSIKQSGPNRDIAPKSIASDDHAAMELDGIQTILESECVVNDKVNKAGNNNKAKQLSSNDTNHDRFLVGCGEIAAEVSSAETPDANLKVVIKPCYSSASTYDEKESCAVHEKADDGHLDECMAHIREGELGHSRTLPCVVEASTSHNDVVGPSCEGTVNIVDEHADGDINTVAGKIDSHEDLDSSRHSNMILKVSGTSIDFSRPASLKESSDLVRPEASNISHVKDEIEVCNSAIVAQKDTECLSSGRSMNIEESPVSVRKNSYVGNSNSAHPISVGIDLSDALSPPKNDESNVESEIKKYENLNKMEKKAYEDSILKNARVIEANIKKAGQRSPCNIALEKRRKSHWDFVLEEMTWMANDFMQERLWKSVAAAQVCHWIASDAHAKFEKASILKKQKAVIKIIAKGIMSFWRSAEALQTADRTAKVMPHNSTMLEEIDPSGVKAGKEQGHNSLEAKESSQQRSQIHDYAVRFLEYNRTADLHVLPEAPPTPDRLNDFGVLKVSDHLSEESLFYTVAAPGAVLAYRDSLESLFMYHKEDGNAELNDDYEASACDSVADLPQENAYEEDEGETCTFLSPKAYVGGSISNMVHKKKHVMPQRISLARPYEIGTYVPYQPCMESKSRNQPLLSNGKRPTSFLAIPPKRTRTAARQQVVSPFHAGASVPPQDFSSGNTNSYQDDQSSLHSESLPWRNMDFESTVDSDRQLPYDAGEMCTKVNNKKKLKNSGYKIAQNAANLYVPTSAKFQGHIYDPRKQMQVDLVNKYEQEYLKKRTDVHQYGSNGNKVAYGGQHASKKLKMGKQGIDISQETSVASQMSNMAHPARFIKIIANRDRGRKCKALKITRILG

SEQ ID NO: 193807 - protein, 952 aa, Zea Mays
MEERIGISRESMPAPGYLLDYISAFTVPTYSYLLQGGNPLDFNFAHLETVGVHSASLTNQVEAQTVISDAKGSFSASPLGDSVESTDKPGGSMCRETNTADNLMLLGGGKNDIAEEKVVKRGTKRLNAAQPKHSLPSDGHKNTKKPAASGLSHLGVKSQAYVRRNRSKPSRESGNVTSIRSSMIPAKVYEPNDEKVTAQKNNADDHGVLSVSSIKQSGPNRDIAPKSIASDDHAAMELDGIQTILESECVVNDKVNKAGNNNKAKQLSSNDTNHDRFLVGCGEIAAEVSSAETPDANLKVVIKPCYSSASTYDEKESCAVHEKADDGHLDECMAHIREGELGHSRTLPCVVEASTSHNDVVGPSCEGTVNIVDEHADGDINTVAGKIDSHEDLDSSRHSNMILKVSGTSIDFSRPASLKESSDLVRPEASNISHVKDEIEVCNSAIVAQKDTECLSSGRSMNIEESPVSVRKNSYVGNSNSAHPISVGIDLSDALSPPKNDESNVESEIKKYENLNKMEKKAYEDSILKNARVIEANIKKAGQRSPCNIALEKRRKSHWDFVLEEMTWMANDFMQERLWKSVAAAQVCHWIASDAHAKFEKASILKKQKAVIKIIAKGIMSFWRSAEALQTADRTAKVMPHNSTMLEEIDPSGVKAGKEQGHNSLEAKESSQQRSQIHDYAVRFLEYNRTADLHVLPEAPPTPDRLNDFGVLKVSDHLSEESLFYTVAAPGAVLAYRDSLESLFMYHKEDGNAELNDDYEASACDSVAVCSDLPQENAYEEDEGETCTFLSPKAYVGGSISNMVHKKKHVMPQRISLARPYEIGTYVPYQPCMESKSRNQPLLSNGKRPTSFLAIPPKRTRTAARQQVVSPFHAGASVPPQDFSSGNTNSYQDDQSSLHSESLPWRNMDFESTVDSDRQLPYDAGEMCTKVNNKKKLKNSGYKIAQNAANFF

SEQ ID NO: 193808 - protein, 1071 aa, Zea Mays
MVNAEPCSMGGIMDYGVGVGTKSSPRSMAIEKAQEELRQESDVRDEWRRELEFLEKGGNPLDFNFAHLETVGVHSASLTNQVEAQTVISDAKGSFSASPLGDSVESTDKPGGSMCRETNTADNLMLLGGGKNDIAEEKVVKRGTKRLNAAQPKHSLPSDGHKNTKKPAASGLSHLGVKSQAYVRRNRSKPSRESGNVTSIRSSMIPAKVYEPNDEKVTAQKNNADDHGVLSVSSIKQSGPNRDIAPKSIASDDHAAMELDGIQTILESECVVNDKVNKAGNNNKAKQLSSNDTNHDRFLVGCGEIAAEVSSAETPDANLKVVIKPCYSSASTYDEKESCAVHEKADDGHLDECMAHIREGELGHSRTLPCVVEASTSHNDVVGPSCEGTVNIVDEHADGDINTVAGKIDSHEDLDSSRHSNMILKVSGTSIDFSRPASLKESSDLVRPEASNISHVKDEIEVCNSAIVAQKDTECLSSGRSMNIEESPVSVRKNSYVGNSNSAHPISVGIDLSDALSPPKNDESNVESEIKKYENLNKMEKKAYEDSILKNARVIEANIKKAGQRSPCNIALEKRRKSHWDFVLEEMTWMANDFMQERLWKSVAAAQVCHWIASDAHAKFEKASILKKQKAVIKIIAKGIMSFWRSAEALQTADRTAKVMPHNSTMLEEIDPSGVKAGKEQGHNSLEAKESSQQRSQIHDYAVRFLEYNRTADLHVLPEAPPTPDRLNDFGVLKVSDHLSEESLFYTVAAPGAVLAYRDSLESLFMYHKEDGNAELNDDYEASACDSVADLPQENAYEEDEGETCTFLSPKAYVGGSISNMVHKKKHVMPQRISLARPYEIGTYVPYQPCMESKSRNQPLLSNGKRPTSFLAIPPKRTRTAARQQVVSPFHAGASVPPQDFSSGNTNSYQDDQSSLHSESLPWRNMDFESTVDSDRQLPYDAGEMCTKVNNKKKLKNSGYKIAQNAANLYVPTSAKVHFSSFIGAPLLLLEYLKKRTDVHQYGSNGNKVAYGGQHASKKLKMGKQGIDISQETSVASQMSNMAHPARFIKIIANRDRGRKCKALKITRILG

SEQ ID NO: 193809 - protein, 952 aa, Zea Mays
MVNAEPCSMGGIMDYGVGVGTKSSPRSMAIEKAQEELRQESDVRDEWRRELEFLEKGGNPLDFNFAHLETVGVHSASLTNQVEAQTVISDAKGSFSASPLGDSVESTDKPGGSMCRETNTADNLMLLGGGKNDIAEEKVVKRGTKRLNAAQPKHSLPSDGHKNTKKPAASGLSHLGVKSQAYVRRNRSKPSRESGNVTSIRSSMIPAKVYEPNDEKVTAQKNNADDHGVLSVSSIKQSGPNRDIAPKSIASDDHAAMELDGIQTILESECVVNDKVNKAGNNNKAKQLSSNDTNHDRFLVGCGEIAAEVSSAETPDANLKVVIKPCYSSASTYDEKESCAVHEKADDGHLDECMAHIREGELGHSRTLPCVVEASTSHNDVVGPSCEGTVNIVDEHADGDINTVAGKIDSHEDLDSSRHSNMILKVSGTSIDFSRPASLKESSDLVRPEASNISHVKDEIEVCNSAIVAQKDTECLSSGRSMNIEESPVSVRKNSYVGNSNSAHPISVGIDLSDALSPPKNDESNVESEIKKYENLNKMEKKAYEDSILKNARVIEANIKKAGQRSPCNIALEKRRKSHWDFVLEEMTWMANDFMQERLWKSVAAAQVCHWIASDAHAKFEKASILKKQKAVIKIIAKGIMSFWRSAEALQTADRTAKVMPHNSTMLEEIDPSGVKAGKEQGHNSLEAKESSQQRSQIHDYAVRFLEYNRTADLHVLPEAPPTPDRLNDFGVLKVSDHLSEESLFYTVAAPGAVLAYRDSLESLFMYHKCGVFSIGCLGIVFAALPGVEACHSPPSPWSDFCRCHGGIVGRRVCVAEVCDALSLKFDIQTDVLDLRRAAPSTFIAYLPNEDLARRIYNGGQPRFAPPLRLHIRWWSRQALACDCRALSQLLEVELRGIPTHLWAIEMAELLFSDHCLIQGVHADSKFGSIGVQVKRLVFRSGEHSCFIGSPC

SEQ ID NO: 193810 - protein, 397 aa, Zea Mays
MLVATFVSCGMLRNLQVRYRSSYTGSFPHWIRELDSPREASLLKQIYKSDPERVVQIFERHPSLHSNSAALSEYIKALASLDRLEDSPLLKTLQRGFATSAAEEERSTGLAAFGSVGRRTKDGALGTANAPIHMVTAGTGQFKEQLWKTFRSVALTFLVISGIGALLEDRGISKGLGLNEEVRPNMDSKTKFSDVKGVDEAKAELEEIVHYLRDPKRFTCLGGKLPKGVLLVGPPGTGKTMLARAIAGEAGVPFFSCSGSEFEEMFVGVGAKRVRDLFNAAKKCSPCIIFIDEIDAIGGSRNPKDQQYMKMTLNQLLVELDGFKQNGGVIVIAATNFPQSLDKALVRPGRFDRHIVVPNPDVEGRRQILEAHMSKVLRADDVDLMIIARGTPGFSGS

SEQ ID NO: 193811 - protein, 746 aa, Zea Mays
MLRNLQVRYRSSYTGSFPHWIRELDSPREASLLKQIYKSDPERVVQIFERHPSLHSNSAALSEYIKALASLDRLEDSPLLKTLQRGFATSAAEEERSTGLAAFGSVGRRTKDGALGTANAPIHMVTAGTGQFKEQLWKTFRSVALTFLVISGIGALLEDRGISKGLGLNEEVRPNMDSKTKFSDVKGVDEAKAELEEIVHYLRDPKRFTCLGGKLPKGVLLVGPPGTGKTMLARAIAGEAGVPFFSCSGSEFEEMFVGVGAKRVRDLFNAAKKCSPCIIFIDEIDAIGGSRNPKDQQYMKMTLNQLLVELDGFKQNGGVIVIAATNFPQSLDKALVRPGRFDRHIVVPNPDVEGRRQILEAHMSKVLRADDVDLMIIARGTPGFSGADLANLVNVAALKAAMDEAKAVTMQDLEYAKDRIMMGSERKSAVISDESRKITAYHEGGHALVAIHTEGAHPVHKATIVPRGVSLGMVIQLPEKDQHSVSRKQMLARLDVCMGGRVAEELIFGESEVTTGSSSDLNYATRLARAMVTKYGMSKRVGLVSYSENSVSGQTSVIDKEVKEILEKAYNNAKAILTTHDKELHMLANALLEHETLSGAQIKKLLPQVDNSNNKQKKAAKVPQKTPAARAKGVAQEAAGKAKGVAGTAAVAQEAATANTEGGAGTAAVPQEAATSVAAKAKGVAGTAAAAQEAATANTEGGAGTAAAPQEAATSVAAKAKGVAGTAAVAQEAATANTEGVAGVGS

SEQ ID NO: 193812 - protein, 747 aa, Zea Mays
MAWLVAISKAARLRSANAVCSQLVVSSPFRAPRSDNAAGGMLRNLQVRYRSSYTGSFPHWIRELDSPREASLLKQIYKSDPERVVQIFERHPSLHSNSAALSEYIKALASLDRLEDSPLLKTLQRGFATSAAEEERSTGLAAFGSVGRRTKDGALGTANAPIHMVTAGTGQFKEQLWKTFRSVALTFLVISGIGALLEDRGISKGLGLNEEVRPNMDSKTKFSDVKGVDEAKAELEEIVHYLRDPKRFTCLGGKLPKGVLLVGPPGTGKTMLARAIAGEAGVPFFSCSGSEFEEMFVGVGAKRVRDLFNAAKKCSPCIIFIDEIDAIGGSRNPKDQQYMKMTLNQLLVELDGFKQNGGVIVIAATNFPQSLDKALVRPGRFDRHIVVPNPDVEGRRQILEAHMSKVLRADDVDLMIIARGTPGFSGADLANLVNVAALKAAMDEAKAVTMQDLEYAKDRIMMGSERKSAVISDESRKITAYHEGGHALVAIHTEGAHPVHKATIVPRGVSLGMVIQLPEKDQHSVSRKQMLARLDVCMGGRVAEELIFGESEVTTGSSSDLNYATRLARAMVTKYGMSKRVGLVSYSENSVSGQTSVIDKEVKEILEKAYNNAKAILTTHDKELHMLANALLEHETLSGAQIKKLLPQVDNSNNKQKKAAKVPQKTPAARAKGVAQEAAGKAKGVAGTAAVAQEAATANTEGGAGTAAAPQEAATSVAAKAKGVAGTAAVAQEAATANTEGVAGVGS

SEQ ID NO: 193813 - protein, 699 aa, Zea Mays
MAWLVAISKAARLRSANAVCSQLVVSSPFRAPRSDNAAGFATSAAEEERSTGLAAFGSVGRRTKDGALGTANAPIHMVTAGTGQFKEQLWKTFRSVALTFLVISGIGALLEDRGISKGLGLNEEVRPNMDSKTKFSDVKGVDEAKAELEEIVHYLRDPKRFTCLGGKLPKGVLLVGPPGTGKTMLARAIAGEAGVPFFSCSGSEFEEMFVGVGAKRVRDLFNAAKKCSPCIIFIDEIDAIGGSRNPKDQQYMKMTLNQLLVELDGFKQNGGVIVIAATNFPQSLDKALVRPGRFDRHIVVPNPDVEGRRQILEAHMSKVLRADDVDLMIIARGTPGFSGADLANLVNVAALKAAMDEAKAVTMQDLEYAKDRIMMGSERKSAVISDESRKITAYHEGGHALVAIHTEGAHPVHKATIVPRGVSLGMVIQLPEKDQHSVSRKQMLARLDVCMGGRVAEELIFGESEVTTGSSSDLNYATRLARAMVTKYGMSKRVGLVSYSENSVSGQTSVIDKEVKEILEKAYNNAKAILTTHDKELHMLANALLEHETLSGAQIKKLLPQVDNSNNKQKKAAKVPQKTPAARAKGVAQEAAGKAKGVAGTAAVAQEAATANTEGGAGTAAVPQEAATSVAAKAKGVAGTAAAAQEAATANTEGGAGTAAAPQEAATSVAAKAKGVAGTAAVAQEAATANTEGVAGVGS

SEQ ID NO: 193814 - protein, 333 aa, Zea Mays
MKMRTISSVDQENKNRTRDSNDHDHHKPKTGKHKSPRDGVVLLEKRQEKRSLDKNKPAEHDIKMHIAVVPSGMDCVGAFQQQRFKSRCDPEESLESLSNHSNCESGSVSSLVFEKPLQALPPGKNLLGYEICHAAKPIKTLHLNPALYDVELSVLGSSNTGRRVPLVSLMSRWNCKAVVGYPVSVEVSDDVFGCPSPSSEKDIQQAATNSVNGIVLKKDETEGLERVVVPPSAQTSRPRCKSRSRRASEKAVDKLWQPHTKWPASSSRKMRRLSSFGPGQRDGKSAVRKVSGATVACIPLRVVFSRINEALSFSVNENALAGCGTASRLRNTW

SEQ ID NO: 193815 - protein, 727 aa, Zea Mays
MGGLPKEGAPAVDVSVEGTLVWLRRPNGSWWPSIVISPQDVPEGCAPPPRCPATPIMLLGRRPDGPTYVCKRVKPFRCGELDLEQRIANALTLAATSDRSTWSYNKGRYARMEDAILQALDIEKELALGPATKAYLHARSCSPRPKVEMPNGQVKDTAAKDHAPTIQPPLPPPKRKRKTPYDSEDDVPEVSRRMRDLRDIGSKAVVPMDLANAAAVSAPKYDDLTNAGQAKRIVHSQATAKRKHAGLHQDQPCGIPRKKDRSRPLSELCNGDMWGGSRPNGQKADEHLLGVATCSSSSSGTSTLDTPLDMNNCHRSMAFKTDQAKGTEISCMTRLLSDDSRHGNDFVGTPAAQNIVEPDHLHRYQPCGLAKNPTWKPNKQTNDARKAEKHARKNMKMRTISSVDQENKNRTRDSNDHDHHKPKTGKHKSPRDGVVLLEKRQEKRSLDKNKPAEHDIKMHIAVVPSGMDCVGAFQQQRFKSRCDPEESLESLSNHSNCESGSVSSLVFEKPLQALPPGKNLLGYEICHAAKPIKTLHLNPALYDVELSVLGSSNTGRRVPLVSLMSRWNCKAVVGYPVSVEVSDDVFGCPSPSSEKDIQQAATNSVNGIVLKKDETEGLERVVVPPSAQTSRPRCKSRSRRASEKAVDKLWQPHTKWPASSSRKMRRLSSFGPGQRDGKSAVRKVSGATVACIPLRVVFSRINEALSFSVNENALAGCGTASRLRNTW

SEQ ID NO: 193816 - protein, 132 aa, Zea Mays
MYGSSLQNAGEVLFFEEGEPKIDGEPGDLKFRIRTALHSHFKREGNDLHATVTISLLQALVGFEKTIKHLDNHLVEIGTKGITKPKEIRKFKGEGMPLYQSNKKGDLYVTFEVLFPKTLTADQKAKLKDVLV

SEQ ID NO: 193817 - protein, 239 aa, Zea Mays
MNIQDIFSSFFGGGGGGMEEEEQQILKGDEVIVELDASLEDLYMGGSLKVWREKNVIKPAPGKRRCNCRNEVYHRQIGPGMYQQMTEQVCDQCPNVKFVREGEFLTVDIEKGMKDGQEVLFFEEGEPKIDGEPGDLKFRIRTALHSHFKREGNDLHATVTISLLQALVGFEKTIKHLDNHLVEIGTKGITKPKEIRKFKGEGMPLYQSNKKGDLYVTFEVLFPKTLTADQKAKLKDVLV

SEQ ID NO: 193818 - protein, 265 aa, Zea Mays
MATPGKGGAARFAAALFVLLNLAVAIAGKSYYDVLQVPKGASEDQIKRSYRKLALKYHPDKNPDNEEANKRFAEINNAYEVLTDQEKKKIYDRYGEEGLKQFQGGRGSGGGMNIQDIFSSFFGGGGGGMEEEEQQILKGDEVIVELDASLEDLYMGGSLKVWREKNVIKPAPGKRRCNCRNEVYHRQIGPGMYQQMTEQVCDQCPNVKFVREGEFLTVDIEKGMKDGQVGRHTSRGRSEVAEHVRTRRFCFSRKASLRLMANQAI

SEQ ID NO: 193819 - protein, 128 aa, Zea Mays
MATPGKGGAARFAAALFVLLNLAVAIAGKSYYDVLQVPKGASEDQIKRSYRKLALKYHPDKNPDNEEANKRFAEINNAYEVLTDQEKKKIYDRYGEEGLKQFQGGRGSGGGMNIQDIFSSIGCYNHGN

SEQ ID NO: 193820 - protein, 76 aa, Zea Mays
MAEAERRHGSDTVWNGEEPKWRLDQSGLGRSQANRVQDDWVRYAKMTEAIGEQLHIVGDDLVTNPTVSTFISFLLK

SEQ ID NO: 193821 - protein, 321 aa, Zea Mays
MRFSRHALAGMPIPRFSVLGDVSKKVSRSDGVSTERSTRLRFSQDHAAKSKAKLKGAFSLLGLNNDTFKGKGPHTSKRLQLKDLSWRSKDTTINVKENHDQETVHEENTKSCEHEYGSYCLWSTEHREVMKDAIVKKLKDQLFMARAHYPSIAKLKQHEAFTSELKQNIQEHERMLSDTITDADLPPFFAKKLEKMEHTIVRAKSSEVGCSNVERKLRQLLDITENEAYFHTRQSAFLYHLGVQTMPKTHHCLNMRLTVEYFKSGSSHVDQLNDQKLESPALHHYVIFSRNVLAASTTINSTVMNSQVYHYFSNNLKHLDH

SEQ ID NO: 193822 - protein, 337 aa, Zea Mays
MRFSRHALAGMPIPRFSVLGDVSKKVSRSDGVSTERSTRLRFSQDHAAKSKAKLKGAFSLLGLNNDTFKGPHTSKRLQLKDLSWRSKDTTINVKENHDQETVHEENTKSCEHEYGSYCLWSTEHREVMKDAIVKKLKDQLFMARAHYPSIAKLKQHEAFTSELKQNIQEHERMLSDTITDADLPPFFAKKLEKMEHTIVRAKSSEVGCSNVERKLRQLLDITENEAYFHTRQSAFLYHLGVQTMPKTHHCLNMRLTVEYFKSGSSHVDQLNDQKLESPALHHYVIFSRNVLAASTTINSTVMNSQVSLSRTLILNRNETLRMSLAARAACSCDLCQE

SEQ ID NO: 193823 - protein, 226 aa, Zea Mays
MSNGSLENWLYPKLNRYGIRKPLSLGSRIEIAADIACALDYLHNHCVPAIVHCDLKPSNVLLDDAMVAHLGDFGLAKLLHTCSYSITHSSSTSLIGPRGSIGYIAPEYGFGSKLSTQGDVYSYGITVLEMLTGKRPTDEMFSKGLTLHKFVKEAFPQKIHEILDPSIFPVTRDGDNHTTDEITRSIMNLLKIGISCSADAPTDRPTIDDVYAKVITIKETFLDLCH

SEQ ID NO: 193824 - protein, 798 aa, Zea Mays
MLVLAGNSFAGPIPAVSNTVVDSPPPPLQYLILDSNDLTGPLPSTLGNLTSLLWLTLGGNGFHGSIPTSLGALVNLQVLDMTNNALSGTVPASIYNMSALTHLGMGMNNLTGEIPANVGYSLPRIVNLIMARNKFTGQIPVSLTKATNLQIINLWDNALTGTVPLFGALPNLVELDLTKNQLEAGRDWSFLTSLTNCTQLVTLYLDRNTLGGVLPKSIGDLPSGLEVLFLSANGISGTIPNEIGRLKNLKLLYLDRNLLAGSIPYSLGHLPNMFALNLAQNKLSGQIPASLGNLSQLSELYLQENHLSGPIPGALGRCKNLDKLNLSCNSFGGGIPEELFTLSSLSNELDLSHNQLSGEIPLEIGSFVNLGLLNISNNMLAGRIPSTLGQCVHLESLHMEGNLLDGRIPQSLQGLRGLVEMDMSRNNLSGEIPEFFETFSSMKLLNLSFNDLEGPVPTGGIFQDARDVFVQGNKDLCSSTHLLQLPLCTTDTTSKRHRHTSSYVLKLVGFTALSLVLLLCFAVVLLKKRKKVQQVDHPSSMDLKKFTYAGLVKATNSFSSDNLVGSGKCGLVYKGRFWDEEHVVAIKVFKLDQLGAPNSFLAECEALRNTRHRNLVKVITACSTIDSEGHDFKAVILEYMSNGSLENWLYPKLNSYSITHSSSTSLIGPRGSIGYIAPEYGFGSKLSTQGDVYSYGITVLEMLTGKRPTDEMFSKGLTLHKFVKEAFPQKIHEILDPSIFPVTRDGDNHTTDEITRSIMNLLKIGISCSADAPTDRPTIDDVYAKVITIKETFLDLCH

SEQ ID NO: 193825 - protein, 52 aa, Zea Mays
MLLIDALLCSFYFDFLFRTSALDDTFFLSIQRGVVNRQTRHPRTEGHLSTIR

SEQ ID NO: 193826 - protein, 51 aa, Zea Mays
MHNLFVLAHILVILEPTISQQSVEYFYTVCSHVFGVIVSYPLFVYLYVLLR

SEQ ID NO: 193827 - protein, 180 aa, Zea Mays
MSSNLFLDWSREWGIGAIAVSTENPDKARATHAPAASFLPSQRRRSLSPPSLLSRLHRAQLSSLPPLRASAASLPIVFAWPGSTGTMDQEKKLEVSNTSHTYKHHCSVGVDVHEIFVKRSRLRVVLSYIGIIFLLVNACQPLLTKESLSLGSVWNITFAVLVAKCLQYKPVKRDSQANDK

SEQ ID NO: 193828 - protein, 196 aa, Zea Mays
MSSNLFLDWSREWGIGAIAVSTENPDKARATHAPAASFLPSQRRRSLSPPSLLSRLHRAQLSSLPPLRASAASLPIVFAWPGSTGTMDQEKKLEVSNTSHTYKHHCSVGVDVHEIFVKRSRLRVVLSYIGIIFLLVNACQPLLTKESLSLGSVWNITFAVLVAKCLQYKPVKRESVVIMPAFGIQLEIHFWRFSSQ

SEQ ID NO: 193829 - protein, 193 aa, Zea Mays
MSSNLFLDWSREWGIGAIAVSTENPDKARATHAPAASFLPSQRRRSLSPPSLLSRLHRAQLSSLPPLRASAASLPIVFAWPGSTGTMDQEKKLEVSNTSHTYKHHCSVGVDVHEIFVKRSRLRVVLSYIGIIFLLVNACQPLLTKESLSLGSVWNITFAVLVAKCLQYKPVKRESVVIMPAFGIQLEIHFWRI

SEQ ID NO: 193830 - protein, 329 aa, Zea Mays
MGQHVFTEQVAVSAAPGTTHPCPYVAYLHPLPPLTSSSSHVPERTTDRTAYHDHWNPMVGPSDVRPMQTMQPADFHHSHWAHVPHSYAQPNSNNEQPGIPFGTRATRVDGDSQRRISVVSPSYFSNGPPSVPPLMPQFMRAHGSINEQYQQNSSSSLFAGAHRSGGMRPAPTPLPENPTFSLFPPGSSGHSSMETDDAGGSQFYAWERDRFAPFPLMPVDCEISWWTSQQQSHSTSEPSSAPRRLFGQWLGVGRSSPENRPPEGSSYRQMMPVDCETSWWSSQHQSHSTSEPTSAPRRLFGQWLGVSRSSPENRSPEGSSYRQMHSPRM

SEQ ID NO: 193831 - protein, 279 aa, Zea Mays
MGQHVFTEQVAVSAAPGTTHPCPYVAYLHPLPPLTSSSSHVPERTTDRTAYHDHWNPMVGPSDVRPMQTMQPADFHHSHWAHVPHSYAQPNSNNEQPGIPFGTRATRVDGDSQRRISVVSPSYFSNGSRPPSVPPLMPQFMRAHGSINEQYQQNSSSSLFAGAHRSGGMRPAPTPLPENPTFSLFPPGSSGHSSMETDDAGGSQFYAWERDRFAPFPLMPVDCEISWWTSQQQSHSTSEPSSAPRRLFGQWLGVGSSRSSPENRSPEGSSYRQMHSPRM

SEQ ID NO: 193832 - protein, 76 aa, Zea Mays
MAEPTPSQSPAQTPPPPPTQQTPAAGGLEDMLACVAALEAALLPCLPARELQAVDRSLQSSHQRYLSVVVSTKLGS

SEQ ID NO: 193833 - protein, 296 aa, Zea Mays
MLRNATWTLSNFCRGKPQPNFDQDEEVLTDACWALSYLSDGTNDKIQAVIESGVFPRLVELLMHPSASVLIPALRTVGNIVTGDDMQTQCVIDNQALPCLLNLLTTNHKKSIKKEACWTISNITAGNKEQIQAVINANIIAPLVQLLQTAEFDIKKEAAWAISNATSGGTHDQIKYLVAQGCIKPLCDLLVCPDPRIVTVCLEGLENILKVGEAEKNLGAGDVNVYAQMIDDAEGLDKIENLQSHDNTEIYEKAVKMLESYWLEEEDDAMPSGDNPQNGFNFGNQPSVPSGGFNFG

SEQ ID NO: 193834 - protein, 311 aa, Zea Mays
MLRNATWTLSNFCRGKPQPNFDQVKPALPALQHLIHSQDEEVLTDACWALSYLSDGTNDKIQAVIESGVFPRLVELLMHPSASVLIPALRTVGNIVTGDDMQTQCVIDNQALPCLLNLLTTNHKKSIKKEACWTISNITAGNKEQIQAVINANIIAPLVQLLQTAEFDIKKEAAWAISNATSGGTHDQIKYLVAQGCIKPLCDLLVCPDPRIVTVCLEGLENILKVGEAEKNLGAGDVNVYAQMIDDAEGLDKIENLQSHDNTEIYEKAVKMLESYWLEEEDDAMPSGDNPQNGFNFGNQPSVPSGGFNFG

SEQ ID NO: 193835 - protein, 508 aa, Zea Mays
MSLRPSEREQMRKGNYKQTVDAEESRRRREGQMVDIRKAKREESLQKKRRDGFPASAAGVPPMGHSTALQQKLDGLPAMVQAVHSNDPSVQLEATTQFRKLLSIERSPPIEEVISTGVVPRFIEFLTREDHPQLQFEAAWALTNIASGTSENTKVVVESGAVPIFVKLLNSLSEDVREQAVWALGNVAGDSPKCRDLVLGHGGLYPLLQQLNEHAKLSMLRNATWTLSNFCRGKPQPNFDQVKPALPALQHLIHSQDEEVLTDACWALSYLSDGTNDKIQAVIESGVFPRLVELLMHPSASVLIPALRTVGNIVTGDDMQTQCVIDNQALPCLLNLLTTNHKKSIKKEACWTISNITAGNKEQIQAVINANIIAPLVQLLQTAEFDIKKEAAWAISNATSGGTHDQIKYLVAQGCIKPLCDLLVCPDPRIVTVCLEGLENILKVGEAEKNLGAGDVNVYAQMIDDAVKMLESYWLEEEDDAMPSGDNPQNGFNFGNQPSVPSGGFNFG

SEQ ID NO: 193836 - protein, 137 aa, Zea Mays
MAIPLLVPHMNLNDGKLAGFDIPAESKILVNAWFLANDPKRWVRPDEFRPERFLEEEKSVEAHGNDFRFVPFGVGRRSCPGIILALPIIGITLGRLVQNFQLLPPPGLDKIDTTEKPGQFSNQIAKHATIVCKPLEA

SEQ ID NO: 193837 - protein, 50 aa, Zea Mays
MYDYGTTCVMYFTRDCFLVLKYMFSFGCLDRCVTGVEDSSSCYELLNQCG

SEQ ID NO: 193838 - protein, 93 aa, Zea Mays
MRQIQIGRRTTDYEGYTISSISAVRSISSDRYTLKSESPKIESMARAPSSTPTTSWAAAPELATAASSSSHDQHSLSCSISKLNRCYIERSLR

SEQ ID NO: 193839 - protein, 57 aa, Zea Mays
MGFKEFQPKIIIPLENLRSIELLHLLLEHQNKEMMLEMMIMMMMMMNLLLMKTTTRS

SEQ ID NO: 193840 - protein, 289 aa, Zea Mays
MQTYLYSVLNSRVSRPSPLLRNPFPSSAEASPPAAETLASAAAVMASSNVSTVYISVIDDVISKVREDFITYGVGDAVLNELQALWEMKMLHCGAISGNIDRTKAAAASVGGTTGTTPPVHDLNVPYEATSEEYATPTADMLFPPTPLQTPIQTPLPGTDTAMYNIPTGPSDYAPSPISDVRNGMAINGADPTAGHPSPYMPPPSPWMNQRPLGVDVNVAYVEGREDPDRGVQPQPLTQDFLMMSSGKRKRDEYPGQLPSGSFVPQQDGSADQIVEFVVSKASVLLIYI

SEQ ID NO: 193841 - protein, 140 aa, Zea Mays
MAASHVPLLGSLLQHPASQQQQDLPVPSWRPSATTPMSSSAHHGWLLSAPPPHAMRFWRNDRTVNVMGVYQHSAPRSILALPAMAPPPPAQTSTELYHHQAPPHQLHRAHLAAAPNTPTAGQQHQTTAGQQHQAPPQPPA

SEQ ID NO: 193842 - protein, 73 aa, Zea Mays
MMHADSSRLLRPNYFSGASTTSLLIVVVAFTAYINSHLATHLFPKASRPRSILIVLISIQLWFLSKFYFRKGW

SEQ ID NO: 193843 - protein, 87 aa, Zea Mays
MTTLPTSNLMKSMILLVSRLILTNASIASYSCRYTFFSSIFLALSCLLCINSEFRLYIEQRFQTTTSIGLAVPGEKQTNYGFNGLRL

SEQ ID NO: 193844 - protein, 150 aa, Zea Mays
MRAIASPLAPPRPEPPIAVRSRSNALKRATLPPVPLTAARLRLRRQPEPGPSPPTRLSHPMPPPTATMSPAAGGSFPELTCPADFATVAAPGGRFSVVGFGSLLSERSARSTFPELEGFRVAVLRGFRRVFAHAAPIFFERGIAIEATKY

SEQ ID NO: 193845 - protein, 282 aa, Zea Mays
MRAIASPLAPPRPEPPIAVRSRSNALKRATLPPVPLTAARLRLRRQPEPGPSPPTRLSHPMPPPTATMSPAAGGSFPELTCPADFATVAAPGGRFSVVGFGSLLSERSARSTFPELEGFRVAVLRGFRRVFAHAAPIFFERGIAIEATKEFSSLSVEPCDSELIVVTVFEIKEEEVPAFIEREHEFRFLAVVPEGLDGVPFTNRAVVCARYSNEEYFQERCRGSKEIYNKYYGRYNIDKIWRDDILPCRLYLRHWLICSCTYRRPRISKDADPSRQAAAPHH

SEQ ID NO: 193846 - protein, 108 aa, Zea Mays
MRAIASPLAPPRPEPPIAVRSRSNALKRATLPPVPLTAARLRLRRQPEPGPSPPTRLSHPMPPPTATMSPAAGGSFPELTCPADFATVAAPGGRFSVVGFGSLLSASW

SEQ ID NO: 193847 - protein, 327 aa, Zea Mays
MIWQFYSAEGDFLLKYWRSAGLCSEGILQVDNVATPVVSNVFDGTGELIAGVASVQAVENFITSSWIYHFRHHIANAPLVMLDANLSPESLKAACIMAYEFGVPVLFEPVSVVKCRRIAPVAEYITCTSPNEIELVAMANSLSPSVKYNFHTIEQFKEKADTVEYIFQMLSPAMFFLLEKGIKLLIVTLGSNGVFICCKEHTNFMKDQHKCKQTPFSRQLLEKMDGCFPSNNLVNLCRESSSRTCVFHLPAISASVISLTGAGDCLVGGALSALCAGFDIIQSVAVGVAIAKASVESEANIPDDISAASIADDAQSVLHSAKVLWCK

SEQ ID NO: 193848 - protein, 347 aa, Zea Mays
MAEPANRRMEAVRRHLLLPSPAPLRPNPLSSLAEVEPSPVIIGGMVLDIHAKPSVPPHHGTTVPGMVKYISGGVARNIAECMSKLGTQPFMISVVGNDLAGDFLLKYWRSAGLCSEVAYEFGVPVLFEPVSVVKCRRIAPVAEYITCTSPNEIELVAMANSLSPSVKYNFHTIEQFKEKADTVEYIFQMLSPAMFFLLEKGIKLLIVTLGSNGVFICCKEHTNFMKDQHKCKQTPFSRQLLEKMDGCFPSNNLVNLCRESSSRTCVFHLPAISASVISLTGAGDCLVGGALSALCAGFDIIQSVAVGVAIAKASVESEANIPDDISAASIADDAQSVLHSAKVLWCK

SEQ ID NO: 193849 - protein, 103 aa, Zea Mays
MVIWGMKTGACVRVCTSHEVAALHPVAWIQAKRTGTRKRSMNAHIRSITSNKNPFFVRKFRSSLLCFGDAICYAYYSSQTWQKELNQRTAARCLCGCVVTTSK

SEQ ID NO: 193850 - protein, 152 aa, Zea Mays
MATKILSLTASSSGCERNWSGFDGVHTKKRNRLTTDCLNKLVYIQFNNRLINKRAKIKSKKITDVLLSSGTTEAQGFLQENGDDCALVSFRDEEEVMEGTGILWSVLGDAVGAEEQLELRRSARVRELNEEEFESEEEEFDEDEDEYEMDET

SEQ ID NO: 193851 - protein, 153 aa, Zea Mays
MVGWHRGIKLGLPSSALAAATPAGPSSALTIGNQTSGASFRAHCRPAFVEGLGGSPPRVDRARTANWSLRVSGRWQSLAVNPAPPSDRQVPGSATSACMISARGYESCEDHPGTWNLKSQASCALDHFFLLNHVLINHNDMHRLILMGPNRLP

SEQ ID NO: 193852 - protein, 121 aa, Zea Mays
MVGWHRGIKLGLPSSALAAATPAGPSSALTIGNQTSGASFRAHCRPAFVEGLGGSPPRVDRARTANWSLRVSGRWQSLAVNPAPPSDRQVPGSATSACMISGNSPFRMFATISSSCFCDPI

SEQ ID NO: 193853 - protein, 281 aa, Zea Mays
MCRRSTQDTGYECTVTVTEIDTSNTWWYPSCTKCGRKTTPHNTTYYCDLCKWDGYKFKYKLKFRASDATAIAQMFCFDNIARYIVGKSCKVILRSTNAATPIPPDLAQIVSLKFTFRVIPDDSSFDNQDQVPIALRIISITAAHGRQHALPLKPTNIIEGTSTPQNKLQLQLIENSPSNPFQNLSTSTPPPKQATRKLIYPPLSNPLTYQHTPKSDGEEEITEQTMDTSQIKGKKVCTHSNLLQKGIHEQNNMMDDRATKTIWLDEEDTRIRVGQEHGFVS

SEQ ID NO: 193854 - protein, 352 aa, Zea Mays
MTSLRSMDYTLLPDLTTYKKHAIIQVHVSRKWSFHGATENGPLQHIDMVLSDCKGNSMYAEIPANLAEEKGALIETNQIYDISRFRVTAAKTAYKPIDGDKMIQFTIYTIIKPASNPPPTFSLYIYQLTPFDEIESQIQHKTKFLDVLGTITEVTALKTVHIEGQLSPTIIRDIMIEDLSRKTLKITLWAKRATSFTIQNVYDPVSKKPILALFVGCLPKFYKGVYLSGGAACHWYFNPAIPEAEAYQNSITKYYAYKHGGETIQLHLPTQPEHALQTFQPPTIEHKTLEQLLTMNPYDYPDTGYECTVTVTEIDTSNTWWYPSCTKCGRKTTPHNTTYYCDLCKWDGYKFK

SEQ ID NO: 193855 - protein, 286 aa, Zea Mays
MNPYDYPDTGYECTVTVTEIDTSNTWWYPSCTKCGRKTTPHNTTYYCDLCKWDGYKFKYKLKFRASDATAIAQMFCFDNIARYIVGKSCKVILRSTNAATPIPPDLAQIVSLKFTFRVIPDDSSFDNQDQVPIALRIISITAAHGRQHALPLKPTNIIEGTSTPQNKLQLQLIENSPSNPFQNLSTSTPPPKQATRKLIYPPLSNPLTYQHTPKSDGEEEITEQTMDTSQIKGKKVCTHSNLLQKGSRKEAYISKAMMTMSRRTKHRCLEHQIFLLLTRCLLQTLV

SEQ ID NO: 193856 - protein, 199 aa, Zea Mays
MGAQIDNSVNDGRGPPLFKICGQVHHRIGTLLPDNGSPPRFIQLYIYDTTNEVQNRINALDSGDRTQDSFDPVIIRNLIKMLDHHNPFVKKFRMARDRLADNPNEEFTIRLIGAKEGDPIQYNLPTTDELAMLVVGDFTLDTFKRDIIIETQNKELKRISSLHPTYMALQYPLLFRFGERGFQVGERGFHYRKNQPNPY

SEQ ID NO: 193857 - protein, 127 aa, Zea Mays
MQLGARRGPPSRVHRWRSVAGVLWVNTANAPSTVPYQCWGLGVLAREFLGRTWNCTVATAGVKVWTSWRNFSLVLRVRASPRAIITTPGFLVKNWYHWRRRMVDVRCVRVRSRSSSPSRLSGAKDGF

SEQ ID NO: 193858 - protein, 113 aa, Zea Mays
MHAVRSSAGTTVASSSVALCGRCAVGQYRERPLNRPIPAVGPGRVGQGVSWAHLELHRGDRGREGVGIVEEFLTGAAGPRIAACHHHHARIFGQELVSLEEAHGGCALCSCEV

SEQ ID NO: 193859 - protein, 92 aa, Zea Mays
MASTDLPAVMAEMAELTTKLRKSLDRRVPFSHYMVAIPFADRSIHQCLDHILVKPPLPLFSLFDAREILRNRMSARAVAIALESSTVLRPRV

SEQ ID NO: 193860 - protein, 347 aa, Zea Mays
MAAAVHLRPLHSFAFPLPAVKAAPSWLPLQAKPGARRTGSRVALLVPSASAPAPASPSPSGKDGTTASAATKWVEWIPRAAAGAGSAVGPEQVLRLISGAAATPICQFVDSPRTFLHSVDPRVKLVWLLSLVVLPARSNIYMRFGLVVFLALISMWVLPNHVWKDQLGRVTLLSGFIFIMLGFGADGAPSLVQMRTPPPSVLGIPNIPCSTSGYSYTILKLGPLQFTRKGLSLASTSASLSFAIFQSASLCLTTTTPEQLASALWWFMSPLKHIGVPVPEIILTLLLSLRFINLVFDEVRNSALAIVARRINWKKLTAMETIDFSSAMSNGYLKIYLIMRSKYPRQW

SEQ ID NO: 193861 - protein, 295 aa, Zea Mays
MAAAVHLRPLHSFAFPLPAVKAAPSWLPLQAKPGARRTGSRVALLVPSASAPAPASPSPSGKDGTTASAATKWVEWIPRAAAGAGSAVGPEQVLRLISGAAATPICQFVDSPRTFLHSVDPRVKLVWLLSLVVLPARSNIYMRFGLVVFLALISMWVLPNHVWKDQLGRVTLLSGFIFIMLGFGADGAPSLVQMRTPPPSVLGIPNIPCSTSGYSYTILKLGPLQFTRKGLSLASTSASLSFAIFQSASLCLTTTTPEQLASALWWFMSPLKHIGVPVPEIILTLLLSLRFATQL

SEQ ID NO: 193862 - protein, 215 aa, Zea Mays
MLGFGADGAPSLVQMRTPPPSVLGIPNIPCSTSGYSYTILKLGPLQFTRKGLSLASTSASLSFAIFQSASLCLTTTTPEQLASALWWFMSPLKHIGVPVPEIILTLLLSLRFINLVFDEVRNSALAIVARRINWKKLTAMETIDIFFSYVQRIFKNIFDHAEQISKAMVARGFRGNPINHKIYFLTESSFGIADFFSLLCLLVVVSLASFSDQLV

SEQ ID NO: 193863 - protein, 180 aa, Zea Mays
MAAAVHLRPLHSFAFPLPAVKAAPSWLPLQAKPGARRTGSRVALLVPSASAPAPASPSPSGKDGTTASAATKWVEWIPRAAAGAGSAVGPEQVLRLISGAAATPICQFVDSPRTFLHSVDPRVKLVWLLSLVVLPARSNIYMRFGLVVFLALISMWVLPNHVWKDSYSSCWDLVLMVHLH

SEQ ID NO: 193864 - protein, 340 aa, Zea Mays
MESEMAEESPAAVSAAAARARPLEAVAEEGQEVAEQHEVAVGSTKTMERVAAAKKFIEDHYRAQMKNLQERKERRLILEQQLASSQVPREEQINLIKDLERKETEYMRLKRHRICVDDFDLLTIIGKGAYGQVQLCREKSTGNIYAMKKLKKTDMLVRGQVEHVRAERNLLAEVGSHCIVKLYYSFQDAEYLYLIMEYLPGGDMMTLLMREDTLTENVARFYIAETILAIESIHKHNYIHRDIKPDNLLLDKNGHMKLSDFGLCKPIDCSKLSTLNENEPMTDENLRESMDIDHSLSDTANGRSNTNSHDHELSKVIYCHCVFLNMLNKCFPGIFNSRDT

SEQ ID NO: 193865 - protein, 486 aa, Zea Mays
MESEMAEESPAAVSAAAARARPLEAVAEEGQEVAEQHEVAVGSTKTMERVAAAKKFIEDHYRAQMKNLQERKERRLILEQQLASSQVPREEQINLIKDLERKETEYMRLKRHRICVDDFDLLTIIGKGAYGQVQLCREKSTGNIYAMKKLKKTDMLVRGQVEHVRAERNLLAEVGSHCIVKLYYSFQDAEYLYLIMEYLPGGDMMTLLMREDTLTENVARFYIAETILAIESIHKHNYIHRRWRSPNEQLQHWQNNRRKLAFSTVGTPDYIAPEVLLKKGYGLECDWWSLGAIMYEMLVGYPPFYSDDPLVTCQKIVHWRSYLNFPDNPRLSLEAKDLICRLLCDVDHRIGSGGADQIKAHPWFRGVEWDKLYEMEAAFKPLVNDELDTQNFMKFPDLNPAPARASSGASRKMMLNSKDLSFVGYTYKNFEAVKGLHQFADLQRSSSFTRHSAGSPSDTADMDASMEANGTDTHMRTGSAGDPMAP

SEQ ID NO: 193866 - protein, 545 aa, Zea Mays
MESEMAEESPAAVSAAAARARPLEAVAEEGQEVAEQHEVAVGSTKTMERVAAAKKFIEDHYRAQMKNLQERKERRLILEQQLASSQVPREEQINLIKDLERKETEYMRLKRHRICVDDFDLLTIIGKGAYGQVQLCREKSTGNIYAMKKLKKTDMLVRGQVEHVRAERNLLAEVGSHCIVKLYYSFQDAEYLYLIMEYLPGGDMMTLLMREDTLTENVARFYIAETILAIESIHKHNYIHRDIKPDNLLLDKNGHMKLSDFGLCKPIDCSKLSTLNENEPMTDENLRESMDIDHSLSDTANGRRWRSPNEQLQHWQNNRRKLAFSTVGTPDYIAPEVLLKKGYGLECDWWSLGAIMYEMLVGYPPFYSDDPLVTCQKIVHWRSYLNFPDNPRLSLEAKDLICRLLCDVDHRIGSGGADQIKAHPWFRGVEWDKLYEMEAAFKPLVNDELDTQNFMKFPDLNPAPARASSGASRKMMLNSKDLSFVGYTYKNFEAVKGLHQFADLQRSSSFTRHSAGSPSDMDASMEANGTDTHMRTGSAGDPMAP

SEQ ID NO: 193867 - protein, 508 aa, Zea Mays
MESEMAEESPAAVSAAAARARPLEAVAEEGQEVAEQHEVAVGSTKTMERVAAAKKFIEDHYRAQMKNLQERKERRLILEQQLASSQVPREEQINLIKDLERKETEYMRLKRHRICVDDFDLLTIIGKGAYGQVQLCREKSTGNIYAMKKLKKTDMLVRGQVEHVRAERNLLAEVGSHCIVKLYYSFQDAEYLYLIMEYLPGGDMMTLLMREDTLTENVARFYIAETILAIESIHKHNYIHRDIKPDNLLLDKNGHMKLSDFGLCKPIDCSKLSTLNENEPMTDENLRESMDIDHSLSDTANGRRWRSPNEQLQHWQNNRRKLAFSTVGTPDYIAPEVLLKKGYGLECDWWSLGAIMYEMLVGYPPFYSDDPLVTCQKIVHWRSYLNFPDNPRLSLEAKDLICRLLCDVDHRIGSGGADQIKAHPWFRGVEWDKLYEMEAAFKPLVNDELDTQNFMKFPDLNPAPARASSGASRKMMLNSKDLSFVGYTYKNFEAVKGLHQFAGDLFLY

SEQ ID NO: 193868 - protein, 114 aa, Zea Mays
MCMILINEVRRLAMEVRQLGNSRSITVLNGGSAQSGVSGLIVPAATVGALGYGYMWWKGISFSDLMYVTKRNMANAVSSMTKHLEQVQSSLAVSTYSFLIYHRNYTFNCIMCLL

SEQ ID NO: 193869 - protein, 131 aa, Zea Mays
MALVQAGMGLTRVVILVGAGVAGSVVLRNGRLAEILGELQEILDKGKKVKDGGGGDGETDLNEALTSQVRRLAMEVRQLGNSRSITVLNGGSAQSGVSGLIVPAATVGALGYGYMWWKDLSAFSYILIILS

SEQ ID NO: 193870 - protein, 490 aa, Zea Mays
MSVVGFDLGNESCIVAVARQRGIDVVLNEESKRETPAIVCFGDKQRFIGTAGAASSTMNPKNSISQIKRLLGRKFSDPELQRDLASFPFRVTEGPDGFPLVHVRYLGEERTFTSTQLLAMVLSNLKGIAEGNLNAAVVDCCIGIPVYFTDLQRRAVLDAATIAGLRPLRLFHETTATALAYGIYKTDLPENDQLNVAFVDIGHASMQVSVVGYRKGQLKMLSHTYDRSLGGRDFDEALFKHFAAKFKEEYKIDVYQNARACIRLRVACEKLKKVLSANPEAPLNIECLMDEKDVRGFIKREEFEQISASVLERVKGPLEKALAEAGLTTENVHFVEVVGSGSRVPAIIKIITDFFGKEPRRTMNASECVARGCALQCAILSPTFKVREFQIGPFQTSNGEKAKLKVKVRLNIHGTVTVDSVIMLEEDVEVPVSSANEAPNDTMKMDTDDVPSDPAAGSDVTMQEQPPAAGNGAQDNEEKSVSMETDAKVW

SEQ ID NO: 193871 - protein, 504 aa, Zea Mays
MSVVGFDLGNESCIVAVARQRGIDVVLNEESKRETPAIVCFGDKQRFIGTAGAASSTMNPKNSISQIKRLLGRKFSDPELQRDLASFPFRVTEGPDGFPLVHVRYLGEERTFTSTQLLAMVLSNLKGIAEGNLNAAVVDCCIGIPVYFTDLQRRAVLDAATIAGLRPLRLFHETTATALAYGIYKTDLPENDQLNVAFVDIGHASMQVSVVGYRKGQLKMLSHTYDRSLGGRDFDEALFKHFAAKFKEEYKIDVYQNARACIRLRVACEKLKKVLSANPEAPLNIECLMDEKDVRGFIKREEFEQISASVLERVKGPLEKALAEAGLTTENVHFVEVVGSGSRVPAIIKIITDFFGKEPRRTMNASECVARGCALQCAILSPTFKVREFQVNDGFPFSIALSWNGDSQNAPQQTLVFQKGNAIPSTKALTIFKSSTFEVDVLYVDPDNSQIPQKISTYTIGPFQTSNGEKAKLKVKVRLNIHGTVTVDSVNAGGGCGSSSLICK

SEQ ID NO: 193872 - protein, 357 aa, Zea Mays
MMLEEDVAVPVSSANEAPKDTTKMDTDDAPSDPVSGTDVNVHEPDTTEAAPAAENGTQNPEEKSVPMETDAKVEPSKRKVKRTSVPVHALVYGALAAADLQKAVEKEYEMALQDRVMEETKEKKNAVEAYVYDMRNKLYDRYNDFVTPEEKEGLIGKLQEVEDWLYEDGEDETKGVYISKLEDLKKIGDPIEARYKESTERGSSVDQLVYCINSFREAALSSDQKFGHIDISEKQKVINECSEVENWLRERKQQQDALPKHTDPVLLVSDLKKKAEALDRFCKPIMTKPKPAPKPQTPPPHTPPPQPEAQASDPQTPEQQQSGTGAAGEPGSEGGVQQASGEQMDMDRPDDSADVAA

SEQ ID NO: 193873 - protein, 391 aa, Zea Mays
MMTREAVLLSLLFCLAAAGEAVSLVSQGEAAELAVSVDPSWRFPSQRLRDAYLALQTWKQQAIFSDPRGFTADWVGPGVCNYTGVFCAPLPRGVPGAGELSVAGVDLNHGDIAGYLPTELGLLADLSLLHLNSNRFCGLVPATLRRLRLLVELDLSNNRLVGPFPAVVLDLPALKFLDLRFNEFEGAIPPELFDRPLDAIFLNHNRLRSPLPDNLGNSPASVIVLADNSFGGCLPASIGNMSGTLNEILLINDGLDSCVPPEQVAGMRKVEQLDVAHNRLSGSVPEAICDLPRLKNLTIAYNFFTGEPPSCARVVPRGGDTKNCLPSRPAQRTPQQCAAFYSQPPVDCASFQCKPFVPVPPLPPPPPSYPGPLPPVYPMPYASPPPPAHYR

SEQ ID NO: 193874 - protein, 82 aa, Zea Mays
MHQRYYQKLKSIFHKLEINISEIKLLHNNSKKKMHTCKQCHCAEKGLIGVAALKMMNLTKRLKLSVYYAPKILALINQIYFI

SEQ ID NO: 193875 - protein, 62 aa, Zea Mays
MKQNSSSVGQGEPVAGGQHDRVPRSEEPPAPWLLPGHRLLPPPQGQGALGGWPPHRMEPYRD

SEQ ID NO: 193876 - protein, 69 aa, Zea Mays
MIGYLEAKNHLLLGYCQDIVYYLLRKAKGLSVDGHPIVWSLIEIRLFLEKACLLELLLQPSVSSLPYVD

SEQ ID NO: 193877 - protein, 91 aa, Zea Mays
MKQNSSSVGQGEPVAGGQHDRVPRSEEPPAPWLLPGHRLLPPPQGQGALGGWPPHRLFAGATAATFCELIALCRLMVKWKRVQYNFTLFYC

SEQ ID NO: 193878 - protein, 88 aa, Zea Mays
MANPRVFSDMTVGSAPADRIVMELYANVVPKTAENFCALCTSWRRSARRASRSGGHGRWCRRRGSAQQVPPWSRQSSSGRWATSCLPR

SEQ ID NO: 193879 - protein, 94 aa, Zea Mays
MNSGSLSHVSIGQGEPVAGGQHDRVPRSEEPPAPWLLPGHRLLPPPQGQGALGGWPPHRLFAGATAATFCELIALCRLMVKWKRVQYNFTLFYC

SEQ ID NO: 193880 - protein, 97 aa, Zea Mays
MVPTKRKRSTGAAVVATVVKWKVGDLVLTKMKSFPAWLAMQGHEELDGASLREHEEFTMVKKYHKARCNLMFETIPKFARCNLMLQSYIEVEFIHFS

SEQ ID NO: 193881 - protein, 106 aa, Zea Mays
MHASGLTPRQARGEADLAHRPQISFQTKRQQIGGPLPQRTQFHPFHIWRPWHALRPLPRPHSKFSPQLRMHPPQWTAIVCIGSAIVLVGWNMRRCAKDSLFLDLLK

SEQ ID NO: 193882 - protein, 101 aa, Zea Mays
MHASGLTPRQARGEADLAHRPQISFQTKRQQIGGPLPQRTQFHPFHIWRPWHALRPLPRPHSKFSPQLRMHPPQWTAIVCIGSAIVLVGWNMRRIPSSWTY

SEQ ID NO: 193883 - protein, 288 aa, Zea Mays
MIDRSRAVYTQHNNVIGTLNVLFAIKEYSEECHLVKLGTMGEYGTPNIDIEEGFITITHNGRTDTLPYPKQASSFYHLSKVHDSHNIAFTCKAWGIRATDLNQGVVYGVRTDETAMHEELSNRFDYDGVFGTALNRFCVQAAVGHPLTVYGKGGQTRGYLDIRDTVQCVELAIANPAKPGEFRVFNQFTEQFSVNELAKLVTAAGAKLGLEVETKSIPNPRVEAEEHYYNAKHTKLIELGLVPHLLSDSLLDSLLNFAIQYKDRVDTAQIMPSVSWKKMGAKPRTVSV

SEQ ID NO: 193884 - protein, 373 aa, Zea Mays
MKMAHLITNCSFQTQTPLTGSQQAYEHSSSKPKKNRVRRWKSLTAKTIQLFIGDICDFEFLSEAFKSFEPDAAVHFGEQRSAPYSMIDRSRAVYTQHNNVIGTLNVLFAIKEYSEECHLVKLGTMGEYGTPNIDIEEGFITITHNGRTDTLPYPKQASSFYHLSKVHDSHNIAFTCKAWGIRATDLNQGVVYGVRTDETAMHEELSNRFDYDGVFGTALNRFCVQAAVGHPLTVYGKGGQTRGYLDIRDTVQCVELAIANPAKPGEFRVFNQFTEQFSVNELAKLVTAAGAKLGLEVETKSIPNPRVEAEEHYYNAKHTKLIELGLVPHLLSDSLLDSLLNFAIQYKDRVDTAQIMPSVSWKKMGAKPRTVSV

SEQ ID NO: 193885 - protein, 349 aa, Zea Mays
MKMAHLITNCSFQTFSSSPNYCRNIGQLQNSKSSNLSLKSCSRRQKKSYVTCASAAVQGQTQTPLTGSQQAYEHSSSKPKKVMVIGGDGYCGWATALHLSNKGYEVAIVDNLVRRAFDNQLGLDSLTPITSIQNRVRRWKSLTAKTIQLFIGDICDFEFLSEAFKSFEPDAAVHFGEQRSAPYSMIDRSRAVYTQHNNVIGTLNVLFAIKEYSEECHLVKLGTMGEYGTPNIDIEEGFITITHNGRTDTLPYPKQASSFYHLSKVHDSHNIAFTCKAWGIRATDLNQGVVYGVRTDETAMHEELSNRFDYDGVFGTALNRFCVQAAVGHPLTVYGKGGQVAYLGELRNS

SEQ ID NO: 193886 - protein, 353 aa, Zea Mays
MAAAAAAGAASSILSSTPPRRLTFPPAHIRKPLAAAAPKALNLSSQKLPPLSSSATASPPPPPDGDDKPDPIKLAFARAAAYKKGRDSHSPSPSPAPAPPPTPPPQSSPPSQPQASVSEPGSKEAFKRALEYRNGNGAGAGAAGGDSPLLGGSPDFGQNALISEEVSFGKRGGYEFDEADFLGLDFFEKKRSKGLPPGLAPAFEPLRDDDFPEVDIIVGDPSKFDKSPRRTEIQPVDNGESGEASQSTTKPNEADKAGIAPPSTVIETEEDEDVYRPTVRSWGMFPRPQNISKAYGGGRNIRLGGETQSAEEKAAKDKRTKELIAAYRNRQNMVIDAKTKAECIKVQGSNEHV

SEQ ID NO: 193887 - protein, 441 aa, Zea Mays
MAAAAAAGAASSILSSTPPRRLTFPPAHIRKPLAAAAPKALNLSSQKLPPLSSSATASPPPPPDGDDKPDPIKLAFARAAAYKKGRDSHSPSPSPAPAPPPTPPPQSSPPSQPQASVSEPGSKEAFKRALEYRNGNGAGAGAAGGDSPLLGGSPDFGQNALISEEVSFGKRGGYEFDEADFLGLDFFEKKRSKGLPPGLAPAFEPLRDDDFPEVDIIVGDPSKFDKSPRRTEIQPVDNGESGEASQSTTKPNEADKAGIAPPSTVIETEEDEDVYRPTVRSWGMFPRPQNISKAYGGGRNIRLGGETQSAEEKAAKDKRTKELIAAYRNRQNMVIDAKTKAECIKTEFHGRAALQWSICLDSLCRSKEAMSMYSKLKNHPNSEISKKANMFVFSFQAMDFMKVSSIPVPKSTGYETYFTKFGSKKNYYASLEEPEKSWTSC

SEQ ID NO: 193888 - protein, 384 aa, Zea Mays
MAAAAAAGAASSILSSTPPRRLTFPPAHIRKPLAAAAPKALNLSSQKLPPLSSSATASPPPPPDGDDKPDPIKLAFARAAAYKKGRDSHSPSPSPAPAPPPTPPPQSSPPSQPQASVSEPGSKEAFKRALEYRNGNGAGAGAAGGDSPLLGGSPDFGQNALISEEVSFGKRGGYEFDEADFLGLDFFEKKRSKGLPPGLAPAFEPLRDDDFPEVDIIVGDPSKFDKSPRRTEIQPVDNGESGEASQSTTKPNEADKAGIAPPSTVIETEEDEDVYRPTVRSWGMFPRPQNISKAYGGGRNIRLGGETQSAEEKAAKDKRTKELIAAYRNRQNMVIDAKTKAECIKALREGDEMMNTGRLKQALPYYEKVMDAVDFKVQGSNEHV

SEQ ID NO: 193889 - protein, 187 aa, Zea Mays
MGISPLPDALRSALPGSRSTPKASLEHGTGLSFRFVARRPKDKDKMEDLQKEADTYHDFLFIDADEATKPPQTMLAFFKAAYHMFNAEFYVKASDDIYLRPDRLAALLAKERPQHKTYIGCMKKGPVVNDPNLKWYESSWELLGNEYFMHASGSLYALSSEVVEALATAKSDRCYNRRMDACYECKA

SEQ ID NO: 193890 - protein, 255 aa, Zea Mays
MPLHHPKHRHHDEDLLPYRRSDDEAKPRRPYTPTFPSSPASTNRLLLFFAVACLVLAAASFAFAVSTSRNRQSLPQPPPTVAFRCGRAEDSLRSFLAASSHGNFSAGDREKVLAVVGVHTEHGNFSAARRAALRATWFPLNPEGIVSLEHGTGLSFRFVARRPKDKDKMEDLQKEADTYHDFLFIDADEATKPPQTMLAFFKAAYHMFNAEFYVKASDDIYLRPGTKVLGNCWVTSTSCMHLVHYMLFLLRWLKL

SEQ ID NO: 193891 - protein, 77 aa, Zea Mays
MCKRLNVKVLPFFHFYRGADGLLEAFSCSLAKFQKLKDAIAMHNTARCSIGPPVGVGDVDLLDNASPQEKPAEASPR

SEQ ID NO: 193892 - protein, 242 aa, Zea Mays
MTDGDDEYKREESVALLVIVFLAALSLLSVIAAFAYYCYITRKVSRRLQAFHIPKRSSSHHTLPPRALPPQQQGTDNPSSNSTRDGVGAAAMSVVAAGERGVQVFSYRQLHAATGGFDRAHMVGQGSFGTVYRGVLPDGRKVAVKLMDRPGKQGEDEFEMEVELLSRLRSPYLLGLIGHCSEGEHCLLVYEFMANGGLQEHLYPNRGSHVNMKLAEVSSYHLTQRITWVHVVESQNWTGTQE

SEQ ID NO: 193893 - protein, 210 aa, Zea Mays
MTDGDDEYKREESVALLVIVFLAALSLLSVIAAFAYYCYITRKVSRRLQAFHIPKRSSSHHTLPPRALPPQQQGTDNPSSNSTRDGVGAAAMSVVAAGERGVQVFSYRQLHAATGGFDRAHMVGQGSFGTVYRGVLPDGRKVAVKLMDRPGKQGEDEFEMEVELLSRLRSPYLLGLIGHCSEGEHCLLVYEFMANGGLQEHLYPNRDLPG

SEQ ID NO: 193894 - protein, 156 aa, Zea Mays
MSGARHVFLLLCQFVNYLEVVRLPVYYPSEQEKDDPKLYANNVRKLMAVEGNLILSDLGLAEKRVYHAALNVRNRPSRKTAGAVAPMRMVVAEEPRQTTGAVATRRTTGAVATRRTAGAVATRRTTGATTRRTSGPAASTWMAGVVVTRRAIVATV

SEQ ID NO: 193895 - protein, 61 aa, Zea Mays
MGIISFHSKQDDPKLYANNVRKLMAVEGNLILSDLGLAEKRVYHAALNGNSLARALHQKDD

SEQ ID NO: 193896 - protein, 76 aa, Zea Mays
MSGARHVFLLLCQFVNYLEVVRLPVYYPSEQEKDDPKLYANNGNLILSDLGLAEKRVYHAALNGNSLARALHQKDD

SEQ ID NO: 193897 - protein, 87 aa, Zea Mays
MGIISFHSKQARHVFLLLCQFVNYLEVVRLPVYYPSEQEKDDPKLYANNVRKLMAVEGNLILSDLGLAEKRVYHAALNGLLCQSYFG

SEQ ID NO: 193898 - protein, 226 aa, Zea Mays
MAAAGTIPGAAAAIGASVSQRQRRVGAPSFVAAYVSEGTRLVCRRQLRPAPVLASSFISLSHPARRRFLCDAAAGASSGPAGEAKPQGFAERYPALVTGFFFFLWYFLNVIFNILNKKIFDYFPYPYFVSVSHLFIGVLYCLIGWSFGIPKRAPINSTLLKQLVPVAVCHAIGHVTSTVSFAAVAVSFAHTIKALEPFFNAAASQFILGQPVPLTLWLSLVPVVSR

SEQ ID NO: 193899 - protein, 397 aa, Zea Mays
MAAAGTIPGAAAAIGASVSQRQRRVGAPSFVAAYVSEGTRLVCRRQLRPAPVLASSFISLSHPARRRFLCDAAAGASSGPAGEAKPQGFAERYPALVTGFFFFLWYFLNVIFNILNKKIFDYFPYPYFVSVSHLFIGVLYCLIGWSFGIPKRAPINSTLLKQLVPVAVCHAIGHVTSTVSFAAVAVSFAHTIKALEPFFNAAASQFILGQPVPLTLWLSLVPVVIGVSVASLTELSFNWTGFINAMISNISFTYRSIYSKKTDMDSTNLYAYISIIALFVCIPPAIIIEGPQLVQHGFKDAIAKVGLTKLISNFFVVGLFYHLYNQVATNTLERVAPLTHAIGNVLKRVFVIGFSIIAFGNKITTQTGIGTSIAVSGVALYSFIKAKIEEKKQIKSA

SEQ ID NO: 193900 - protein, 180 aa, Zea Mays
MYERVFGDGDRLARFLRWRVQVMERGVRALTLRPGGVNAIIQVTDLKDMPKRELRAASNQILSLFQDNYPEMVARKVFINVPWYFSVLFSMISPFLTERTKSKFVIAREGNVAETLYKFIRPELVPVQYGGLSRTGDLENGPPKPASEFTIKGGEKVFLEIDGIEVQTNADSSGCKETTW

SEQ ID NO: 193901 - protein, 119 aa, Zea Mays
MLPLIYLRKLISQLPYLLLDGYMKLSNHLTFRERRIIGGALLKNHGVFFGAIQNSYHSTRILIRVMVIRYPLKGCKSPMIHGTIFLAKVFSLCLNTPEIKFICKPIRISRLNLTVEGIV

SEQ ID NO: 193902 - protein, 543 aa, Zea Mays
MLATEASAQMYAERLTELAHTLGFDGWLINIEVNLDVHFIDNLKEFVKHLTMTMHDAVPGSLVIWYDAITVNGDLDWQDKLNKYNKPFFDVCDGLFSNYTWKENDPQDSATVAGDRKYDVYMGIDVFGRNTFGGGQWTTNVALDLLKKVDISAAIFAPGWVYETKQPPDFQRAQNHWWGLVEKSWGILRSYPEQLPFYSDFNQGHGYQVSVEGLQISNDSWNNISCQSFQPMLKYTRDQVHLQAYTDFKAEPYSGGNCLTVKGSLQQNIIFSEQLFNGGLAMEDGPVHLFYSIRANASSALGLSLDLSSRNKQGTSKILVAEDIATFTRKKQNHKYGSYVKADKVELHAPDNHGWVLYKATVSSSAGHTLTGINIVCTLKFTGEISPESEDGSILVEDVDGTSLYQASLGHLSIRNTDKNTEFPPAESWITEGDYISWSKCSNGSELVNLKISWKLKNPDQPQPPFSKYNIYVEKLTADSDLKVPSPKSYLGVASVDAFYVSGLEVSNEVTGLKFFIQAFAHDGSWQELEECPKFFLFPVHSE

SEQ ID NO: 193903 - protein, 683 aa, Zea Mays
MLPFAAEPEVSDGDAAAGADRRAWEPPFDASSPAPPMSYPITGLAALASRAYLSAEANFHLPFNRASVPAPASPLPQRRRVLVCHDMEGGYRNDAAPQGGDKPDAYALWHWHLVDVFVYFSHYLVTLPPPCWINAAHLHGVKVLGTFIAEWDEGVKICKEMLATEASAQMYAERLTELAHTLGFDGWLINIEVNLDVHFIDNLKEYDAITVNGDLDWQDKLNKYNKPFFDVCDGLFSNYTWKENDPQDSATVAGDRKYDVYMGIDVFGRNTFGGGQWTTNVALDLLKKVDISAAIFAPGWVYETKQPPDFQRAQNHWWGLVEKSWGILRSYPEQLPFYSDFNQGHGYQVSVEGLQISNDSWNNISCQSFQPMLKYTRDQVHLQAYTDFKAEPYSGGNCLTVKGSLQQNIIFSEQLFNGGLAMEDGPVHLFYSIRANASSALGLSLDLSSRNKQGTSKILVAEDIATFTRKKQNHKYGSYVKADKVELHAPDNHGWVLYKATVSSSAGHTLTGINIVCTLKFTGEISPESEDGSILVEDVDGTSLYQASLGHLSIRNTDKNTEFPPAESWITEGDYISWSKCSNGSELVNLKISWKLKNPDQPQPPFSKYNIYVEKLTADSDLKVPSPKSYLGVASVDAFYVSGLEVSNEVTGLKFFIQAFAHDGSWQELEECPKFFLFPVHSE

SEQ ID NO: 193904 - protein, 716 aa, Zea Mays
MPVSPRRHLRRIARRVRAMLPFAAEPEVSDGDAAAGADRRAWEPPFDASSPAPPMSYPITGLAALASRAYLSAEANFHLPFNRASVPAPASPLPQRRRVLVCHDMEGGYRNDAAPQGGDKPDAYALWHWHLVDVFVYFSHYLVTLPPPCWINAAHLHGVKVLGTFIAEWDEGVKICKEMLATEASAQMYAERLTELAHTLGFDGWLINIEVNLDVHFIDNLKEFVKHLTMTMHDAVPGSLVIWYDAITVNGDLDWQDKLNKYNKPFFDVCDGLFSNYTWKENDPQDSATVAGDRKYDVYMGIDVFGRNTFGGGQWTTNVALDLLKKVDISAAIFAPGWVYETKQPPDFQRAQNHWWGLVEKSWGILRSYPEQLPFYSDFNQVSVEGLQISNDSWNNISCQSFQPMLKYTRDQVHLQAYTDFKAEPYSGGNCLTVKGSLQQNIIFSEQLFNGGLAMEDGPVHLFYSIRANASSALGLSLDLSSRNKQGTSKILVAEDIATFTRKKQNHKYGSYVKADKVELHAPDNHGWVLYKATVSSSAGHTLTGINIVCTLKFTGEISPESEDGSILVEDVDGTSLYQASLGHLSIRNTDKNTEFPPAESWITEGDYISWSKCSNGSELVNLKISWKLKNPDQPQPPFSKYNIYVEKLTADSDLKVPSPKSYLGVASVDAFYVSGLEVSNEVTGLKFFIQAFAHDGSWQELEECPKFFLFPVHSE

SEQ ID NO: 193905 - protein, 702 aa, Zea Mays
MPVSPRRHLRRIARRVRAMLPFAAEPEVSDGDAAAGADRRAWEPPFDASSPAPPMSYPITGLAALASRAYLSAEANFHLPFNRASVPAPASPLPQRRRVLVCHDMEGGYRNDAAPQGGDKPDAYALWHWHLVDVFVYFSHYLVTLPPPCWINAAHLHGVKVLGTFIAEWDEGVKICKEMLATEASAQMYAERLTELAHTLGFDGWLINIEVNLDVHFIDNLKEFVKHLTMTMHDAVPGSLVIWYDAITVNGDLDWQDKLNKYNKPFFDVCDGLFSNYTWKENDPQDSATVAGDRKYDTNVALDLLKKVDISAAIFAPGWVYETKQPPDFQRAQNHWWGLVEKSWGILRSYPEQLPFYSDFNQGHGYQVSVEGLQISNDSWNNISCQSFQPMLKYTRDQVHLQAYTDFKAEPYSGGNCLTVKGSLQQNIIFSEQLFNGGLAMEDGPVHLFYSIRANASSALGLSLDLSSRNKQGTSKILVAEDIATFTRKKQNHKYGSYVKADKVELHAPDNHGWVLYKATVSSSAGHTLTGINIVCTLKFTGEISPESEDGSILVEDVDGTSLYQASLGHLSIRNTDKNTEFPPAESWITEGDYISWSKCSNGSELVNLKISWKLKNPDQPQPPFSKYNIYVEKLTADSDLKVPSPKSYLGVASVDAFYVSGLEVSNEVTGLKFFIQAFAHDGSWQELEECPKFFLFPVHSE

SEQ ID NO: 193906 - protein, 710 aa, Zea Mays
MPVSPRRHLRRIARRVRAMLPFAAEPEVSDGDAAAGADRRAWEPPFDASSPAPPMSYPITGLAALASRAYLSAEANFHLPFNRASVPAPASPLPQRRRVLVCHDMEGGYRNDAAPQGGDKPDAYALWHWHLVDVFVYFSHYLVTLPPPCWINAAHLHGVKVLGTFIAEWDEGVKICKEMLATEASAQMYAERLTELAHTLGFDGWLINIEVNLDVHFIDNLKEFVKHLTMTMYDAITVNGDLDWQDKLNKYNKPFFDVCDGLFSNYTWKENDPQDSATVAGDRKYDVYMGIDVFGRNTFGGGQWTTNVALDLLKKVDISAAIFAPGWVYETKQPPDFQRAQNHWWGLVEKSWGILRSYPEQLPFYSDFNQGHGYQVSVEGLQISNDSWNNISCQSFQPMLKYTRDQVHLQAYTDFKAEPYSGGNCLTVKGSLQQNIIFSEQLFNGGLAMEDGPVHLFYSIRANASSALGLSLDLSSRNKQGTSKILVAEDIATFTRKKQNHKYGSYVKADKVELHAPDNHGWVLYKATVSSSAGHTLTGINIVCTLKFTGEISPESEDGSILVEDVDGTSLYQASLGHLSIRNTDKNTEFPPAESWITEGDYISWSKCSNGSELVNLKISWKLKNPDQPQPPFSKYNIYVEKLTADSDLKVPSPKSYLGVASVDAFYVSGLEVSNEVTGLKFFIQAFAHDGSWQELEECPKFFLFPVHSE

SEQ ID NO: 193907 - protein, 124 aa, Zea Mays
MDPYCCDCLFSDVHYLIASMGLQMLWSFGLACLDGYAIRANKDLTSPILLSLFVVGDWVTAILSFAASSSAAGVVILFQKDVLFCRRYPQLPCGKYELATAFAFLSWALSATSALIMFWLLAAF

SEQ ID NO: 193908 - protein, 147 aa, Zea Mays
MFILGMGFLWKPVAIVAAFMTGLSIAFLNDSFAVTFNEKVTRTVRQFSPHLAAKLRPPITPVLRGRPSSKRSIHICGRPRWVFVLFFSAVSCILWLTSCSLLTVLWALLIALFATVLHASFRTPNLKARLNTFREEFRAVWRNYSEL

SEQ ID NO: 193909 - protein, 176 aa, Zea Mays
MDWSAVTAEDLVDALREVDWSMPPRPVPEFFSRFTVPRSYSKWTSRLKCNLYYYRTNYFILIMFILGMGFLWKPVAIVAAFMTGLSIAFLNDSFAVTFNEKVTRTVRQFSPHLAAKLRPPITELYTLVDLMQSSHSPLGTSHCSICNCAPCKLQNTKSQSTSEYIQRGIPGCLAEL

SEQ ID NO: 193910 - protein, 464 aa, Zea Mays
MARGDTASEALTADSADEEGRRGSSSSASSDAASSFSCTYSPAPPDEWHKVAIIKTCVSVSADAAGGGGGKDQKPRACPRVKSPEMEMMKERFSKLLLGEDMSGSGKGVCTALAISNAVTNLCATVFGQLWRLEPLPPEKKAMWRRELDCLLCVSDHIVELVPTWQTFPDGTRLEIMTSRPRSDLYINLPALRKLDNMLLEILEGFRDVEFWYVDQGICAPDCDSSASYRRTFHRRDDKWWLPVPHVPHGGLREATRRQLEHRRDCASQILKAAMAINSNALAEMAVPVSYLDSLPKNGRAALGDVIYRYITSDQFSQDYLLDCLDLSSEYQALEIANRVEASIYVWRRKGGGGARSSWGIVKDMVMDTEKRDLLAERAEALLMSLKQRFPGLTQTSLDMSKIQYNKVQFAIHRDESSFVHRCLGRRGQIDPRELLEGPREPGLQHHRADRRPAQRRRAEQATS

SEQ ID NO: 193911 - protein, 203 aa, Zea Mays
MAEDSGAILRHISSVKDMVDKVNEEIEQNIQKTREIESEIVQHSETEKHYLNKESELTKEVSVTEFELNGLIQVAASESDLLKVAEGNLEFQKVAHDVIRKRVSDKMEKFINESMGFQANMLKSSNEDLVLLLNEKSSLEDESAKLKVKINSIHSSSKEYIAEILEEVNTENSGRMIPASPILSHRALPSSESITEEIVPHPP

SEQ ID NO: 193912 - protein, 367 aa, Zea Mays
MVQLLRRHRPGALADRYGGKKVMAGAAALWSLATILTPWAASRSTIMLLAVRALFGLAEGVAFPTMSTFLPKWFPTHERATAVGISMGGFHLGNVISFLATPIIMSHIGLSGTFAFFASLGYLWISVWMMNVESDPLDSHTISKSELQLILAGRAGSKVQGSNKFPSLRELFSRTEFLAVTLANVVNNWGYFVLLSWMPVYFKTVYNVNLKQAAWFSAIPWAVMAMSGYVAGASADFLIKSGFPIGLVRKIMQSIGFMGPCVALLCLRFAQTPSVAAVLMTIALSLSSFSQAGYFCNIQDIAPKYAGSLHGMTNGIGTVAAIVSTIGTGYFVQWLGSFQAFLTLTAALYFSATVFYNVYATGDLIFD

SEQ ID NO: 193913 - protein, 363 aa, Zea Mays
MVQLLRRHRPDRYGGKKVMAGAAALWSLATILTPWAASRSTIMLLAVRALFGLAEGVAFPTMSTFLPKWFPTHERATAVGISMGGFHLGNVISFLATPIIMSHIGLSGTFAFFASLGYLWISVWMMNVESDPLDSHTISKSELQLILAGRAGSKVQGSNKFPSLRELFSRTEFLAVTLANVVNNWGYFVLLSWMPVYFKTVYNVNLKQAAWFSAIPWAVMAMSGYVAGASADFLIKSGFPIGLVRKIMQSIGFMGPCVALLCLRFAQTPSVAAVLMTIALSLSSFSQAGYFCNIQDIAPKYAGSLHGMTNGIGTVAAIVSTIGTGYFVQWLGSFQAFLTLTAALYFSATVFYNVYATGDLIFD

SEQ ID NO: 193914 - protein, 173 aa, Zea Mays
MFLTASPVGPMRFTNRPWQDKMCVNCASINILSVKIACSDIDFPIQVYGTVVARDCIDYKCVYLFRRDNDHCQLISSNEESLILTGPKRGLALWYDADYVQTDLWVKDRQGHCKQFSKGIVRIPGNQVFDKCEPETVSLATRLSTVDVTYDVVECAVEATVAAEVTQGEFYGA

SEQ ID NO: 193915 - protein, 252 aa, Zea Mays
MGLLSNRIGRESLKAGDHIYSWRAAWVYAHHGIYVGDDKVIHFTRGRGQEVGTGTVVDIILVSSTPKRSNTPCPVCTDETSDSSTETNGVVSSCLSCFLAGGALYRFEYAVNPALFLAKARGGTCTLAPSDPDDTVARRARYLLSNGFRCYNLFKSNCEDFAIYCKTGLLVAEQGVVGQSGQAISIIGGPLAAVVSTPFRLVTTNIYGMAVMAVGVYCASSGRICAVENIAQLVAPEAEGPADATATATLAA

SEQ ID NO: 193916 - protein, 66 aa, Zea Mays
MKYHIKVNKSLEVGVPWCCTKLGVNCLKMFLIRFLFQITETESSVSLEGFWGIATFDLCAFNPEFL

SEQ ID NO: 193917 - protein, 77 aa, Zea Mays
MVITMAIVVAHWAYKFTTLSSPFIQINRAQLFVPSLRSQRITSHSILSTTLSDHRSSLESISSAAVKNPSVASTPRN

SEQ ID NO: 193918 - protein, 122 aa, Zea Mays
MVITMAIVVAHWAYKFTTLSSPFIQINRAQLFVPSLRSQRITSHSILSTTLSDHRSSLESISSAAVKNPSVASTPRDLENAVAPSVNTVWNDLTMADLVWSWLRARSWVVPLRGEPLMLPSC

SEQ ID NO: 193919 - protein, 111 aa, Zea Mays
MVKDLVFPVNMHLGQHFTKPPPRYSEGALIKKLEELVIGRPSTYASIMKVLLTAVGRPRPDFWRCFLDGKQLYDQVTGDVICHGEKNFLQDGRKSFPSGHTSLGKPLSISS

SEQ ID NO: 193920 - protein, 100 aa, Zea Mays
MFSNKATGTRCGLGSKGWKGPPNTTPFPECRTKNNTCSLNSSVCSSSSCITCDSSSATYAYILGQTKAIKSAAEVIKTNSAQRTAQNHASWNICNFATQK

SEQ ID NO: 193921 - protein, 119 aa, Zea Mays
MAAIWQSRKQPKSHIADTKASAGCTDRPSISNFLLIDRAARHSCLLYIYTGSPASSLCRTRTLPLSSSAATSRTSPTLFPCLRLHQSRRQPGRRERWGTAGQSPRPATETTRLRPSRRR

SEQ ID NO: 193922 - protein, 131 aa, Zea Mays
MVKDKDNVTLEDVLQPGTNMLAAGYCMYGSSCTLVLSTGNGVNGFTLDPSLGEFILTHPNIKIPRKGKIYSVNEGNAKNWDGPTAKYDELGGSFLSKNYYCDFVTSQAEFYAVSDSWRNASILRMVHRLDP

SEQ ID NO: 193923 - protein, 347 aa, Zea Mays
MDHAAEAQRTDLMTITRHVLNEQSRHPESRGDFTILLSHIVLGCKFVAAAVNKAGLAKLIGLAGETNVQGEEQKKLDVLSNEVFVKALVSSGRTCVLVSEENEEAIFVDPALRGKFVNPLLLHPDLVKVPQRRTVAFPDRVLVLSLSLFRYCVCFDPLDGSSNIDCGVSIGTIFGIYMVKDKDNVTLEDVLQPGTNMLAAGYCMYGSSCTIPRKGKIYSVNEGNAKNWDGPTAKFVEKCKYPEDGSPPRSLRYIGSMVADVHRTLLYGGIFLYPADQKSPNGKLRVLYEVFPMSFLMEQAGGQAFTGKQRALELAPAKLHDRSPVFLGSYDDVEEIKALYASMSNSG

SEQ ID NO: 193924 - protein, 121 aa, Zea Mays
MPFVRHIYSASKQVSTAVSPDQNTTAFKEVAIISHPRVGEYAFGFITSTMVLQTDKGDEELCSVYVPTNHLYIGDIFLVNSAEIIRPNLSIREGIGDHVTGTNTSEEPERPFGQSEDSMTV

SEQ ID NO: 193925 - protein, 256 aa, Zea Mays
MPASIRIGGEQAAHDVQGAAAMEGHYSPTASAAEAGGERRFRGVRQRPWGKWAAEIRDPHKAARVWLGTFDTAEAAARAYDEAALRFRGSRAKLNFPEDARLTTAPSAAVAPAAAGSTTTMAVAASAGGSYQQEASAAVVSADYLQYQMMLLQGATSGQGSSSHGGYPLYYDYGGHGGAGAGAGGGAMSSSYSFPASTVTVASVPSSSASSAPSYGEAAQWAGSWPESSAWSYPATTASWSGSSQYEYPPSTRPPQ

SEQ ID NO: 193926 - protein, 142 aa, Zea Mays
MDPAAMLRSPCSIVSPGSLLTAPLLPVRLAVQPRRRVPGFIAPSGRPSVARRAAAGDKFEAETPIEKSFPPFPTVMDINQIRDILPHRFPFLLVDRVIDYKPGEYAVAIKNVTINDNFFPGHFPERPIMPGVLMVEFQIVAE

SEQ ID NO: 193927 - protein, 62 aa, Zea Mays
MYGIAGFKLTLSHSQGMWLDKIVLDQQAYIRIQSLIDPGGASPVPSPSLDLSISILRIVSVP

SEQ ID NO: 193928 - protein, 75 aa, Zea Mays
MAAPPPPTLPLQSFHPSPPRSCLGLRANDWVYLLFMTMGVVVAALREHHQEPRIQVNEEIYNHDELKAKFRTHEF

SEQ ID NO: 193929 - protein, 180 aa, Zea Mays
MAAPPPPTLPLQSFHPSPPRSCLGLRANDWVYLLFMTMGVVVAALREHHQEPRIQYEEFGEEFVDMLDGIISFVLLDTRQKSFVAAHDAVAICPLYMGWCLDETPVAIHFCRTLKKGNILGNIVDLNNWNLDEIEAARMAAINKEIKRVLTEVLSKAGQKVHEESERLRACDSRNMSRLQ

SEQ ID NO: 193930 - protein, 147 aa, Zea Mays
MKQQHGTEPRQRRAYARSASSCRACTQQACRPHRASVRRPESSPTAPAGLLVAWWSAYKLASARAPAARASLYSPLSRASHSRATNHTTGPCRSLASLVQGIKQARGQPSSSMAKASSRLLFSLSLVVLLLLVELLCADHYFSPWTG

SEQ ID NO: 193931 - protein, 351 aa, Zea Mays
MTPAPSNAAGDLFAANLTGALLAVASSAFIGVSFIVKKKGLRRAATAGARAGVGGYGYLLEPLWWIGMVTMLIGEIANFVAYMFAPAILVTPLGALSIIVSAVLAHFTLNEKLQRMGVLGCVLCIIGSTIIILHAPEEETPSSVTQIWQLATQPAFLCYAASALTISLILIFHCAPRYGQTNIVVYVGICSVIGSLTVMSIKAVGIAIKLTIEGINQAGYFQTWLFATVSATCIIIQLIYLNKALDTFNTAVVSPIYYAMFTSLTILASAIMFKSISSIASEICGFLTVLTGTVVLHSTREHDPTLTSDLYAPLSPIYWHIQGNGETGGKLKEDDLLSGNFITVVRQDYFV

SEQ ID NO: 193932 - protein, 262 aa, Zea Mays
MTPAPSNAAGDLFAANLTGALLAVASSAFIGVSFIVKKKGLRRAATAGARAGVGGYGYLLEPLWWIGMVTMLIGEIANFVAYMFAPAILVTPLGALSIIVSAVLAHFTLNEKLQRMGVLGCVLCIIGSTIIILHAPEEETPSSVTQIWQLATQPAFLCYAASALTISLILIFHCAPRYGQTNIVVYVGICSVIGSLTVMSIKAVGIAIKLTIEGINQAGYFQTWLFATVSATCIIIQLIYLNKLFLPSTMRCLHPSQFWQVP

SEQ ID NO: 193933 - protein, 124 aa, Zea Mays
MQWNSSDMASDDALSPKPQRSRSRQHRGFHRKSISRSMSCDSHSKTSVSSSSRAHTKVDLSKLELTALLRYWRHFNLDACPNPSREQLVDAVQRHFTAQQLDELQVIVGFVQAAKRLKTTMKVA

SEQ ID NO: 193934 - protein, 171 aa, Zea Mays
MGRGKIEIKRIENSTNRQVTFSKRRAGLVKKAREIGVLCDAEVGVVIFSSGGKLYDYCSPRTSLSRILEKYQTNSGKILWGEKHKNLSAEIDRVKKENDNMQIQLRHLKGEDLNSLQPRELIAIEEGLQNGQTNMREKQAIILPRPVAPELISVACSTQARHSSLGEGFCF

SEQ ID NO: 193935 - protein, 824 aa, Zea Mays
MGKATGKKSRFPNRGCQKAYHPACVGKDSGFLNSDEEFICEWHTCFICKGRSRYYCFCCPWQAFCQNCVKQAEFVPVLRKTKGFCTNCLRMAIMIEKNVDVDSDGERVDFNDRATYEFLFKEYWEEIVKGKESMTLDKLEKAYAFLKEKLNCKQDLDLEKVHDEEHSSDDDFVGNSDDDDDNKPSSTTKFNGTSNTMKFFLREDRPMKNGYVGWGSKELMEFLSSIGKDTLNSLDQHGATEVVKVYIQQKGLLARDKKKLVICDDKLKILFRRSKVRYNRIYSLLGKHIAVNMTSEDETFANSDDNNETFVRKKARIGNYSSSTPKCTPEINKRCFAALVRHNIDLIYLKKSLVVDLLREPDTFGSKVIGCFVRIKIDLNDYSFYMHKKVHQHRKLYQLGLVTGTSKSPEEYKINDVSTDILLCISSIPDIKISSLSDEEYEEEECQDLRLLAKNESFKRPTVGDLEEKARSLRREIVNHWISKELQRLERLIDRASEKGWRKEKFEYLDKKQLLRKPSEQQRLLEEVPQVIPETEDNKDTEFQVTGQDKPIQKSTVALQGTNGESIVSLKKGSEEKCTYVTRASFLKSHTGKKSKGTDGERDLSLESLSEEKPEVNKAHTDGGTAVIHNQNRSTTAAIAALPKYLHRHAATEANNAGDISSVQELDGEGVKASTDVDTTGTDVQHGSIEATKANAAGDAPGAFFQKQCAKAADVITIDDDDEDNSHRCYKEEQTAVVDLEADYAGDNHPVQLEANSRGHKHVKVKERIWYYIDPQGDEQGPFTMQHLSIWWSNGFFPGDFRVWRTGQTSNDAILLVDALQMTR

SEQ ID NO: 193936 - protein, 879 aa, Zea Mays
MGKGARRRSRASGAGGGGHGSKRPRRAEEEEQEEEEMEPLVGEEEEVAALEGEDYCFVCKDGGDLRVCDFRGCQKAYHPACVGKDSGFLNSDEEFICEWHTCFICKGRSRYYCFCCPWQAFCQNCVKQAEFVPVLRKTKGFCTNCLRMAIMIEKNVDVDSDGERVDFNDRATYEFLFKEYWEEIVKGKESMTLDKLEKAYAFLKEKLNCKQDLDLEKVHDEEHSSDDDFVGNSDDDDDNKPSSTTKFNGTSNTMKFFLREDRPMKNGYVGWGSKELMEFLSSIGKDTLNSLDQHGATEVVKVYIQQKGLLARDKKKLVICDDKLKILFRRSKVRYNRIYSLLGKHIAVNMTSEDETFANSDDNNETFVRKKARIGNYSSSTPKCTPEINKRCFAALVRHNIDLIYLKKSLVVDLLREPDTFGSKVIGCFVRIKIDLNDYSFYMHKKVHQHRKLYQLGLVTGTSKSPEEYKINDVSTDILLCISSIPDIKISSLSDEEYEEEECQDLRLLAKNESFKRPTVGDLEEKARSLRREIVNHWISKELQRLERLIDRASEKGWRKEKFEYLDKKQLLRKPSEQQRLLEEVPQVIPETEDNKDTEFQVTGQDKPIQKSTVALQGTNGESIVSLKKGSEEKCTYVTRASFLKSHTGKKSKGTDGERDLSLESLSEEKPEVNKAHTDGGTAVIHNQNRSTTAAIAALPKYLHRHAATEANNAGDISSVQELDGVKASTDVDTTGTDVQHGSIEATKANAAGDAPGAFFQKQCAKAADVITIDDDDEDNSHRCYKEEQTAVVDLEADYAGDNHPVQLEANSRGHKHVKVKERIWYYIDPQGDEQGPFTMQHLSIWWSNGFFPGDFRVWRTGQTSNDAILLVDALQMTR

SEQ ID NO: 193937 - protein, 640 aa, Zea Mays
MGKGARRRSRASGAGGGGHGSKRPRRAEEEEQEEEEMEPLVGEEEEVAALEGEDYCFVCKDGGDLRVCDFRGCQKAYHPACVGKDSGFLNSDEEFICEWHTCFICKGRSRYYCFCCPWQAFCQNCVKQAEFVPVLRKTKGFCTNCLRMAIMIEKNVDVDSDGERVDFNDRATYEFLFKEYWEEIVKGKESMTLDKLEKAYAFLKEKLNCKQDLDLEKVHDEEHSSDDDFVGNSDDDDDNKPSSTTKFNGTSNTMKFFLREDRPMKNGYVGWGSKELMEFLSSIGKDTLNSLDQHGATEVVKVYIQQKGLLARDKKKLVICDDKLKILFRRSKVRYNRIYSLLGKHIAVNMTSEDETFANSDDNNETFVRKKARIGNYSSSTPKCTPEINKRCFAALVRHNIDLIYLKKSLVVDLLREPDTFGSKVIGCFVRIKIDLNDYSFYMHKKVHQHRKLYQLGLVTGTSKSPEEYKINDVSTDILLCISSIPDIKISSLSDEEYEEEECQDLRLLAKNESFKRPTVGDLEEKARSLRREIVNHWISKELQRLERLIDRASEKGWRKEKFEYLDKKQLLRKPSEQQRLLEEVPQVIPETEDNKDTEFQVTGQDKPIQKSTVALQGTNGESIVSLKKGSEEKCKHLLL

SEQ ID NO: 193938 - protein, 864 aa, Zea Mays
MGKGARRRSRASGAGGGGHGSKRPRRAEEEEQEEEEMEPLVGEEEEVAALEGEDYCFVCKDGGDLRVCDFRGCQKAYHPACVGKDSGFLNSDEEFICEWHTCFICKGRSRYYCFCCPWQAFCQNCVKQAEFVPVLRKTKGFCTNCLRMAIMIEKNVDVDSDGERVDFNDRATYEFLFKEYWEEIVKGKESMTLDKLEKAYAFLKEKLNCKQDLDLEKVHDEEHSSDDDFVGNSDDDDDNKPSSTTKFNGTSNTMKFFLREDRPMKNGYVGWGSKELMEFLSSIGKDTLNSLDQHGATEVVKVYIQQKGLLARDKKKLVICDDKLKILFRRSKVRYNRIYSLLGKHIAVNMTSEDETFANSDDNNETFVRKKARIGNYSSSTPKCTPEINKRCFAALVRHNIDLIYLKKSLVVDLLREPDTFGSKVIGCFVRIKIDLNDYSFYMHKKVHQHRKLYQLGLVTGTSKSPEEYKINDVSTDILLCISSIPDIKISSLSDEEYEEEECQDLRLLAKNESFKRPTVGDLEEKARSLRREIVNHWISKELQRLERLIDRASEKGWRKEKFEYLDKKQLLRKPSEQQRLLEEVPQVIPETEDNKDTEFQVTGQDKPIQKSTVALQGTYVTRASFLKSHTGKKSKGTDGERDLSLESLSEEKPEVNKAHTDGGTAVIHNQNRSTTAAIAALPKYLHRHAATEANNAGDISSVQELDGEGVKASTDVDTTGTDVQHGSIEATKANAAGDAPGAFFQKQCAKAADVITIDDDDEDNSHRCYKEEQTAVVDLEADYAGDNHPVQLEANSRGHKHVKVKERIWYYIDPQGDEQGPFTMQHLSIWWSNGFFPGDFRVWRTGQTSNDAILLVDALQMTR

SEQ ID NO: 193939 - protein, 540 aa, Zea Mays
MGKGARRRSRASGAGGGGHGSKRPRRAEEEEQEEEEMEPLVGEEEEVAALEGEDYCFVCKDGGDLRVCDFRGCQKAYHPACVGKDSGFLNSDEEFICEWHTCFICKGRSRYYCFCCPWQAFCQNCVKQAEFVPVLRKTKGFCTNCLRMAIMIEKNVDVDSDGERVDFNDRATYEFLFKEYWEEIVKGKESMTLDKLEKAYAFLKEKLNCKQDLDLEKVHDEEHSSDDDFVGNSDDDDDNKPSSTTKFNGTSNTMKFFLREDRPMKNGYVGWGSKELMEFLSSIGKDTLNSLDQHGATEVVKVYIQQKGLLARDKKKLVICDDKLKILFRRSKVRYNRIYSLLGKHIAVNMTSEDETFANSDDNNETFVRKKARIGNYSSSTPKCTPEINKRCFAALVRHNIDLIYLKKSLVVDLLREPDTFGSKVIGCFVRIKIDLNDYSFYMHKKVHQHRKLYQLGLVTGTSKSPEEYKINDVSTDILLCISSIPDIKISSLSDEEYEEEECQDLRLLAKNESFKRPTVIEIMHCWCGMASNQMEACLF

SEQ ID NO: 193940 - protein, 124 aa, Zea Mays
MPESATATEEDGICTTTVTTVIFKAGDCDTVGGADVSIAGGRALCCTRDMARLEACTEGAVTYCAWNGSTGWPMVLTASILLGGLDAAFPDETVAVARTDMYTLLFVHCNASLADQQVATVKVA

SEQ ID NO: 193941 - protein, 212 aa, Zea Mays
MFVRDLSLPRLQALRHRRHPRAVILQHPIRFLGAADLVPHWCADGHSSRIVAVAVVDATVTDAAAQQLPSAPRRMLVCVTAGAHDGPSGHRAQRAAAASDSPKPMYVRAGDNDLNLNSGSCAGMGTGRGGCLCLLVLALQHGRRRRAYGGRQLKVVRRRAEHAGWSQPGLRQPLGRDGRPPPPITDAAATANATNDAAWCAADRGAAIVFSR

SEQ ID NO: 193942 - protein, 170 aa, Zea Mays
MNEKDWLALVAVHSDSWLLAVAFYFAARFGFDKEARRRLFNMINNLPTIFEVVTGVANKQNKEKGPNSTSKSNKTSSKMTSRPESHSKATKVAVPPKDDDDESGEEYEEEERDNTLCGSCGTNDGKDEFWICCDSCERWYHGKCVKITPARAEHIKHYKCPDCNNKRARA

SEQ ID NO: 193943 - protein, 245 aa, Zea Mays
MDPGAGAHYSVRTAEEVFRDFRGRRAGMIKALTNEKENLCLYGYPNETWEVTLPAEEVPPEIPEPALGINFARDGMNEKDWLALVAVHSDSWLLAVAFYFAARFGFDKEARRRLFNMINNLPTIFEVVTGVANKQNKEKGPNSTSKSNKTSSKMTSRPESHSKATKVAVPPKDDDDESGEEYEEEERDNTLCGSCGTNDGKDEFWICCDSCERWYHGKCVKITPARAEHIKHYKCPDCNNKRARA

SEQ ID NO: 193944 - protein, 134 aa, Zea Mays
MDPGAGAHYSVRTAEEVFRDFRGRRAGMIKALTNDVEKFYQLCDPEKENLCLYGYPNETWEVTLPAEEVPPEIPEPALGINFARDGMNEKDWLALVAVHSDSWLLAVAFYFAARFGFDKEASLHFHKFLYKLVL

SEQ ID NO: 193945 - protein, 77 aa, Zea Mays
MRTSRVRPVATGYYYYKSQGQTGTASRQPPHHQRQAAKRQHHRAAPKQASTTDPPGHHPTASSRGRRRRGAARSGRR

SEQ ID NO: 193946 - protein, 371 aa, Zea Mays
MVPKFMMANGTLVRTLIHTDVTKYLSFKAVDGSYVFSKGKIYKVPATDMEALKSPLMGLFEKRRARNFFIYVQDYNEADPRTHQGLDLTRVTTRELIAKYGLSDDTVDFIGHALALHRDDRYLDEPALDTVKRMKLYSESLARFQGGSPYIYPLYGLGELPQGFARLSAVYGGTYMLNKPECKVEFDMEGKVCGVTSEGETAKCKKVVCDPSYLPNKVRKIGRVVRAIAIMSHPIPNTNESHSVQIILPQKQLGRRSDMYVFCCSYTHNVAPRGKFIAFVSAEAETDNPQSELKPGIDLLGSVDEILYDIYDRYEPVNEPSLDNCFVTTSYDATTHFETTVTDVLNMYTMITGKTVDLSVDLSAASAAEEY

SEQ ID NO: 193947 - protein, 196 aa, Zea Mays
MLNKPECKVEFDMEGKVCGVTSEGETAKCKKVVCDPSYLPNKVRKIGRVVRAIAIMSHPIPNTNESHSVQIILPQKQLGRRSDMYVFCCSYTHNVAPRGKFIAFVSAEAETDNPQSELKPGIDLLGSVDEILYDIYDRYEPVNEPSLDNCFVTTSYDATTHFETTVTDVLNMYTMITGKTVDLSVDLSAASAAEEY

SEQ ID NO: 193948 - protein, 336 aa, Zea Mays
MDEEYDVIVLGTGLKECILSGLLSVDGLKVLHMDRNDYYGGDSTSLNLNQLWKRFRGEDKPPAHLGASRDYNVDMVPKFMMANGTLVRTLIHTDVTKYLSFKAVDGSYVFSKGKIYKVPATDMEALKSPLMGLFEKRRARNFFIYVQDYNEADPRTHQGLDLTRVTTRELIAKYGLSDDTVDFIGHALALHRDDRYLDEPALDTVKRMKLYSESLARFQGGSPYIYPLYGLGELPQGFARLSAVYGGTYMLNKPECKVEFDMEGKVCGVTSEGETAKCKKVVCDPSYLPNKVRKIGRVVRAIAIMSHPIPNTNESHSVQIILPQKQLGRRSDISRD

SEQ ID NO: 193949 - protein, 169 aa, Zea Mays
MDEEYDVIVLGTGLKECILSGLLSVDGLKVLHMDRNDYYGGDSTSLNLNQLWKRFRGEDKPPAHLGASRDYNVDMVPKFMMANGTLVRTLIHTDVTKYLSFKAVDGSYVFSKGKIYKVPATDMEALKSPLMGLFEKRRARNFFIYVQDYNEADPRTHQGLDLTRKIWFK

SEQ ID NO: 193950 - protein, 237 aa, Zea Mays
MDEEYDVIVLGTGLKECILSGLLSVDGLKVLHMDRNDYYGGDSTSLNLNQLWKRFRGEDKPPAHLGASRDYNVDMVPKFMMANGTLVRTLIHTDVTKYLSFKAVDGSYVFSKGKIYKVPATDMEALKSPLMGLFEKRRARNFFIYVQDYNEADPRTHQGLDLTRVTTRELIAKYGLSDDTVDFIGHALALHRDDRYLDEPALDTVKRMKSLLRAFKEARHISIHCMVWVSYHRVLHD

SEQ ID NO: 193951 - protein, 438 aa, Zea Mays
MDEEYDVIVLGTGLKECILSGLLSVDGLKVLHMDRNDYYGGDSTSLNLNQLWKRFRGEDKPPAHLGASRDYNVDMVPKFMMANGTLVRTLIHTDVTKYLSFKAVDGSYVFSKGKIYKVPATDMEALKSPLMGLFEKRRARNFFIYVQDYNEADPRTHQGLDLTRVTTRELIAKYGLSDDTVDFIGHALALHRDDRYLDEPALDTVKRMKLYSESLARFQGGSPYIYPLYGLGELPQGFARLSAVYGGTYMLNKPECKVEFDMEGKVCGVTSEGETAKCKKVVCDPSYLPNKVRKIGRVVRAIAIMSHPIPNTNESHSVQIILPQKQLGRRSDMYVFCCSYTHNVAPRGKFIAFVSAEAETDNPQSELKPGIDLLGSVDEILYDIYDRYEPVNEPSLDNCFVTTSYDATTHFETTVTDVLNMYTMITGKEGFISRIATS

SEQ ID NO: 193952 - protein, 141 aa, Zea Mays
MSHPIPNTNESHSIQIILPQKQLGRKSDMYVFCCSYTHNVAPKGKFIAFVSAEAETDNPQSELKPGIDLLGQVDELFFDMYDRYKPVNEPSLDNCFVSMSYDATTHFETTVTDVLSMYTAITGKTVDLSVDLSAASAAEEY

SEQ ID NO: 193953 - protein, 131 aa, Zea Mays
MSHPIPNTNESHSIQIILPQKQLGRKSDMYVFCCSYTHNVAPKGKFIAFVSAEAETDNPQSELKPGIDLLGQVDELFFDMYDRYKPVNEPSLDNCFVSMSYDATTHFETTVTDVLSMYTAITGKIFCENQP

SEQ ID NO: 193954 - protein, 419 aa, Zea Mays
MREILHIQGGQCGNQIGSKFWEVVCDEHGIDPTGRYMGTSDVQLERVNVYYNEASCGRFVPRAVLMDLEPGTMDAVRTGPYGQIFRPDNFVFGQSGAGNNWAKGHYTEGAELIDSVLDVVRKEAENCDCLQGFQVCHSLGGGTGSGMGTLLISKIREEYPDRMMMTFSVFPSPKVSDTVVEPYNATLSVHQLVENADECMVLDNEALYDICFRTLKLTTPSFGDLNHLISATMSGVTCCLRFPGQLNSDLRKLAVNLIPFPRLHFFMMWDSKNMMCAADPRHGRYLTASAMFRGKMSTKEVDEQMINVQNKNSSYFVEWIPNNVKSSVCDIPPRGLSMSSTFVGNSTSIQEMFRRVSEQFTAMFRRKAFLHWYTGEGMDEMEFTEAESNMNDLVSEYQQYQDATADEEADYEEEEAAAE

SEQ ID NO: 193955 - protein, 208 aa, Zea Mays
MSTSPAASAAASPPPPIASAAEASRATETLVVDERVASHVDPFLVEALDNPRHRLMDSDAASVLGTLCTGRDESVNVEPSVDEIKVSTMNNRSRVAVFKDTQKDRSDPDYDRNYKRYVRSPVPDFNLSPGAFNFVPQFMQYGVGYVQSPGMSTNQPAVYFGQPDLTMGSSGAAVYPHWPTPAMMYPHCYDNVGSMISQVPLYQSFNHG

SEQ ID NO: 193956 - protein, 290 aa, Zea Mays
MELDIRNFMQNPQLQEFEFQNFPTSYLRCAAHRVAQHYGLETIVADSLVEGSVSRIVARKTPESRCPAISLAEVPSKQARNDHEAAEKLKFVIYQRPKAFQNGSTDLGNKNGAPKTVEERIEEYNKARARIFNGSVSADSDAASVLGTLCTGRDESVNVEPSVDEIKVSTMNNRSRVAVFKDTQKDRSDPDYDRNYKRYVRSPVPDFNLSPGAFNFVPQFMQYGVGYVQSPGMSTNQPAVYFGQPDLTMGSSGAAVYPHWPTPAMMYPHCYDNVGSMISQVPLYQSFNHG

SEQ ID NO: 193957 - protein, 120 aa, Zea Mays
MNNRSRVAVFKDTQKDRSDPDYDRNYKRYVRSPVPDFNLSPGAFNFVPQFMQYGVGYVQSPGMSTNQPAVYFGQPDLTMGSSGAAVYPHWPTPAMMYPHCYDNVGSMISQVPLYQSFNHG

SEQ ID NO: 193958 - protein, 271 aa, Zea Mays
MSTSPAASAAASPPPPIASAAEASRATETLVVDERVASHVDPFLVEALDNPRHRLMVLRMELDIRNFMQNPQLQEFEFQNFPTSYLRCAAHRVAQHYGLETIVADSLVEGSVSRIVARKTPESRCPAISLAEVPSKQARNDHEAAEKLKFVIYQRPKAFQNGSTDLGNKNGAPKTVEERIEEYNKARARIFNGSVSADSDAASVLGTLCTGRDESVNVEPSVDEIKVSTMNNRSRVAVFKDTQKDRSDPDYDRNYKRYVRSPVPDFNLSPA

SEQ ID NO: 193959 - protein, 144 aa, Zea Mays
MMNSIVEESRKLQKEAEENLKLKEFLVERGQIVDMLQGEMAVTCEDVSLLKRVVDERLPLSKLQRSAMSSLSSSLHSSHHKSWTSSDKAIRSPDKHTLAEPASPVGKDLDGNECTVEVSDGNDSGEGILKRVDSKEDVDGWELC

SEQ ID NO: 193960 - protein, 650 aa, Zea Mays
MGDLKEVFRSLQELFPEVDHRILKAIAIEHRKDVDSAVVTVLDEVMPFMTGSAGVDGSVGNLSSMDGSVGNLFGNHSTHEVGSSSSVWRDICINEIDASVYSVQYTSYGDVKTGKQENINNTYVGRLASIEGVNEQLNLHSYPIPNGGQHDLLPNLDVLSSNTDPEKTLANTDNEVGYSGLFSECFSQPPTGEDGGNIIAPQPCDQDPNGMIPVGDYFPQNSSMEFFSGYEDYNFDDGLLPIGSNDQISFRILGTEKDPFAPVLDVPGRDKEESSTETSGFIESSNNVADMLPDLNLNHFTSTASTHSNHSVSIESLEDSVADARSNKERAAHAVVLMLLLGFDRRRLQVQGDTVQYGCSVEGAVLGSFDNDLLPSIELVTKMIEDVELLEEKAKVAKHELSVAGTGILAKVEELREMITYAKEANDMHAGKVLGEKAILTTEARELLSRHQRLSDERNKYLVIIEEIHQILAERLVAAQQEIAAAEKENAEKEAAAQAVLDEQEKMMNSIVEESRKLQKEAEENLKLKEFLVERGQIVDMLQGEMAVTCEDVSLLKRVVDERLPLSKLQRSAMSSLSSSLHSSHHKSWTSSDKAIRSPDKHTLAEPASPVGKDLDGNECTVEVSDGNDSGEGILKRVDSKEDVDGWELC

SEQ ID NO: 193961 - protein, 624 aa, Zea Mays
MGDLKEVFRSLQELFPEVDHRILKAIAIEHRKDVDSAVVTVLDEVMPFMTGSAGVDGSVGNLSSMDGSVGNLFGNHSTHEVGSSSSVWRDICINEIDASVYSVQYTSYGDVKTGKQENINNTYVGRLASIEGVNEQLNLHSYPIPNGGQHDLLPNLDVLSSNTDPEKTLANTDNEVGYSGLFSECFSQPPTGEDGGNIIAPQPCDQDPNGMIPVGDYFPQNSSMEFFSGYEDYNFDDGLLPIGSNDQISFRILGTEKDPFAPVLDVPGRDKEESSTETSGFIESSNNVADMLPDLNLNHFTSTASTHSNHSVSIESLEDSVADARSNKERAAHAVVLMLLLGFDRRRLQVQELVTKMIEDVELLEEKAKVAKHELSVAGTGILAKVEELREMITYAKEANDMHAGKVLGEKAILTTEARELLSRHQRLSDERNKYLVIIEEIHQILAERLVAAQQEIAAAEKENAEKEAAAQAVLDEQEKMMNSIVEESRKLQKEAEENLKLKEFLVERGQIVDMLQGEMAVTCEDVSLLKRVVDERLPLSKLQRSAMSSLSSSLHSSHHKSWTSSDKAIRSPDKHTLAEPASPVGKDLDGNECTVEVSDGNDSGEGILKRVDSKEDVDGWELC

SEQ ID NO: 193962 - protein, 352 aa, Zea Mays
MGDLKEVFRSLQELFPEVDHRILKAIAIEHRKDVDSAVVTVLDEVMPFMTGSAGVDGSVGNLSSMDGSVGNLFGNHSTHEVGSSSSVWRDICINEIDASVYSVQYTSYGDVKTGKQENINNTYVGRLASIEGVNEQLNLHSYPIPNGGQHDLLPNLDVLSSNTDPEKTLANTDNEVGYSGLFSECFSQPPTGEDGGNIIAPQPCDQDPNGMIPVGDYFPQNSSMEFFSGYEDYNFDDGLLPIGSNDQISFRILGTEKDPFAPVLDVPGRDKEESSTETSGFIESSNNVADMLPDLNLNHFTSTASTHSNHSVSIESLEDSVADARSNKERAAHAVVLMLLLGFDRRRLQVQE

SEQ ID NO: 193963 - protein, 306 aa, Zea Mays
MGYGMSRLDDEYYEAEGQNTGGSGSVQVNDEFATLHNDIFHMTRMRSGLTESYKSMGTNRGIISTAKLLSRREIDCSGKGMFSSGDRAFVLGRHVPMNNPELLDRMDSRAYVSQFSADGTLFVAGFQGSHIRIYDVDRGWSIHKDIHARCLRWTISDVSLSPDQRYLAYSSLAPIIHIVNVGNAARESYANVTDIHDGLDFSQHEDVQYSFGIFSVKFSSDGRELVAGSNDDSIYVYDLHANKLTLRLSAHTSDVNTVAFADETGHLIYSGSDDTLCKSAGLGQAVFVRRTGCRSFDWTFAWDNTY

SEQ ID NO: 193964 - protein, 263 aa, Zea Mays
MGYGMSRLDDEYYEAEGQNTGGSGSVQVNDEFATLHNDIFHMTRMRSGLTESYKSMGTNRGIISTAKLLSRREIDCSGKGMFSSGDRAFVLGRHVPMNNPELLDRMDSRAYVSQFSADGTLFVAGFQVCYAQPTIVEGSHIRIYDVDRGWSIHKDIHARCLRWTISDVSLSPDQRYLAYSSLAPIIHIVNVGNAARESYANVTDIHDGLDFSQHEDVQYSFGIFSVKFSSDGRELVAGSNDDSIYVYDLHANKLTLRLSAHTV

SEQ ID NO: 193965 - protein, 219 aa, Zea Mays
MVSVLPEAVGVGQLPVAGEVQARHDDQAPGEGQPREAPSVGPERVARRVVPVGVLGQVRLPVPVPVLERHEVLAVQPPLRLRALGAAEHGVQQHVAAHADPGHGRADGHVVGDVAAGAVPRQEHAGAPARAAAEGRLRRRPLERRPPVVVRARVPVLRGAPVVHRHHHALAQPHQPPAQVVVDGRAGRRVREAAAVEEEDDRERRRRCRPPAGACCTPA

SEQ ID NO: 193966 - protein, 115 aa, Zea Mays
MSPSWKFSKRHLCSRSRKMTAVIILLPGQALQQLQTSLRHQILHFQLPNHHRFQKLRVQFQRKIAKLNQMHLGHPVHMYFCRHTTAHQGELPQTHLQGVMHRYHRRGDIQSPLRR

SEQ ID NO: 193967 - protein, 122 aa, Zea Mays
MPSPANSASCKPETTNNSVLSNVASTDVTNGCLTTVDSGQQEASDSHSSVEFTQYFQEGYCKISELDDCRELTEAVTDADSSSSHCEREKPEEDGDNDDLLGGVFAFSEEGSTLLPIYSYKL

SEQ ID NO: 193968 - protein, 944 aa, Zea Mays
MLFLFESTMAKNRLKTLTELRRVKVDSQIVLTYRCGKWVKIPGTELLPGDIVSIGRSTSGEDRSVPADMLLLAGSAIVNEAILTGESTPQWKVSIAGRSPDDMLSIKRDKNHILFGGTKVLQHTADKSVNLRAPDGGCLAFVLRTGFETSQGKLMRTILFSTERVTANNKESGLFILFLLFFAIIASGYVLVKGLEDPTRSRYKLLLSCSLIITSVIPPELPMELSIAVNTSLIALARRGIFCTEPFRIPFAGKVDICCFDKTGTLTSDDMEFQGIVTLEDDTELISDANKLPLRTQEVLSSCHALVFVDNKLVGDPLEKAAIKGIDWIYTSDEKAMSKRPGGQPVQIVHRYHFASHLKRMSVIVRIQERFYAFIKGAPETIQERLVDLPAAYVETYKKYTRQGSRVLALAYKLLPEMPVSEARSLERDQVESDLTFAGFAVFNCPIRGDSGAVLQELGQSSHDLVMITGDQALTACHVASQVHISSKPVLILTRIKTGGFEWVSPDETDRAPYSAVEVAVLSESHDLCINGDCFEMLQSTEAVLQVIPYVKVFSRVAPEQKELVLTTFKSVGRVTLMCGDGTNDVGALKQAHVGIALLNAEPVQKVNSKSKAENKSGKLKKQKPGNEASSRVTPATNSSAKASSSRPLTAAERQQEKLQKLLDEMNDESDGRSAPIVKLGDASMASPFTAKHASVAPTLDIIRQGRSTLVTTLQMFKILGLNCLATAYVLSVMYLDGVKLGDVQATISGVFTAAFFLFISHARPLQTLSAERPHPNIFCAYVLLSILGQFAMHILFLITAVNEASKHMPEECIEPDSDFHPNLVNTVSYMVNMMIQVATFAVNYMGHPFNQSISENKPFKYALYGAVAFFTVITSDMFRDLNDYMKLEPLPEGMRGKLMLWAILMFCGCYGWEWLLRWVFPGKMPAWEKRQKQAVANLEKKRD

SEQ ID NO: 193969 - protein, 978 aa, Zea Mays
MKEQIMEPFFVFQVFCVVLWCLDEYWYYSLFTLFMLFLFESTMAKNRLKTLTELRRVKVDSQIVLTYRCGKWVKIPGTELLPGDIVSIGRSTSGEDRSVPADMLLLAGSAIVNEAILTGESTPQWKVSIAGRSPDDMLSIKRDKNHILFGGTKVLQHTADKSVNLRAPDGGCLAFVLRTGFETSQGKLMRTILFSTERVTANNKESGLFILFLLFFAIIASGYVLVKGLEDPTRSRYKLLLSCSLIITSVIPPELPMELSIAVNTSLIALARRGIFCTEPFRIPFAGKVDICCFDKTGTLTSDDMEFQGIVTLEDDTELISDANKLPLRTQEVLSSCHALVFVDNKLVGDPLEKAAIKGIDWIYTSDEKAMSKRPGGQPVQIVHRYHFASHLKRMSVIVRIQERFYAFIKGAPETIQERLVDLPAAYVETYKKYTRQGSRVLALAYKLLPEMPVSEARSLERDQVESDLTFAGFAVFNCPIRGDSGAVLQELGQSSHDLVMITGDQALTACHVASQVHISSKPVLILTRIKTGGFEWVSPDETDRAPYSAVEVAVLSESHDLCINGDCFEMLQSTEAVLQVIPYVKVFSRVAPEQKELVLTTFKSVGRVTLMCGDGTNDVGALKQAHVGIALLNAEPVQKVNSKSKAENKSGKLKKQKPGNEASSRVTPATNSSAKASSSRPLTAAERQQEKLQKLLDEMNDESDGRSAPIVKLGDASMASPFTAKHASVAPTLDIIRQGRSTLVTTLQMFKILGLNCLATAYVLSVMYLDGVKLGDVQATISGVFTAAFFLFISHARPLQTLSAERPHPNIFCAYVLLSILGQFAMHILFLITAVNEASKHMPEECIEPDSDFHPNLVNTVSYMVNMMIQVATFAVNYMGHPFNQSISENKPFKYALYGAVAFFTVITSDMFRDLNDYMKLEPLPEGMRGKLMLWAILMFCGCYGWEWLLRWVFPGKMPAWEKRQKQAVANLEKKRD

SEQ ID NO: 193970 - protein, 1160 aa, Zea Mays
MARFEVNGKSVQGVDLLRRRHWASRLDFWPFLALYALWLLLAVPALDFTDALIVLAALSAAHILAFLFTAWFVDFRAFIGYSKVKNICAANVCKVTPAKFLGSKEIVPLHIQRNVASTSVAGETAEIYFDFRKQRFIYSAEKDNFLKLRYPTKELISHYAKGTGYGTEAKISTYPQPTFQKLMKEQIMEPFFVFQVFCVVLWCLDEYWYYSLFTLFMLFLFESTMAKNRLKTLTELRRVKVDSQIVLTYRCGKWVKIPGTELLPGDIVSIGRSTSGEDRSVPADMLLLAGSAIVNEAILTGESTPQWKVSIAGRSPDDMLSIKRDKNHILFGGTKVLQHTADKSVNLRAPDGGCLAFVLRTGFETSQGKLMRTILFSTERVTANNKESGLFILFLLFFAIIASGYVLVKGLEDPTRSRYKLLLSCSLIITSVIPPELPMELSIAVNTSLIALARRGIFCTEPFRIPFAGKVDICCFDKTGTLTSDDMEFQGIVTLEDDTELISDANKLPLRTQEVLSSCHALVFVDNKLVGDPLEKAAIKGIDWIYTSDEKAMSKRPGGQPVQIVHRYHFASHLKRMSVIVRIQERFYAFIKGAPETIQERLVDLPAAYVETYKKYTRQGSRVLALAYKLLPEMPVSEARSLERDQVESDLTFAGFAVFNCPIRGDSGAVLQELGQSSHDLVMITGDQALTACHVASQVHISSKPVLILTRIKTGGFEWVSPDETDRAPYSAVEVAVLSESHDLCINGDCFEMLQSTEAVLQVIPYVKVFSRVAPEQKELVLTTFKSVGRVTLMCGDGTNDVGALKQAHVGIALLNAEPVQKVNSKSKAENKSGKLKKQKPGNEASSRVTPATNSSAKASSSRPLTAAERQQEKLQKLLDEMNDESDGRSAPIVKLGDASMASPFTAKHASVAPTLDIIRQGRSTLVTTLQMFKILGLNCLATAYVLSVMYLDGVKLGDVQATISGVFTAAFFLFISHARPLQTLSAERPHPNIFCAYVLLSILGQFAMHILFLITAVNEASKHMPEECIEPDSDFHPNLVNTVSYMVNMMIQVATFAVNYMGHPFNQSISENKPFKYALYGAVAFFTVITSDMFRDLNDYMKLEPLPEGMRGKLMLWAILMFCGCYGWEWLLRWVFPGKMPAWEKRQKQAVANLEKKRD

SEQ ID NO: 193971 - protein, 360 aa, Zea Mays
MSTPDTGASQAADPHQSNVAASGTQDTIEIDNDVPIGSKRKPKLKSEVWKEFDRVEINGVWKAKCMWCKKYLGGNTKNGTNHLRGHLEICPDRAVRKGFKQSSLKLTANAQDGTVTLEKYTFDQDVARKELALMIIVHEYPLSMVDHDGFRKFCAALQPLFKVVSRNTIRKDIIDMYEVQKQSMLKYFRNLSSRVAVTTDLWTANHQRKGYMAVTTHFLDDDWKLKSFLIRFIYVPAPHTADAITDVLHEVLLDWHIERNLSTITLDNCSTNDSLMKNMIGTSIDGIMKTMFAIEGKLPLSCCMLKGKLVHMRCACHILNLIVKDGMSVMEKGIDSVRDSVAFWSATPKRHEKFEKMAVQ

SEQ ID NO: 193972 - protein, 196 aa, Zea Mays
MMRSWLAPLMMQEETLTLALAPLRVAGGEPKSHHTANPDPDASRRAVLIEGLLIAARPRLPKTPLESPGHTVPPLRSLRWGASSATSIHQTWSGISGWSMALQRPITLLILLLISGRSLMRLASLRAMPKSFMDMRFCQGMVSTCRLLRQIFARDVLDPKIRSKDVEFIRKINELYPFESINENKLKIKHILVELP

SEQ ID NO: 193973 - protein, 267 aa, Zea Mays
MRVGEKSVQRRVALALAHLCAPEDQSSVFIDNNGLDLLLDLLISMSSKHQQDGSAALYKLANKAAALSPMDAAPPSPTPQVYLGEQYVNSSTLSDVTFLVEGKRFYAHRIALLASSDAFRAMFDGGYREKDARDIEIPNIRWDVFELMMRFIYTGSVQVTSEIAQDLLRAGDQYLLEGLKRLCEYTIAKDVNLDNVSDMYDLSEAFHAVSLRHTCILYILEHFNKICTRAGSAQLIQRVIPELRNFLTKALSSSRSPSTTDDRNLQT

SEQ ID NO: 193974 - protein, 748 aa, Zea Mays
MEAEQQKQQPQRPRRKGLKRKLEDEASAAVAAAATSAAASAAAASLGSAGADDDNEEEDGSAGTPEICCRHSHAALAREVRAQVDALVRCASSWRHADRAAAKRATHVLAELAKNEEVVNVIVEGGAVAALVCHLEEPAVAAPTQEEQQLRPFEHEVEKGAAFALGLLAVKPEHQQLVVDAGALPPLVKLLKRQKNTTNSRVVNSVIKRAADAITNLAHENSNIKTSVRMEGGIPPLVQLLESQDLKVQRAAAGALRTLAFKNDENKTQIVQCNALPTLILMLRSEDAAIHYEAVGVIGNLVHSSPKIKKEVLNAGALQPVIGLLSSCCTESQREAALLLGQFASADSDCKVHIVQRGAVCPLIEMLQSADVQLREMSAFALGRLAQDTHNQAGIAYNGGLVPLLKLLDSENGSLQHNAAFALYGVADNEDYVSDFIKVGGVQKLQDGEFIVQATKDCVAKTLKRLEEKINGRVLKHLLYLMRVGEKSVQRRVALALAHLCAPEDQSSVFIDNNGLDLLLDLLISMSSKHQQDGSAALYKLANKAAALSPMDAAPPSPTPQVYLGEQYVNSSTLSDVTFLVEGKRFYAHRIALLASSDAFRAMFDGGYREKDARDIEIPNIRWDVFELMMRFIYTGSVQVTSEIAQDLLRAGDQYLLEGLKRLCEYTIAKDVNLDNVSDMYDLSEAFHAVSLRHTCILYILEHFNKICTRAGSAQLIQRVIPELRNFLTKALSSSRSPSTTDDRNLQT

SEQ ID NO: 193975 - protein, 746 aa, Zea Mays
MEAEQQKQQPQRPRRKGLKRKLEDEASAAVAAAATSAAASAAAASLGSAGADDDNEEEDGSAGTPEICCRHSHAALAREVRAQVDALVRCASSWRHADRAAAKRATHVLAELAKNEEVVNVIVEGGAVAALVCHLEEPAVAAPTQEEQQLRPFEHEVEKGAAFALGLLAPEHQQLVVDAGALPPLVKLLKRQKNTTNSRVVNSVIKRAADAITNLAHENSNIKTSVRMEGGIPPLVQLLESQDLKVQRAAAGALRTLAFKNDENKTQIVQCNALPTLILMLRSEDAAIHYEAVGVIGNLVHSSPKIKKEVLNAGALQPVIGLLSSCCTESQREAALLLGQFASADSDCKVHIVQRGAVCPLIEMLQSADVQLREMSAFALGRLAQDTHNQAGIAYNGGLVPLLKLLDSENGSLQHNAAFALYGVADNEDYVSDFIKVGGVQKLQDGEFIVQATKDCVAKTLKRLEEKINGRVLKHLLYLMRVGEKSVQRRVALALAHLCAPEDQSSVFIDNNGLDLLLDLLISMSSKHQQDGSAALYKLANKAAALSPMDAAPPSPTPQVYLGEQYVNSSTLSDVTFLVEGKRFYAHRIALLASSDAFRAMFDGGYREKDARDIEIPNIRWDVFELMMRFIYTGSVQVTSEIAQDLLRAGDQYLLEGLKRLCEYTIAKDVNLDNVSDMYDLSEAFHAVSLRHTCILYILEHFNKICTRAGSAQLIQRVIPELRNFLTKALSSSRSPSTTDDRNLQT

SEQ ID NO: 193976 - protein, 383 aa, Zea Mays
MLQSADVQLREMSAFALGRLAQDTHNQAGIAYNGGLVPLLKLLDSENGSLQHNAAFALYGVADNEDYVSDFIKVGGVQKLQDGEFIVQATKDCVAKTLKRLEEKINGRVLKHLLYLMRVGEKSVQRRVALALAHLCAPEDQSSVFIDNNGLDLLLDLLISMSSKHQQDGSAALYKLANKAAALSPMDAAPPSPTPQVYLGEQYVNSSTLSDVTFLVEGKRFYAHRIALLASSDAFRAMFDGGYREKDARDIEIPNIRWDVFELMMRFIYTGSVQVTSEIAQDLLRAGDQYLLEGLKRLCEYTIAKDVNLDNVSDMYDLSEAFHAVSLRHTCILYILEHFNKICTRAGSAQLIQRVIPELRNFLTKALSSSRSPSTTDDRNLQT

SEQ ID NO: 193977 - protein, 732 aa, Zea Mays
MEAEQQKQQPQRPRRKGLKRKLEDEASAAVAAAATSAAASAAAASLGSAGADDDNEEEDGSAGTPEICCRHSHAALAREVRAQVDALVRCASSWRHADRAAAKRATHVLAELAKNEEVVNVIVEGGAVAALVCHLEEPAVAAPTQEEQQLRPFEHEVEKGAAFALGLLAPEHQQLVVDAGALPPLVKLLKRQKNTTNSRVVNSVIKRAADAITNLAHENSNIKTSVRMEGGIPPLVQLLESQDLKVQRAAAGALRTLAFKNDENKTQIVQCNALPTLILMLRSEDAAIHYEAVGVIGNLVHSSPKIKKEVLNAGALQPVIGLLSSCCTESQREAALLLGQFASADSDCKVHIVQRGAVCPLIEMLQSADVQLREMSAFALGRLAQDTHNQAGIEDYVSDFIKVGGVQKLQDGEFIVQATKDCVAKTLKRLEEKINGRVLKHLLYLMRVGEKSVQRRVALALAHLCAPEDQSSVFIDNNGLDLLLDLLISMSSKHQQDGSAALYKLANKAAALSPMDAAPPSPTPQVYLGEQYVNSSTLSDVTFLVEGKRFYAHRIALLASSDAFRAMFDGGYREKDARDIEIPNIRWDVFELMMRFIYTGSVQVTSEIAQDLLRAGDQYLLEGLKRLCEYTIAKDVNLDNVSDMYDLSEAFHAVSLRHTCILYILEHFNKICTRAGAPQFPNQGTEFIKKPKYNRRQELADLILSPNSLTLTPSSDQSCWTSCTVKFLALRI

SEQ ID NO: 193978 - protein, 560 aa, Zea Mays
MEAEQQKQQPQRPRRKGLKRKLEDEASAAVAAAATSAAASAAAASLGSAGADDDNEEEDGSAGTPEICCRHSHAALAREVRAQVDALVRCASSWRHADRAAAKRATHVLAELAKNEEVVNVIVEGGAVAALVCHLEEPAVAAPTQEEQQLRPFEHEVEKGAAFALGLLAVKPEHQQLVVDAGALPPLVKLLKRQKNTTNSRVVNSVIKRAADAITNLAHENSNIKTSVRMEGGIPPLVQLLESQDLKVQRAAAGALRTLAFKNDENKTQIVQCNALPTLILMLRSEDAAIHYEAVGVIGNLVHSSPKIKKEVLNAGALQPVIGLLSSCCTESQREAALLLGQFASADSDCKVHIVQRGAVCPLIEMLQSADVQLREMSAFALGRLAQDTHNQAGIEDYVSDFIKVGGVQKLQDGEFIVQATKDCVAKTLKRLEEKINGRVLKHLLYLMRVGEKSVQRRVALALAHLCAPEDQSSVFIDNNGLDLLLDLLISMSSKHQQDGSAALYKLANKAAALSPMDAAPPSPTPQVYLGEQYVNSSTLSDVTFLVEGWYYFMTLISSV

SEQ ID NO: 193979 - protein, 83 aa, Zea Mays
MGNLQGLNGATVGFSAAGGPEEATEEEDMRGCKGCARRWPKSGLSWGCARSRRWRRGESLHHTAHVTKARPPISVTTIPSYSM

SEQ ID NO: 193980 - protein, 145 aa, Zea Mays
MEPPRRRLSPARAIPSRRLSAPDTTSAVMGNLQGLNGATVGFSAAGGPEEATEEEDMRGCKGCARRWPKSGLSWGCARSRRWRRGESLHHTAHVTKARPPISSLDFSTKVMDLASRGTPGDCASWKRLLSCQLSYFNFGLTIIVC

SEQ ID NO: 193981 - protein, 200 aa, Zea Mays
MSSPAEYYKSLPPISKAYGTLCFFTTVLVQLQILHPLFLYLDYPLVFKKFEIWRLLTSFFFLAPFSMKFGIRLLMIARYGVMLEKGAFDKRTADFLWMMIFGAISLLSFYLPWAMLLLDVIFGSSLMPGLLGIMVGHLYYFFAVLHPLATGKSYLKTPKWVHKIVARFRIGMQANSPVRPPANGNSGSGVFRGRSYRLNQ

SEQ ID NO: 193982 - protein, 100 aa, Zea Mays
MYSLLLQSFYLPWAMLLLDVIFGSSLMPGLLGIMVGHLYYFFAVLHPLATGKSYLKTPKWVHKIVARFRIGMQANSPVRPPANGNSGSGVFRGRSYRLNQ

SEQ ID NO: 193983 - protein, 156 aa, Zea Mays
MSSPAEYYKSLPPISKAYGTLCFFTTVLVQLQILHPLFLYLDYPLVFKKFEIWRLLTSFFFLAPFSMKFGIRLLMMNTYGQHAPLCLEPRESKCSDKYIRPRPIEVLLSSMGYALIGCDIWVIINAWTSGYHGWTSLLLLCSVAPSCHREELPQDS

SEQ ID NO: 193984 - protein, 134 aa, Zea Mays
MDDDIWCHLTIGIPMVSMLLYVWSRENPNAQINIYGLVQLRSFYLPWAMLLLDVIFGSSLMPGLLGIMVGHLYYFFAVLHPLATGKSYLKTPKWVHKIVARFRIGMQANSPVRPPANGNSGSGVFRGRSYRLNQ

SEQ ID NO: 193985 - protein, 92 aa, Zea Mays
MFVPSGNFTVYFIAAISTICRTRPTSHDLPHKPMEVPSSTPCMLVVHRQRPRCFHHVVATFVSRRRGKTSPLFIVPTSGSSPSSPPLDLLRS

SEQ ID NO: 193986 - protein, 229 aa, Zea Mays
MEKIKMDTGAQAMFIISLVLWCTTSFALDDAAATRIPIVGTLPLSMKENPQLCQLCEEFASEALFYLNENETQTEIIDTLHQACSKFGSFKLECTRLVDYYVPLFFTKIASLSPEEFCASASFCGGVTFIRLPRHEDTCTLCHEVVDEVVTNLEDPGMELKIIEILLKGCNNAEDYVQKCKRLIIQNAPIIMENIKKFLEKRDFCNSIHVCGSKSVRAGSQVLRSLSSA

SEQ ID NO: 193987 - protein, 168 aa, Zea Mays
MDTGAQAMFIISLVLWCTTSFALDDAAATRIPIVGTLPLSMKENPQLCQLCEEFASEALFYLNENETQTEIIDTLHQACSKFGSFKLECTRLVDYYVPLFFTKIASLSPEEFCASASFCGGVTFIRLPRHEDTCTLCHEVVDEVVTNLEDPGMEILANFFPKKQSLMP

SEQ ID NO: 193988 - protein, 252 aa, Zea Mays
MENKCQNGHTLCSTCKARVHNRCPTCRQELGDIRCLALEKVAESLELPCKYCSLGCPEIFPYYSKIKHEAQCSFRPYNCPYAGSECAVAGDIPFLVAHLRDDHKVDMHSGCTFNHRYVKSNPREVENATWMLTVFHCFGQYFCLHFEAFQLGMAPVYMAFLRFMGDENEARNYTYSLEVGGNGRKMVWEGTPRSIRDSHRKVRDSHDGLIIQRNMALFFSGGDRKELKLRVTGRIWKEQTNPDGACIPNLCS

SEQ ID NO: 193989 - protein, 137 aa, Zea Mays
MENKCQNGHTLCSTCKARVHNRCPTCRQELGDIRCLALEKVAESLELPCKYCSLGCPEIFPYYSKIKHEAQCSFRPYNCPYAGSECAVAGDIPFLVAHLRDDHKVDMHSGCTFNHRYVKSNPREVENATWMLTVRLN

SEQ ID NO: 193990 - protein, 100 aa, Zea Mays
MAPVYMAFLRFMGDENEARNYTYSLEVGGNGRKMVWEGTPRSIRDSHRKVRDSHDGLIIQRNMALFFSGGDRKELKLRVTGRIWKEQTNPDGACIPNLCS

SEQ ID NO: 193991 - protein, 185 aa, Zea Mays
MDMDRDSVECLSLPDAAMDVDNVDGHPHHGHLGLPLHPAHLPSSGAGRAFPKCQNGHTLCSTCKARVHNRCPTCRQELGDIRCLALEKVAESLELPCKYCSLGCPEIFPYYSKIKHEAQCSFRPYNCPYAGSECAVAGDIPFLVAHLRDDHKVDMHSGCTFNHRYVKSNPREVENATWMLTVRLN

SEQ ID NO: 193992 - protein, 790 aa, Zea Mays
MEVMRSRESTTMYVDFAHVMRFNDVLQKAISEEYLRFEPYLRNACKRFALEHRAGENRAPLISDDSPNKDINIAFYNIPMLKKLRELGTAEIGKLTSVMGVVTRTSEVRPELLQGTFKCLDCGNVVKNVEQQFKYTEPIICVNATCQNRTKWALLRQESKFTDWQRVRMQETSKEIPAGSLPRSLDVILRHEIVEKARAGDTVIFTGTVVAVPDVMALTSPGERAECRREAPQRKNGGVQEGVKGLKSLGVRDLSYRLAFVANSVQVADGRREVDIRERDTDGDDSERQKFTEEEEDEVVRMRNTPDFFNKIVDSICPTVFGHQEIKRAVLLMLLGGVHKITHEGINLRGDINVCIVGDPSCAKSQFLKYTAGIVPRSVYTSGKSSSAAGLTATVAKEPETGEFCIEAGALMLADNGVCCIDEFDKMDIKDQVAIHEAMEQQTISITKAGIQATLNARTSILAAANPTGGRYDKSKPLKYNVALPPAILSRFDLVYIMIDEPDENTDYHIAHHIVRVHQKREEALAPAFSTAQLKRYISFAKSLKPQLSSEAKKVLVESYVTLRRGDSTPGTRVAYRMTVRQLEALIRLSEAIARSHLERVVLPAHVRLAVKLLKTSIISVESSEVDLSDFQDAEDGTNVPSESDAGQPAEEDAAPQQQGAENDQAADNGKKKLVITEEHFQRVTQALVMRLRQHEESVKKDGDGLAGMKQGDLIIWYVEQQNAKGAYSSTAEVKEEVKCIKAIIERLIQREGHLIVIDEGTAAAAEDGSGARRTSESRILAVNPNYVID

SEQ ID NO: 193993 - protein, 615 aa, Zea Mays
MEAFGGFFVDEKAARVENIFLEFLKRFKESDGAGEPFYEAEMEVMRSRESTTMYVDFAHVMRFNDVLQKAISEEYLRFEPYLRNACKRFALEHRAGENRAPLISDDSPNKDINIAFYNIPMLKKLRELGTAEIGKLTSVMGVVTRTSEVRPELLQGTFKCLDCGNVVKNVEQQFKYTEPIICVNATCQNRTKWALLRQESKFTDWQRVRMQETSKEIPAGSLPRSLDVILRHEIVEKARAGDTVIFTGTVVAVPDVMALTSPGERAECRREAPQRKNGGVQEGVKGLKSLGVRDLSYRLAFVANSVQVADGRREVDIRERDTDGDDSERQKFTEEEEDEVVRMRNTPDFFNKIVDSICPTVFGHQEIKRAVLLMLLGGVHKITHEGINLRGDINVCIVGDPSCAKSQFLKYTAGIVPRSVYTSGKSSSAAGLTATVAKEPETGEFCIEAGALMLADNGVCCIDEFDKMDIKDQVAIHEAMEQQTISITKAGIQATLNARTSILAAANPTGGRYDKSKPLKYNVALPPAILSRFDLVYIMIDEPDENTDYHIAHHIVRVHQKREEALAPAFSTAQLKRYISFAKSLKPQKQRKFWWSRMLRFVGGTVLLELGLLIG

SEQ ID NO: 193994 - protein, 100 aa, Zea Mays
MTTTQLEGSKEDGDAKQGQGFLYVKVSMDGAPYLRKIDLKTYKNYKDLSTALEKMFSGFSTGKDGSSEYRKDGEYVLTYEDKDGDWMLVGDVPWDSKGSR

SEQ ID NO: 193995 - protein, 137 aa, Zea Mays
MTTTQLEGSKEDGDAKQGQGFLYVKVSMDGAPYLRKIDLKTYKNYKDLSTALEKMFSGFSTGKDGSSEYRKDGEYVLTYEDKDGDWMLVGDVPWDCHIVFRSNCRMFAGSCRRLRIMKGSDAIGLAPRAADKSKNRN

SEQ ID NO: 193996 - protein, 989 aa, Zea Mays
MAAPPRRSLLVLLSGLLVFASLVALTTAIYEDQVGLADWHQKYIGKVKQAVYHSQKSGRRRVVVLTEENVISSLDLRSGDIFWRHVIDKNDPLDQLGLSLGKYVLTLSSGGTILRAWNLPDGLMIWETNLRTSTASNSQLHVMSNNKAARDNLVLVSAGRWIYAVSSIDGAISWEKEFSLDDLEIKRILQSPENDVVYALGLAGSSKLALYHLSAKTGEILKDIQESFPGGLCGKTVLGSDNVFVALDKARSSLLLIEFKGERISYNKVLVSDLVQDLSGSFELQSLSSDIISLQTSSSISLLKLKGTDGLEVLQRFDQPAAVSDSLPITEKEKAFAVVQHLGSEIEFIVKFTSDLSSEIIREKVNIDQNKGNVERVFLNSYIRTDKSHGFRALVVMEDHSLLLIQQGEVVWSRDDGLASIVDVTTSELPVEKDGVSVAGVEHNLFEWLKGHMLKLKGTLMLANADEVAAIQALRLKSSEKNKMTRDHNGFRKLLVVLTKAGKVMTLHTGDGRVIWSKLLPSLRASRFGGVPSALRIYQWQVPHHSVMRENPSVLVVGRTGAESSAPGVFSILDSYSGEELNSMKLDHSVFQIIPLTLKDSSEQRLYLILDSNSNAHLYPKSADTLNIFLHEMSNLYFYSVDIQANVIKGYSLQKSCDLNFGDDYCFSTKELWSIIFPSDSERIVISETRNMNEVVHTQAKTIGDHDVMYKYLSKNLVFVATLSPKAAGDIGSVLPEEASLVAYLIDAVTGRILHRVTHHGAQGPVHAVLSENWVVYHYFNLRAHRFEMAVIEIYDQSRADNKDVMKLILGKHNLSAPITSYARPEVAVKSQSYFFTHSVKAMAVTQTAKGITSKQLLIGTIGDQVLALDKRYLDPRRSVNPTQQEKEEGIIPLTDSLPIIPQSFVTHSHQVEALRGIVSIPAKLESTTLVFTYGVDLFYTQLAPSRTYDSLTDEFSYALLLITIAVLVAAIIVTWIWSEKKELGDKWR

SEQ ID NO: 193997 - protein, 63 aa, Zea Mays
MFKIITQSTKLSSIYVWVVSTGRRPVISSRSMTPKENTSDFSVSLPEDAYSGAKYLKSQQDVY

SEQ ID NO: 193998 - protein, 245 aa, Zea Mays
MAQQLLLLLPAPSRTFLKALPSPFLSYLPRRHLVPVTAVPVAPGIRRGLLRYATKRSSLVEELEIAKEKQPHSRRANGIFWILLLNFGIYMADHLFQIRQIKSLYLYHAFPSWFQFVTSTFCHANWNHLSSNLFFVYIFGKLVEEEEGNFALWMSYILTGAGANLISWLALPTSSVSLGASGAVFGLFTISVLVKMSWDWRKILEVLILGQFVVDKVLEAARATTITGQSFQVNNVAHVSGPSRF

SEQ ID NO: 193999 - protein, 127 aa, Zea Mays
MVFYFKARPEAGDYTIFMGLDKYENEDLIKYGFPEDIWFHVDKMSSAHVYVRLNKGQSMDDMSEGLLEDCAQLVKANSIQGNKVNNIDVVYTPWYNLKKTPSMDVGQVGFHNPKLGMARIVTMCIGR

SEQ ID NO: 194000 - protein, 64 aa, Zea Mays
MGHLPDTIIALHDISDELKELCLHQHSEKIAAAFGLISCTSATNVYALIIIQHPSMSLRPLVGR

SEQ ID NO: 194001 - protein, 69 aa, Zea Mays
MEYSAKARLPLQLYLCHLSFVLLINFHSYLFTKGEKRLGLSSFFVLALHAKGGEINRPKAKGLHHQPVF

SEQ ID NO: 194002 - protein, 259 aa, Zea Mays
MAAATATVTFSPSPPSFLNSHIPRGHRPASTTTIAFARRFRGVKPSPDRSRGKVDQVAHPDDGFGALEAELWRLRRLVELKIHRLGTEADAAYRDLRSAVREVSGDRVVLTFRRSSLRYLTGALLFLLACAIAARLLLGMVLRAWQRRGLRRGLWGEGGRAVVRRRDRSLGGKEVVVAVSSPPKEAARTSRVAEPAKEVWRGYSQAKLPDWWPNVGATVMEPGPEMEKWARMANRLVRAIIDSRVMGRDYRYDDAIQLR

SEQ ID NO: 194003 - protein, 527 aa, Zea Mays
MAPLSCRDLPARLPTLPHHASTHPHLSFLSGGPAPRRWRSLTTSNTLRLRLAATKDDAVASLVGRLEHDVANAQYRDDVLEEEDEEQREEEEEEQQFLDDDNARRRGAGKHRDELRSRWREIHGCDDWAGLLDPMDPLLRSELIRYGELAQACYDAFDYDPSSRYCGSCKYSRRDLFERLGMADAARGYVVSRYLFATSNIRFPNLFPQSRAGARIWSQSASWIGYVAVSTDEESARLGRRDIAIAWRGTVTRLEWVSDLMDFLRPVAEEGIPCPDREVKVLAGFVDLYTDRDPSCRFCKYSAREQVLTEVRRLVGRYTAAGEDVSVTVTGHSLGSALAMLSAYDVTRMPGILLNEGAPEVVRRVAEGLLRVPWCYAHVGVELPLDHKRSPFLKDTLDPACYHDLEAHLHLIDGYHGRGERFVLASGRDPALVNKACDFLKDHHGVPPCWRQDENKGMVRARDGRWVQPDRHGWHLDDHDHDHGDHRHHHHHHHHDGHHHRHHKKHSTEGARHHHRHGHGQDMQSHA

SEQ ID NO: 194004 - protein, 306 aa, Zea Mays
MMQLPQHHKPSAHSCCPSWIRRSPPSPPPPPHKKLGGGRSRYACRLVPLLVLTVYSVVTVLRIPSASLVVSTADSGKSIKDFQALLHRSYSRTTTTPSASPPVPVPLPLAPPSRSRSRACPRPAAKPKLLIFIRKQNRVLLNLPHVVTACRRAGFAPHVMNLRRQTPLAAIHAALASADAMVAVHGAAVTHFLFMRPGSVLLQIVPVGLDWAADAFYGKPAQQLGLEYLEYKVAPEESSLAAEYGLDSTVLRNPWVISSRGWWEMKKVYMDRQNVTVNIKRFGELLRTARTHLKNTTACAAAAALR

SEQ ID NO: 194005 - protein, 859 aa, Zea Mays
MLKIQPHSMLHLIEDDDGDNAFHIAADAAKMIRENLTWIAQMLLQPSPAVDVRNHRGWTLRDFLERLPREWIYEELMEMLEDKGVHLSPTIYEVADWVKFRRTVTSPAFGWQGAGPRSIGFVQSVVDNDHLAVSFCTGEAHVLTSEVIKVIPLNRGQHVQLKPDVSEPRFGWRGQSRDSIGTVLCVDDDGILRVGFPGASRGWRADPAEIERVEEYKVGNWVRIRPSLTVAVHGMESITPGSVGIVYSIRPDSSLLLGLCYLSNPWLCEPEEVEHVDPFKIGDQVCVKRSVAEPRYAWGGETHHSVGKIIDIESDGLLIIDIPNRAAPWQADPSDMEKIENFKVGDWIRVKVTVPSPKYGWEDVTRNSIGIIHSLQDDGDVGVAFCFRSKLFLCSVADIEKAQPFEVGEKVHVSPSISEPRLGWLNETAATIGAISRIDMDGTLNIKVSGRKSLWKVAPGDAERLSAFEVGDWVRPKPSIGSRPTYDWNSVGRINIAVVHSIQDSGYLELAGCFRHGKWLTHNTDIEKVQTVKIGQHVRFRAGISEPRWGWRDANPDSRGIIAGVHADGEVRVAFFGVPGLWRGDPADLEIENIFEVGEWVRLRNDVEQWRSLKPGSIGVVHGVGYQGDAWDGTIHVAFCGEQERWIGPSSQLEGVSKFVVGQRVRIRGCIRQPRFGWSNHSHSSIGTISSIDADGKLRIHTPAGARAWLTDPAEVEKVEDEEEVCIGDWVKVKDSVGTPVYQWGDVNHSSIGVVHRADDGELWIAFCFCERLWLCKAWEVEKVRPFRQGDKVRIRSGLVSPRWGWGMETYASKGEVVGVDANGKLRIKFRWRDRLWIGDPADVVLDDAHLLTEASNGF

SEQ ID NO: 194006 - protein, 1622 aa, Zea Mays
MRVPCCSLCNVRYDEEERTPLLLHCGHGFCRACLSRMLAAAPGATLPCPRCRHPTAVGNSVSALRKNFPILSLLSASPSSPSFLHSDSGSSSDGSEDEDDFFARPTRRPAPAPAAASPGCSSFDLASHPDLKLARRIGSGPPGPAGQDVWVGTLSRGGGGVKRCKHQVAVKRVPQTAGDGLEVVQEEVERLRRASTWCRNVCTFHGAVRVGGHLCFVMDHYVGSVQAEMRQNGGRLTLEQILRYGADIARGVAELHAAGIVCMSIKPSNILLDAHGHAVVSDYGLSAILKNRRVPDDSGAGIDAMLLSPNYTAPEAWGPLKKSLNMFWDSANGISPESDAWSFGCTLVEMCTGAVPWAGLTAEEICKSVAKEKKPPPQYSRVVGVGLPGELWKMIGECLQFRASRRPSFQDMLKIFLRHLLDIPRSPPASPENDFANENLPNGMEPPTTSILEMVRYNPNALHHLVCEGDAAGVRDLLAKVASERNGGFIRSLLEAQNTDGLTALHLACRRGSAELVEAIVAYQENVDILDKDEDPPIVFALAAGSPRCVRALVGRSASINSRLREGLGPTLAHVCAHHGQPECMQELLMAGADPNAVDGEGESVLHIAVARRYTDCAIAILENGGCRSMGISNSQHKTPLHLCVETWNTTVVRRWVDVASLEDIAEAIDVPSPVGTALCMAAALKKEHEKEGRELVRILLAAGADPTAQDDPHCRTALHTAAMINDVELVKIILEAGVDVNIRNAQNTTPLHVALNRGANSCVGLLLASGANCNIQDDDGDNAFHIAADAAKMIRENLTWIAQMLLQPSPAVDVRNHRGWTLRDFLERLPREWIYEELMEMLEDKGVHLSPTIYEVADWVKFRRTVTSPAFGWQGAGPRSIGFVQSVVDNDHLAVSFCTGEAHVLTSEVIKVIPLNRGQHVQLKPDVSEPRFGWRGQSRDSIGTVLCVDDDGILRVGFPGASRGWRADPAEIERVEEYKVGNWVRIRPSLTVAVHGMESITPGSVGIVYSIRPDSSLLLGLCYLSNPWLCEPEEVEHVDPFKIGDQVCVKRSVAEPRYAWGGETHHSVGKIIDIESDGLLIIDIPNRAAPWQADPSDMEKIENFKVGDWIRVKVTVPSPKYGWEDVTRNSIGIIHSLQDDGDVGVAFCFRSKLFLCSVADIEKAQPFEVGEKVHVSPSISEPRLGWLNETAATIGAISRIDMDGTLNIKVSGRKSLWKVAPGDAERLSAFEVGDWVRPKPSIGSRPTYDWNSVGRINIAVVHSIQDSGYLELAGCFRHGKWLTHNTDIEKVQTVKIGQHVRFRAGISEPRWGWRDANPDSRGIIAGVHADGEVRVAFFGVPGLWRGDPADLEIENIFEVGEWVRLRNDVEQWRSLKPGSIGVVHGVGYQGDAWDGTIHVAFCGEQERWIGPSSQLEGVSKFVVGQRVRIRGCIRQPRFGWSNHSHSSIGTISSIDADGKLRIHTPAGARAWLTDPAEVEKVEDEEEVCIGDWVKVKDSVGTPVYQWGDVNHSSIGVVHRADDGELWIAFCFCERLWLCKAWEVEKVRPFRQGDKVRIRSGLVSPRWGWGMETYASKGEVVGVDANGKLRIKFRWRDRLWIGDPADVVLDDAHLLTEASNGF

SEQ ID NO: 194007 - protein, 195 aa, Zea Mays
MQTSVFGKSKGLRETLAEGTWMEAFDGLGISIILTCNPSIQYTAFDQFKQRILHRQRRKNAGSAEDNSGVALSAFSAFLLGAVSKSIATVLTYPLIRCKVMIQAADPDEDDDDEPGRPSKSRTPKTMLGALHAIWSKEGIPGFFKGLNAQILKTVLSSALLLMIKEKISKFTWVSLLALRRYLFVSQKRIKSATV

SEQ ID NO: 194008 - protein, 210 aa, Zea Mays
MAADGGGGVDWESLAEATSGAIGSLVSTTVLYPLDTCKTKFQAELQTHQGAQKYRNLSDVFWEAIRKKQFLSLYQGLNTKNIQSFVSSFFYFYGYSYFKRLYLEKSGAKSIGTTANLLVAAAAGACTVIVTQPLDTAASRMQTSVFGKSKGLRETLAEGTWMEAFDGLGISIILTCNPSIQDQRRIIPELLFLLSQLFCLAPSLKVLLQY

SEQ ID NO: 194009 - protein, 124 aa, Zea Mays
MAEADPGVMATDTEKGWLDDGGGERGDGEEERATVLRASRVGEKEEAGPTVGVRSLPETGDGRGRGGEGGEGGGGGRGGPGDEGHGRKRRIPSNSIKISGPGAASTRRQDVDPSTREVRAGAET

SEQ ID NO: 194010 - protein, 346 aa, Zea Mays
MGSEDMLVEIHPRELRFLVEVKKQSSCCIHLVNKSDQYIAFKVKTTSPKKYCVRPNIGVILPLASRDFTDKFLVQTTVVPFGTADEDIVPAFFSKETDQYIEEKKLKVVTVRVSEPQVEKLINGVPHAKETAGVTVAEQTLDSVNEAPNVVNEVRHSLKASFPSLSGTPATFNENSSSVNECPTILQEFLVPSKQASFALSESASNLQESSVASIETLFSSTEASVDLKESPPLEYTPAPSEVPSLSDKESTNADNVYIPQVTKDFQNLQMKLNNLEVKLDEAKTLIVKLREANRTTILERDKLQKEMVFLKRAEAAARSQSIGFPLLFVIYVAVVGILLGYLLHL

SEQ ID NO: 194011 - protein, 867 aa, Zea Mays
MDITQVLIAAQSPDANLRTVAEGNLTQFQEQNFPNFLLSLSIELSNDEKPPESRRLAGIILKNSLDAKDSAKKELLTQQWVSVDPSIKLKIKELLLVTLGSSVHDARHTSSQVIAKVASIEIARREWQDLVAKLLGNMTSAGAPAPLKQATLEALGYVCEEISPQDLEQDQVNAVLTAVVQGMNQTELSPEVRLAAVKALYNALDFAESNFANEMERNYIMKVVCDTAVSKEVEIRQAAFECLVAIASTYYSHLEPFMETIFYLTANAVKGDEEPVALQAVEFWSAICDEEIALQDEYEGSEDGNSAIHFRFIEKALPLLVPLLLETLLKQEEDQDQDDNAWNISMSGGTCLGLISRTVGDAVVPLVMPFVETNITKPDWHCREAATFAFGSILEGPSVGKLAPLVQAGLDFLLNTMNDANSQVKDTTAWTLGRVFELLHSPAGINSIINGSNLPRIMSVLLESTKDAPNVAEKVCGAIYFLAQGYEDAESTSSVLTPYLSNTIAALLSAADRAETTHFRLRASAYEALNEIVRVSNIPETSGIIAQLLQEIMRRLNLTFDLHILSSGDKEKQSDLQALLCGVLQVIIQKLSSTDAKSIISQTTDQLMVLFLRVFACHNSTVHEEAMLAIGALAYATGPDFVKYMPNFFTYLEAGLQNYEEYQVCSISVGVVGDICRALEDKSLPFCDRIMTVLLKDLSSSMLNRSVKPLIFSCFGDIALAIGENFEKYLPYAVPMLQGAAGLLGTLDLSDDDMVDYGNQLRRGIFEAYSGILQGIKGPKAQLMIPYATHLLQFTEAVSKDRSSVTKAAVAVLGDLADTLGQSSKDLFKTHLFHVEFLRECQAQELDDEVRETAQWAQGMINQAVVS

SEQ ID NO: 194012 - protein, 50 aa, Zea Mays
MYPRNKASAGRNCVQTHLGPQISYSKQQHAHKCPLKCFGLSSKLALLKEW

SEQ ID NO: 194013 - protein, 407 aa, Zea Mays
MRIINEPTAAAIAYGLDKKATSSGEKNVLIFDLGGGTFDVSLLTIEEGIFEVKATAGDTHLGGEDFDNRMVNHFVQEFKRKHKKDISGNPRALRRLRTACERAKRTLSSTAQTTIEIDSLYEGIDFYTTITRARFEELNMDLFRKCMEPVEKCLRDAKMDKSTVHDVVLVGGSTRIPKAAILSGEGNEKVFSTYSDNQPGVLIQVYEGERARTKDNNLLGKFELSGIPPAPRGVPQITVCFDIDANGILNVSAEDKTTGQKNKITITNDKGRLSKEEIEKMVKEAEKYKAEDEEHKKKVDAKNSLENYAYNMRNTIKDDKIASKLGADDKKRIENAVDGAISWLDSNQLAEVDEFEDKMKELEGICNPIIAKMYQGAGADMGAAAGMDEDAPAAGGSAAGPKIEEVD

SEQ ID NO: 194014 - protein, 313 aa, Zea Mays
MDRVLLSSHLPSHAHANTRLQQGPGGLNSIGFAVIKKGCLKLRCYAIGDELGGPGRFSKHFIENSNGPVFQGLDASAGSFRTVGAEITQDTGDFFVSDAEGDPDKPTDGFSSIDQAIGALREGKFVIAVDDENGDNEGDLVMAATLVDQKSVAFMIRNGSGIISVGMEEEDLTRLMIPMMSPITEIEDITAAASTVTVDARVGISTGVSAADRAKTILTLASSDSKPSDLRRPGHIFPLKYRNGGVLKRAGHTEASVDLVALAGLRPVSVLSTVMDPRDGSMAGVTVLQQMAMEHDIPIVSIADLIRLVYPKV

SEQ ID NO: 194015 - protein, 130 aa, Zea Mays
MFICFSLTAEIVMFDGQIVVYKFIQDLHFFVTGGEEENELILASVLQGFSDAVERLLKNMVDKRTALENLDLILLCLDEIVDGGIVLETEGREIAEKVSGHGSEGASSAEQTLVNALTQAREHLAKSLLM

SEQ ID NO: 194016 - protein, 116 aa, Zea Mays
MAAPPARARADYDYLIKLLLIGDSGVGKSCLLLRFSDGSFTTSFITTIGIDFKIRTIELDGKRIKLQIWDTAGQERFRTITTAYYRGAMGILLVYDVTDESSFNNISKINSPFLFF

SEQ ID NO: 194017 - protein, 857 aa, Zea Mays
MPIIIIATHKRQMILLSSKEQTNIQTVPGYGSSSYYFQNNTWNGGSTGNNFAQSYQNYSPSDTNAQQSSTSVPANSLPYQQQYNQWPYYYNQSVPSASSNPVAGNSTTDNLAVNTPSSYSYPNSQPPPPGTTSWKSNSSASVAPPMQVPGVLEHQNQYGNQAEGHYNQGPGVQWSQNHYAYQTQPYPQKINSNYSQLSNPEDQLRTVDSNGPSTNLSSNHVSENFKPNLLDSVTMNTSSESKIQVPINPRIAQGFSMVIPKNEKKSSGLDLSRKPAYVSVSMPANDAKASQVGPDARSIPFSLRNYAMRNLNRCKNDTQRAACRSIMEEITKKAFAEGTLLTKNWDTEPLFPLPESVVGMAGASSDLSPFLSVSTPRKRVKSRWEPVVDENVTNKVEQIAKGLISSNVHSTLDPKNRIPNPVRGSSWDRGKFLQSCQASSNKVNQRPAKKQKMASNLSQIQNGSASSDSEKEHDLTKHYASATALANSPEEKKRREHRSKRFEKSKDSSLKSRNASANNDGMASFRARRAISSLRTRTYEEGTLAVEDMDWDALTVKGTCQEIEKRYLRLTEAPDPAKVRPEDVLEKALAMVETSEKNYLYKCDQLKSIRQDLTVQRIQNELTVKVYETHARLAMQAGDLPEFNQCQSQLKRLYAQGIKGCYFEFSAYNLLCVMLHSNNKRDLLSSMASLSKEAKQDAAVKHSLAVHASVLSCNYVQFFKLYKKAPNLNSCLMDLYVERMRFEAMKCMSRSYRPTVPVGYVAQILGFLRTDTGCATNGDDGLEGCEKWLKAHGTVLSEDSSGELQIDTKASSSTLYMPEPENAVAHGDASLAVDDFFARTDGQLKRGSSDGPTVDTP

SEQ ID NO: 194018 - protein, 800 aa, Zea Mays
MASHGIGAAAGSDAPHAEVVTMGQTNPSPYPPVSSSHHSWSSATGSVSWNNTVDKLSQDTVYYDPQRDVSVSGGNQNVGSSAPHVAQASMGITDAAHSHVPYSSSDQHGYNPVEYANYYYSYPQAANDSSVQQGANQHPGAAYQPLTSFQNSGSYIDPTSNTYYNAGDHQTVPGYGSSSYYFQNNTWNGGSTGNNFAQSYQNYSPSDTNAQQSSTSVPANSLPYQQQYNQWPYYYNQSVPSASSNPVAGNSTTDNLAVNTPSSYSYPNSQPPPPGTTSWKSNSSASVAPPMQVPGVLEHQNQYGNQAEGHYNQGPGVQWSQNHYAYQTQPYPQKINSNYSQLSNPEDQLRTVDSNGPSTNLSSNHVSENFKPNLLDSVTMNTSSESKIQVPINPRIAQGFSMVIPKNEKKSSGLDLSRKPAYVSVSMPANDAKASQVGPDARSIPFSLRNYAMRNLNRCKNDTQRAACRSIMEEITKKAFAEGTLLTKNWDTEPLFPLPESVVGMAGASDLSPFLSVSTPRKRVKSRWEPVVDENVTNKVEQIAKGLISSNVHSTLDPKNRIPNPVRGSSWDRGKFLQSCQASSNKVNQRPAKKQKMASNLSQIQNGSASSDSEKEHDLTKHYASATALANSPEEKKRREHRSKRFEKSKDSSLKSRNASANNDGMASFRARRAISSLRTRTYEEGTLAVEDMDWDALTVKGTCQEIEKRYLRLTEAPDPAKVRPEDVLEKALAMVETSEKNYLYKCDQLKSIRQDLTVQRIQNELTVKVYETHARLAMQAGDLPEFNQLVKRSQTRCSC

SEQ ID NO: 194019 - protein, 856 aa, Zea Mays
MPIIIIATHKRQMILLSSKEQTNIQTVPGYGSSSYYFQNNTWNGGSTGNNFAQSYQNYSPSDTNAQQSSTSVPANSLPYQQQYNQWPYYYNQSVPSASSNPVAGNSTTDNLAVNTPSSYSYPNSQPPPPGTTSWKSNSSASVAPPMQVPGVLEHQNQYGNQAEGHYNQGPGVQWSQNHYAYQTQPYPQKINSNYSQLSNPEDQLRTVDSNGPSTNLSSNHVSENFKPNLLDSVTMNTSSESKIQVPINPRIAQGFSMVIPKNEKKSSGLDLSRKPAYVSVSMPANDAKASQVGPDARSIPFSLRNYAMRNLNRCKNDTQRAACRSIMEEITKKAFAEGTLLTKNWDTEPLFPLPESVVGMAGASDLSPFLSVSTPRKRVKSRWEPVVDENVTNKVEQIAKGLISSNVHSTLDPKNRIPNPVRGSSWDRGKFLQSCQASSNKVNQRPAKKQKMASNLSQIQNGSASSDSEKEHDLTKHYASATALANSPEEKKRREHRSKRFEKSKDSSLKSRNASANNDGMASFRARRAISSLRTRTYEEGTLAVEDMDWDALTVKGTCQEIEKRYLRLTEAPDPAKVRPEDVLEKALAMVETSEKNYLYKCDQLKSIRQDLTVQRIQNELTVKVYETHARLAMQAGDLPEFNQCQSQLKRLYAQGIKGCYFEFSAYNLLCVMLHSNNKRDLLSSMASLSKEAKQDAAVKHSLAVHASVLSCNYVQFFKLYKKAPNLNSCLMDLYVERMRFEAMKCMSRSYRPTVPVGYVAQILGFLRTDTGCATNGDDGLEGCEKWLKAHGTVLSEDSSGELQIDTKASSSTLYMPEPENAVAHGDASLAVDDFFARTDGQLKRGSSDGPTVDTP

SEQ ID NO: 194020 - protein, 550 aa, Zea Mays
MRNLNRCKNDTQRAACRSIMEEITKKAFAEGTLLTKNWDTEPLFPLPESVVGMAGASSDLSPFLSVSTPRKRVKSRWEPVVDENVTNKVEQIAKGLISSNVHSTLDPKNRIPNPVRGSSWDRGKFLQSCQASSNKVNQRPAKKQKMASNLSQIQNGSASSDSEKEHDLTKHYASATALANSPEEKKRREHRSKRFEKSKDSSLKSRNASANNDGMASFRARRAISSLRTRTYEEGTLAVEDMDWDALTVKGTCQEIEKRYLRLTEAPDPAKVRPEDVLEKALAMVETSEKNYLYKCDQLKSIRQDLTVQRIQNELTVKVYETHARLAMQAGDLPEFNQCQSQLKRLYAQGIKGCYFEFSAYNLLCVMLHSNNKRDLLSSMASLSKEAKQDAAVKHSLAVHASVLSCNYVQFFKLYKKAPNLNSCLMDLYVERMRFEAMKCMSRSYRPTVPVGYVAQILGFLRTDTGCATNGDDGLEGCEKWLKAHGTVLSEDSSGELQIDTKASSSTLYMPEPENAVAHGDASLAVDDFFARTDGQLKRGSSDGPTVDTP

SEQ ID NO: 194021 - protein, 99 aa, Zea Mays
MSRASASRPCFWCRSTLRYVADWLICSRFSFVWMSGFACLLALSSFVTRRQRKGSSTNAWIVIKLLADHVYVSTQFNQGWRQGNLCPLCQVWYALLKPI

SEQ ID NO: 194022 - protein, 116 aa, Zea Mays
MLQPDDRERAVVPTPGLLLSCLLIMYMCPLNSTRAGGKEIFVHSVKCGTLCLSQFDYFFELGGHSMLPNMQRSSGHFELNVLTFYSLSGKNATPSSVTFFVSNEILSGTFTTNFNN

SEQ ID NO: 194023 - protein, 64 aa, Zea Mays
MSRASASRPCFWCRSTLRYVADWLICSRFSFVWMSGFACLLALSSFVTRCDTDTTMWCKVVAAG

SEQ ID NO: 194024 - protein, 54 aa, Zea Mays
MMMAMKSEVIITPEHNEEGIYTIRFYIQRRCRLSPANVAAEEMNFLLLCRGNTY

SEQ ID NO: 194025 - protein, 51 aa, Zea Mays
MIQLILMSIYYTCIYLYNNFLCIWLYCKYYCLFTVSRWGVRMDASSSSKLN

SEQ ID NO: 194026 - protein, 75 aa, Zea Mays
MYGDTMKGHQPKGDKGNRDDYTFNSEGSRMSGRHTFPRRPRSGCQNPTRRSASPPPWLISSPRPRWRKSFAHGLT

SEQ ID NO: 194027 - protein, 157 aa, Zea Mays
MTQNTSEAGISRRSHSHVLFLCSAAPKSLLPGAPVLGHRCSRRCAQPTQRQLPLRQREGAPKAPMLLLPVLQRVIDGSQKTTVALPIHKALMIVMMEPMLRPTTMMSLFPWDLNLQKTKRPWEEECDNEKVQLKTIGTFYRIFYFYFSICSLVALMF

SEQ ID NO: 194028 - protein, 598 aa, Zea Mays
MSAPGFDDPQLPPLRLRASCGGAIASPRSCSSSDTFVSMPSTPSGMLNPCGLWSPPPRAPSEASSSEMEFGTAREYDTTDAFFTDNWLYDNHLLHSTESDGSEGEDKFIVGPDVSLQRTETPELGDGCGLRHVHRDCNADSHGCTQAKNACSSPPCGCCYNEELLRDSCSAVSVYGRYHTMEDHTEGLDECVAEAFLFRLNSLVDASEQLVDFKKGEDDGLNLSALEKELQMLTPYLADEDALESTGLEDDVRGNTNLDVCMVTNEENANGKEFLKDSYCILPSPESAVPFDVYGVEDFKTEDTDLQNPTARKFQEDPKIDPALSKFQQEYEVFDLKIFHRKNRTGFEENKEFPIVMDSVIAGRYRINEYLGSAAFSKSLDEIKLLKFVNKYDPDDDHHILRLYDYFYYQEHLFIVTELLRANLYEFQKYNQESGDEVYFSLPRIQAIARQCLEALVYLHHLNIVHCDLKPENILLKSYSRCEIKVIDLGSSCFLSDNLNLYVQSRSYRSPEVILGLPYDQKIDIWSLGCILSELYTGEVLFPNESMPIILARMIGIIGPIDMEMLASGQETQKYFTDDYDLFHTNEVIIGLYARLPT

SEQ ID NO: 194029 - protein, 446 aa, Zea Mays
MKMLLRLSFSGTGLEDDVRGNTNLDVCMVTNEENANGKEFLKDSYCILPSPESAVPFDVYGVEDFKTEDTDLQNPTARKFQEDPKIDPALSKFQQEYEVFDLKIFHRKNRTGFEENKEFPIVMDSVIAGRYRINEYLGSAAFSKVVRAHDLRTGVDVCLKIIKNDKDFFDQSLDEIKLLKFVNKYDPDDDHHILRLYDYFYYQEHLFIVTELLRANLYEFQKYNQESGDEVYFSLPRIQAIARQCLEALVYLHHLNIVHCDLKPENILLKSYSRCEIKVIDLGSSCFLSDNLNLYVQSRSYRSPEVILGLPYDQKIDIWSLGCILSELYTGEVLFPNESMPIILARMIGIIGPIDMEMLASGQETQKYFTDDYDLFHTNEETDQLEYLIPEKSSLRRHLQCPDKKFVDFLSYLLQINPRNRPTASEALQHRWLSFKYSSTANQTRS

SEQ ID NO: 194030 - protein, 166 aa, Zea Mays
MFKVMDTDNDGIVSYEELKSGIAKFGSHLAESEVQMLIEAVDTNGRGALDYGEFLAVSLHLQRMANDEHLRRAFLFFDKDGNGFIEPEELQEALMEDGGADTMDVVNDILQEVDTDKDGKISYEEFVAMMKTGTDWRKASRHYSRGRFNSLSIKLIKDGSVKLGSE

SEQ ID NO: 194031 - protein, 537 aa, Zea Mays
MGNCCRSPAAAAREDVKSSHFPASAGGKKKPHQQARNGGPGSGEKKRLSVLGEEGCDVGAGGIEEKYALDRELGRGEFGVTYLCMDRGTRELLACKSISKRKLRTPVDVEDVRREVAIMRHLPRSPSIVSLREACEDDGAVHLVMELCEGGELFDRIVARGHYTERAAAAVTRTIVEVVQLCHRHGVMHRDLKPENFLFANKKENSPLKAIDFGLSIFFKPGEKFSEIVGSPYYMAPEVLKRNYGPEIDIWSAGVILYILLCGVPPFWAGVAQAILRGNIDFKREPWPNVSDNAKDLVRQMLQPDPKLRLTAKQVLEHPWLQNAKKAPNVPLGDIVKSRLKQFSRMNRFKRKALRVIADHLSAEEVEDIKDMFKVMDTDNDGIVSYEELKSGIAKFGSHLAESEVQMLIEAVDTNGRGALDYGEFLAVSLHLQRMANDEHLRRAFLFFDKDGNGFIEPEELQEALMEDGGADTMDVVNDILQEVDTDKDGKISYEEFVAMMKTGTDWRKASRHYSRGRFNSLSIKLIKDGSVKLGSE

SEQ ID NO: 194032 - protein, 339 aa, Zea Mays
MGNCCRSPAAAAREDVKSSHFPASAGGKKKPHQQARNGGPGSGEKKRLSVLGEEGCDVGAGGIEEKYALDRELGRGEFGVTYLCMDRGTRELLACKSISKRKLRTPVDVEDVRREVAIMRHLPRSPSIVSLREACEDDGAVHLVMELCEGGELFDRIVARGHYTERAAAAVTRTIVEVVQLCHRHGVMHRDLKPENFLFANKKENSPLKAIDFGLSIFFKPGEKFSEIVGSPYYMAPEVLKRNYGPEIDIWSAGVILYILLCGVPPFWAETEQGVAQAILRGNIDFKREPWPNVSDNAKDLVRQMLQPDPKLRLTAKQVLSIPGFKMLRKLQMFLLETL

SEQ ID NO: 194033 - protein, 344 aa, Zea Mays
MAAAADSASDQNPKDAERHVLTAESDADFSEEDYDEDGEEEYEEEEELDGPAAAAAERERMQSVLRRLSSDPVGIRVHDVIIKGNTKTQDELIEAEVAELLRAAPTVQDLLRAASVATARLHDLDIFDAVKITLDAGPPELPGTTNVVIEVVEVANPLTGTAGVYSKPEARSWSLEGSLKLKNLFGYGDIWDASGSFGWDQTTEVGVGVCLPRFKSIPTPLMARASLSSQDWLKFSSYKERLLGLSFGLLSTRNHDLSYNLAWRTLTDPSRVSSKAIRRQLGHNLLSALKYTYKIDKRDSHLRPTKGYAFQSTSQVGGLWNSKGLRYFRQCAAWADRHLCWVSD

SEQ ID NO: 194034 - protein, 531 aa, Zea Mays
MAAAADSASDQNPKDAERHVLTAESDADFSEEDYDEDGEEEYEEEEELDGPAAAAAERERMQSVLRRLSSDPVGIRVHDVIIKGNTKTQDELIEAEVAELLRAAPTVQDLLRAASVATARLHDLDIFDAVKITLDAGPPELPGTTNVVIEVVEVANPLTGTAGVYSKPEARSWSLEGSLKLKNLFGYGDIWDASGSFGWDQTTEVGVGVCLPRFKSIPTPLMARASLSSQDWLKFSSYKERLLGLSFGLLSTRNHDLSYNLAWRTLTDPSRVSSKAIRRQLGHNLLSALKYTYKIDKRDSHLRPTKGYAFQSTSQVGGLWNSKGLRYFRQEFDVRGAVPLGFYSAALNVGVGAGVILPLAGGFMNSTSSVPERFYLGEARRHVLNNSESGSADPGRDYLGGDLAVSAFADLSFDLPLKIFRDAGIHGHAFLTAGNLAKLSEGEYKNFSASEFRQTFRSSAGVGIILPTKLFRVEVNYCRILKQAEHDSAKTGIQFSFSSPMRWVYYLLFLTSRGICPRTTQIPMLWLHNGG

SEQ ID NO: 194035 - protein, 525 aa, Zea Mays
MAAAADSASDQNPKDAERHVLTAESDADFSEEDYDEDGEEEYEEEEELDGPAAAAAERERMQSVLRRLSSDPVGIRVHDVIIKGNTKTQDELIEAEVAELLRAAPTVQDLLRAASVATARLHDLDIFDAVKITLDAGPPELPGTTNVVIEVVEVANPLTGTAGVYSKPEARSWSLEGSLKLKNLFGYGDIWDASGSFGWDQTTEVGVGVCLPRFKSIPTPLMARASLSSQDWLKFSSYKERLLGLSFGLLSTRNHDLSYNLAWRTLTDPSRVSSKAIRRQLGHNLLSALKYTYKIDKRDSHLRPTKGYAFQSTSQVGGLWNSKGLRYFRQEFDVRGAVPLGFYSAALNVGVGAGVILPLAGGFMNSTSSVPERFYLGGNSSPVCSLGGPSSLLGFRLRGVGPTEARRHVLNNSESGSADPGRDYLGGDLAVSAFADLSFDLPLKIFRDAGIHGHAFLTAGNLAKLSEGEYKNFSASEFRQTFRSSAGVGIILPTKLFRVNYCRILKQAEHDSAKTGIQFSFSSPM

SEQ ID NO: 194036 - protein, 473 aa, Zea Mays
MAAAADSASDQNPKDAERHVLTAESDADFSEEDYDEDGEEEYEEEEELDGPAAAAAERERMQSVLRRLSSDPVGIRVHDVIIKGNTKTQDELIEAEVAELLRAAPTVQDLLRAASVATARLHDLDIFDAVKITLDAGPPELPGTTNVVIEVVEVANPLTGTAGVYSKPEARSWSLEGSLKLKNLFGYGDIWDASGSFGWDQTTEVGVGVCLPRFKSIPTPLMARASLSSQDWLKFSSYKERLLGLSFGLLSTRNHDLSYNLAWRTLTDPSRVSSKAIRRQLGHNLLSALKYTYKIDKRDSHLRPTKGYAFQSTSQVGGLWNSKGLRYFRQEFDVRGAVPLGFYSAALNVGVGAGVILPLAGGFMNSTSSVPERFYLGERRGGMSLITRRVARLTLEGITWEVIWPCLPSLTFLLICPSRYSETLESMATHSLLLETLRNCRRVSTRTFRLLNFGKRSGALLALGLFCLPNFSG

SEQ ID NO: 194037 - protein, 403 aa, Zea Mays
MPTIQWGRRTRTVLDVGCGVASFGGYLLDRNAITMSFAPKDEHEAQIQFALERGIPAFLAVIGTQKLPFPDNVFDVVHCARCRVHWYANGGKPLLELNRVLRPGGYFIWSATPVYRQEQRDQDDWNAMVTLTKSICWRTVVKSQDVNGIGVVIYQKPASNSCYAERKTNEPPLCSERDGSRFPWYAPLDSCLFTTAITTSDERYNWPVPWPERLDVSYASVPDDSASNKEKFEADTKYWKQLISEVYFNDFPLNWSSIRNVMDMNAGFGGFAAALIDQPLWVMNAVPIGQPDTLPLIFNRGLIGAYHDWCESFSTYPRTYDLLHMSNLIGNLTNRCDLIDVVVEIDRILRPGRWFVLKDTLEMIKKIRPILKSLHYEIVVVKQQFLVATKSFWRPGKPASTSG

SEQ ID NO: 194038 - protein, 308 aa, Zea Mays
MAVPSSDRARRPFPLSPSLSLFLLISAILVLLFLFLDPSPGSLAFLPSRLSASAPSLAPPLTPQQQSRAPRSRSPPHSRPDGSSATEKAEEGTTATASQPVTKADANGSASGPSAKESSGGSGSGGNSGARGVGADGETGTSVVAPVEKGGDDEEEAPVSVRWQTCSRLGRGVSSTDYIPCLDNVRAIKALRSRRHMEHRERHCPLPPRLRCLVPLPAGYRTPVPWPRSRDMIWYNNVPHPKLVEYKKDQNWVTRSGDYLVFPGGGTQFKDGVGRYIQFVEQLEPAVRASPLAARSSARRTSLALCLL

SEQ ID NO: 194039 - protein, 131 aa, Zea Mays
MDTRKGQTIKEEKRNYQSGFWHVNCTLPPLPICGELFVNIPLLQVSLHSLCPRQSWSTSTSLHIFGTPNYSDMHWCLFRSSLDMSKPSQAMLHKLLLNWRHSYSLSYIIIPDSISPCVATYPAQHTHLCHT

SEQ ID NO: 194040 - protein, 105 aa, Zea Mays
MNITYTTSDAGNITLSDGKFAKRKGNDGVPYQQLEMGGQAPNSSGVDNTASTTDGWEDGWDDDWDDEEAPAGPVDKKPTGSVSANGLSLRSQTNSKDGWDVDWDD

SEQ ID NO: 194041 - protein, 70 aa, Zea Mays
MGGQAPNSSGVDNTASTTDGWEDGWDDDWDDEEAPAGPVDKKPTGSVSANGLSLRSQTNSKDGWDVDWDD

SEQ ID NO: 194042 - protein, 509 aa, Zea Mays
MVPTRPTRSNSRPSIQSALMNGNNRTSVPNTSISSVTSRPTTPSRRSSTVVAPKQSVPAARTVPARSSTPVKTRLSTPAKTRPSTPTSTRPTAPNSSTDSSAAKTTSTHNVRPSTPNSRPRIVPNSSSGAAHTISRPSASSSTTSRSGSSSGNVPGISRATSLSSSSIPSMSHSSSRSSTPTRQPAIRSSAPAIGRSPSVGRSSSINSFTSVSQSAASSGRNSAPSSAPSSRPSSPNPRPRAPVRPLNIPDFPNEAPPNLRTKLPERPLSAGRSRPGMALGIRSTPNTEPSAASAPMKKVSVSAVSRSKFSDASSKTSTPTNGHQNRQAERSTVDSQANRPSRPVTGTDNGFGRSISKRSLDMAIRHMDIRQNLGGIRGASLFPQSTRSAAAKVRPARTSDPGHGISKGDQHRTDNGNSLNGHLYVSGDSNGALSRNGGSSTGSPDRESIRTKETLIELDIYGSSRYEAMLLSEDLRNTSWLHGFDDKPDQSPLFDHRFEPLPEPFSPL

SEQ ID NO: 194043 - protein, 57 aa, Zea Mays
MLVHLTKEIYYASKEKKRGASRSLDDQLLSIILAERQPSSKFDEPLPIYFRKQSIRE

SEQ ID NO: 194044 - protein, 178 aa, Zea Mays
MGWQGPPQSPASYIVKKILRLEVPTETYPNFNFIGRLLGPRGNSLKRIEACTGCRVFIRGKGSIKDSGKEEQLKGRPGYEHLSEPLHILIEAELPANVIDARLAKAQEILEELLKPVDESQDYYKRQQLRELAMLNSPLREESPRSGGAPPSPFIQHICTEDKGCWHDDHRGRKGALP

SEQ ID NO: 194045 - protein, 236 aa, Zea Mays
MDGLHGTDACFSPARAVSPQVRLPGPPDVGSQYLAELLQEHQKLGPFMQVLPICSRLLNQGVPQGAMGWQGPPQSPASYIVKKILRLEVPTETYPNFNFIGRLLGPRGNSLKRIEACTGCRVFIRGKGSIKDSGKEEQLKGRPGYEHLSEPLHILIEAELPANVIDARLAKAQEILEELLKPVDESQDYYKRQQLRELAMLNSPLREESPRSGGAPPSPFSKTVSGRPNKTGDTEL

SEQ ID NO: 194046 - protein, 183 aa, Zea Mays
MEWDAFRGVPQGAMGWQGPPQSPASYIVKKILRLEVPTETYPNFNFIGRLLGPRGNSLKRIEACTGCRVFIRGKGSIKDSGKEEQLKGRPGYEHLSEPLHILIEAELPANVIDARLAKAQEILEELLKPVDESQDYYKRQQLRELAMLNSPLREESPRSGGAPPSPFSKTVSGRPNKTGDTEL

SEQ ID NO: 194047 - protein, 101 aa, Zea Mays
MVLKTELCRFSGQKIYPGKGIRFIRADSQVFLFANSKCKRYFHNRLKPAKLTWTAMYRKQHKKDIHAEAVKKRRRATKKPYSRSRSASRRPRMRRKRRRRR

SEQ ID NO: 194048 - protein, 412 aa, Zea Mays
MYHQHQGPSELFTTRTSFPMEQHPFLRGGNAQGDSGLVLSTDAKPRLKWTPELHQRFVDAVNQLGGEEKATPKTVMRLMGIPGLTLYHLKSHLQKYRLSKNLQAQANASTSKNAIGCTPVADRIPGTTAATMSSTNVLPQAEKTIQIGEALQMQIQVQRQLNEQLEVQRHLQLRIEAQGKYLQAVLEQAQETLGKQNLGPANLEDAKIKISELVSQVSNECFSNAITDVKESSSVHRLEPIQIEFVESSTNSYLSVAEGFIKEHKLQHHGVLKAYDDSSLFCRKRSHEHETQFALNRSLSEHRMAHLQNEEGYHKAEFGYESDTEMAHEYTAPQKNGRCSTTSSASGSKVDAEKLYLEEQKCARQAVEYPRESKLVDFEHPCSVNKLDLNTHNVDDTNQAYRHFDLNGFSWG

SEQ ID NO: 194049 - protein, 410 aa, Zea Mays
MYHQHQGPSELFTTRTSFPMEQHPFLRGGNAQGDSGLVLSTDAKPRLKWTPELHQRFVDAVNQLGGEEKATPKTVMRLMGIPGLTLYHLKSHLQKYRLSKNLQAQANASTSKNGCTPVADRIPGTTAATMSSTNVLPQAEKTIQIGEALQMQIQVQRQLNEQLEVQRHLQLRIEAQGKYLQAVLEQAQETLGKQNLGPANLEDAKIKISELVSQVSNECFSNAITDVKESSSVHRLEPIQIEFVESSTNSYLSVAEGFIKEHKLQHHGVLKAYDDSSLFCRKRSHEHETQFALNRSLSEHRMAHLQNEEGYHKAEFGYESDTEMAHEYTAPQKNGRCSTTSSASGSKVDAEKLYLEEQKCARQAVEYPRESKLVDFEHPCSVNKLDLNTHNVDDTNQAYRHFDLNGFSWG

SEQ ID NO: 194050 - protein, 299 aa, Zea Mays
MTQRWIDNPATRGRVLLADLSSKAEILPVCLVNEVDHEKGPVHFTYTNQVKYLRPLSSMKKLQGCGCQSVCLPGDASCACGQHNGGDLPFSSSGLLSCRKPIVYECGESCNCSTNCRNRVTQKGSRLHFEVFRTTNRGWGLRCWEPIRAGSFICEYAGEVIDELKFNLNDSEDDYIFQTVCPGEKTLKWNYGPELIGEVSTYVSPDEFEPLPVKISAKNMGNVSRFMNHSCSPNVFWQPVQYDHGDDGHPHIMFFALKHIPPMTELTYDYGVAGAESSGSGSRRTKNCVCGSQNCRGLF

SEQ ID NO: 194051 - protein, 129 aa, Zea Mays
MLLNSFSVVTSHSICVAAGPVLLLTCPLQVPETPLHRPTELSPLLNHSPVNESTDHHSQEQGIPTLITWSQGGDEVFLEGSWDNWTSRRALERSGKDHAVLLVLPSGVYHYRIIVDGELRTTCQKASTA

SEQ ID NO: 194052 - protein, 277 aa, Zea Mays
MLLNSFSVVTSHSICVAAGPVLLLTCPLQVPETPLHRPTELSPLLNHSPVNESTDHHSQEQGIPTLITWSQGGDEVFLEGSWDNWTSRRALERSGKDHAVLLVLPSGVYHYRIIVDGELRYIPELPHAADERGRVANVLDVHDYVPESLDSVAEFEAPPSPVHSYDLHCPGDEEFAKEPPTLPPQLLVSVLGGDVDSAGHGNQALKPQHVVLDHLFIEKGWGSQSLLALGVTHRFESKYPDFVLMWRHHGKKEKKRKITTPANQWIKRICRFDGGGS

SEQ ID NO: 194053 - protein, 324 aa, Zea Mays
MGNASAKEGENGHMAASPEPAAPNGGGGSSSSAGGAAARPPPLSPPDDVMLERPPPVPYLFVPQVPETPLHRPTELSPLLNHSPVNESTDHHSQEQGIPTLITWSQGGDEVFLEGSWDNWTSRRALERSGKDHAVLLVLPSGVYHYRIIVDGELRYIPELPHAADERGRVANVLDVHDYVPESLDSVAEFEAPPSPVHSYDLHCPGDEEFAKEPPTLPPQLLVSVLGGDVDSAGHGNQALKPQHVVLDHLFIEKGWGSQSLLALGVTHRFESKYVSFVLYKPLERYPDFVLMWRHHGKKEKKRKITTPANQWIKRICRFDGGGS

SEQ ID NO: 194054 - protein, 68 aa, Zea Mays
MHGRTSTVETPRRLLSDGGENTREGACDSPRYISSALLRLRRTIFVSSWRPVARRRKLSSRDSTAQTY

SEQ ID NO: 194055 - protein, 64 aa, Zea Mays
MIPDLLKRDKPIKVATTLRVGPQLGTYHQSGAEAARYTQRSNSAVPTATGKVGNSRNSYSISFF

SEQ ID NO: 194056 - protein, 181 aa, Zea Mays
MIFTFYKAQGLSVGASLVEEDKLDLATSLLAKAKEKGVSLMLPTDVVIADKFAPDANSQIVPASAIPDGWMGLDIGPDSIAAFNAALETTQTVIWNGPMGVFEYDKFAIGTEAVAKKLAELSRKGVTTIIGGGDSVAAVEKVGVADVMSHISTGGGASLELLEGKELPGVTALDEAATVTV

SEQ ID NO: 194057 - protein, 92 aa, Zea Mays
MKKNTADVFTSTFSYSEVANNAYREDLVTGNICAFSSSSSPQVRAIFTGCVGAVRETLCPLRSVRGDPGDIRSTVGESLTALIGGWRLDTRG

SEQ ID NO: 194058 - protein, 498 aa, Zea Mays
MGLLSSANRCGCKNILSCNLLRCACCCSWIRSVCGGRTTTSNKAAAQQEASDAERKAKRKLARGLCGGAVREAEEPLTSEAKKKRTNTAATIPEPQKCKWTKKARKKKKTKNEQNGLAALVEEISLSNSPKHRAAAGEILRIGNHNIPSRVFTFRELVDATNSFCPENLLGEGGFGRVYKGCIPDTMEVIAVKQLDKDGLQGNREFLVEVLMLSLLHHPNLVTLVGYSTDCDQRILVYEYMSLGSLQDHLLDLSPKSQPLSWHTRMKIAVGAARGIEYLHEVANPPVIYRDLKASNILLDASFNAKLSDFGLAKLGPSGDNTHVSTRVMGTYGYCAPEYAMTGKLTKTSDIYSFGVVLLELITGRRAIDTTKPTREQILVHWAAPFFRDKRKFVKMADPLLDMKFPLKGLYQALAISSMCLQEEASSRPLISDVVTALTFLADPNYDPPDDIKDPLPITVPNLDMETTGQNGTEGGKEQLQQNEGESRHSTKNEEEGS

SEQ ID NO: 194059 - protein, 420 aa, Zea Mays
MASAKQSKKMRILLIPFFATSHIGPYIDFAVRLAAARPGAVEPTVAVTPANVAVVRSALERHGPAASGTVRIVTYPFPRVDGLAPGVENLSTAGDDAWRIDAAAIDEALSRPAQEALLRERSPDAVVSDYHFFWTSSIAAELGLPAGDTDPRQRAAGVPETPGEGPRHVQPLQRGAGQVFGRRLQHVRRHGAGVPRGERARQILEALLLRRPRLTAAAGGSGRHQRVSMHQVARLQAKLLGGVRVLRHLRRHLGGPAPGAGARPGGLRGAVPVGGEGRRVDAAGGLGAARRGEGDAGERVGSADGGAGPSSGGRVPDALRVELVAGGGGGRRADADVAAGVRPVHRGEAGDGRARDRGAGLEWGAEHEVRGEGARAGGGGGSGGGEVLGARRAGGGGEGQGAGSRSEGPRCRSGGRLVVP

SEQ ID NO: 194060 - protein, 104 aa, Zea Mays
MRRKRPRPKLLYRSPTFGWLVGTDPLHVSLLLCVTAVPWKPDHHRSSRHCRLRPREPRDMVSRHAGHGNVVLISAGPRPGPGTGTGTGTGTGRCWNNHAVASSS

SEQ ID NO: 194061 - protein, 185 aa, Zea Mays
MALLQPTLLTPPPLCCCSHGLLYPGFLKLPPKFSNGACCSTARASDRSELAGKSGGLAWRAAGRKGRLLGVTGAGRGPFFGGGGRRMDKGTSRVVGNLAFAAVVTYLAVTGQLRWVIDAIVSLWLLTILLPVLALGAFFFFAGQDILQGDCPNCGKSFQILNFEGWPTTLSLLHSTFLRSRQQIC

SEQ ID NO: 194062 - protein, 109 aa, Zea Mays
MISYCPGDKGISPLLLMKYLLLNGGKRLAELANSELRMSVWTDDVYSFMRSQKRRRIQSSDISQDFDAMRKQLVSDAARVCRSKVPESLMENLIKRLRSYFEDKYPPKA

SEQ ID NO: 194063 - protein, 72 aa, Zea Mays
MSVWTDDVYSFMRSQKRRRIQSSDISQDFDAMRKQLVSDAARVCRSKVPESLMENLIKRLRSYFEDKYPPKA

SEQ ID NO: 194064 - protein, 223 aa, Zea Mays
MAPTAEPSSRPPQWRPRTGPPPGLKNLGNTCYLNSVLQCLASTPPLATFCLASRHSNQCKKVFPNRDNDCALCVLERQIARLLRADAGALDSPAKVIRCMPLFAEHFRWGRQEDAHEFLRYVVDACHTADLRMRKGLRAAAASGNCGEDVRGQGVCLVMRETFGGALLSQVKCLECKGESNKTDEIMDISLDLPGSSSVADALSRFFHPETLDGANKYCCERS

SEQ ID NO: 194065 - protein, 282 aa, Zea Mays
MAPTAEPSSRPPQWRPRTGPPPGLKNLGNTCYLNSVLQCLASTPPLATFCLASRHSNQCKKVFPNRDNDCALCVLERQIARLLRADAGALDSPAKVIRCMPLFAEHFRWGRQEDAHEFLRYVVDACHTADLRMRKGLRAAAASGNCGEDVRGQGVCLVMRETFGGALLSQVKCLECKGESNKTDEIMDISLDLPGSSSVADALSRFFHPETLDGANKYCCESCKKLTSARKQMFMLRAPKVLVIQLKRFEGINGGKINRNIEFKEALDLSDCMYNKNQVYDV

SEQ ID NO: 194066 - protein, 281 aa, Zea Mays
MAPTAEPSSRPPQWRPRTGPPPGLKNLGNTCYLNSVLQCLASTPPLATFCLASRHSNQCKKVFPNRDNDCALCVLERQIARLLRADAGALDSPAKVIRCMPLFAEHFRWGRQEDAHEFLRYVVDACHTADLRMRKGLRAAAASGNCGEDVRGQGVCLVMRETFGGALLSQVKCLECKGESNKTDEIMDISLDLPGSSSVADALSRFFHPETLDGANKYCCESCKKLTSARKQMFMLRAPKVLVIQLKRFEGINGGKINRNIEFKEALDLSDCMYNKNQVAH

SEQ ID NO: 194067 - protein, 228 aa, Zea Mays
MAPTAEPSSRPPQWRPRTGPPPGLKNLGNTCYLNSVLQCLASTPPLATFCLASRHSNQCKKVFPNRDNDCALCVLERQIARLLRADAGALDSPAKVIRCMPLFAEHFRWGRQEDAHEFLRYVVDACHTADLRMRKGLRAAAASGNCGEDVRGQGVCLVMRETFGGALLSQVKCLECKGESNKTDEIMDISLDLPGSSSVADALSRFFHPETLDGANKYCCERQMLLFP

SEQ ID NO: 194068 - protein, 607 aa, Zea Mays
MDPVSNKVNGSSLKMKVTMASPCSKSHPADMDKDASLPSKSPRTNRAAPVPPKLPSADKATLVPSKLPSVDKATPVPQKSPLVNKVAQARPKSPAVDKATPHRPKSPAVDKATPVRSQSPAVDKATLVRPQSPAVDKATPVRPQSAAVDKATPVRPKSPAIDKATPIAPKSPPVDKASPALPKSLSGAKDALFPSRSLQIDKFTPAAPRLSQDDKAALPSSEQSHISPATSSEAQGATTRKVTTTTSLSEAAAAWRPSSAPVLPTPRSTGPAASHIQTSTLLSRSMSEAAGRRPVNDPSFSAPSYTPQTYRNAIIGKSGLSMTSASLAYQPSSLDQDTAPSRPLSAYASSTVMMPPAGRSDQSSARHGFKSGPGKLEAHDGWQQWKGDSNVDMHLWRDHAPYQQMTNSQAYEQSRRDDTYQQACSRGTEKFSRHAGLQARQQFQTETPASHVWHQPQGPVAEEFPHLDIINDLLEEDQINGSIPESFRQDYNVFGLPFSPRGNLSDMEMASVRSPARFNSPKYDGGLSGAYDMNAVNGLRERQFPSLDIYSNGLSDVSASKPWLNGSASPSVSLGVNTNGYHPQVGEYLGGGVNGVSLWRRHANGRW

SEQ ID NO: 194069 - protein, 1590 aa, Zea Mays
MAVKGKGKQVAAESPGPGAGAGGASGSGGKRRMASSDAGAGPSSSSAAKRRRRAGVLQFVDDVAGVDDDYEEDELESEDDTDDGFFTGGEHAQNLSHKRTERSHPLPFLVKEEELSGDELEEFIKNRYSNRVKYAADRSYSREDDDIFSMDCALKEPTIWRVKCMVGRERQMAFCFMQKFVDLRKIGTKVPIITAFALDHIRGFVFVEAEKACDVTEACKGFCSVYTSRITSVPAAEVPSLLSSRTKPFEISRGTWIRMKNGNYKGDLAQVVSVDDGRKKVMIKIVPRVDLHAISKKFGGAVSLKGAAVPAPRLISSQELEFFRPHIEIKRDRQTGEVFEVLDGLMFKDGFLYKKVALSSLIYWGIQPTETELLKFSSSPSNRASADDLDWLSGMYGSKKRNLPEKRDMESSSSKIRSSKASDLKASTSTENYDENDEFNLHDLVLYGRKDFGVIVAVEKDGFRILKGGPEGSAVKVRKQDIKKGCVDKMFTAVDHQKKTISINDTVNVVEGPFQGKQGVVKHLYLGILFIYNESESENCGFFCAQSGSCEKIRKGLGSSTTESSDFTTPMFPEPAYEQNGHRDTERPYRSTREQLFSIGQMLRIRKGPLKGYLCRVVRIFRNDVTVKLDSLLKIVTVQADLLSVPANRGDNLSGAPASKFGSQDTSFFGSEAGKTSWDNGLPSFGSDSWQPFSSSTLSVQNAGGESEADPWSKKTSAKDDSDPWGKKTDGDSDRWGKKTDGDSDPWGKEAVSAADGDSNPWGKETVPSAAGDSDPWGKKVVSSADGDSDSWGKKATSSAVDTEKEGSGGTAWDKQAGVGGSDAAGSSWDRAVVNESEKSDNWGEACRVMDMGTGAEADTDPWGSKVKAVDMEGPNNWEKATVPPNNKLEDVSQGWGQPKGNSTEDQAIDNVSKDVDNNRACDSSLPVTEDGTWGKSKDNSCGGAGGAGGWDVSVGNWNKSSVVADAQDEGWGKGNWSSAESEETNNQSGNWNKTGASDQAGYNNWDKPKSFGGNGWNKGDDQNSSWNRPENFGGGRGFGRGQGRGRGQQSGYFNGRNDQGSWKKSWGSDNAERPSWRSDNQVDNEAGESGGYRGRGRGGRGQYGGRGKDNGWRNDDRSNSGFGRENNSGDGPKWGGGGNWNATNPPSSSVGTKSYGQNQPFTWNNSEDNKPSVGEQGDPWASKVSSTEEQQNDSWSSKMISGGAEDTSGGWDTKVKDSSCNDGGEGLQNDPWANKIGSNEGKEQETDPWASKMSSTVCADDKKGSWNTTAKGIPSKEKADDPWNSKGGNDDSKKTDTWGAGSSGGDQELSWSKPNFSLGDQESTWNNPRFSDDDNANNRGGFGRGNRGRGRGRNFGDGGGSSWNGGNRNDESGGGRSGEPWNRRDFDGGGGRGRGRFGRGDRNQGNNFGSGDGGSWGSGRGNGGRGGYRNWNDNNERSFGEGGGWSQSQSSDWNANKGNGEGNQAFSKSKPSWEAQNTSGRDGQAGKGDANNSWSKNRSSPSSAWGAPSGGAGGRGSWGKSNEDGWNSAGGSAKEKPAWGGGSEASTKKEDKGGEGNGSQGGGGVSSWDKGADDAWNGNTGSDIGSGGW

SEQ ID NO: 194070 - protein, 1125 aa, Zea Mays
MAVKGKGKQVAAESPGPGAGAGGASGSGGKRRMASSDAGAGPSSSSAAKRRRRAGVLQFVDDVAGVDDDYEEDELESEDDTDDGFFTGGEHAQNLSHKRTERSHPLPFLVKEEELSGDELEEFIKNRYSNRVKYAADRSYSREDDDIFSMDCALKEPTIWRVKCMVGRERQMAFCFMQKFVDLRKIGTKVPIITAFALDHIRGFVFVEAEKACDVTEACKGFCSVYTSRITSVPAAEVPSLLSSRTKPFEISRGTWIRMKNGNYKGDLAQVVSVDDGRKKVMIKIVPRVDLHAISKKFGGAVSLKGAAVPAPRLISSQELEFFRPHIEIKRDRQTGEVFEVLDGLMFKDGFLYKKVALSSLIYWGIQPTETELLKFSSSPSNRASADDLDWLSGMYGSKKRNLPEKRDMESSSSKIRSSKASDLKASTSTENYDENDEFNLHDLVLYGRKDFGVIVAVEKDGFRILKGGPEGSAVKVRKQDIKKGCVDKMFTAVDHQKKTISINDTVNVVEGPFQGKQGVVKHLYLGILFIYNESESENCGFFCAQSGSCEKIRKGLGSSTTESSDFTTPMFPEPAYEQNGHRDTERPYRSTREQLFSIGQMLRIRKGPLKGYLCRVVRIFRNDVTVKLDSLLKIVTVQADLLSVPANRGDNLSGAPASKFGSQDTSFFGSEAGKTSWDNGLPSFGSDSWQPFSSSTLSVQNAGGESEADPWSKKTSAKDDSDPWGKKTDGDSDRWGKKTDGDSDPWGKEAVSAADGDSNPWGKETVPSAAGDSDPWGKKVVSSADGDSDSWGKKATSSAVDTEKEGSGGTAWDKQAGVGGSDAAGSSWDRAVVNESEKSDNWGEACRVMDMGTGAEADTDPWGSKVKAVDMEGPNNWEKATVPPNNKLEDVSQGWGQPKGNSTEDQAIDNVSKDVDNNRACDSSLPVTEDGTWGKSKDNSCGGAGGAGGWDVSVGNWNKSSVVADAQDEGWGKGNWSSAESEETNNQSGNWNKTGASDQAGYNNWDKPKSFGGNGWNKGDDQNSSWNRPENFGGGRGFGRGQGRGRGQQSGYFNGRNDQGSWKKSWGSDNAERPSWRSDNQVKTMVGEMMIEAILGLEGKITVAMDQNGVVEVIGTLQIHQVAV

SEQ ID NO: 194071 - protein, 517 aa, Zea Mays
MAVKGKGKQVAAESPGPGAGAGGASGSGGKRRMASSDAGAGPSSSSAAKRRRRAGVLQFVDDVAGVDDDYEEDELESEDDTDDGFFTGGEHAQNLSHKRTERSHPLPFLVKEEELSGDELEEFIKNRYSNRVKYAADRSYSREDDDIFSMDCALKEPTIWRVKCMVGRERQMAFCFMQKFVDLRKIGTKVPIITAFALDHIRGFVFVEAEKACDVTEACKGFCSVYTSRITSVPAAEVPSLLSSRTKPFEISRGTWIRMKNGNYKGDLAQVVSVDDGRKKVMIKIVPRVDLHAISKKFGGAVSLKGAAVPAPRLISSQELEFFRPHIEIKRDRQTGEVFEVLDGLMFKDGFLYKKVALSSLIYWGIQPTETELLKFSSSPSNRASADDLDWLSGMYGSKKRNLPEKRDMESSSSKIRSSKASDLKASTSTENYDENDEFNLHDLVLYGRKDFGVIVAVEKDGFRILKGGPEGSAVKVRKQDIKKGCVDKMFTAVDHQKKTISINDTVNVVEGPFQYM

SEQ ID NO: 194072 - protein, 180 aa, Zea Mays
MMPPFPTDLEIGAPILPFACTICARHRSPPSTGRRGLIWKCPPFPTDLAVGDPMSWMAPPRRQLCARGRLTPCPAYVVSVYLDRSLPSRAIATPARGHHRPSQPPLPGRPTCNLVCSRLRAPWVSLLARDQPAPATSASRRPMRPASLAHSSAPCPPRTWTTASSSHDHYAPPRPPPCRR

SEQ ID NO: 194073 - protein, 272 aa, Zea Mays
MSRLLLRHRSFLLPGARSDASHPFTAASSSSRSSYTSRFSPLAYHASAAATAAGAQSEGAAAESTPAAGDQPSSTPPPAARGRWGLLKFGALAAVAGAIGGVGYVTYAYSLNEVEEKTREFRKNPRLLIPEDASTFEKYKAMVYSTAMKVPVSAIELYLDIRSTIEDHVRGFTEPTSDKLLPDLLPQDQHVFTLVLDLNETLVYSDWQRERGWRTFKRPGVDAFLEHMSKLYEVVVYSDQPPMYVEPVFERLNSRGTISHRLSRPATKICQS

SEQ ID NO: 194074 - protein, 109 aa, Zea Mays
MRHPRGVVIIIGYAVTKQYLNIAGPPWLSTCPYSICYLSSLLLCTQGRISHAVSQSVDFICAVPSVASYLVNTVGQNKSKPELKFVSVWDGGRLFLAFCFNASCHTRAG

SEQ ID NO: 194075 - protein, 199 aa, Zea Mays
MASRRRTLLKVIILGDSGVGKTSLMNQYVNKKFSNQYKATIGADFLTKEVQFEDRLFTLQERFQSLGVAFYRGADCCVLVYDVNSMKSFDNLHNWREEFLIQASPSDPDNFPFVLLGNKVDVDGGNSRVVSEKKAKAWCASKGNIPYFETSAKDGTNVEDAFQCIVKNALKNEPEEELYVPDTVDVVGGNRAQRSSGCC

SEQ ID NO: 194076 - protein, 177 aa, Zea Mays
MAKGRFKHKPTGERSFSSPEDIAAGTSAGRPKTFAKHDEKDVYSRRGEPEEESEDFMKPKHKGIEGLIEIENPNLVKTKNVKAKDIDIGKPTDMSRREREDLDKQKSHERHMKLQEQGKTEQARKDLERLTIIRQQRAEATKKREEEKAGMSILFDELNHSTLTAKTMQKHDDPRQC

SEQ ID NO: 194077 - protein, 181 aa, Zea Mays
MAKGRFKHKPTGERSFSSPEDIAAGTSAGRPKTFAKHDEKDVYSRRGEPEEESEDFMKPKHKGIEGLIEIENPNLVKTKNVKAKDIDIGKPTDMSRREREDLDKQKSHERHMKLQEQGKTEQARKDLAYRSVTCKNTDEFYPPFENVERLTIIRQQRAEATKKREEEKAAKEERKANKALK

SEQ ID NO: 194078 - protein, 236 aa, Zea Mays
MCSQKLSLLNGVLFTGGSEKEGVYFDTIKRVFQYVLDKNDAGEPFPLFAQCLGFELVSMIVSKDNNILEAFDAQDQASTLQFPSYALEGSVFQRFDTDLIKKVSTNCLVMQNHRYGISPRRYRENDALSSFFKILTTSPDENGKVYVSTVQANNYPITCTQWHPEKAIFEWRKPMIPHSEDAVQVTQHFANHFISQARKSPNRPPADKVLDNLIYNYSPTFTGKKSKSFEEVYIFS

SEQ ID NO: 194079 - protein, 323 aa, Zea Mays
MDSRCPHLLLLLPLLLLAALLPPPSSGVPEVIWLPTSGGAGPLSCAPPDPAVYDRPVIGIVSHPGDGAGGRISNTTATSYIGASYVKFVEAAGSRVIPLVYNEPEDRLLEKLSLLNGVLFTGGSEKEGVYFDTIKRVFQYVLDKNDAGEPFPLFAQCLGFELVSMIVSKDNNILEAFDAQDQASTLQFPSYALEGSVFQRFDTDLIKKVSTNCLVMQNHRYGISPRRYRENDALSSFFKILTTSPDENGKVYVSTVQANNYPITCTQWHPEKAIFEWRKPMIPHSEDAVQLAVHHVGLSICKKGPCFDETCKSGERKMEFMFT

SEQ ID NO: 194080 - protein, 173 aa, Zea Mays
MLLANVRDFVWSLVRAGAKPPAVSRPSDSTHRRRRATHGSVANGLALPPSATAPPSPPLGRPPAPAVVGGAGGHLAADERGSGALVLRAAGPRRVRPPRHRHRLAPRGRCGRQDQQHHRDLLHRRLLRQVRRGRRLARHPTRLQRARRPPPREIEFVEWSAVHWWVREGRCIF

SEQ ID NO: 194081 - protein, 79 aa, Zea Mays
MADDDTVPVPAQTGGSEAAVPSTEPINIDPDSTVEQAGGTDTPTSSRDYRGASTDLGDGRDADLHQGLGGRECKDPTYC

SEQ ID NO: 194082 - protein, 99 aa, Zea Mays
MRGRTQDLASTGWYLCCSVNLAGGQFLHQKCATTSTAEALHGNITSALPPLHISTVKGKVDPAEEGLGKSRNHRPLHGHTIEISSIMCTILNQCTTSIC

SEQ ID NO: 194083 - protein, 250 aa, Zea Mays
MVAEPQRTPLAVGLCASLHSAPLDAAHQSETRRPSLRSAPSHGGCRSAAPLCSDAELPTPGPLSSGPHPPAAAMAELSGAAPLLSPPQRRCLSCSSMEILSAADCLASRCPSSPSGTRRADPASHPLQLAITPVAARWFPLLPEASPKSGLGRSHHRPSSSSVAGHPPCLHGHVQRALFFFPVLSPARRNAAARSGHGSSLCRALGVLDVMPQQAAAATPFAATRSPGRSTRRRSAQPLHVVVETRGPRD

SEQ ID NO: 194084 - protein, 137 aa, Zea Mays
MPPGKKGSRCILNPQDDMEAMVAASVEVRQLVMSSTQVVSHVLPSSSKFLHNVGLQPASKTSSISAKVHELQSQLETKRQEKDGLRQEMESLKATSQEFMTTIANQTIEIENLKKSLAENNSLLRQILSTNRGMSPP

SEQ ID NO: 194085 - protein, 70 aa, Zea Mays
MVGRSNIEKSLSTSGTIAYEGIDLLTCAHISIYLSSSSRYLSYSDFYRHILLQISVFKLFLCHVPLALIF

SEQ ID NO: 194086 - protein, 59 aa, Zea Mays
MRCAVSILAFLDSICFFFLFSFGLRQLLHLYKATSSATRATTSGSTTGVPHLLLPPLCR

SEQ ID NO: 194087 - protein, 90 aa, Zea Mays
MLSSSPSMLHPSASAPARSTLLGQDPQVHLLHRPAVTFIRVGRTWRAALSHQEVVAGAWVDTKATGFALTSGSFPLSCSWIFYWTRLKIR

SEQ ID NO: 194088 - protein, 56 aa, Zea Mays
MTRFIIIQTMFTLHYYVELLNVFTCRWSVTMFSCTTYLGVANFRCCYVHNIVCLNF

SEQ ID NO: 194089 - protein, 232 aa, Zea Mays
MGSSSHSLAVSRRGRSARQSPFFRDLATPIPSHRGVSRFASGASPSSTPPPPPPIFTLDDRYASADFSPDPTASDLLPVASSPSPRTAASRSPPWDLSRGKVALSAPGSPMAGVVEPTRKEMLALPAPASPGTPPPAATAEAQSPVSPAQAPRTEPVANAGEVEREEWVTVFGFSIGDTNLILREFEKCGVILRHHSGPRDGNWIHILYQVIIHLSTVVLPYFCCTIYFNFL

SEQ ID NO: 194090 - protein, 58 aa, Zea Mays
MWIITAKIGCVFSLYRVLSSQLKSPAPRLASETVACRCSRLKVNLMFIREVVSFRWPI

SEQ ID NO: 194091 - protein, 116 aa, Zea Mays
MNVLLIPAFILMPSPAHAAQVHKQHIPSIRRNRTNTGRHPAHAATRYRQARLLPSPPTAPPPSSMAPPPRRNPPHQNPTRRKVLVVRQDLKMGAGKIASQCAHAATGLYAELLSRC

SEQ ID NO: 194092 - protein, 194 aa, Zea Mays
MNGPYKMNVLLIPAFILMPSPAHAAQVHKQHIPSIRRNRTNTGRHPAHAATRYRQARLLPSPPTAPPPSSMAPPPRRNPPHQNPTRRKGEEPWLAASLRPANFLPGLAIGFLLGLLLDLSSSWRPKSSPAPAPAAAPARASSSKRASGTSFASGGEELKMVLVVRQDLKMGAGKIASQCAHAATGLYAELLSRC

SEQ ID NO: 194093 - protein, 119 aa, Zea Mays
MAPPPRRNPPHQNPTRRKGEEPWLAASLRPANFLPGLAIGFLLGLLLDLSSSWRPKSSPAPAPAAAPARASSSKRASGTSFASGGEELKMDVEPCAVRRPESREEETERARGDRENKAF

SEQ ID NO: 194094 - protein, 117 aa, Zea Mays
MNGPYKMNVLLIPAFILMPSPAHAAQVHKQHIPSIRRNRTNTGRHPAHAATRYRQARLLPSPPTAPPPSSMAPPPRRNPPHQNPTRRKDVEPCAVRRPESREEETERARGDRENKAF

SEQ ID NO: 194095 - protein, 68 aa, Zea Mays
MGPNEKGRSNSAGPTSKWLELDPMLWPACDDDHIQSSKNPARCYKHRMPDHCEIPMITCAFFTLLLSR

SEQ ID NO: 194096 - protein, 68 aa, Zea Mays
MSTSYHLLLTRPRGMSISHLRHRNRNLVQLLLGYCRRKGELLMVYYCMPNGSLDKHRLHAEDGKALLE

SEQ ID NO: 194097 - protein, 768 aa, Zea Mays
MMHSNSLDNAPTQSLISVVNGILDESIERKKGEIPHRVVYLLRKVVQEIEHRLCIQAEHIRSMAINRLQIVKNEKSQIEEKKELCEKDVQRLMKEKEYSKSIIMNLTKDMEAMNRLHEQQLEQIGRKAKEMEEQLTTRVKEVEYLLLQSNKKVEELEIASRLKSQLWDQKENIFQSYMDNQQLVIKDIRILSQSYENDMYALQMQWRNEISNLGSGLKCLVDAAENYHKVLTENQKLFNEVQELKGNIRVYCRVRPFLSGQDKKSTTIDYMGENGELLISNPFKQGKDGHRMFKFNKVFTPFASQAEVFSDIQPLIRSVLDGFNVCIFAYGQTGSGKTYTMSGPTTSKQDWGVNYRALNDLFDISLSRRNAFSYEVGVQMVEIYNEQVRDLLSNDIAQRRLGIWNTSQPNGLVVPDASLHSVKSTSDVLDLMEIGQANRAVGSTALNERSSRSHSILTVHVRGMDLKNGSTSRGCLHLIDLAGSERVEKSEVTGDRLKEAQYINKSLSALGDVIFALSQKSAHVPYRNSKLTQVLQSSLGGQAKTLMFVQINPDVESYSETISTLKFAERVSGVELGAARSNKEGKDIKELLEQVASLKDTILRKDMEIEQIQVIKDKVKSPNLLLDRNVPGLTKTTANQPSQLLSGERMLKSSDRVLSDRQSYGEVNVDPNHHVMDTAPVSIDEAGYENNASDDGLSGETENDNSAAEMTAERLHRFPSRISRFTLTKNGQPSMSRSNPKDAKTPSNTKAPSSRLTGGSSARSKRRQ

SEQ ID NO: 194098 - protein, 586 aa, Zea Mays
MGSVDGRGVEGIHEANRRAQLIGWMNALLPEFSLPPDSSSEELRELLSDGVVLCRLVNTLIPGVLEGSWEGYAPSDQRLGNVKKFLSVVSDMGLPGFSLKDLDEGLMSSVVECLLVLRGSVDPRLGDDIPPDVTRTPLRKQWGVQEMDKPQVPAAALGKRSPAEDMRNGVADSKTHQKTSVFSGQKVREVFQLKRGSYSDLTAAKISEMMHSNSLDNAPTQSLISVVNGILDESIERKKGEIPHRVVYLLRKVVQEIEHRLCIQAEHIRSQNVTIKTREQKYCSKIKALEMLVNGTNEENQMAINRLQIVKNEKSQIEEKKELCEKDVQRLMKEKEYSKSIIMNLTKDMEAMNRLHEQQLEQIGRKAKEMEEQLTTRVKEVEYLLLQSNKKVEELEIASRLKSQLWDQKENIFQSYMDNQQLVIKDIRILSQSYENDMYALQMQWRNEISNLGSGLKCLVDAAENYHKVLTENQKLFNEVQELKGNIRVYCRVRPFLSGQDKKSTTIDYMGENGELLISNPFKQGKDGHRMFKFNKVFTPFASQAEVFSDIQPLIRSVLDGFNVCIFAYGQTGSGKTYTMEKCLLI

SEQ ID NO: 194099 - protein, 498 aa, Zea Mays
MAQMKKTSFSLQMAINRLQIVKNEKSQIEEKKELCEKDVQRLMKEKEYSKSIIMNLTKDMEAMNRLHEQQLEQIGRKAKEMEEQLTTRVKEVEYLLLQSNKKVEELEIASRLKSQLWDQKENIFQSYMDNQQLVIKDIRILSQSYENDMYALQMQWRNEISNLGSGLKCLVDAAENYHKVLTENQKLFNEVQELKGNIRVYCRVRPFLSGQDKKSTTIDYMGENGELLISNPFKQGKDGHRMFKFNKVFTPFASQAEVFSDIQPLIRSVLDGFNVCIFAYGQTGSGKTYTMSGPTTSKQDWGVNYRALNDLFDISLSRRNAFSYEVGVQMVEIYNEQVRDLLSNDIAQRRLGIWNTSQPNGLVVPDASLHSVKSTSDVLDLMEIGQANRAVGSTALNERSSRSHSILTVHVRGMDLKNGSTSRGCLHLIDLAGSERVEKSEVTGDRLKEAQYINKSLSALGDVIFALSQKSAHVPYRNSKLTQVLQSSLAILVGKTVY

SEQ ID NO: 194100 - protein, 799 aa, Zea Mays
MMHSNSLDNAPTQSLISVVNGILDESIERKKGEIPHRVVYLLRKVVQEIEHRLCIQAEHIRSQNVTIKTREQKYCSKIKALEMLVNGTNEENQMAINRLQIVKNEKSQIEEKKELCEKDVQRLMKEKEYSKSIIMNLTKDMEAMNRLHEQQLEQIGRKAKEMEEQLTTRVKEVEYLLLQSNKKVEELEIASRLKSQLWDQKENIFQSYMDNQQLVIKDIRILSQSYENDMYALQMQWRNEISNLGSGLKCLVDAAENYHKVLTENQKLFNEVQELKGNIRVYCRVRPFLSGQDKKSTTIDYMGENGELLISNPFKQGKDGHRMFKFNKVFTPFASQAEVFSDIQPLIRSVLDGFNVCIFAYGQTGSGKTYTMSGPTTSKQDWGVNYRALNDLFDISLSRRNAFSYEVGVQMVEIYNEQVRDLLSNDIAQRRLGIWNTSQPNGLVVPDASLHSVKSTSDVLDLMEIGQANRAVGSTALNERSSRSHSILTVHVRGMDLKNGSTSRGCLHLIDLAGSERVEKSEVTGDRLKEAQYINKSLSALGDVIFALSQKSAHVPYRNSKLTQVLQSSLGGQAKTLMFVQINPDVESYSETISTLKFAERVSGVELGAARSNKEGKDIKELLEQVASLKDTILRKDMEIEQIQVIKDKVKSPNLLLDRNVPGLTKTTANQPSQLLSGERMLKSSDRVLSDRQSYGEVNVDPNHHVMDTAPVSIDEAGYENNASDDGLSGETENDNSAAEMTAERLHRFPSRISRFTLTKNGQPSMSRSNPKDAKTPSNTKAPSSRLTGGSSARSKRRQ

SEQ ID NO: 194101 - protein, 562 aa, Zea Mays
MAQMKKTSFSLQMAINRLQIVKNEKSQIEEKKELCEKDVQRLMKEKEYSKSIIMNLTKDMEAMNRLHEQQLEQIGRKAKEMEEQLTTRVKEVEYLLLQSNKKVEELEIASRLKSQLWDQKENIFQSYMDNQQLVIKDIRILSQSYENDMYALQMQWRNEISNLGSGLKCLVDAAENYHKVLTENQKLFNEVQELKGNIRVYCRVRPFLSGQDKKSTTIDYMGENGELLISNPFKQGKDGHRMFKFNKVFTPFASQAEVFSDIQPLIRSVLDGFNVCIFAYGQTGSGKTYTMSGPTTSKQDWGVNYRALNDLFDISLSRRNAFSYEVGVQMVEIYNEQVRDLLSNDIAQRRLGIWNTSQPNGLVVPDASLHSVKSTSDVLDLMEIGQANRAVGSTALNERSSRSHSILTVHVRGMDLKNGSTSRGCLHLIDLAGSERVEKSEVTGDRLKEAQYINKSLSALGDVIFALSQKSAHVPYRNSKLTQVLQSSLGGQAKTLMFVQINPDVESYSETISTLKFAERVSGVELGAARSNKEGKDIKELLEQVLVLLDLSLTRVYLFPIL

SEQ ID NO: 194102 - protein, 54 aa, Zea Mays
MLMWSGRRPVLCLPLYFGQINKLDGVCMFASWDLCFFALNLSILSRRLRCPNVV

SEQ ID NO: 194103 - protein, 94 aa, Zea Mays
MRCHKLEQHFVMFTCLVTSSFVGNLTTLCRDRNPRDFCRWDVNMQQLKGTCSSCMRSFQNLKREHGVLRQKLESYFQLLRQAGPAVTATRPRGM

SEQ ID NO: 194104 - protein, 117 aa, Zea Mays
MRGVHSPAAQLLKPSLLRALRLPLSWKGDGHSHPCSGFVVTDVLLGVWGPVNYGGYWRPRSKNLVLPVQCSHRCRFAPKYGCHWRECAVCLHINQGIKISKEAFWLFHSTSDSLIKM

SEQ ID NO: 194105 - protein, 102 aa, Zea Mays
MRGVHSPAAQLLKPSLLRALRLPLSWKGDGHSHPCSGFVVTDVLLGVWGPVNYGGYWRPRSKNLVLPVQCSHRCRFAPKYGCHWRECAVCLHINQGIKISKE

SEQ ID NO: 194106 - protein, 51 aa, Zea Mays
MRTLARRLRPACFSTSPDCSFFSVSAVDGSVGSVVTMARQAKEKPFCFSLP

SEQ ID NO: 194107 - protein, 74 aa, Zea Mays
MISCLRVVGWDNDLILLELLGRQLRAGEHRKSREERSQERVFLRGYYLIFGLAGHVLIRSDYVIFPTRSFLFSK

SEQ ID NO: 194108 - protein, 100 aa, Zea Mays
MGDNKSPLSLSPMGGRDRDRELLIPVSGGGSAPGVDDEDADRASSASAALSSSGREAFHKVVRSWASKKFMTGWSWLHHICYFHIFDRSLYVILGWGICP

SEQ ID NO: 194109 - protein, 218 aa, Zea Mays
MNAFRFLGDMTHLFSVLVLLLKIYATKSCSGVSRKTQELYMLVFVARYLDLFTDYVSLYNSVMKMVFITSSAAIVWCMRRHPQVRRTYDKEQDTFRHAVLVAAAFLLALMFHDRFTFREICWAFSIYLEAVAILPQLVLLQRSRNVDNLTGQYVFFLGYGLSFLLIVGNLLFFLNTYVVFKVCYQVNMKQFMALNSVQCCSLEIYQHLIVMHILNKWY

SEQ ID NO: 194110 - protein, 452 aa, Zea Mays
MEGAGRDANPLGGYRIGKTLGIGSFGKVKIAEHILTGHKVAIKILNRRKIRSMEMEEKVKREIKILRLFMHPHIIRLYEVIDTPADIYVVMEYVKSGELFDYIVEKGRLHEEEARRFFQQIISGVEYCHRNMVAHRDLKPENLLLDSKCNIKIADFGLSNVMRDGHFLKTSCGSPNYAAPEVISGKLYAGPEVDVWSCGVILYALLCGTLPFDDENIPNLFKKIKGGIYTLPSHLSPSARDLIPRMLVVDPMKRITIREIREHMWFKIQLPRYLAVPPPDTAQQVKKLDEETLNDVIKMGFDKNQLIESLHNRLQNEATVAYYLLMDNRLRTTSGYLGSEFQESMDPSFSQVHAETPTSATEHRQHVFTESPGSGLRQHFASERKWALGLQLDVSELRPEKHGNNNPVRRSEPLAGRQLWCHRAEGGHARGGVDLGVRLLLNVSGGSYHCFF

SEQ ID NO: 194111 - protein, 527 aa, Zea Mays
MEGAGRDANPLGGYRIGKTLGIGSFGKVKIAEHILTGHKVAIKILNRRKIRSMEMEEKVKREIKILRLFMHPHIIRLYEVIDTPADIYVVMEYVKSGELFDYIVEKGRLHEEEARRFFQQIISGVEYCHRNMVAHRDLKPENLLLDSKCNIKIADFGLSNVMRDGHFLKTSCGSPNYAAPEVISGKLYAGPEVDVWSCGVILYALLCGTLPFDDENIPNLFKKIKGGIYTLPSHLSPSARDLIPRMLVVDPMKRITIREIREHMWFKIQLPRYLAVPPPDTAQQVKKLDEETLNDVIKMGFDKNQLIESLHNRLQNEATVAYYLLMDNRLRTTSGYLGSEFQESMDPSFSQVHAETPTSATEHRQHVFTESPGSGLRQHFASERKWALGLQSRAHPREIISEVLKALQELNVYWKKIGHYNMKCRWSPGCLESMMHNCDGFSAESAIIETDDLIAKSTRIVKFEIQLDVSELRPEKHGNNNPVRRSEPLAGRQLWCHRAEGGHARGGVDLGVRLLLNVSGGSYHCFF

SEQ ID NO: 194112 - protein, 327 aa, Zea Mays
MEGAGRDANPLGGYRIGKTLGIGSFGKVKIAEHILTGHKVAIKILNRRKIRSMEMEEKVKREIKILRLFMHPHIIRLYEVIDTPADIYVVMEYVKSGELFDYIVEKGRLHEEEARRFFQQIISGVEYCHRNMVAHRDLKPENLLLDSKCNIKIADFGLSNVMRDGHFLKTSCGSPNYAAPEVISGKLYAGPEVDVWSCGVILYALLCGTLPFDDENIPNLFKKIKGGIYTLPSHLSPSARDLIPRMLVVDPMKRITIREIREHMWFKIQLPRYLAVPPPDTAQQVKKLDEETLNDVIKMGFDKNQLIESLHNRLQNEASYNQWLSWI

SEQ ID NO: 194113 - protein, 650 aa, Zea Mays
MADKEKLESEEEYESDLDDAPLSALRRRDAASDDEDEDEDGGMPLRRRKAGSDADSDGQGAAEVYDEDGAYEESEEYEEYEYGGFKAGGGGVRGVAVEAVAGAGHEEGEAGDGEAEKAGEAAPGGEEEDKKGNEPYSVPTTGAFYMHDDRFQEGRGRGRGRQRRMVNSRRLWSPKDEQAWVHDRFDEMDLHDFHGDNPKRKQGGVFRGRGGGQGGRTRGISRGNFRGSRTRTYYHDGSKNYSYVPKESHAYRDNTKNAHHSSHINGKNRVPKPSRDHYDGAKSYDIVPNESHIYHGDAKSQKNAPRVVRGRGSKRYQPRLKSTSDVSSVQNTKSQSLEGTSSNANLVKDEAQGPNSRLEQVLPIKQTVASNLNSASPPFYPARSSSQEFAVGQGENTQELSTNLVRGKAFVPSGHVEAAINGMNRPALLPPASSSNGPFPVATNQVNRDYGHPAHPIVQQNPVQPPTRSAPRMPAQMFGATFSNVKGQPDDQGEERASFLYGGARVLGATSAMGITLGDQNFHGTPALLPVMQFGGQRPVGRGVPSIGMALPGFVSQQQLGINNSEMTWLPILTGASGALGAPYGSPYIAVDGSYYSRPPEQPSSSVSNRESSANNASSLKSQEITEVAGDARTQHQNKPRRYSEMNFGQ

SEQ ID NO: 194114 - protein, 649 aa, Zea Mays
MADKEKLESEEEYESDLDDAPLSALRRRDAASDDEDEDEDGGMPLRRRKAGSDADSDGQGAAEVYDEDGAYEESEEYEEYEYGGFKAGGGGVRGVAVEAVAGAGHEEGEAGDGEAEKAGEAAPGGEEEDKKGNEPYSVPTTGAFYMHDDRFQEGRGRGRGRQRMVNSRRLWSPKDEQAWVHDRFDEMDLHDFHGDNPKRKQGGVFRGRGGGQGGRTRGISRGNFRGSRTRTYYHDGSKNYSYVPKESHAYRDNTKNAHHSSHINGKNRVPKPSRDHYDGAKSYDIVPNESHIYHGDAKSQKNAPRVVRGRGSKRYQPRLKSTSDVSSVQNTKSQSLEGTSSNANLVKDEAQGPNSRLEQVLPIKQTVASNLNSASPPFYPARSSSQEFAVGQGENTQELSTNLVRGKAFVPSGHVEAAINGMNRPALLPPASSSNGPFPVATNQVNRDYGHPAHPIVQQNPVQPPTRSAPRMPAQMFGATFSNVKGQPDDQGEERASFLYGGARVLGATSAMGITLGDQNFHGTPALLPVMQFGGQRPVGRGVPSIGMALPGFVSQQQLGINNSEMTWLPILTGASGALGAPYGSPYIAVDGSYYSRPPEQPSSSVSNRESSANNASSLKSQEITEVAGDARTQHQNKPRRYSEMNFGQ

SEQ ID NO: 194115 - protein, 588 aa, Zea Mays
MADKEKLESEEEYESDLDDAPLSALRRRDAASDDEDEDEDGGMPLRRRKAGSDADSDGQGAAEVYDEDGAYEESEEYEEYEYGGFKAGGGGVRGVAVEAVAGAGHEEGEAGDGEAEKAGEAAPGGEEEDKKGNEPYSVPTTGAFYMHDDRFQEGRGRGRGRQRMVNSRRLWSPKDEQAWVHDRFDEMDLHDFHGDNPKRKQGGVFRGRGGGQGGRTRGISRGNFRGSRTRTYYHDGSKNYSYVPKESHAYRDNTKNAHHSSHINGKNRVPKPSRDHYDGAKSYDIVPNESHIYHGDAKSQKNAPRVVRGRGSKRYQPRLKSTSDVSSVQNTKSQSLEGTSSNANLVKDEAQGPNSRLEQVLPIKQTVASNLNSASPPFYPARSSSQEFAVGQGENTQELSTNLVRGKAFVPSGHVEAAINGMNRPALLPPASSSNGPFPVATNQVNRDYGHPAHPIVQQNPVQPPTRSAPRMPAQMFGATFSNGSKISPAQPTSTILDDDAEISSPSGSNKYDSRLTVKGQPDDQGEERASFLYGGARVLGATSAMGITLGDQNFHGTPALLPGLYHGSVKHEFNNMLCEAYQRNKLL

SEQ ID NO: 194116 - protein, 83 aa, Zea Mays
MAIINNSIAQLLKLLHGNKLIYSFENWQINYILRNLRRRPNVGPKYLRTLTCIQRGRGHAQHTMHILASNSTHRILPSTCMHA

SEQ ID NO: 194117 - protein, 525 aa, Zea Mays
MWSNNAMGLWSKVKGSGTIFKNPNSIGQAIAKNLPSSDIIESASVAGPGFVNITLSNRWVAQRIQDMLVNGIKTWAPVLPVNRTVVDFSSPNIAKEMHVGHLRSTIIGDTLARMFEFSNVVVLRRNHVGDWGTQFGMLIEYLFEKFPNWQEIGCQAIGDLQIFYKASKHRFDSDPDFKARAQQGVVRLQGGEDKYREAWKKICDISRSEFDLVYKRLNVVLEEKGESFYNPYIPQVLEELSNKGLIKESEGARVIFIQGHQIPLIVVKSDGGFNYASTDLTALWYRLNVEQAEWIIYVTDVGQQQHFDMVFSAAKMAGWLPDPSEKKFPKTSHVGFGLVLGSDGKRFRTRSTEVVRLVELLDEAKSRSKSELLQRLTENGKIVDWTDEELEQTSEAVGYGAVKEILLCTFSMHMLVFVPLFGKSNKNVEELKMSGAISLDHPDERVLGLYLIRFAEVVEEACTNLLPNVVCEYLYNLSEMFTKFYTNCQVVGSPEETSRLLLCQATAVVMRQCFNLLGITPVYKL

SEQ ID NO: 194118 - protein, 631 aa, Zea Mays
MQALAAAATAVAAPTPARLRLPLLFRAPRSGHCRPASSSRLLRISCSATTMGDETSTSVAPQEQESTVRAGSVKQQLSRLVLSSLQTTLPDVEVEPMVEVSAKFADYQCNNAMGLWSKVKGSGTIFKNPNSIGQAIAKNLPSSDIIESASVAGPGFVNITLSNRWVAQRIQDMLVNGIKTWAPVLPVNRTVVDFSSPNIAKEMHVGHLRSTIIGDTLARMFEFSNVVVLRRNHVGDWGTQFGMLIEYLFEKFPNWQEIGCQAIGDLQIFYKASKHRFDSDPDFKARAQQGVVRLQGGEDKYREAWKKICDISRSEFDLVYKRLNVVLEEKGESFYNPYIPQVLEELSNKGLIKESEGARVIFIQGHQIPLIVVKSDGGFNYASTDLTALWYRLNVEQAEWIIYVTDVGQQQHFDMVFSAAKMAGWLPDPSEKKFPKTSHVGFGLVLGSDGKRFRTRSTEVVRLVELLDEAKSRSKSELLQRLTENGKIVDWTDEELEQTSEAVGYGAVKEILLCTFSMHMLVFVPLFGKSNKNVEELKMSGAISLDHPDERVLGLYLIRFAEVVEEACTNLLPNVVCEYLYNLSEMFTKFYTNCQVVGSPEETSRLLLCQATAVVMRQCFNLLGITPVYKL

SEQ ID NO: 194119 - protein, 469 aa, Zea Mays
MGDETSTSVAPQEQESTVRAGSVKQQLSRLVLSSLQTTLPDVEVEPMVEVSAKFADYQCNNAMGLWSKVKGSGTIFKNPNSIGQAIAKNLPSSDIIESASVAGPGFVNITLSNRWVAQRIQDMLVNGIKTWAPVLPVNRTVVDFSSPNIAKEMHVGHLRSTIIGDTLARMFEFSNVVVLRRNHVGDWGTQFGMLIEYLFEKFPNWQEIGCQAIGDLQIFYKASKHRFDSDPDFKARAQQGVVRLQGGEDKYREAWKKICDISRSEFDLVYKRLNVVLEEKGESFYNPYIPQVLEELSNKGLIKESEGARVIFIQGHQIPLIVVKSDGGFNYASTDLTALWYRLNVEQAEWIIYVTDVGQQQHFDMVFSAAKMAGWLPDPSEKKFPKTSHVGFGLVLGSDGKRFRTRSTEVVRLVELLDEAKSRSKSELLQRLTENGKIVDWTDEELEQTSEAVGYGAVKYADSKNNRAH

SEQ ID NO: 194120 - protein, 519 aa, Zea Mays
MQALAAAATAVAAPTPARLRLPLLFRAPRSGHCRPASSSRLLRISCSATTMGDETSTSVAPQEQESTVRAGSVKQQLSRLVLSSLQTTLPDVEVEPMVEVSAKFADYQCNNAMGLWSKVKGSGTIFKNPNSIGQAIAKNLPSSDIIESASVAGPGFVNITLSNRWVAQRIQDMLVNGIKTWAPVLPVNRTVVDFSSPNIAKEMHVGHLRSTIIGDTLARMFEFSNVVVLRRNHVGDWGTQFGMLIEYLFEKFPNWQEIGCQAIGDLQIFYKASKHRFDSDPDFKARAQQGVVRLQGGEDKYREAWKKICDISRSEFDLVYKRLNVVLEEKGESFYNPYIPQVLEELSNKGLIKESEGARVIFIQGHQIPLIVVKSDGGFNYASTDLTALWYRLNVEQAEWIIYVTDVGQQQHFDMVFSAAKMAGWLPDPSEKKFPKTSHVGFGLVLGSDGKRFRTRSTEVVRLVELLDEAKSRSKSELLQRLTENGKIVDWTDEELEQTSEAVGYGAVKYADSKNNRAH

SEQ ID NO: 194121 - protein, 581 aa, Zea Mays
MGDETSTSVAPQEQESTVRAGSVKQQLSRLVLSSLQTTLPDVEVEPMVEVSAKFADYQCNNAMGLWSKVKGSGTIFKNPNSIGQAIAKNLPSSDIIESASVAGPGFVNITLSNRWVAQRIQDMLVNGIKTWAPVLPVNRTVVDFSSPNIAKEMHVGHLRSTIIGDTLARMFEFSNVVVLRRNHVGDWGTQFGMLIEYLFEKFPNWQEIGCQAIGDLQIFYKASKHRFDSDPDFKARAQQGVVRLQGGEDKYREAWKKICDISRSEFDLVYKRLNVVLEEKGESFYNPYIPQVLEELSNKGLIKESEGARVIFIQGHQIPLIVVKSDGGFNYASTDLTALWYRLNVEQAEWIIYVTDVGQQQHFDMVFSAAKMAGWLPDPSEKKFPKTSHVGFGLVLGSDGKRFRTRSTEVVRLVELLDEAKSRSKSELLQRLTENGKIVDWTDEELEQTSEAVGYGAVKEILLCTFSMHMLVFVPLFGKSNKNVEELKMSGAISLDHPDERVLGLYLIRFAEVVEEACTNLLPNVVCEYLYNLSEMFTKFYTNCQVVGSPEETSRLLLCQATAVVMRQCFNLLGITPVYKL

SEQ ID NO: 194122 - protein, 350 aa, Zea Mays
MWSNNAMGLWSKVKGSGTIFKNPNSIGQAIAKNLPSSDIIESASVAGPGFVNITLSNRWVAQRIQDMLVNGIKTWAPVLPVNRTVVDFSSPNIAKEMHVGHLRSTIIGDTLARMFEFSNVVVLRRNHVGDWGTQFGMLIEYLFEKFPNWQEIGCQAIGDLQIFYKASKHRFDSDPDFKARAQQGVVRLQGGEDKYREAWKKICDISRSEFDLVYKRLNVVLEEKGESFYNPYIPQVLEELSNKGLIKESEGARVIFIQGHQIPLIVVKSDGGFNYASTDLTALWQSGSYMLQMLVSSSTLTWFSVLQRWPVGSQIQVKRSFRKQAMLDLVLFLVQMASGSEPAVLRLFDW

SEQ ID NO: 194123 - protein, 256 aa, Zea Mays
MLKHEGKLFSCTLDGCDMRFSMKADMQRHVKEIHDSKNPHQFVCKEDGCNKVFRYSSKLKKHEESHVKLDYVEVVCCEPGCMKMFRNVEYLRAHNQSCHQYVQCEICGEKHLKKNIKRHLQSHDKVPSDGRMKCTFDGCEHFFSNKSNLTKHVKACHDQLKPFKCGIVGCGKAFTYKHVRDNHETSGAHVYMEGDFEELDEQLRARPRGGRKRKALTVETLTRKRVTISGEASSLDDGVEYLRWLLSGGDDSIDCQ

SEQ ID NO: 194124 - protein, 242 aa, Zea Mays
MLFPDADLIHVLSSVPRDLNFIDHTGDVGSKEPEKVQQIIVDAGIYLSGRTNFFRGTQKRAAPEAFKFFTGSPWVILNRQFIEYCILAWENLPRILLMYFNNVIQPQEGYFQTVICNSLDFRNFTVNNDLRFMVQDDSAQKKSLFTSREHYGHMVDSGAPFARPFQENDPLLDQIDGNILKRWSHGPVPGAWCTGRKRWFSDPCSQWGDVNVLRPGPQAVMLHQYVNRTLEEAKSSSNSCRR

SEQ ID NO: 194125 - protein, 258 aa, Zea Mays
MDLIEDHGLAVVASSCNKLQELRVFPSAPFEAAEQVSLTERGLVDVSASCPMLESVLYFCRRMTNEALITIAKNRPNFTCFRLCIIEPHTPDYITHQPLDAGFSAIVESCKGLRRLSVSGLLTDSVFKSIGAHADRLEMLSIAFAGNSDLGLHYILSGCKSLKKLEIRDCPFGDKPLLANAAKLETMRSLWMSTCSMTLGACRQLARKMPRLSVEVMNDPRRGFPLDSLTDESPVETLYVYRTISGPRSDTPACVQIL

SEQ ID NO: 194126 - protein, 529 aa, Zea Mays
MASTAATVTFGGKGAALSPAAVYALSIGLAAPGIDPSAHKALSTRAPSPQETPAPLAAALPALAPAESRAAAAVLLNKLVLTASDSASALVTAATAVGLAGSLDLAAALPLGSRDEVAVAAASAPVAVGLAALVDCCAAPLARVADAVAALSCEAVRGDAAAFDVQASGDGLSSKDEADVAADIKVLVFGSKLVGAAGGAPAAATFAKVPALNGIFRQAVRALHAQVRIELNAPVKLGKKDAGQTGEGKEEALVVLATQLARAVQALCRLSVARARLCAERFADAELRDKLTAGISVDDLRGMLDKVLIDSDAVSVLKGVYNHLLKFRDFLSWEAAMAMAVIETDSSIEKPQSAVDNEAAGSSEKAQAGGDKAKGDKKSKKKKTLGKGTSAVLMLLRDHVTNGSTVASVNSVLVAEWAASLSLLFDPKCPGLVSLVEKVKEIVESNEVRRLPKIPKGTRDFGKEQMAIRERAFSIITSVFKMHGATALDTPVFELRETLMGKYGEDSKLIYDLADQHKRTEEIPDCKSI

SEQ ID NO: 194127 - protein, 255 aa, Zea Mays
MADPAAGGAMVPAAGGGSVWANGAPRFGDMVWAKVKSHPWWPGHIYSVSLTDDEEVHRGYRYGLVLVAFFGDKSYGWFEPSELVPFEEHFTEKAAQGGSTRSSFAGAVAEAVDEIQAARQRFVPRKALDYLLDAAVTQRDAAEKAARTVPGMEMAALFSAYRRAVFSPIDNTYAQAFGVDPELALAAEQKAAAERAQRGGTAISWLGPHVHGEGEGTALHIDPLWCSLAIGIYISMYTICQNRYVNQSIQSNWFG

SEQ ID NO: 194128 - protein, 123 aa, Zea Mays
MRCVNPGSATAAPSSCPAQNGAALIPVYRLACRLGAPSNRSTAERLYVMAEAAASNARARSSPDAMYGTTWCGRRSSRGMRDGARTSTARNTTRGARQAAAVAATTATHCRRRRLAGDGVSVD

SEQ ID NO: 194129 - protein, 523 aa, Zea Mays
MRGEAGNDGGGGDTQLLDGATPRLGSPSSDDDGTQSEAYDWALYDETQPLDGAETQFVDQVEEEGVAGDWTETQLESGDEDGGSGNEDGGDDSDQVKTQQQVEDGERGNDGGGGDDNAGNWTKTQLDEVCEVYGANNFVGDMVEAQLVEESEEEDDDKDGLTDDGEHDLGEWGKTQLVEDSDEDIGDDELSDGTVVLSDNESLSEDERGTKSGTDKRDAKLGMEGSIEGLNGGIKKHDDNNNSVDSDASTDEEGDTSSGHLQMKLPSVHVASVRTCGISEPRNSLSVNCMKQWKQKAWVNTIHPLPKIVDESTSCSTSVGWVDNDSHGYVQNHDQDGAKSRDKCSTAKKLFADTTVEDGENNSRCIAGLSYVGSQEPGDLSQANAFDVVDRLISINGGLSSQETTPNKLEIAKPCVSSKRGTLMLAEKVDLGRSSNGKAEIFKFVDSLEDEGGGDFFSKNKDILLLKPIGRGKPRSHFTGAKKSSPKLSRGENKTGEALNKRNSKLPGRLENYSFNIFKTIQK

SEQ ID NO: 194130 - protein, 618 aa, Zea Mays
MAVEAMDALVQCSPAKSLSSEHQSVLNRDMIAEKSRIAKSHSKNGSPQRASNIQEGVTTRSKKGKVTDFSAKPQKERLRGSKMQQSSESIVKVKHKQTKSVPEKSKVSKKFISENKYHETPVAHRTRHCGRNDPSAFIELSNKHLRRGKKMTGDNSTIGQVQNNHIATESGLSYFEKESTEQTCTNNDQDLQQPRYGSTQRTSVNNVRNLEARRVESTTVVTCRDSPSHPKRQRTPTKMIQSTAPAAASHEIPSELARPCKKRRIFIRSVSDLLKYAKREPSHGKSASMLSSIIEKSLAAYPVLNSSIRDDRKTSDVISSAQRLKESSHIENTSKSPKTNPQVLDSAMKTPSKVVNELSPTFSPVNPSKGSSRSLLKASVARELLKLDPENVLSNQQKKDSRRGKDKANASILFSQHLDDDVIKRQKKDRFCRTKNMLQAITMGKPVVTSMWLENCAQAGCFIDERKYIMRDEKKEKEIGFSMLISLASACKHPLLLGKRVFVTSNVKPSQVVMTSLVKSSSGQPLERVGRSIMEGKGVPPDLLVISCEEDYEACAPLLEKGASVFSVELLLNGIVIQKLEYERHRLFMDRVKQTRSSRWLKDTVQGRFVPVPKRPRA

SEQ ID NO: 194131 - protein, 549 aa, Zea Mays
MAVEAMDALVQCSPAKSLSSEHQSVLNRDMIAEKSRIAKSHSKNGSPQRASNIQEGVTTRSKKGKVTDFSAKPQKERLRGSKMQQSSESIVKVKHKQTKSVPEKSKVSKKFISENKYHETPVAHRTRHCGRNDPSAFIELSNKHLRRGKKMTGDNSTIGQVQNNHIATESGLSYFEKESTEQTCTNNDQDLQQPRYGSTQRTSVNNVRNLEARRVESTTVVTCRDSPSHPKRQRTPTKMIQSTAPAAASHEIPSELARPCKKRRIFIRSVSDLLKYAKREPSHGKSASMLSSIIEKSLAAYPVLNSSIRDDRKTSDVISSAQRLKESSHIENTSKSPKTNPQVLDSAMKTPSKVVNELSPTFSPVNPSKGSSRSLLKASVARELLKLDPENVLSNQQKKDSRRGKDKANASILFSQHLDDDVIKRQKKGKRVFVTSNVKPSQVVMTSLVKSSSGQPLERVGRSIMEGKGVPPDLLVISCEEDYEACAPLLEKGASVFSVELLLNGIVIQKLEYERHRLFMDRVKQTRSSRWLKDTVQGRFVPVPKRPRA

SEQ ID NO: 194132 - protein, 657 aa, Zea Mays
MWSLLRAASPLLRRSSGRLAARGEAVAAASASAPAPAGLLAVGAGAYSRWRRAMSTKGRSMRSKVEKRMARETGRTQRELRRAVKLRKKLMTEDEKLIYNLRRAKKKVALLLQKLKKYELPDLPAPRHDPELLTAEQLQAYKKIGFRNRNYVPVGVRGVFGGVVQNMHMHWKFHETVQVCCDNFPKEKIKEMAAMLTRLSGGIVINIHNTKTIIMFRGRNYRQPKNLIPFNTLTKRKALFKARFEQALESQKLNIKKIETQLRRKGINPEDPVAMASIQRVASTFFRAIDEQQGTPYIFRGDTQPSAGTSEIKEPRDEPSEDSDQEELDRFISEIESAAEKQWEEEEAAEKEESSRMRYWEREDVGDRRGFNRNNENSDYEDRGHGRYRIEHNNNRRTSDVRKWDDDSEFEASGEEWDSGDDRGNAPGFDSDRDSIDEHPRRFGSMRNEKSRSSWTQDFVPTRDVGEGKVFNRSYANSDVYDRGQGRHRIDNNSSKRASDARRWDDSEIEASGEEWDTGVDSDNDLEDATDGHPRQFKSMRNEKSRSRGRQNSIPGGFRGSNRITGNSADASDGAMFRCSNGDELGTEDEDLSVSDYRGEATNSRSPKVNFPNFHSGSEDSDENRKNDGKVSINGCQVQVLSLVVLLMYCPMEISRS

SEQ ID NO: 194133 - protein, 735 aa, Zea Mays
MDLVAQRYLVTVSGNDGKRALSDAWALDTAQKPYRWQKLNPEGDRPSARMYATASTRSDGMLLLCGGRDASGMPLSDAYGLLMHTNGQWEWTLAPGVSPSPRYQHAAVFVGARLHVTGGVLRGGRAIEGEGAIAVLDTAAGVWLDRNGIVTSRTLKSSNEHDASSDLLRRCRHAAASVGSQIYIYGGLRGDILLDDFLVAENAPFQSEITSSMYNVDRVPRGETQNRNNNFHSDSPVHQSTNNRQEAASGFSADKKSIDMLIEASTAEAEAVSAVWRAAKEASAASSEDSLSEGIGSESPLSETSPMPEDFDDGGSLEPDVKLHSRAVVVAKEAVGDLGCLVRQLSLDQFENESRRMHPSNNDQSYPGRRTLNRQRSPQGLHKKVISFLLKPRNWRAPADRTFFLDSYEVGELCYAAEQIFMQEPTVLQLKAPIKVFGDLHGQFGDLMRLFDEYGFPSTAGDITYIDYLFLGDYVDRGQHSLETIALLLALKIEYPENVHLIRGNHEAADINALFGFRLECIERMGESDGIWAWTRFNQLFNYLPLAAMIEKKIICMHGGIGRSINTVEQIEKLERPITMDVGSIVLMDLLWSDPTENDSVEGLRPNARGPGLVTFGPDRVTEFCKRNKLQLIIRAHECVMDGFERFAHGQLITLFSATNYCGTANNAGAILVVGRGLVIVPKLIHPLPPPVNSPESSPERGDATWMQELNIQRPPTPTRGRPQAAGDRNSLAYI

SEQ ID NO: 194134 - protein, 476 aa, Zea Mays
MLIEASTAEAEAVSAVWRAAKEASAASSEDSLSEGIGSESPLSETSPMPEDFDDGGSLEPDVKLHSRAVVVAKEAVGDLGCLVRQLSLDQFENESRRMHPSNNDQSYPGRRTLNRQRSPQGLHKKVISFLLKPRNWRAPADRTFFLDSYEVGELCYAAEQIFMQEPTVLQLKAPIKVFGDLHGQFGDLMRLFDEYGFPSTAGDITYIDYLFLGDYVDRGQHSLETIALLLALKIEYPENVHLIRGNHEAADINALFGFRLECIERMGESDGIWAWTRFNQLFNYLPLAAMIEKKIICMHGGIGRSINTVEQIEKLERPITMDVGSIVLMDLLWSDPTENDSVEGLRPNARGPGLVTFGPDRVTEFCKRNKLQLIIRAHECVMDGFERFAHGQLITLFSATNYCGTANNAGAILVVGRGLVIVPKLIHPLPPPVNSPESSPERGDATWMQELNIQRPPTPTRGRPQAAGDRNSLAYI

SEQ ID NO: 194135 - protein, 957 aa, Zea Mays
MNPLPPPPGPRRVPTLLPVTAAVVSPVLFTNSEFHCAALLLPPSLSLRVRSLGSHAAAGCGGGGVRGLGFSVWRSLGVCEEEEEEEEEEEERMGTAGKGAWVVPAPAYREVEGWEGAGDDAPGFRCAHSLTAVAPTKGHGPRLILFGGATAIETGASSGLPGIRLAGVTNSVHSYDVETRRWTRLHPAGEPPSPRAAHAAAAVGTMVVFQGGIGPAGHSTDDLYVLDLTNDKFKWHRVVVQGAGPGPRYGHCMDLVAQRYLVTVSGNDGKRALSDAWALDTAQKPYRWQKLNPEGDRPSARMYATASTRSDGMLLLCGGRDASGMPLSDAYGLLMHTNGQWEWTLAPGVSPSPRYQHAAVFVGARLHVTGGVLRGGRAIEGEGAIAVLDTAAGVWLDRNGIVTSRTLKSSNEHDASSDLLRRCRHAAASVGSQIYIYGGLRGDILLDDFLVAENAPFQSEITSSMYNVDRVPRGETQNRNNNFHSDSPVHQSTNNRQEAASGFSADKKSIDMLIEASTAEAEAVSAVWRAAKEASAASSEDSLSEGIGSESPLSETSPMPEDFDDGGSLEPDVKLHSRAVVVAKEAVGDLGCLVRQLSLDQFENESRRMHPSNNDQSYPGRRTLNRQRSPQVGELCYAAEQIFMQEPTVLQLKAPIKVFGDLHGQFGDLMRLFDEYGFPSTAGDITYIDYLFLGDYVDRGQHSLETIALLLALKIEYPENVHLIRGNHEAADINALFGFRLECIERMGESDGIWAWTRFNQLFNYLPLAAMIEKKIICMHGGIGRSINTVEQIEKLERPITMDVGSIVLMDLLWSDPTENDSVEGLRPNARGPGLVTFGPDRVTEFCKRNKLQLIIRAHECVMDGFERFAHGQLITLFSATNYCGTANNAGAILVVGRGLVIVPKLIHPLPPPVNSPESSPERGDATWMQELNIQRPPTPTRGRPQAAGDRNSLAYI

SEQ ID NO: 194136 - protein, 972 aa, Zea Mays
MNPLPPPPGPRRVPTLLPVTAAVVSPVLFTNSEFHCAALLLPPSLSLRVRSLGSHAAAGCGGGGVRGLGFSVWRSLGVCEEEEEEEEEEEERMGTAGKGAWVVPAPAYREVEGWEGAGDDAPGFRCAHSLTAVAPTKGHGPRLILFGGATAIETGASSGLPGIRLAGVTNSVHSYDVETRRWTRLHPAGEPPSPRAAHAAAAVGTMVVFQGGIGPAGHSTDDLYVLDLTNDKFKWHRVVVQGAGPGPRYGHCMDLVAQRYLVTVSGNDGKRALSDAWALDTAQKPYRWQKLNPEGDRPSARMYATASTRSDGMLLLCGGRDASGMPLSDAYGLLMHTNGQWEWTLAPGVSPSPRYQHAAVFVGARLHVTGGVLRGGRAIEGEGAIAVWLDRNGIVTSRTLKSSNEHDASSDLLRRCRHAAASVGSQIYIYGGLRGDILLDDFLVAENAPFQSEITSSMYNVDRVPRGETQNRNNNFHSDSPVHQSTNNSADKKSIDMLIEASTAEAEAVSAVWRAAKEASAASSEDSLSEGIGSESPLSETSPMPEDFDDGGSLEPDVKLHSRAVVVAKEAVGDLGCLVRQLSLDQFENESRRMHPSNNDQSYPGRRTLNRQRSPQGLHKKVISFLLKPRNWRAPADRTFFLDSYEVGELCYAAEQIFMQEPTVLQLKAPIKVFGDLHGQFGDLMRLFDEYGFPSTAGDITYIDYLFLGDYVDRGQHSLETIALLLALKIEYPENVHLIRGNHEAADINALFGFRLECIERMGESDGIWAWTRFNQLFNYLPLAAMIEKKIICMHGGIGRSINTVEQIEKLERPITMDVGSIVLMDLLWSDPTENDSVEGLRPNARGPGLVTFGPDRVTEFCKRNKLQLIIRAHECVMDGFERFAHGQLITLFSATNYCGTANNAGAILVVGRGLVIVPKLIHPLPPPVNSPESSPERGDATWMQELNIQRPPTPTRGRPQAAGDRNSLAYI

SEQ ID NO: 194137 - protein, 358 aa, Zea Mays
MWESVIEVLEIVHQDERNPSGAGGFVGKMECFSFVFMMKLMLQILRITNELSLLLQRKDQNVVQAMSLVVDVRTCLINLRNDGWEPLLEEATTFCLANDIPIPNMSDVVPRFGRSRKGGRNNITTEHFYRVDTFYVVIDSITTEFDHRFNELSQELLGCFSCLDPRDSFSKFDVDKLARLADIYSDDFSFDDCKTIKDQLRTFIIHVRRIEEFKACCDIASLSKTMVQLERHIVFPLVYRLIELALLLPVATTTVERAFSAMKIIKTELRNKMSDGWLNDLMVCYIEREIFKGLDLQKIKKAFQNKKTRQMQCLDLLELDSTKGIFLFHLFNNFYFNLPFVTYLFLFSRFYSLYGSWL

SEQ ID NO: 194138 - protein, 106 aa, Zea Mays
MEHILSLTTLRLHILTNLHGTVTHSLGHFFLVRKEKAWSIITVRVVGGGKKKAMSVMFVFQDREHLSFVYRRPAASNSNQKWLLLRSNTNRSTSRALDVCQESSFP

SEQ ID NO: 194139 - protein, 166 aa, Zea Mays
MIQEVYHESGVRGFWKGLIPTLIMVCNPSIQFMIYETLAKRLQSKRSGKQLPKRHLTAMEVFLLGALAKLGATVVTYPLLVVKSRLQAKQEIGSNVMSRYTGTIDAIIKMVRYEGLHGFYKGMGTKIVQSVFAASVLFMVKEELVKLAVLLVASSRTMLITTSKKQ

SEQ ID NO: 194140 - protein, 136 aa, Zea Mays
MKSWNWQHDRIFQGKKGKRSAAKLKQSLRYTRCEQFLSKGQGLISFAALDKLEADLSKFDDGPFFLGQFSLADVAYITILERVQIYYSHLRNYDIAEGRPNLQEFIEEMNKIEAYAQTKNDPLFLLDLAKNHLKIA

SEQ ID NO: 194141 - protein, 187 aa, Zea Mays
MQLMTSHYQDSGDPSLPCVNSRLTRSGKRSAAKLKQSLRYTRCEQFLSKGQGLISYLSSPWHCSPGQPPSRSCARRRAWEETTITWTLFSKWISIFVAALDKLEADLSKFDDGPFFLGQFSLADVAYITILERVQIYYSHLRNYDIAEGRPNLQEFIEEMNKIEAYAQTKNDPLFLLDLAKNHLKIA

SEQ ID NO: 194142 - protein, 204 aa, Zea Mays
MKSWNWQHDRIFQGKKGKRSAAKLKQSLRYTRCEQFLSKGQGLISYLSSPWHCSPGQPPSRSCARRRAWEETTITWTLFSKWISIFASSAGARLINQLDSILAAVPWTLAVRRVAALDKLEADLSKFDDGPFFLGQFSLADVAYITILERVQIYYSHLRNYDIAEGRPNLQEFIEEMNKIEAYAQTKNDPLFLLDLAKNHLKIA

SEQ ID NO: 194143 - protein, 142 aa, Zea Mays
MQLMTSHYQDSGDPSLPCVNSRLTRSGKRSAAKLKQSLRYTRCEQFLSKGQVAALDKLEADLSKFDDGPFFLGQFSLADVAYITILERVQIYYSHLRNYDIAEGRPNLQEFIEEMNKIEAYAQTKNDPLFLLDLAKNHLKIA

SEQ ID NO: 194144 - protein, 350 aa, Zea Mays
MGQRAGTNDMSVKVELEAMTPGRRANVQGDLAKPPFFLYGNVVEVPKDTWHQLKQFLYNVEPEFVNSQSFSALTRREGYIHNLPVEKRSVVVPKSPMTIEEALPFTRQWWPSWDTRKHISVITTEAAGIEQTCERLGGMVRESRGVLSQARQMQIIHQCRVSNLIWVGRDRLGPLEPRQVEKILGYPYNHTNLFELNQPDRLAAMKYAFQTDTLSYLLSVLKGKYQDGIRVLSIYSGIGGAEVALHRLGIPLKCVISVEESEVNRKILRRWWLKTEQTGVLRQHAGIWKLKTHVIEDLVKEFGGFDLIIGGNYTSCKGGTTVNTTMGMDSNRFYEYNRVVKRVRTAVGLS

SEQ ID NO: 194145 - protein, 399 aa, Zea Mays
MDISASASVASGNKFCKGGACDFSDSSNSSKDAKERSTSMRKLIIAVILCIIFMTVEVVGGIKANSLAILTDAAHLLSDVAAFAISLFSLWAAGWEATPQQSYGFFRIEILGALVSIQLIWLLAGILVYEAIVRLINESGDVQGSLMFAVSAFGLFVNIIMAVLLGHDHGHGHGHSHGHPHDHGHGDSDDGHSHHEEPEQGHVHHHEHSHGSSITVTTHHHHHSGTGQHHDAEEPLIKHEADCEGTQSAAKKPRRNINVHSAYLHVLGDSIQSIGVMIGGAIIWYKPEWKIIDLICTLIFSVVVLFTTIRMLRNILEVLMESTPREIDATRLERGLCEMEGVVAVHELHIWAITVGKVLLACHVTVAREADADEILDKVIGYIKTEYNISHVTIQVERE

SEQ ID NO: 194146 - protein, 362 aa, Zea Mays
MVTYAFTVPRAPAASALLLRPWFATLVASTAVDRLSCVSLGVIAERDFVVQLAGEGRPIALARANAALSRVDLLCETAGASIFAVLLSRNHPLTCVRLSCAVSLCSLPLLFFLGGAMNRLADGILDRSASAGPAPLERPGRHGSAAVGKAWETIRHGWTEYLRQPVLPASLAYVLVCFNVALAPGALMTTFLIHLGVSASVLGAFGGSSAVVGILATFVTPYLVKELGILKAGAAGLVAQSALLGAAVVVFVTGPVSRRGALFAFLGFIVASRLGHMAYSVIGLQVVQTGNPMGKAKLIGATEIAVASLAELAMMAVAVVAGDAAHFGCLAALSAASVAAAACLFCAWLANPTDDLRRLFPC

SEQ ID NO: 194147 - protein, 328 aa, Zea Mays
MAPSVSKMLSTPPYHAYYTWRRRLLPQETAASPNPSPASRRIAPPLRCCRCACSRSPARRFVPICASASDRAGATTAALVEAEEEAELDGPPMVQLSSDILRTELSLLKADAPPAGGDSSLGITALEDQDSEDGRHSGGRETAAYPAAMNGMQRSVVRGLPRWDSGNVTEQLWNFTWPAAIATLHPSLLPVAVLGFFSKLVVFAVGPLVGDLVSSLPRIPAYRSLTVIQTAAHLVSAAMVTYAFTVPRAPAASALLLRPWFATLVASTAVDRLSCVSLGVIAERDFVVQGKAGRSRWRGRTRRSAGSISSARRRERPSSPCCSPGTTR

SEQ ID NO: 194148 - protein, 320 aa, Zea Mays
MGVDYYKVLGVGRGATDDELKKAYRRLAMKYHPDKNPTPQADTLFKQVLSDPQKRAIYDQYGEEGLKAGAPPPAASTHGAGAGVHRFRFNTRSAEEIFSEIFGGGFAGAGPRTPGGGVPSGFPMFGGAAGAGEASSAASQRKAPPIERPLACTLEDLYKGATKKMKISRDVLDATGRPTNREEILTIDIKPGWKKGTKITFPEKGNEARNVVPSDLVFIVEERAHPRFRRDGNDLIYTHKISLVEALTGCTVQVTTLDGRTLTVPVKSVVSPTYEEVVPGEGMPITREPSRKGSLRIKFQIKFPTSLTGDQKAAIQQLLS

SEQ ID NO: 194149 - protein, 93 aa, Zea Mays
MVQRADHLLCLSLGTIAKFFPKPTASRKSDTITRKRQGGNLLIDLFRHCDNHLGEKQVNNPFFHKTPSGSARQPLQLTTDVTKMMQKHQLETP

SEQ ID NO: 194150 - protein, 78 aa, Zea Mays
MLRTTSPVDITQAQNVLGNKGTEIAKVAHRRTDAEAGVEALDAVQQSVVVAASATSFPHQHGRVNGSGETSLLCLIRE

SEQ ID NO: 194151 - protein, 118 aa, Zea Mays
MFDASGEPTSLSFVFHKPHNPSTAATMSSSPSSVNRRPPGPLALGLESLGKKISIGWSPSRAASSPSRVAPTRPHWAMASFPVTPLSGSRGMRSTRSSVKRAQGSTFQGPCLSTWSPL

SEQ ID NO: 194152 - protein, 758 aa, Zea Mays
MTPRPRLLLLLLAIALPAASAASTLAVSASSTSPTVCGVAEPNGTVYCAPLQGPSSSNSASPVAPSAIAFAELSAGRGFVCGLQAGGAALFCWPSTPAPQWGQLRRLYNGPAPLADLAVGGGHVAAYDASGKVVLWWRGGGRFPARADGAFRSLVSGDGFSCAVQANASAAVRCWGPQGSAVQAGLANASAAPYLAAGGARACAVLASGAALCSGSDASAGALPRDLFGYGLAVGDSHACALRRPDHTAVCWTLGGPTTTLYEPALGISFAFLVAGGNFTCGVASSDFSVYCWSAGAVAAPVPLPRIRPGVCVSDDSSCRGCGFMSQSQKFCGGSGGICDALCDDSPPPPAPAPPSPPPSSSRRVSKAWIAFCVVGAVGGFAGLCSIVYCLVFGFCSNKRVHNSVQPNISAAAAGTGADNNGGGGGAAASGSPYGSPNGSRARGLFRRQLSRAMTRQRSGPSSFKDPAEEFTFAQLEAATKGFALEAKIGEGSFGTVYRGKLPDGREVAIKRGESGPRARRFQEKESAFRSELVFLSRLHHKHLVGLVGYCEEAEERLLVYEYMKNGALYDHLHPKASAAPSPVASSWKLRIKILLDASRGIEYLHSYAVPPIIHRDIKSSNILLDGGWTARVSDFGLSLTGSPEPSSEESRSQQLAVTTKAAGTVGYMDPEYYGLHHLTVKSDVYGFGVVMLESLTGRRAIFKEAEGGSPVSVVDYAVPSIMGGELGKVLDPRAPEQLLQRQPLRHVHGPVGSPGLS

SEQ ID NO: 194153 - protein, 52 aa, Zea Mays
MPFKNLLNLLGTRERGGMDRPFLFREEWKYSREKNKEKLLIVFFFLQQKLPS

SEQ ID NO: 194154 - protein, 226 aa, Zea Mays
MYPYRMSNVMIGYLNLATLLASLPIIGAGLWLARGSSSSSSTTCSSILQTPLLAVGFAALLVSLAGFVGACFHVAWALRLYLAAVALLVAFLLGLTAFGFAVTAGGGGAQVYGRPYREYRVTDYSAWLQKRMQDDRYWRPALACVVGSKACPKIQNWTPMDYLQHDLTPIQSGCCKPPTACQYSGGMPVGAQDEDCYRWNNAPDILCYRCDSCRAGVMEQVAMMGW

SEQ ID NO: 194155 - protein, 888 aa, Zea Mays
MAELASGAVSSLLGVIGNEARLLRGVRGDVQFIKEEMESMNSFLVHLARTSHTGGEHGVQVRTWMNQVRILANDCNNCIDKYVYRGNPDVHLRRSGLLRYLLWPPWFVRKMFAQHDAAGQLRVLKDRAREVGERRMRYDVKEGALTTEAAYAAGDEDDDQPDADGSALASHRRAVLFKHRALDDYFQGKLVEWTEQVMERGDVMHSAAVVAPEADQEVIALARRALAQGHRSVLVDIPQVHMDFEPLRPQEILYYILCQLQQDRASSPPQLGSLEGSPDTLVKQYLLYRSKREISHGKESLLGETEIQQDIQNVMGKLDEVKRGIQDEQLLLQLLEGIRDVKELEEKPISVLFELLVLQQQAARRDQARGKAMRKLAAWHAHILRITAESLKKYIEAEHLPQQEAEKKTAKKFDFYDARYGYVIHKVFATKASNSKRRHGHVKIQGMISKVPQDVATETEEKIDEIKKTVQEQMETGWIVRKIIENHFEDDKRPLVVILRIGDKIYESNWDENRYAFTRLEKHVAGVLTVTTTRSTQQAKESLRQQELIDSFRQGEPLDYSLAGLYHDIVLQFTSHLMSEDKNEEYSDPQIIRDILGECEQFEFCMKILAHSFYARPKRSNQELTKLRDSLQAVSPKSFEGVAAKMLKFSYNDLPKEYKSCLLYLAIFPPGRSIRRSTLVARWVVEGLINRDDWNAAVRQSDRCFEALIDRGLVDPAEISGTGKAKSCIVGNRVHGFITMIAKKQHIVETRLSQHLAQHFSIFSDVRLRASEKIRDFLQVLPKQYHFSRLKVLDLEGCKCVGTKNTSYLKDVCCNLLLLKYLNLRSTNVTQLPGEINRLHELEVLDIRHNNVHKTATRYLRLLKLKRLLAGCIDDPTLPSVELPPALA

SEQ ID NO: 194156 - protein, 639 aa, Zea Mays
MTKSSSGCNGLNMQNCIPVRVMTRPGSQLLGINGRDDGPLVTTCSREGINKISLSRVDARTFCFGVRIVRRRTVPQVLNLIPKEGEGESFEDALARVRRCLGGGGATDNADSDSDLEVVTESVTVNLRCPNSGSRMRIAGRFKPCVHMGCFDLETFVELNQRSRKWQCPICLKNYSLENLMIDPYFNRITSLLHNCSEDVNELDVKPDGSWRVKGDAATRDLSQWHMPDGTLCDSKEDTNPGVVSVNEFKREGTSDGHRTLKLGIKKTPNGLWQVSSKPDDKKPVVRNHIQNNTGYSIPNIVPMISSPTGSCRDGEDVSVNQEGGGIQFDISLNQEFDSFAHNFGQTYNTEDRQQEPQHNAADVIVLSDSDEENDPIVRLPAVYANTPTNGDSFPFVTDAAVSGYPEGYQEDAGVGTSGLGLLSNNTGDFEINNWQMHSYPQPEQGFQFFGTDTDVGNPFVGPHNSFSITPEDYSLDCNVGIEDPSAAHDVSICRNSNDVHGSLVDNPLALAGDDPSLQIFLPSQPSTVPLQEELSERANTPNGVHPDDWRISLTLAAGGGGNEEPTSVDGLKSQPKVPSKEAGVEPLLDAASALPSMNNDRCNGSNLNPRRIENIFSHPRQPRSVRPRLCLSLDSDSE

SEQ ID NO: 194157 - protein, 825 aa, Zea Mays
MSDLASSCKDKLAYFRIKELKDILNQLGLPKQGKKQDLVDRVLAILSDEQGQHHHGWGRKNALTREAVAKVVDDTYRKMQVCAPDLPSRSHSGSDFSHFRPKEEAPDFYHVDTKVRCLCNSTLLNDNMIKCEDGKCQVWQHITCVLIPDKPTEGAGPDIPPHFYCELCRLKRADPFWVTTGNPLLPVKFMSSGVGNDGASVPQIVEKTFQLSRADRETVQRQEYDLQVWCILINDKVQFRMQWPQYAELQVNGIPVRVMTRPGSQLLGINGRDDGPLVTTCSREGINKISLSRVDARTFCFGVRIVRRRTVPQVLNLIPKEGEGESFEDALARVRRCLGGGGATDNADSDSDLEVVTESVTVNLRCPNSGSRMRIAGRFKPCVHMGCFDLETFVELNQRSRKWQCPICLKNYSLENLMIDPYFNRITSLLHNCSEDVNELDVKPDGSWRVKGDAATRDLSQWHMPDGTLCDSKEDTNPGVVSVNEFKREGTSDGHRTLKLGIKKTPNGLWQVSSKPDDKKPVVRNHIQNNTGYSIPNIVPMISSPTGSCRDGEDVSVNQEGGGIQFDISLNQEFDSFAHNFGQTYNTEDRQQEPQHNAADVIVLSDSDEENDPIVRLPAVYANTPTNGDSFPFVTDAAVSGYPEGYQEDAGVGTSGLGLLSNNTGDFEINNWQMHSYPQPEQGFQFFGTDTDVGNPFVGPHNSFSITPEDYSLDCNVGIEDPSAAHDVSICRNSNDVHGSLVDNPLALAGDDPSLQIFLPSQPSTVPLQEELSERANTPNGVHPDDWRISLTLAAGGGGNEEPTSVDGLKSQPKVPSKELLLSQA

SEQ ID NO: 194158 - protein, 856 aa, Zea Mays
MSDLASSCKDKLAYFRIKELKDILNQLGLPKQGKKQDLVDRVLAILSDEQGQHHHGWGRKNALTREAVAKVVDDTYSRKMQVCAPDLPSRSHSGSDFSHFRPKEEAPDFYHVDTKVRCLCNSTLLNDNMIKCEDGKCQVWQHITCVLIPDKPTEGAGPDIPPHFYCELCRLKRADPFWVTTGNPLLPVKFMSSGVGNDGASVPQIVEKTFQLSRADRETVQRQEYDLQVWCILINDKVQFRMQWPQYAELQVNGIPVRVMTRPGSQLLGINGRDDGPLVTTCSREGINKISLSRVDARTFCFGVRIVRRRTVPQVLNLIPKEGEGESFEDALARVRRCLGGGGATDNADSDSDLEVVTESVTVNLRCPNSGSRMRIAGRFKPCVHMGCFDLETFVELNQRSRKWQCPICLKNYSLENLMIDPYFNRITSLLHNCSEDVNELDVKPDGSWRVKGDAATRDLSQWHMPDGTLCDSKEDTNPGVVSVNEFKREGTSDGHRTLKLGIKKTPNGLWQVSSKPDDKKPVVRNHIQNNTGYSIPNIVPMISSPTGSCRDGEDVSVNQEGGGIQFDISLNQEFDSFAHNFGQTYNTEDRQQEPQHNAADVIVLSDSDEENDPIVRLPAVYANTPTNGDSFPFVTDAAVSGYPEGYQEDAGVGTSGLGLLSNNTGDFEINNWQMHSYPQPEQGFQFFGTDTDVGNPFVGPHNSFSITPEDYSLDCNVGIEDPSAAHDVSICRNSNDVHGSLVDNPLALAGDDPSLQIFLPSQPSTVPLQEELSERANTPNGVHPDDWRISLTLAAGGGGNEEPTSVDGLKSQPKVPSKEAGVEPLLDAACQPFPGSSRLTFEGRHLSFCSPKHEQ

SEQ ID NO: 194159 - protein, 856 aa, Zea Mays
MSDLASSCKDKLAYFRIKELKDILNQLGLPKQGKKQDLVDRVLAILSDEQGQHHHGWGRKNALTREAVAKVVDDTYRKMQVCAPDLPSRSHSGSDFSHFRPKEEAPDFYHVDTKVRCLCNSTLLNDNMIKCEDGKCQVWQHITCVLIPDKPTEGAGPDIPPHFYCELCRLKRADPFWVTTGNPLLPVKFMSSGVGNDGASVPQIVEKTFQLSRADRETVQRQEYDLQVWCILINDKVQFRMQWPQYAELQVNGIPVRVMTRPGSQLLGINGRDDGPLVTTCSREGINKISLSRVDARTFCFGVRIVRRRTVPQVLNLIPKEGEGESFEDALARVRRCLGGGGATDNADSDSDLEVVTESVTVNLRCPNSGSRMRIAGRFKPCVHMGCFDLETFVELNQRSRKWQCPICLKNYSLENLMIDPYFNRITSLLHNCSEDVNELDVKPDGSWRVKGDAATRDLSQWHMPDGTLCDSKEDTNPGVVSVNEFKREGTSDGHRTLKLGIKKTPNGLWQVSSKPDDKKPVVRNHIQNNTGYSIPNIVPMISSPTGSCRDGEDVSVNQEGGGIQFDISLNQEFDSFAHNFGQTYNTEDRQQEPQHNAADVIVLSDSDEENDPIVRLPAVYANTPTNGDSFPFVTDAAVSGYPEGYQEDAGVGTSGLGLLSNNTGDFEINNWQMHSYPQPEQGFQFFGTDTDVGNPFVGPHNSFSITPEDYSLDCNVGIEDPSAAHDVSICRNSNDVHGSLVDNPLALAVHPDDWRISLTLAAGGGGNEEPTSVDGLKSQPKVPSKEAGVEPLLDAASALPSMNNDRCNGSNLNPRRIENIFSHPRQPRILIFIVEGYQVILVDTKRNTSVDALLH

SEQ ID NO: 194160 - protein, 888 aa, Zea Mays
MSDLASSCKDKLAYFRIKELKDILNQLGLPKQGKKQDLVDRVLAILSDEQGQHHHGWGRKNALTREAVAKVVDDTYRKMQVCAPDLPSRSHSGSDFSHFRPKEEAPDFYHVDTKVRCLCNSTLLNDNMIKCEDGKCQVWQHITCVLIPDKPTEGAGPDIPPHFYCELCRLKRADPFWVTTGNPLLPVKFMSSGVGNDGASVPQIVEKTFQLSRADRETVQRQEYDLQVWCILINDKVQFRMQWPQYAELQVNGIPVRVMTRPGSQLLGINGRDDGPLVTTCSREGINKISLSRVDARTFCFGVRIVRRRTVPQVLNLIPKEGEGESFEDALARVRRCLGGGGATDNADSDSDLEVVTESVTVNLRCPNSGSRMRIAGRFKPCVHMGCFDLETFVELNQRSRKWQCPICLKNYSLENLMIDPYFNRITSLLHNCSEDVNELDVKPDGSWRVKGDAATRDLSQWHMPDGTLCDSKEDTNPGVVSVNEFKREGTSDGHRTLKLGIKKTPNGLWQVSSKPDDKKPVVRNHIQNNTGYSIPNIVPMISSPTGSCRDGEDVSVNQEGGGIQFDISLNQEFDSFAHNFGQTYNTEDRQQEPQHNAADVIVLSDSDEENDPIVRLPAVYANTPTNGDSFPFVTDAAVSGYPEGYQEDAGVGTSGLGLLSNNTGDFEINNWQMHSYPQPEQGFQFFGTDTDVGNPFVGPHNSFSITPEDYSLDCNVGIEDPSAAHDVSICRNSNDVHGSLVDNPLALAGDDPSLQIFLPSQPSTVPLQEELSERANTPNGVHPDDWRISLTLAAGGGGNEEPTSVDGLKSQPKVPSKEAGVEPLLDAASALPSMNNDRCNGSNLNPRRIENIFSHPRQPRILIFIVEGYQVILVDTKRNTSVDALLH

SEQ ID NO: 194161 - protein, 314 aa, Zea Mays
MQTLSRVQSQISSRRAKMSEENQALQRQLLLKQELENFRMGENWDDSTQSKEQIEASLISRQEAAIRRERALAYAFSHQWKSTSRSVNPMFVDPNNLQWGWSWLERWMAAKPWEGRNGADKESNIDRGSVKSMSLNLGEGEITKAFNRRDSKLEKPSPPTPRPARPTSRHSPLTPSARVAPIPARRKFVTPKNGLSQVDDDARSVLSVQSERPRRHSIATSTVRDDESLTSSPSLPSYMVPTESARAKSRLQGSATANGAETPEKGGSTGPAKKRLSFQGGTVSASPMRRHSGPPKVEIAPPQPEALVVNGGSK

SEQ ID NO: 194162 - protein, 362 aa, Zea Mays
MGTGAVAVAAPDRAKQRRAGGHLWKKALLHFSLCFVMGFFTGFAPSSSSSWKSAAATPQHHPPHRPGDRLAASRVAVDARATLSPPAEAADALSAGATVDLGDDEEDAAQRRLLIVVTTTRSGPGERRRRRGELLRLAHTLRLVRPPVVWVVVEPAADAPATAEVLRGTGVMYRHLAFKPEDNFTTADAEAHVQRNAALAHVEKHRLAGVLHFADAAGVYDVGFFEQIRQIEAFGTWPVATMSAGEKKVVVEGPLCSASKVVGWFSRDFNDGTTRSVTYNTEADLNPAGAAGTRAHTIDVSGFAFNSSILWDPERWGRPTSLPDTSQKFVQEVLLEDRAKLKGIPSDCSQIMVWQYSVPSSR

SEQ ID NO: 194163 - protein, 330 aa, Zea Mays
MSKRDMPRNDDRYGNTRLYVGRLSPRTRSRDLEYLFSKYGRIREVELKRDYAFIEFSDPRDADDAQYNLDGRDVDGSRIIVEFAKGVPRGSGGSRDYNGRGPPPGTGRCFNCGVDGHWARDCQAGDWKNKCYRCGERGHIERNCQNSPRNLRRERSYSRSPSPRRGRGRSRSYSRSRSYSRSRSPSGSPRGGRRDRDERRSRSLSYSRSASPRRSVSPVKEKERSRTPDGSRSPSPRDKVSPPPKDNGAHNGSDREDSPGGREMSKRSRSPSDGYRSPVGNGRSPSRSPSPKVNNGDDPSPKGNNGDDPSPKGNNGDDEHRGSPRGSQSP

SEQ ID NO: 194164 - protein, 185 aa, Zea Mays
MEWASMRTRSAPSPTSLTSGRLAVLSTTTRPPPGMSTSSGASRQLSATPSRSRGDGAGSGDEDARTMPEAGWLDTSAAASASGRSHARDTNSVEKPVKMPVAPVSWKLVNCPGLWPLEVSPRKSTVSGVGAAGPLCHHVTTPKGSASASPSFTATTFSFVASGRTMPQVPVPVVRFRCSRSIIGF

SEQ ID NO: 194165 - protein, 253 aa, Zea Mays
MADEAAPRLLPVAADRDKDDRRRWAARCGFAVLGIMSTLLVYGVLQEKIMRVPYGVEKEFFRYSLFLVFCNRITTSMVSAMVLLASKKSLDPVAPLHKYGVVSISNILTTTCQYEALKYVSFPVQTLAKCAKMIPVMIWGTIIMRKKYVAKDYFFSVVVTMGCALFILYPASMDVSPFNKGRESTIWGVSLMLGYLGADSPESSDSSCGFYVPSPRLLLRCCNPVQRCNSESVLHILHHSDIWRSHICYHNDN

SEQ ID NO: 194166 - protein, 351 aa, Zea Mays
MADEAAPRLLPVAADRDKDDRRRWAARCGFAVLGIMSTLLVYGVLQIMRVPYGVEKEFFRYSLFLVFCNRITTSMVSAMVLLASKKSLDPVAPLHKYGVVSISNILTTTCQYEALKYVSFPVQTLAKCAKMIPVMIWGTIIMRKKYVAKDYFFSVVVTMGCALFILYPASMDVSPFNKGRESTIWGVSLMLGYLGFDGFTSTFQDKLFKGYDMEIHNQIFYTTVCSCLLSLSGLILQNHLIPAVDFMFRHPDCFSDVVILSSVATASQFFISYTIRTFGALTFATIMTTRQLVSILLSCIWFVHPLSWMQWVGAAIVFVALYTKSFLRSKPQKLAGSSPPRGSSPNPVSNS

SEQ ID NO: 194167 - protein, 221 aa, Zea Mays
MIPVMIWGTIIMRKKYVAKDYFFSVVVTMGCALFILYPASMDVSPFNKGRESTIWGVSLMLGYLGFDGFTSTFQDKLFKGYDMEIHNQIFYTTVCSCLLSLSGLILQNHLIPAVDFMFRHPDCFSDVVILSSVATASQFFISYTIRTFGALTFATIMTTRQLVSILLSCIWFVHPLSWMQWVGAAIVFVALYTKSFLRSKPQKLAGSSPPRGSSPNPVSNS

SEQ ID NO: 194168 - protein, 324 aa, Zea Mays
MSMCPSSYSIPFFYRDVSQPEPGPLQFYLLKLMSPDRKGLLHDVTHILSDLELIIHRVKVSTTPDGRVVDLFFITDGMELLHRKERQEETCSALTATLGPSISCEVVPAEGFQQGFSSLPPEIAEELFRAELADTDSEVCSSPLSAELRKVRTTATVNFDNSLSPAHTLVQIVCADQKGLIYDILRTMKDCNIQIFYGRFRSDKKGSASKGSSGCREVDLFVKQVDGKKVTDPAKQDALRSRLRSETLHPLRVMVVGRGPDTELLVANPVEASGKGRPRVFYDATLALKALGICIFSAEIGRQAASERHWEVYRARKTLMGCYN

SEQ ID NO: 194169 - protein, 234 aa, Zea Mays
MLIFYFSFQAFLTGCSAGGLATYIHCDSFRALLPKDSRVKCLADGGFFLDVEDISGRRTMHSFYSDIGLRERFSHCNSNMDAGQCFFPREVVKHIVNPVFVLNPAYDAWQVQHALAPEASDPQHSWLDCRLDISKCSPKQLGILQGFRKELHDAISEAKQKRGWGFYINSCFVHCQSLNSLTWHSPTSPRVNNKSIAEAVGDWFFDRREVKEIDCEYPCNPTCHNLVFARPFKI

SEQ ID NO: 194170 - protein, 353 aa, Zea Mays
MPPPPPSAPASHHLRLWWRRRGRAGAVGATFAVALLATALLLALSSYASIVFPASSGRRGPALVGLTLVRRASEKGALCLDGSAPGYHLQGGSGSGSRSWLIHLEGGGWCRNLKSCASRQRSMLGSSRYMEGQVEFTGILSDDKSQNPDFYNWNKVKIRYCDGASFSGDVKDELQNGTRFFFRGQRIWEAVMNELVVKGLRNAKQAFLTGCSAGGLATYIHCDSFRALLPKDSRVKCLADGGFFLDVEDISGRRTMHSFYSDIVRLQGLRERFSHCNSNMDAGQCFFPREVVKHIVNPVFVLNPAYDAWYNMRWLQKHLTLNIHGWTADWILASAALNNLEFSKVSGKNCMTL

SEQ ID NO: 194171 - protein, 219 aa, Zea Mays
MPPPPPSAPASHHLRLWWRRRGRAGAVGATFAVALLATALLLALSSYASIVFPASSGRRGPALVGLTLVRRASEKGALCLDGSAPGYHLQGGSGSGSRSWLIHLEGGGWCRNLKSCASRQRSMLGSSRYMEGQVEFTGILSDDKSQNPDFYNWNKVKIRYCDGASFSGDVKDELQNGTRFFFRGQRIWEAVMNELVVKGLRNAKQRRHFWEEDNALFLQ

SEQ ID NO: 194172 - protein, 57 aa, Zea Mays
MKCVFSKDTDGSLLEHRRCIDSVHLEGDERSPFSTMKKLQQQHRLFVHLTALGCSST

SEQ ID NO: 194173 - protein, 136 aa, Zea Mays
MAAVVNARAATARCSAAGGPPRGAASSFPPSTIRTRKRTTAAAGGRGRLVAVSAVGDVAAEGNTYLIAGAVAVALVGTAFPILFSRKDVPGVRRRRVHPKGGRDAAGERREEGRGPDRLPQLQRPRQARTDRQVAK

SEQ ID NO: 194174 - protein, 61 aa, Zea Mays
MPFLFSASGDYTLVPGVRRRRVHPKGGRDAAGERREEGRGPDRLPQLQRPRQARTDRQVAK

SEQ ID NO: 194175 - protein, 51 aa, Zea Mays
MYCLNKAAGSRLLDHDIVIVGVSSLLVTPFSTKLSTCNITKEECSEGMHSR

SEQ ID NO: 194176 - protein, 75 aa, Zea Mays
MARDGRGRSRRLDYTCNKNKTKKSKYNHMSILFFVDQARAVVLLAELYHQVNIYHRPRKRTIPFKHCHFQCCYGI

SEQ ID NO: 194177 - protein, 60 aa, Zea Mays
MSASGLSLRITFLASSTLSPTTSGHDVLAPPPPPPHSVELMVSRRAGKSCLLHCWLLDIY

SEQ ID NO: 194178 - protein, 90 aa, Zea Mays
MSTWWVKSTRRRSLPGRSMSPRNNRTTTRTRLPSLSSRSSSFWFPWQSWAWLLPLGCTPSRSLLSFVAHLPLPPSRLYESNLSNKLARVL

SEQ ID NO: 194179 - protein, 1008 aa, Zea Mays
MQRFEALVEHLNLVRHENWWFGMIQDFFLKYFGATVAVVLIIEPFFSGNLRPDSSTLGRAEMLSNLRYHTSVIISLFQSLGILSISTRRLNILSGYADRIRELLDVSRELSGVRDRSLDHSSPGNYVSEANHIEFSDVKVVTPAGNVLVDDLTLRVETGSNLLITGPNGSGKSSLFRVLGGLWPLVSGHIVKPGVGSDLNKEIFYVPQRPYTAVGTLREQLIYPLTADQGIEPLTYDGMVDLLKNVDLEYLLERYPLDKEVNWGDELSLGEQQRLGMARLFYHKPKFAILDECTSAVTTDMEERFCKKVRAMGTSCITISHRPALVAFHDIVLSLDGEGGWNVQHRRDDSSFSTEESDFSSSETDRKSDALTVQRAFMSRAKSNASLGSKDHPYCTEVIATSPEVEIEHPARTPRIPHLRCHPRPLPLRVAAMLKILVPRLFDKQGGQLLAVAVLVFSRTWISDRIASLNGTTVKFVLEQDKDAFIRLIGVSILQSGANSFVAPSLRTLTAKLALGWRIRMTNHMLRYYLKRNAFYKVFNMSGKSIDADQRLTLDVDKLTTDLAGLVTGMVKPLVDILWFTWRMKLLSGRRGVAILYAYMLLGLGFLRAISPDFGHLSGQEQELEGTFRFMHSRLRTHAESIAFFGGGSREKAMVEAKFVKLINHSKILLRKQWLYGIVDDFVTKQLPHNVTWGLSLLYALEHKGDRALTSTQGELAHALRFLASVVSQSFIAFGDILELHKKFLELSGGINRIFELEEFTRFAQRNTVVSPNAISAASKETISFHEVDIVTPSQKLLARKLSCDVVQGKSLLLTGPNGSGKSSIFRVLRDLWPTFSGRVTKPSEGMFHVPQRPYTSLGTLRDQIIYPLSREEAKIKVLSLHRSGNNSSASMLLDDHLKTILENVRLVYLLEREGWDSTPNWEDVLSLGEQQRLGMARLFFHHPKFGILDECTNATSVDVEEHLYRLATSMGITVITSSQRPALIPFHALELKLIDGEGNWELCAIQQ

SEQ ID NO: 194180 - protein, 954 aa, Zea Mays
MPSLQLLQLTDRGRGLLASRRRTLAFVSGAVLAGGALAYARSSQSRRRRRRPEASRSGGAGALAANGDGFSQNGAGGGLAAADQRRSGLKSLHFLASILLKKMGPSGTRYLLCLVLTSVLRTAVGHRLARVQGFLFKAAFLRRIPTFTRLIIENLTLCFLQSTLYQTSKYLTGSLSLRFKKILTDIAHADYFENMVYYKISHVDHRISNPEQRIASDIPKFSSELGELVQDDLAAVAEGLIYTWRLCSYASPKYVFWIMAYVLVAGGVIKNFSPAFGKLKSTEQQLEGDYRQLHSRLRTHAESVAFYGGENREASHIMQRFEALVEHLNLVRHENWWFGMIQDFFLKYFGATVAVVLIIEPFFSGNLRPDSSTLGRAEMLSNLRYHTSVIISLFQSLGILSISTRRLNILSGYADRIRELLDVSRELSGVRDRSLDHSSPGNYVSEANHIEFSDVKVVTPAGNVLVDDLTLRVETGSNLLITGPNGSGKSSLFRVLGGLWPLVSGHIVKPGVGSDLNKEIFYVPQRPYTAVGTLREQLIYPLTADQGIEPLTYDGMVDLLKNVDLEYLLERYPLDKEVNWGDELSLGEQQRLGMARLFYHKPKFAILDECTSAVTTDMEERFCKKVRAMGTSCITISHRPALVAFHDIVLSLDGEGGWNVQHRRDDSSFSTEESDFSSSETDRKSDALTVQRAFMSRAKSNASLGSKDHPYCTEVIATSPEVEIEHPARTPRIPHLRCHPRPLPLRVAAMLKILVPRLFDKQGGQLLAVAVLVFSRTWISDRIASLNGTTVKFVLEQDKDAFIRLIGVSILQSGANSFVAPSLRTLTAKLALGWRIRMTNHMLRYYLKRNAFYKVFNMSGKSIDADQRLTLDVDKLTTDLAGLVTGMVKPLVDILWFTWRMKLLSGRRGVAILYAYMLLGLGFLRAISPDFGHLSGQEQELEGTFRWLRLNSSS

SEQ ID NO: 194181 - protein, 1208 aa, Zea Mays
MVLRTAVGHRLARVQGFLFKAAFLRRIPTFTRLIIENLTLCFLQSTLYQTSKYLTGSLSLRFKKILTDIAHADYFENMVYYKISHVDHRISNPEQRIASDIPKFSSELGELVQDDLAAVAEGLIYTWRLCSYASPKYVFWIMAYVLVAGGVIKNFSPAFGKLKSTEQQLEGDYRQLHSRLRTHAESVAFYGGENREASHIMQRFEALVEHLNLVRHENWWFGMIQDFFLKYFGATVAVVLIIEPFFSGNLRPDSSTLGRAEMLSNLRYHTSVIISLFQSLGILSISTRRLNILSGYADRIRELLDVSRELSGVRDRSLDHSSPGNYVSEANHIEFSDVKVVTPAGNVLVDDLTLRVETGSNLLITGPNGSGKSSLFRVLGGLWPLVSGHIVKPGVGSDLNKEIFYVPQRPYTAVGTLREQLIYPLTADQGIEPLTYDGMVDLLKNVDLEYLLERYPLDKEVNWGDELSLGEQQRLGMARLFYHKPKFAILDECTSAVTTDMEERFCKKVRAMGTSCITISHRPALVAFHDIVLSLDGEGGWNVQHRRDDSSFSTEESDFSSSETDRKSDALTVQRAFMSRAKSNASLGSKDHPYCTEVIATSPEVEIEHPARTPRIPHLRCHPRPLPLRVAAMLKILVPRLFDKQGGQLLAVAVLVFSRTWISDRIASLNGTTVKFVLEQDKDAFIRLIGVSILQSGANSFVAPSLRTLTAKLALGWRIRMTNHMLRYYLKRNAFYKVFNMSGKSIDADQRLTLDVDKLTTDLAGLVTGMVKPLVDILWFTWRMKLLSGRRGVAILYAYMLLGLGFLRAISPDFGHLSGQEQELEGTFRFMHSRLRTHAESIAFFGGGSREKAMVEAKFVKLINHSKILLRKQWLYGIVDDFVTKQLPHNVTWGLSLLYALEHKGDRALTSTQGELAHALRFLASVVSQSFIAFGDILELHKKFLELSGGINRIFELEEFTRFAQRNTVVSPNAISAASKETISFHEVDIVTPSQKLLARKLSCDVVQGKSLLLTGPNGSGKSSIFRVLRDLWPTFSGRVTKPSEGMFHVPQRPYTSLGTLRDQIIYPLSREEAKIKVLSLHRSGNNSSASMLLDDHLKTILENVRLVYLLEREGWDSTPNWEDVLSLGEQQRLGMARLFFHHPKFGILDECTNATSVDVEEHLYRLATSMGITVITSSQRPALIPFHALELKLIDGEGNWELCAIQQ

SEQ ID NO: 194182 - protein, 495 aa, Zea Mays
MASGIGSGQQQPPGSAVRLDALAAPAADADPGAVGDKLVFEAPPQPVREDYVQNAVKFLSHPKVRGSPVVYRRSFLEKKGLSTEEIDEAFRRVPDPQPSTTATTSPQQQVNSQNQSVGVQAYAPAQPVHPANAGPVVLPTQPRFSWYQAFLAAGLLLGFGASAAVFIKKLFLPRLKSWIRNVVAEGNGTEGNQLKPRIDDETADAVKASASAVSAIAKTNQQLLASKDEEKKILVTLTQALDSQAKELKSLTDSIGHTREPINITRDDRFSQYRPLEDHAPTVIRNGAINSSWRASQQTNMYGVSNGDFGSAVRSSFAPAPAEPTAGSFSRSYGEQPMSTAQRSDRSSGSKPWEMHSYSQQRPGYGSNSQLSDDGSYSDAQDSYAPSYHQNGKAPDFQADEPRPLTYNTGVEERPPPQRRWVPPQPPGVAMPEAAAAIRQPKALPKQPSSDASEAAGEMQVNGSSASDAVTEVPVNGATASDAGRSEIQEQSVAA

SEQ ID NO: 194183 - protein, 493 aa, Zea Mays
MASGIGSGQQQPPAVRLDALAAPAADADPGAVGDKLVFEAPPQPVREDYVQNAVKFLSHPKVRGSPVVYRRSFLEKKGLSTEEIDEAFRRVPDPQPSTTATTSPQQQVNSQNQSVGVQAYAPAQPVHPANAGPVVLPTQPRFSWYQAFLAAGLLLGFGASAAVFIKKLFLPRLKSWIRNVVAEGNGTEGNQLKPRIDDETADAVKASASAVSAIAKTNQQLLASKDEEKKILVTLTQALDSQAKELKSLTDSIGHTREPINITRDDRFSQYRPLEDHAPTVIRNGAINSSWRASQQTNMYGVSNGDFGSAVRSSFAPAPAEPTAGSFSRSYGEQPMSTAQRSDRSSGSKPWEMHSYSQQRPGYGSNSQLSDDGSYSDAQDSYAPSYHQNGKAPDFQADEPRPLTYNTGVEERPPPQRRWVPPQPPGVAMPEAAAAIRQPKALPKQPSSDASEAAGEMQVNGSSASDAVTEVPVNGATASDAGRSEIQEQSVAA

SEQ ID NO: 194184 - protein, 189 aa, Zea Mays
MASGIGSGQQQPPGSAVRLDALAAPAADADPGAVGDKLVFEAPPQPVREDYVQNAVKFLSHPKVRGSPVVYRRSFLEKKGLSTEEIDEAFRRVPDPQPSTTATTSPQQQVNSQNQSVGVQAYAPAQPVHPANAGPVVLPTQPRFSWYQAFLAAGLLLGFGASAAVFIKKVMALKATSLSLGLMMKRLML

SEQ ID NO: 194185 - protein, 494 aa, Zea Mays
MASGIGSGQQQPPGSAVRLDALAAPAADADPGAVGDKLVFEAPPQPVREDYVQNAVKFLSHPKVRGSPVVYRRSFLEKKGLSTEEIDEAFRRVPDPQPSTTATTSPQQQVNSQNQSVGVQAYAPAQPVHPANAGPVVLPTQPRFSWYQAFLAAGLLLGFGASAAVFIKKLFLPRLKSWIRNVVAEGNGTEGNQLKPRIDDETADAVKASASAVSAIAKTNQQLLASKDEAEKKILVTLTQALDSQAKELKSLTDSIGHTREPINITRDDRFSQYRPLEDHAPTVIRNGAINSSWRASQQTNMYGVSNGDFGSVRSSFAPAPAEPTAGSFSRSYGEPMSTAQRSDRSSGSKPWEMHSYSQQRPGYGSNSQLSDDGSYSDAQDSYAPSYHQNGKAPDFQADEPRPLTYNTGVEERPPPQRRWVPPQPPGVAMPEAAAAIRQPKALPKQPSSDASEAAGEMQVNGSSASDAVTEVPVNGATASDAGRSEIQEQSVAA

SEQ ID NO: 194186 - protein, 179 aa, Zea Mays
MASGIGSGQQQPPAPAADADPGAVGDKLVFEAPPQPVREDYVQNAVKFLSHPKVRGSPVVYRRSFLEKKGLSTEEIDEAFRRVPDPQPSTTATTSPQQQVNSQNQSVGVQAYAPAQPVHPANAGPVVLPTQPRFSWYQAFLAAGLLLGFGASAAVFIKKVMALKATSLSLGLMMKRLML

SEQ ID NO: 194187 - protein, 483 aa, Zea Mays
MASGIGSGQQQPPAPAADADPGAVGDKLVFEAPPQPVREDYVQNAVKFLSHPKVRGSPVVYRRSFLEKKGLSTEEIDEAFRRVPDPQPSTTATTSPQQQVNSQNQSVGVQAYAPAQPVHPANAGPVVLPTQPRFSWYQAFLAAGLLLGFGASAAVFIKKLFLPRLKSWIRNVVAEGNGTEGNQLKPRIDDETADAVKASASAVSAIAKTNQQLLASKDEEKKILVTLTQALDSQAKELKSLTDSIGHTREPINITRDDRFSQYRPLEDHAPTVIRNGAINSSWRASQQTNMYGVSNGDFGSVRSSFAPAPAEPTAGSFSRSYGEPMSTAQRSDRSSGSKPWEMHSYSQQRPGYGSNSQLSDDGSYSDAQDSYAPSYHQNGKAPDFQADEPRPLTYNTGVEERPPPQRRWVPPQPPGVAMPEAAAAIRQPKALPKQPSSDASEAAGEMQVNGSSASDAVTEVPVNGATASDAGRSEIQEQSVAA

SEQ ID NO: 194188 - protein, 496 aa, Zea Mays
MASGIGSGQQQPPGSAVRLDALAAPAADADPGAVGDKLVFEAPPQPVREDYVQNAVKFLSHPKVRGSPVVYRRSFLEKKGLSTEEIDEAFRRVPDPQPSTTATTSPQQQVNSQNQSVGVQAYAPAQPVHPANAGPVVLPTQPRFSWYQAFLAAGLLLGFGASAAVFIKKLFLPRLKSWIRNVVAEGNGTEGNQLKPRIDDETADAVKASASAVSAIAKTNQQLLASKDEAEKKILVTLTQALDSQAKELKSLTDSIGHTREPINITRDDRFSQYRPLEDHAPTVIRNGAINSSWRASQQTNMYGVSNGDFGSAVRSSFAPAPAEPTAGSFSRSYGEQPMSTAQRSDRSSGSKPWEMHSYSQQRPGYGSNSQLSDDGSYSDAQDSYAPSYHQNGKAPDFQADEPRPLTYNTGVEERPPPQRRWVPPQPPGVAMPEAAAAIRQPKALPKQPSSDASEAAGEMQVNGSSASDAVTEVPVNGATASDAGRSEIQEQSVAA

SEQ ID NO: 194189 - protein, 485 aa, Zea Mays
MASGIGSGQQQPPAPAADADPGAVGDKLVFEAPPQPVREDYVQNAVKFLSHPKVRGSPVVYRRSFLEKKGLSTEEIDEAFRRVPDPQPSTTATTSPQQQVNSQNQSVGVQAYAPAQPVHPANAGPVVLPTQPRFSWYQAFLAAGLLLGFGASAAVFIKKLFLPRLKSWIRNVVAEGNGTEGNQLKPRIDDETADAVKASASAVSAIAKTNQQLLASKDEEKKILVTLTQALDSQAKELKSLTDSIGHTREPINITRDDRFSQYRPLEDHAPTVIRNGAINSSWRASQQTNMYGVSNGDFGSAVRSSFAPAPAEPTAGSFSRSYGEQPMSTAQRSDRSSGSKPWEMHSYSQQRPGYGSNSQLSDDGSYSDAQDSYAPSYHQNGKAPDFQADEPRPLTYNTGVEERPPPQRRWVPPQPPGVAMPEAAAAIRQPKALPKQPSSDASEAAGEMQVNGSSASDAVTEVPVNGATASDAGRSEIQEQSVAA

SEQ ID NO: 194190 - protein, 495 aa, Zea Mays
MASGIGSGQQQPPGSAVRLDALAAPAADADPGAVGDKLVFEAPPQPVREDYVQNAVKFLSHPKVRGSPVVYRRSFLEKKGLSTEEIDEAFRRVPDPQPSTTATTSPQQQVNSQNQSVGVQAYAPAQPVHPANAGPVVLPTQPRFSWYQAFLAAGLLLGFGASAAVFIKKLFLPRLKSWIRNVVAEGNGTEGNQLKPRIDDETADAVKASASAVSAIAKTNQQLLASKDEAEKKILVTLTQALDSQAKELKSLTDSIGHTREPINITRDDRFSQYRPLEDHAPTVIRNGAINSSWRASQQTNMYGVSNGDFGSVRSSFAPAPAEPTAGSFSRSYGEQPMSTAQRSDRSSGSKPWEMHSYSQQRPGYGSNSQLSDDGSYSDAQDSYAPSYHQNGKAPDFQADEPRPLTYNTGVEERPPPQRRWVPPQPPGVAMPEAAAAIRQPKALPKQPSSDASEAAGEMQVNGSSASDAVTEVPVNGATASDAGRSEIQEQSVAA

SEQ ID NO: 194191 - protein, 494 aa, Zea Mays
MASGIGSGQQQPPGSAVRLDALAAPAADADPGAVGDKLVFEAPPQPVREDYVQNAVKFLSHPKVRGSPVVYRRSFLEKKGLSTEEIDEAFRRVPDPQPSTTATTSPQQQVNSQNQSVGVQAYAPAQPVHPANAGPVVLPTQPRFSWYQAFLAAGLLLGFGASAAVFIKKLFLPRLKSWIRNVVAEGNGTEGNQLKPRIDDETADAVKASASAVSAIAKTNQQLLASKDEEKKILVTLTQALDSQAKELKSLTDSIGHTREPINITRDDRFSQYRPLEDHAPTVIRNGAINSSWRASQQTNMYGVSNGDFGSVRSSFAPAPAEPTAGSFSRSYGEQPMSTAQRSDRSSGSKPWEMHSYSQQRPGYGSNSQLSDDGSYSDAQDSYAPSYHQNGKAPDFQADEPRPLTYNTGVEERPPPQRRWVPPQPPGVAMPEAAAAIRQPKALPKQPSSDASEAAGEMQVNGSSASDAVTEVPVNGATASDAGRSEIQEQSVAA

SEQ ID NO: 194192 - protein, 486 aa, Zea Mays
MASGIGSGQQQPPAPAADADPGAVGDKLVFEAPPQPVREDYVQNAVKFLSHPKVRGSPVVYRRSFLEKKGLSTEEIDEAFRRVPDPQPSTTATTSPQQQVNSQNQSVGVQAYAPAQPVHPANAGPVVLPTQPRFSWYQAFLAAGLLLGFGASAAVFIKKLFLPRLKSWIRNVVAEGNGTEGNQLKPRIDDETADAVKASASAVSAIAKTNQQLLASKDEAEKKILVTLTQALDSQAKELKSLTDSIGHTREPINITRDDRFSQYRPLEDHAPTVIRNGAINSSWRASQQTNMYGVSNGDFGSAVRSSFAPAPAEPTAGSFSRSYGEQPMSTAQRSDRSSGSKPWEMHSYSQQRPGYGSNSQLSDDGSYSDAQDSYAPSYHQNGKAPDFQADEPRPLTYNTGVEERPPPQRRWVPPQPPGVAMPEAAAAIRQPKALPKQPSSDASEAAGEMQVNGSSASDAVTEVPVNGATASDAGRSEIQEQSVAA

SEQ ID NO: 194193 - protein, 73 aa, Zea Mays
MCGYIRLVQKTRSSHNVALINSSAQLLTVNPCPHVWLGGEPSLSLLSFAMADPSPPYTRKKILKSHNEDMPFS

SEQ ID NO: 194194 - protein, 93 aa, Zea Mays
MTWLLVEPPVDDQDDPRCAHGQTVLVFCAKPVQRSAMCTGKRIILKTLHRCTDVQAHVSTMFSVRAELIVNKRNKIHKYESRCHTINRYRGSY

SEQ ID NO: 194195 - protein, 196 aa, Zea Mays
MAAVGARPVLYHHHPHPAPAGGAPAPMSSSYFSRGGGSSSPASSLSAAHLDISEFLFDDASVVVPPDASGGGAISAGGAGSAAAPERPRTDRIAFRTRSEVEVLDDGYKWRKYGKKSVKNSPNPRNYYRCSTEGCNVKKRVERDRDDPGYVVTTYEGTHNHASPSTVYYASQDAASGRFFVAGTQPPGPGPGSLVN

SEQ ID NO: 194196 - protein, 301 aa, Zea Mays
MEFWGLEVKPGSTVKCEPGHGFILHVSQAALGESKKSDSALMYVKVDDKKLAIGTLSIDKYPQIQFDLVFNKEFELSHTSKTTSVFFSGYKVEQPIEGDEMDLDSEDEEEELNIPVIKENGKADGKEEQKNQEKAVAATASKSSLGLEKKSKDDSDDSDEDESDDSDEDDSDDSDEGEGLSPDEGDDDSSDEDDTSDDDEEETPTPKKPEAGKKRGAENALKTPLSDKKAKVATPPAQKTGGKKGATHVATPHPAKGKTPANNDKSTEKSPKSGHSIVRWLCRLTPRRSMGPNELQVQLSP

SEQ ID NO: 194197 - protein, 301 aa, Zea Mays
MEFWGLEVKPGSTVKCEPGHGFILHVSQAALGESKKSDSALMYVKVDDKKLAIGTLSIDKYPQIQFDLVFNKEFELSHTSKTTSVFFSGYKVEQPIEGDEMDLDSEDEEEELNIPVIKENADGKEEQKNQEKAVAATASKSSLGLEKKSKDDSDDSDEDESDDSDEDDSDDSDEGEGLSPDEGDDDSSDEDDTSDDDEEETPTPKKPEAGKKRGAENALKTPLSDKKAKVATPPAQKTGGKKGATHVATPHPAKGKTPANNDKSTEKSPKSGGSVPCKSCSKTFNSEMALQAHSKAKHGAK

SEQ ID NO: 194198 - protein, 206 aa, Zea Mays
MDGARVLIAAGATAVCCFVCAFWVFRSSSSSSPASPKKHQSPSTNCCGCASCGCRDAKPANGEMAVGGENKKKAPEPDPPEAPSMMEQLVPEITTHALSYLDYTSLCRLSMTNSAMRRAANDDGAWKALYHKGTINPPNGWKAYYAATKAIINLNAEFYNIIREGSLPAMSRFWLNADYVKCIHATGEFCPGMLCRVVQFSYQRVD

SEQ ID NO: 194199 - protein, 278 aa, Zea Mays
MDGARVLIAAGATAVCCFVCAFWVFRSSSSSSPASPKKHQSPSTNCCGCASCGCRDAKPANGEMAVGGENKKKAPEPDPPEAPSMMEQLVPEITTHALSYLDYTSLCRLSMTNSAMRRAANDDGAWKALYHKGTINPPNGWKAYYAATKAIINLNAEFYNIIREGSLPAMSRFWLNADYVKCIHATGEFCPGYNSVMESWGLLFNWGQDGGQGIGFQIRDVRVRVLGEMAWVNMKANVDVDPLVFHVTNVYELCNGRWYMVHHHSSLMAHPAPHNMFG

SEQ ID NO: 194200 - protein, 208 aa, Zea Mays
MDGARVLIAAGATAVCCFVCAFWVFRSSSSSSPASPKKHQSPSTNCCGCASCGCRDAKPANGEMAVGGENKKKAPEPDPPEAPSMMEQLVPEITTHALSYLDYTSLCRLSMTNSAMRRAANDDGAWKALYHKDFTVEQGTINPPNGWKAYYAATKAIINLNAEFYNIIREGSLPAMSRFWLNADYVKCIHATGEFCPGPYWCECAHPF

SEQ ID NO: 194201 - protein, 377 aa, Zea Mays
MPGCGVAGRGGVGVSSAARPTPRRPCLWMPIARGYGRQPELKYCTSSQSKSVLLGAGFGRHVTRSNPYLLQNSSSTTMARLQKSGQFQQLVLDPSRNYLTKTFYNANMKRRVLSRVECFVSSDPINNGWLKPRRSENFTSLESACVQREYKLPVRTRADCKAEQYEITGSPLSPSDADAVMIGDTNEISPWWQEFPKRWMIVLLCFFAFLLCNMDRVNMSIAILPMSSEFSWSPATVGLIQSSFFWGYLLTQILGGIWADRFGGKLVLGFGVIWWSIATVLTPLAAKIGLPCLLTMRAFMGIGEGVAMPAMNNILSKWIPVSERSRSLALVYSGMYLGSVTGLALSPLLISRFGWPSVFYAFGSLGSVWFALWQSKV

SEQ ID NO: 194202 - protein, 348 aa, Zea Mays
MPGCGVAGRGGVGVSSAARPTPRRPCLWMPIARGYGRQPELKYCTSSQSKSVLLGAGFGRHVTRSNPYLLQNSSSTTMARLQKSGQFQQLVLDPSRNYLTKTFYNANMKRRVLSRVECFVSSDPINNGWLKPRRSENFTSLESACVQREYKLPVRTRADCKAEQYEITGSPLSPSDADAVMIGDTNEISPWWQEFPKRWMIVLLCFFAFLLCNMDRVNMSIAILPMSSEFSWSPATVGLIQSSFFWGYLLTQILGGIWADRFGGKLVLGFGVIWWSIATVLTPLAAKIGLPCLLTMRAFMGIGEGVAMPAMNNILSKWIPVSERSRSLALVYSGMYLGHTALQMMIQS

SEQ ID NO: 194203 - protein, 593 aa, Zea Mays
MPGCGVAGRGGVGVSSAARPTPRRPCLWMPIARGYGRQPELKYCTSSQSKSVLLGAGFGRHVTRSNPYLLQNSSSTTMARLQKSGQFQQLVLDPSRNYLTKTFYNANMKRRVLSRVECFVSSDPINNGWLKPRRSENFTSLESACVQREYKLPVRTRADCKAEQYEITGSPLSPSDADAVMIGDTNEISPWWQEFPKRWMIVLLCFFAFLLCNMDRVNMSIAILPMSSEFSWSPATVGLIQSSFFWGYLLTQILGGIWADRFGGKLVLGFGVIWWSIATVLTPLAAKIGLPCLLTMRAFMGIGEGVAMPAMNNILSKWIPVSERSRSLALVYSGMYLGSVTGLALSPLLISRFGWPSVFYAFGSLGSVWFALWQSKAHSSPDDDPELSKAEKRHILGGSPLKEPVTSIPWRLILSKAPVWALIISHFCHNWGTFILLTWMPTYYNQVLKFNLTESGLLCVLPWLTMAVFANIGGWIADTLVQRGISVTNVRKIMQSIGFLGPALFLTLLSKGSDAFSQSGLYSNHQDIGPRYAGVLLGLSNTAGVLAGVFGTAATGYILQKGSWDSVFKVSVVLYIVGTVVWNVFATGEKVLE

SEQ ID NO: 194204 - protein, 578 aa, Zea Mays
MPGCGVAGRGGVGVSSAARPTPRRPCLWMPIARGYGRQPELKYCTSSQSKSVLLGAGFGRHVTRSNPYLLQNSSSTTMARLQKSGQFQQLVLDPSRNYLTKTFYNANMKRRVLSRVECFVSSDPINNGWLKPRRSENFTSLESACVQREYKLPVRTRADCKAEQYEITGSPLSPSDADAVMIGDTNEISPWWQEFPKRWMIVLLCFFAFLLCNMDRVNMSIAILPMSSEFSWSPATVGLIQSSFFWGYLLTQILGGIWADRFGGKLVLGFGVIWWSIATVLTPLAAKIGLPCLLTMRAFMGIGEGVAMPAMNNILSKWIPVSERSRSLALVYSGMYLGSVTGLALSPLLISRFGWPSVFYAFGSLGSVWFALWQSKAHSSPDDDPELSKAEKRHILGGSPLKEPVTSIPWRLILSKAPVWALIISHFCHNWGTFILLTWMPTYYNQVLKFNLTESGLLCVLPWLTMAVFANIGGWIADTLVQRGISVTNVRKIMQSIGFLGPALFLTLLSKVRTPAMAVLCMACSQRCFFTVWPVFKSPRHWTTLCGGTSRIVKHCWRACRSFWYCSHWLHSSERFLG

SEQ ID NO: 194205 - protein, 62 aa, Zea Mays
MPDSADTYLHRVGRAGRFGTKGLAITFVSSSDSDVLNQVQERFEVDIKELPEQIDTSTYMPS

SEQ ID NO: 194206 - protein, 343 aa, Zea Mays
MDVICQAKSGMGKTAVFVLSTLQQIDPVAGQVAALVLCHTRELAYQICHEFERFSKYLPELRVAVFYGGVHIKNHKDLLKNECPHIVVGTPGRILALARDKDLPLKNVRHFILDECDKMLESLDMRRDVQEIFKMTPHDKQVMMFSATLSKEIRPVCKRFMQDPMEIYVDDEAKLTLHGLVQHYIKLSEAEKNRKLNDLLDALDFNQVVIFVKSVSRAAELNKLLCECNFPSICIHSGMTQEERLTRYKNFKEGHKRILVATDLVGRGIDIERVNIVVNYDMPDSADTYLHRVGRAGRFGTKGLAITFVSSSDSDVLNQVQERFEVDIKELPEQIDTSTYMPS

SEQ ID NO: 194207 - protein, 146 aa, Zea Mays
MDTTTCSPSWWPSPSSCSRPLFFHLCAYQLVQPPWCFLPLGSLAPSPWRSPWMLVICSPRCRQMFFPSLQQHLGGCQAARRACAASVTTLFTPGNLVQPSMVSEYDLGGEGDLFKAPEAIIEEPLLLNCLSDSVNLLLCRLGLCRA

SEQ ID NO: 194208 - protein, 582 aa, Zea Mays
MQNQDVVAIAKTGSGKTLGYLLPGFMHIKRLQNSTRNGPTVLVLAPTRELATQILDEAMKFGRSSRISCTCLYGGAPKGPQLRDLDRGVDVVVATPGRLNDILEMRRVSLKQVSYLVLDEADRMLDMGFEPQIRKIVKEIPHRRQTLMYTATWPKEVRRIADDLLVHPLQHIEVITPSEKQRRLEQILRSQVSGSKILIFCTTKRMCDQLARTLTRQFGASAIHGDKSQSEREKVLNHFRSGRSPILVATDVAARGLDIKDIRVVINYDFPTGVEDYVHRIGRTGRAGATGVAYTFFCDQDSKYAADLIKILEGANQQVPRDLEDMASRGGGRGKKRNRWASRSERGGPRSELDSRYSGRDGLASSGRSESGRGSHGRDDYGSRGRYDSGETDGRSRRSARGRSRSRSPSPKRSHHHEARRSRSRSRSRSCRNFRASRSKSHSPVASSRHEKAAVISGSTQPNLGYAEHKSPPRSHSGDDHVNHPDQKDDHMGDGKMERVDLDRSPSPQYDKSAPYSPAYNGKASDSMSPNVQPKADAKYVKPSGKPEPASPLRHSKGRDDDEGIIDDDGEIAEGEMMMKVS

SEQ ID NO: 194209 - protein, 333 aa, Zea Mays
MSGASGSTGRAAPRYAPDDLTLLKPWRGLVDGTTGYLYYWNPETNVTQYERPMPPENQLPPPPPPLPPPPPRSRDRRDRSRSRSRTPPRRDRRDRDRDDEHASSKTASSHHHPAPIAVADYPSTEAYRRRHEITVTGDNVPAPITSFEAGGFPSEILKEIQRAGFASPTPIQAQSWPIAMQNQDVVAIAKTGSGKTLGYLLPGFMHIKRLQNSTRNGPTVLVLAPTRELATQILDEAMKFGRSSRISCTCLYGGAPKGPQLRDLDRGVDVVVATPGRLNDILEMRRVTIGNVDELVANSAITQHIEVITPSEKQRRLEQILRSQAVWSFSHSW

SEQ ID NO: 194210 - protein, 536 aa, Zea Mays
MQNQDVVAIAKTGSGKTLGYLLPGFMHIKRLQNSTRNGPTVLVLAPTRELATQILDEAMKFGRSSRISCTCLYGGAPKGPQLRDLDRGVDVVVATPGRLNDILEMRRVTIGNVDELVANSAITQHIEVITPSEKQRRLEQILRSQVSGSKILIFCTTKRMCDQLARTLTRQFGASAIHGDKSQSEREKVLNHFRSGRSPILVATDVAARGLDIKDIRVVINYDFPTGVEDYVHRIGRTGRAGATGVAYTFFCDQDSKYAADLIKILEGANQQVPRDLEDMASRGGGRGKKRNRWASRSERGGPRSELDSRYSGRDGLASSGRSESGRGSHGRDDYGSRGRYDSGETDGRSRRSARGRSRSRSPSPKRSHHHEARRSRSRSRSRSCRNFRASRSKSHSPVASSRHEKAAVISGSTQPNLGYAEHKSPPRSHSGDDHVNHPDQKDDHMGDGKMERVDLDRSPSPQYDKSAPYSPAYNGKASDSMSPNVQPKADAKYVKPSGKPEPASPLRHSKGRDDDEGIIDDDGEIAEGEMMMKVS

SEQ ID NO: 194211 - protein, 625 aa, Zea Mays
MSGASGSTGRAAPRYAPDDLTLLKPWRGLVDGTTGYLYYWNPETNVTQYERPMPPENQLPPPPPPLPPPPPRSRDRRDRSRSRSRTPPRRDRRDRDRDDEHASSKTASSHHHPAPIAVADYPSTEAYRRRHEITVTGDNVPAPITSFEAGGFPSEILKECLYGGAPKGPQLRDLDRGVDVVVATPGRLNDILEMRRVTIGNVDELVANSAITQHIEVITPSEKQRRLEQILRSQVSGSKILIFCTTKRMCDQLARTLTRQFGASAIHGDKSQSEREKVLNHFRSGRSPILVATDVAARGLDIKDIRVVINYDFPTGVEDYVHRIGRTGRAGATGVAYTFFCDQDSKYAADLIKILEGANQQVPRDLEDMASRGGGRGKKRNRWASRSERGGPRSELDSRYSGRDGLASSGRSESGRGSHGRDDYGSRGRYDSGETDGRSRRSARGRSRSRSPSPKRSHHHEARRSRSRSRSRSCRNFRASRSKSHSPVASSRHEKAAVISGSTQPNLGYAEHKSPPRSHSGDDHVNHPDQKDDHMGDGKMERVDLDRSPSPQYDKSAPYSPAYNGKASDSMSPNVQPKADAKYVKPSGKPEPASPLRHSKGRDDDEGIIDDDGEIAEGEMMMKVS

SEQ ID NO: 194212 - protein, 432 aa, Zea Mays
MRRVTIGNVDELVANSAITQHIEVITPSEKQRRLEQILRSQVSGSKILIFCTTKRMCDQLARTLTRQFGASAIHGDKSQSEREKVLNHFRSGRSPILVATDVAARGLDIKDIRVVINYDFPTGVEDYVHRIGRTGRAGATGVAYTFFCDQDSKYAADLIKILEGANQQVPRDLEDMASRGGGRGKKRNRWASRSERGGPRSELDSRYSGRDGLASSGRSESGRGSHGRDDYGSRGRYDSGETDGRSRRSARGRSRSRSPSPKRSHHHEARRSRSRSRSRSCRNFRASRSKSHSPVASSRHEKAAVISGSTQPNLGYAEHKSPPRSHSGDDHVNHPDQKDDHMGDGKMERVDLDRSPSPQYDKSAPYSPAYNGKASDSMSPNVQPKADAKYVKPSGKPEPASPLRHSKGRDDDEGIIDDDGEIAEGEMMMKVS

SEQ ID NO: 194213 - protein, 580 aa, Zea Mays
MDSVRAFSTSPCVRKSTHCGNILFIQRAGFASPTPIQAQSWPIAMQNQDVVAIAKTGSGKTLGYLLPGFMHIKRLQNSTRNGPTVLVLAPTRELATQILDEAMKFGRSSRISCTCLYGGAPKGPQLRDLDRGVDVVVATPGRLNDILEMRRVTIGNVDELVANSAITQHIEVITPSEKQRRLEQILRSQVSGSKILIFCTTKRMCDQLARTLTRQFGASAIHGDKSQSEREKVLNHFRSGRSPILVATDVAARGLDIKDIRVVINYDFPTGVEDYVHRIGRTGRAGATGVAYTFFCDQDSKYAADLIKILEGANQQVPRDLEDMASRGGGRGKKRNRWASRSERGGPRSELDSRYSGRDGLASSGRSESGRGSHGRDDYGSRGRYDSGETDGRSRRSARGRSRSRSPSPKRSHHHEARRSRSRSRSRSCRNFRASRSKSHSPVASSRHEKAAVISGSTQPNLGYAEHKSPPRSHSGDDHVNHPDQKDDHMGDGKMERVDLDRSPSPQYDKSAPYSPAYNGKASDSMSPNVQPKADAKYVKPSGKPEPASPLRHSKGRDDDEGIIDDDGEIAEGEMMMKVS

SEQ ID NO: 194214 - protein, 377 aa, Zea Mays
MCDQLARTLTRQFGASAIHGDKSQSEREKVLNHFRSGRSPILVATDVAARGLDIKDIRVVINYDFPTGVEDYVHRIGRTGRAGATGVAYTFFCDQDSKYAADLIKILEGANQQVPRDLEDMASRGGGRGKKRNRWASRSERGGPRSELDSRYSGRDGLASSGRSESGRGSHGRDDYGSRGRYDSGETDGRSRRSARGRSRSRSPSPKRSHHHEARRSRSRSRSRSCRNFRASRSKSHSPVASSRHEKAAVISGSTQPNLGYAEHKSPPRSHSGDDHVNHPDQKDDHMGDGKMERVDLDRSPSPQYDKSAPYSPAYNGKASDSMSPNVQPKADAKYVKPSGKPEPASPLRHSKGRDDDEGIIDDDGEIAEGEMMMKVS

SEQ ID NO: 194215 - protein, 321 aa, Zea Mays
MHALEIERSHFPNNCDDLEEDADNDICASQNICSAKSININGLSKKSRGARSLYDIEINSAQELSQTLTLYKQPQNLSSSSTRYASSKRKKWKGHKDHEDDSVHGFQRMRDLREIGTKNVFKQKSGSGIVSDVPLLESGSSFGYDLSSADGIKLGEQSQSSIKKKRSNIGQSYDSLSKKDKHHPLSLLCEDSEVSGTYYHWDPSGQSCSQYPGGQIPNLVESSRRAKTIFPTDVNNCSYSSGTSSLDTLLDTSHINHKRSLNAVTPKNADPCTARFLNDDCPDCDGFLDAVTLEEDVLEEGLHATTCNFELYCVDACLLIL

SEQ ID NO: 194216 - protein, 106 aa, Zea Mays
MGATKDVLSLYAVNHLCAVAQLFSTSAGAEAQASDKLSNPKQLGPFVAETKQPPPPETRVAWPSWFVALLSWPAGPGWQAKRLPLQAAPHRGLRCWEVLPAAEVCG

SEQ ID NO: 194217 - protein, 77 aa, Zea Mays
MDTLQEAPSAPLEATAALYTIQFTVYFFFSEEDEQISSTLFSTPRRMNILRNQKDPLSSTTRRSTRHHSVCPLLQRG

SEQ ID NO: 194218 - protein, 195 aa, Zea Mays
MLLSAFLGDCLFSYPPPPLLPATTAAPRPSTRLPVPFPARLRPASLVARRLTAEAGEALSALSAAEGDDEYEAELQEEGFPSWAGGGEEEDYDHDPEIGDIMGDYFDDPKKGQTRMEDRIRKKRHKIVQTKTGSPNPMKVVFNKFDFSNSYIWFEFYNVLLPKDVTLISDSLRSWHIVGRLGGCNSMNMQWMRRY

SEQ ID NO: 194219 - protein, 145 aa, Zea Mays
MAFLVSVLTNEWLSSSYSLASLTPSALVQMEDRIRKKRHKIVQTKTGSPNPMKVVFNKFDFSNSYIWFEFYNVLLPKDVTLISDSLRSWHIVGRLGGCNSMNMQLSQLPLDCKRLTYDALEGANVTPTSFYNIGDLEIQDNLARV

SEQ ID NO: 194220 - protein, 152 aa, Zea Mays
MLLSAFLGDCLFSYPPPPLLPATTAAPRPSTRLPVPFPARLRPASLVARRLTAEAGEALSALSAAEGDDEYEAELQEEGFPSWAGGGEEEDYDHDPEIGDIMGDYFDDPKKGQTRMEDRIRKKRHKIVQTKTGSPNPMKVVFNKKYLPNLEK

SEQ ID NO: 194221 - protein, 50 aa, Zea Mays
MNQKEKRLPHIVLFMTDHNNAKHPIIVENIENSLYHKIRFVEFHMIPFMA

SEQ ID NO: 194222 - protein, 136 aa, Zea Mays
MIHKQEVIENVLRLLVLLSLTNAGLPKKNFDYMRREILHSYGFEHMHLLYNLEKAGLLKRQESRSNWVGITRALQLIVDVNDTANPTDISYIFSGYAPLSIRLVQHAVRSGWRSIEELLKLLPGPHLDLKRVSRVR

SEQ ID NO: 194223 - protein, 300 aa, Zea Mays
MAQIPNLDNAPLNLAALREQSQKDLFGILKNIRGKKCLVIDPKLAGTLSLVVQTSLLKEYGAEVRILSPEPLQTECPKIVYLVRSQLRFMKFIASQIKNDEPKGLQREYFLYFVPRRTVACEKILEEEKVHQKLTFGEYPLYLVPLDDDVLSLELDHSLQECLIEGDTSSIWHVAKAIHKLEFAFGVIPNVRAKGVASTKAAELLNSMQLEDPVNMDDMGIPEINTVILLDREVDMVTPMCSQLTYEGLLDEISACLLGLHITPSLFSVPMQCYKLIMVQWKLMQASLELNKMGKRLRFH

SEQ ID NO: 194224 - protein, 366 aa, Zea Mays
MSSGITHYTITFFSANAMLQINNGSVEVDASIIGAQQDGKKVKVPLNSSDKLYKEIRDLNFEVVVQVLRQKATSIQQDYAEVKSTNTQSVSELKDFVRRLHSLPEIARHVHLAQHLQSFTGKPSFHARLDIEQTILEVQNFEICFEYIEEMIHKQEVIENVLRLLVLLSLTNAGLPKKNFDYMRREILHSYGFEHMHLLYNLEKAGLLKRQESRSNWVGITRALQLIVDVNDTANPTDISYIFSGYAPLSIRLVQHAVRSGWRSIEELLKLLPGPHLDLKRGGLTINSSPEVHPGLGAQQSIDRVGHRSLVLVVFIGGVTFAEIAALRFLSAQEGMGYDFLVATTKVVNGNTILRPIIANSKEGMM

SEQ ID NO: 194225 - protein, 344 aa, Zea Mays
MAQIPNLDNAPLNLAALREQSQKDLFGILKNIRGKKCLVIDPKLAGTLSLVVQTSLLKEYGAEVRILSPEPLQTECPKIVYLVRSQLRFMKFIASQIKNDEPKGLQREYFLYFVPRRTVACEKILEEEKVHQKLTFGEYPLYLVPLDDDVLSLELDHSLQECLIEGDTSSIWHVAKAIHKLEFAFGVIPNVRAKGVASTKAAELLNSMQLEDPVNMDDMGIPEINTVILLDREVDMVTPMCSQLTYEGLLDEMLQINNGSVEVDASIIGAQQDGKKVKVPLNSSDKLYKEIRDLNFEVVVQVLRQKATSIQQDYAEVKSTNTQSVSELKDFVRRLHSLPEIAML

SEQ ID NO: 194226 - protein, 556 aa, Zea Mays
MAQIPNLDNAPLNLAALREQSQKDLFGILKNIRGKKCLVIDPKLAGTLSLVVQTSLLKEYGAEVRILSPEPLQTECPKIVYLVRSQLRFMKFIASQIKNDEPKGLQREYFLYFVPRRTVACEKILEEEKVHQKLTFGEYPLYLVPLDDDVLSLELDHSLQECLIEGDTSSIWHVAKAIHKLEFAFGVIPNVRAKGVASTKAAELLNSMQLEDPVNMDDMGIPEINTVILLDREVDMVTPMCSQLTYEGLLDEMLQINNGSVEVDASIIGAQQDGKKVKVPLNSSDKLYKEIRDLNFEVVVQVLRQKATSIQQDYAEVKSTNTQSVSELKDFVRRLHSLPEIARHVHLAQHLQSFTGKPSFHARLDIEQTILEVQNFEICFEYIEEMIHKQEVIENVLRLLVLLSLTNAGLPKKNFDYMRREILHSYGFEHMHLLYNLEKAGLLKRQESRSNWVGITRALQLIVDVNDTANPTDISYIFSGYAPLSIRLVQHAVRSGWRSIEELLKLLPGPHLDLKRGGLTINSSPEVHPGLGAQQSIDRLEMTPKYPSEAALGQGE

SEQ ID NO: 194227 - protein, 120 aa, Zea Mays
MVYYALLVGAELDGLTNLQPRHGCDDPNFPYYLKLKCENCGEVTAKSTYVTLSEQVDLPKGHGAAHLVQKVHGTPFEIDCSEGEFSEYDEKGECPVELGKLQSTFKVVKKHERGGKTRFV

SEQ ID NO: 194228 - protein, 81 aa, Zea Mays
MVYYALLVGAELDGLTNLQPRHGCDDPNFPYYLKLKCENCGEVTAKSTYVTLSEQVDLPKGHGAAHLVQKKSSVTGEPFET

SEQ ID NO: 194229 - protein, 142 aa, Zea Mays
MMVRAATDDVRFLLSIYAKMMEKLSKVSLWRLAVRSELYCRCFCLSDNQFADWSPLPPVPDDIEADVYVPEADILSVLDVPPGKMGRVIGRKGSTIMAVKECCKVEIHIGGAKGPPDRVFIIGPEKEVRKAEAIFRGRMLEF

SEQ ID NO: 194230 - protein, 224 aa, Zea Mays
MLLRVEKNLFKLALYFQFGIKLHNVMDTQIAYSLIEEQEQEGKKMTSDDYNYISFVSLLADKRYCGILYPEKEEVRTLLRQDPNFWTIRPLSDMMVRAATDDVRFLLSIYAKMMEKLSKVSLWRLAVRSELYCRCFCLSDNQFADWSPLPPVPDDIEADVYVPEADILSVLDVPPGKMGRVIGRKGSTIMAVKECCKVEIHIGGAKGPPDRPHVRNVDGILGIE

SEQ ID NO: 194231 - protein, 331 aa, Zea Mays
MVWFQCEDCGENLKKPKLAGHFRSCSAYKLSCIDCGELFSHDTVQGHTQCISEAEKYGPKGQTKPSNGAQGKADKPKPNADVDINVGLSTRPPWFCSLCKTTTTSKQTLLLHADGKKHRAKAKAFHVSQKQKDGAEQTPDVKEAGVVPTKESAQVNGGVSGDHERNEDKDAGKRKRMDDMTIEPGNTKRQLTQSGDEKSENKAKSKADELASGTDCKSVQKQKIKWKKIITKTLKANADGVMKLKKLQKLVSKELQECGVSKDKEELRATLMDKLQVPDFMLMARMLDWWPRMKKNLRKRLSVIFLALLLVSFFGVNFQMAYSQVLVKLSP

SEQ ID NO: 194232 - protein, 267 aa, Zea Mays
MVWFQCEDCGENLKKPKLAGHFRSCSAYKLSCIDCGELFSHDTVQGHTQCISEAEKYGPKGQTKPSNGAQGKADKPKPNADVDINVGLSTRPPWFCSLCKTTTTKQTPDVKEAGVVPTKESAQVNGGVSGDHERNEDKDAGKRKRMDDMTIEPGNTKRQLTQSGDEKSENKAKSKADELASGTDCKSVQKQKIKWKKIITKTLKANADGVMKLKKLQKLVSKELQECGVSKDKEELRATLMDKIASSSRFYVDGKNVRLVAKNEEES

SEQ ID NO: 194233 - protein, 120 aa, Zea Mays
MPPSRRTLPPHPTSPPGLCPRRCSCWARARLVHAAAVERASGEGVECATEIEATTTSSATLPSPLSSGPMLVEALWFLDELRRNGRWWVSVGCRSVQAQIDFFVRCSTSAVNTSMLVVST

SEQ ID NO: 194234 - protein, 422 aa, Zea Mays
MWCHDIGREQAANKPLLKTVFQATFEVMMRLFSPRKTTLLFVIRDKSRTPLENLEPILREDIQKIWDAVPKPHAHKETPISEFFDVQVVALSSYEEKEELFKQQVSDLRDRFQHSIAPGGLAGDRRGVVPASGFSFSSQQFWKVIKENKDLDLPAHKVMVATVRCEEIGNEKVTSFIADEEWQQFEEAVQHDFVTGFGKKLSSLLDRCLSEYDMEAIYFDEGVRSSKRQQLESKLLQLVNPAYQSLLGHLHTRTLEAFKEYFGKALEKEGFAVAACNCTETFLEKFDRGSEDAAIQQVNWDTSKVRDKLRRDIEAHVASVRAAKLSELCAKYEAQLTKALVEPVESLLDSASEDTWPAIRKLLQRETKTAVLGLESAVSAFELDEATEKELLAKLEKHGRSVVESKAKEEAGRVLIRMKDSL

SEQ ID NO: 194235 - protein, 436 aa, Zea Mays
MWCHDIGREQAANKPLLKTVFQATFEVMMRLFSPRKTTLLFVIRDKSRTPLENLEPILREDIQKIWDAVPKPHAHKETPISEFFDVQVVALSSYEEKEELFKQQVSDLRDRFQHSIAPGGLAGDRRGVVPASGFSFSSQQFWKVIKENKDLDLPAHKVMVATVRCEEIGNEKVTSFIADEEWQQFEEAVQHDFVTGFGKKLSSLLDRCLSEYDMEAIYFDEGVRSSKRQQLESKLLQLVNPAYQSLLGHLHTRTLEAFKEYFGKALEKEGFAVAACNCTETFLEKFDRGSEDAAIQQVNWDTSKVRDKLRRDIEAHVASVRAAKLSELCAKYEAQLTKALVEPVESLLDSASEDTWPAIRKLLQRETKTAVLGLESAVSAFELDEATEKELLAKLEKHGRSVVESKAKEEAGRVLIRMKDRFSTLFSRDADSMPSL

SEQ ID NO: 194236 - protein, 748 aa, Zea Mays
MDAFRGRSQTTKGIWLAKAQNIEPCTLVMDLEGTDGRERGEDDTAFEKQSALFALAVSDIVLINMWCHDIGREQAANKPLLKTVFQATFEVMMRLFSPRKTTLLFVIRDKSRTPLENLEPILREDIQKIWDAVPKPHAHKETPISEFFDVQVVALSSYEEKEELFKQQVSDLRDRFQHSIAPGGLAGDRRGVVPASGFSFSSQQFWKVIKENKDLDLPAHKVMVATVRCEEIGNEKVTSFIADEEWQQFEEAVQHDFVTGFGKKLSSLLDRCLSEYDMEAIYFDEGVRSSKRQQLESKLLQLVNPAYQSLLGHLHTRTLEAFKEYFGKALEKEGFAVAACNCTETFLEKFDRGSEDAAIQQVNWDTSKVRDKLRRDIEAHVASVRAAKLSELCAKYEAQLTKALVEPVESLLDSASEDTWPAIRKLLQRETKTAVLGLESAVSAFELDEATEKELLAKLEKHGRSVVESKAKEEAGRVLIRMKDRFSTLFSRDADSMPRVWTGKEDIKAITKTARSASVKLLSTMAAIRLEEDGDNIENTLSLALVDTSRHGTTDRSIQLSDPLASSSWERVAEEKTLITPVQCKNLWRQFKAETEYTVTQAIAAQEANKRNNNWLPPPWALAAMAILGFNEFMTLLRNPLYLFAIFVIYLVGKALWVQSEIGREFQHGFLPAILSLSTKFVPTVMNILKRLADAGQEPAAAPERQREMELQPKSTRNGSLYSNVTSAGSSSVTTSEIGPEYSSPVVQ

SEQ ID NO: 194237 - protein, 610 aa, Zea Mays
MDAFRGRSQTTKGIWLAKAQNIEPCTLVMDLEGTDGRERGEDDTAFEKQSALFALAVSDIVLINMWCHDIGREQAANKPLLKTVFQVMMRLFSPRKTTLLFVIRDKSRTPLENLEPILREDIQKIWDAVPKPHAHKETPISEFFDVQVVALSSYEEKEELFKQQVSDLRDRFQHSIAPGGLAGDRRGVVPASGFSFSSQQFWKVIKENKDLDLPAHKVMVATVRCEEIGNEKVTSFIADEEWQQFEEAVQHDFVTGFGKKLSSLLDRCLSEYDMEAIYFDEGVRSSKRQQLESKLLQLVNPAYQSLLGHLHTRTLEAFKEYFGKALEKEGFAVAACNCTETFLEKFDRGSEDAAIQQVNWDTSKVRDKLRRDIEAHVASVRAAKLSELCAKYEAQLTKALVEPVESLLDSASEDTWPAIRKLLQRETKTAVLGLESAVSAFELDEATEKELLAKLEKHGRSVVESKAKEEAGRVLIRMKDRFSTLFSRDADSMPRSVKLLSTMAAIRLEEDGDNIENTLSLALVDTSRHGTTDRSIQLSDPLASSSWERVAEEKTLITPVQCKNLWRQFKAETEYTVTQAIAAQQIRGTTTGSHLHGHLLQWLSLDSTSL

SEQ ID NO: 194238 - protein, 738 aa, Zea Mays
MGDACFSTQLIDGDGIFNVSGLENFMKDVRLGECGLSYAVVSIMGPQSSGHRLPKDDTAFEKQSALFALAVSDIVLINMWCHDIGREQAANKPLLKTVFQATFEVMMRLFSPRKTTLLFVIRDKSRTPLENLEPILREDIQKIWDAVPKPHAHKETPISEFFDVQVVALSSYEEKEELFKQQVSDLRDRFQHSIAPGGLAGDRRGVVPASGFSFSSQQFWKVIKENKDLDLPAHKVMVATVRCEEIGNEKVTSFIADEEWQQFEEAVQHDFVTGFGKKLSSLLDRCLSEYDMEAIYFDEGVRSSKRQQLESKLLQLVNPAYQSLLGHLHTRTLEAFKEYFGKALEKEGFAVAACNCTETFLEKFDRGSEDAAIQQVNWDTSKVRDKLRRDIEAHVASVRAAKLSELCAKYEAQLTKALVEPVESLLDSASEDTWPAIRKLLQRETKTAVLGLESAVSAFELDEATEKELLAKLEKHGRSVVESKAKEEAGRVLIRMKDSRDADSMPRSVKLLSTMAAIRLEEDGDNIENTLSLALVDTSRHGTTDRSIQLSDPLASSSWERVAEEKTLITPVQCKNLWRQFKAETEYTVTQAIAAQEANKRNNNWLPPPWALAAMAILGFNEFMTLLRNPLYLFAIFVIYLVGKALWVQSEIGREFQHGFLPAILSLSTKFVPTVMNILKRLADAGQEPAAAPERQREMELQPKSTRNGSLYSNVTSAGSSSVTTSEIGPEYSSPVVQ

SEQ ID NO: 194239 - protein, 784 aa, Zea Mays
MKDVRLGECGLSYAVVSIMGPQSSGKSTLLNHLFGTNFREMDAFRGRSQTTKGIWLAKAQNIEPCTLVMDLEGTDGRERGEDDTAFEKQSALFALAVSDIVLINMWCHDIGREQAANKPLLKTVFQVMMRLFSPRKTTLLFVIRDKSRTPLENLEPILREDIQKIWDAVPKPHAHKETPISEFFDVQVVALSSYEEKEELFKQQVSDLRDRFQHSIAPGGLAGDRRGVVPASGFSFSSQQFWKVIKENKDLDLPAHKVMVATVRCEEIGNEKVTSFIADEEWQQFEEAVQHDFVTGFGKKLSSLLDRCLSEYDMEAIYFDEGVRSSKRQQLESKLLQLVNPAYQSLLGHLHTRTLEAFKEYFGKALEKEGFAVAACNCTETFLEKFDRGSEDAAIQQVNWDTSKVRDKLRRDIEAHVASVRAAKLSELCAKYEAQLTKALVEPVESLLDSASEDTWPAIRKLLQRETKTAVLGLESAVSAFELDEATEKELLAKLEKHGRSVVESKAKEEAGRVLIRMKDRFSTLFSRDADSMPRVWTGKEDIKAITKTARSASVKLLSTMAAIRLEEDGDNIENTLSLALVDTSRHGTTDRSIQLSDPLASSSWERVAEEKTLITPVQCKNLWRQFKAETEYTVTQAIAAQEANKRNNNWLPPPWALAAMAILGFNEFMTLLRNPLYLFAIFVIYLVGKALWVQSEIGREFQHGFLPAILSLSTKFVPTVMNILKRLADAGQEPAAAPERQREMELQPKSTRNGSLYSNVTSAGSSSVTTSEIGPEYSSPVVQ

SEQ ID NO: 194240 - protein, 791 aa, Zea Mays
MGDACFSTQLIDGDGIFNVSGLENFMKDVRLGECGLSYAVVSIMGPQSSGKSTLLNHLFGTNFREMDAFRGRSQTTKGIWLAKAQNIEPCTLVMDLEGTDGRERGEDDTAFEKQSALFALAVSDIVLINMWCHDIGREQAANKPLLKTVFQVMMRLFSPRKTTLLFVIRDKSRTPLENLEPILREDIQKIWDAVPKPHAHKETPISEFFDVQVVALSSYEEKEELFKQQVSDLRDRFQHSIAPGGLAGDRRGVVPASGFSFSSQQFWKVIKENKDLDLPAHKVMVATVRCEEIGNEKVTSFIADEEWQQFEEAVQHDFVTGFGKKLSSLLDRCLSEYDMEAIYFDEGVRSSKRQQLESKLLQLVNPAYQSLLGHLHTRTLEAFKEYFGKALEKEGFAVAACNCTETFLEKFDRGSEDAAIQQVNWDTSKVRDKLRRDIEAHVASVRAAKLSELCAKYEAQLTKALVEPVESLLDSASEDTWPAIRKLLQRETKTAVLGLESAVSAFELDEATEKELLAKLEKHGRSVVESKAKEEAGRVLIRMKDRFSTLFSRDADSMPRSVKLLSTMAAIRLEEDGDNIENTLSLALVDTSRHGTTDRSIQLSDPLASSSWERVAEEKTLITPVQCKNLWRQFKAETEYTVTQAIAAQEANKRNNNWLPPPWALAAMAILGFNEFMTLLRNPLYLFAIFVIYLVGKALWVQSEIGREFQHGFLPAILSLSTKFVPTVMNILKRLADAGQEPAAAPERQREMELQPKSTRNGSLYSNVTSAGSSSVTTSEIGPEYSSPVVQ

SEQ ID NO: 194241 - protein, 737 aa, Zea Mays
MKDVRLGECGLSYAVVSIMGPQSSGHRLPKDDTAFEKQSALFALAVSDIVLINMWCHDIGREQAANKPLLKTVFQATFEVMMRLFSPRKTTLLFVIRDKSRTPLENLEPILREDIQKIWDAVPKPHAHKETPISEFFDVQVVALSSYEEKEELFKQQVSDLRDRFQHSIAPGGLAGDRRGVVPASGFSFSSQQFWKVIKENKDLDLPAHKVMVATVRCEEIGNEKVTSFIADEEWQQFEEAVQHDFVTGFGKKLSSLLDRCLSEYDMEAIYFDEGVRSSKRQQLESKLLQLVNPAYQSLLGHLHTRTLEAFKEYFGKALEKEGFAVAACNCTETFLEKFDRGSEDAAIQQVNWDTSKVRDKLRRDIEAHVASVRAAKLSELCAKYEAQLTKALVEPVESLLDSASEDTWPAIRKLLQRETKTAVLGLESAVSAFELDEATEKELLAKLEKHGRSVVESKAKEEAGRVLIRMKDRFSTLFSRDADSMPRVWTGKEDIKAITKTARSASVKLLSTMAAIRLEEDGDNIENTLSLALVDTSRHGTTDRSIQLSDPLASSSWERVAEEKTLITPVQCKNLWRQFKAETEYTVTQAIAAQEANKRNNNWLPPPWALAAMAILGFNEFMTLLRNPLYLFAIFVIYLVGKALWVQSEIGREFQHGFLPAILSLSTKFVPTVMNILKRLADAGQEPAAAPERQREMELQPKSTRNGSLYSNVTSAGSSSVTTSEIGPEYSSPVVQ

SEQ ID NO: 194242 - protein, 762 aa, Zea Mays
MGDACFSTQLIDGDGIFNVSGLENFMKDVRLGECGLSYAVVSIMGPQSSGHRLPKDDTAFEKQSALFALAVSDIVLINMWCHDIGREQAANKPLLKTVFQATFEVMMRLFSPRKTTLLFVIRDKSRTPLENLEPILREDIQKIWDAVPKPHAHKETPISEFFDVQVVALSSYEEKEELFKQQVSDLRDRFQHSIAPGGLAGDRRGVVPASGFSFSSQQFWKVIKENKDLDLPAHKVMVATVRCEEIGNEKVTSFIADEEWQQFEEAVQHDFVTGFGKKLSSLLDRCLSEYDMEAIYFDEGVRSSKRQQLESKLLQLVNPAYQSLLGHLHTRTLEAFKEYFGKALEKEGFAVAACNCTETFLEKFDRGSEDAAIQQVNWDTSKVRDKLRRDIEAHVASVRAAKLSELCAKYEAQLTKALVEPVESLLDSASEDTWPAIRKLLQRETKTAVLGLESAVSAFELDEATEKELLAKLEKHGRSVVESKAKEEAGRVLIRMKDRFSTLFSRDADSMPRVWTGKEDIKAITKTARSASVKLLSTMAAIRLEEDGDNIENTLSLALVDTSRHGTTDRSIQLSDPLASSSWERVAEEKTLITPVQCKNLWRQFKAETEYTVTQAIAAQEANKRNNNWLPPPWALAAMAILGFNEFMTLLRNPLYLFAIFVIYLVGKALWVQSEIGREFQHGFLPAILSLSTKFVPTVMNILKRLADAGQEPAAAPERQREMELQPKSTRNGSLYSNVTSAGSSSVTTSEIGPEYSSPVVQ

SEQ ID NO: 194243 - protein, 809 aa, Zea Mays
MGDACFSTQLIDGDGIFNVSGLENFMKDVRLGECGLSYAVVSIMGPQSSGKSTLLNHLFGTNFREMDAFRGRSQTTKGIWLAKAQNIEPCTLVMDLEGTDGRERGEDDTAFEKQSALFALAVSDIVLINMWCHDIGREQAANKPLLKTVFQVMMRLFSPRKTTLLFVIRDKSRTPLENLEPILREDIQKIWDAVPKPHAHKETPISEFFDVQVVALSSYEEKEELFKQQVSDLRDRFQHSIAPGGLAGDRRGVVPASGFSFSSQQFWKVIKENKDLDLPAHKVMVATVRCEEIGNEKVTSFIADEEWQQFEEAVQHDFVTGFGKKLSSLLDRCLSEYDMEAIYFDEGVRSSKRQQLESKLLQLVNPAYQSLLGHLHTRTLEAFKEYFGKALEKEGFAVAACNCTETFLEKFDRGSEDAAIQQVNWDTSKVRDKLRRDIEAHVASVRAAKLSELCAKYEAQLTKALVEPVESLLDSASEDTWPAIRKLLQRETKTAVLGLESAVSAFELDEATEKELLAKLEKHGRSVVESKAKEEAGRVLIRMKDRFSTLFSRDADSMPRVWTGKEDIKAITKTARSASVKLLSTMAAIRLEEDGDNIENTLSLALVDTSRHGTTDRSIQLSDPLASSSWERVAEEKTLITPVQCKNLWRQFKAETEYTVTQAIAAQEANKRNNNWLPPPWALAAMAILGFNEFMTLLRNPLYLFAIFVIYLVGKALWVQSEIGREFQHGFLPAILSLSTKFVPTVMNILKRLADAGQEPAAAPERQREMELQPKSTRNGSLYSNVTSAGSSSVTTSEIGPEYSSPVVQ

SEQ ID NO: 194244 - protein, 236 aa, Zea Mays
MTYEQYRCWILNNSASSIGTGPVVDLLAGSAAGGTAVLCTYPLDLARTKLAYQVSNVGQTGNALGNSGQQQTYNGIKDVFKTVYKEGGARSLYRGVGPTLIGILPYAGLKFYIYEDLKSQVPDDYKDSVILKLSCGALAGLFGQTLTYPLDVVRRQMQVQSKQSQNSSDGFRIRGTFQGLLLIIRCQGWRQLFAGLSLNYVKVVPSVAIGFTTYDMMKALLGVPPRERVHASGGNK

SEQ ID NO: 194245 - protein, 149 aa, Zea Mays
MVNLSGAFGSKALSVGVDVSFDTATSDFTKYNAALSLTSPDLIASLHLNNHGDTLVASYYHLVKNHSGTAVGAELSHSMSRNESTLIFGSQHSLDPHTTIKTRFNNYGMASALVQHEWRPKSFVTISGDVDTKAIEKSTKVGLSLVLKH

SEQ ID NO: 194246 - protein, 137 aa, Zea Mays
MDKGTILKTMPLEPSSQNPSMQIAVIRHVVSGILLHNTIYDVVPLSSKGLALVPFWDDRQGTITGMLTASDFVLILRKLQRNIQVIGNEEPISAWKEAKLQFYGGPDGAVMQRTPLIHTGNIDLRAKKEAQLGMLPV

SEQ ID NO: 194247 - protein, 165 aa, Zea Mays
MKCLWKTMYYPLCSQSLLSEELIWIRMPLEPSSQNPSMQIAVIRHVVSGILLHNTIYDVVPLSSKLTVLDTQLPVKQAFKIMHDVGTITGMLTASDFVLILRKLQRNIQVIGNEEPISAWKEAKLQFYGGPDGAVMQRTPLIHFVQTGNIDLRAKKEAQLGMLPV

SEQ ID NO: 194248 - protein, 207 aa, Zea Mays
MYRFLVDGVWRCDETKPFVRDEYGLISNEVLVENNVLPVVQPEPSIRGTNMDKGTILKTMPLEPSSQNPSMQIAVIRHVVSGILLHNTIYDVVPLSSKLTVLDTQLPVKQAFKIMHDVGLALVPFWDDRQGTITGMLTASDFVLILRKLQRNIQVIGNEEPISAWKEAKLQFYGGPDGAVMQRTPLIHTGNIDLRAKKEAQLGMLPV

SEQ ID NO: 194249 - protein, 145 aa, Zea Mays
MKCLWKTMYYPLCSQSLLSEELIWIRMPLEPSSQNPSMQIAVIRHVVSGILLHNTIYDVVPLSSKGTITGMLTASDFVLILRKLQRNIQVIGNEEPISAWKEAKLQFYGGPDGAVMQRTPLIHFVQTGNIDLRAKKEAQLGMLPV

SEQ ID NO: 194250 - protein, 210 aa, Zea Mays
MYRFLVDGVWRCDETKPFVRDEYGLISNEVLVENNVLPVVQPEPSIRGTNMDKGTILKTMPLEPSSQNPSMQIAVIRHVVSGILLHNTIYDVVPLSSKLTVLDTQLPVKQAFKIMHDVGLALVPFWDDRQGTITGMLTASDFVLILRKLQRNIQVIGNEEPISAWKEAKLQFYGGPDGAVMQRTPLIHFVQTGNIDLRAKKEAQLGMLPV

SEQ ID NO: 194251 - protein, 157 aa, Zea Mays
MKCLWKTMYYPLCSQSLLSEELIWIRMPLEPSSQNPSMQIAVIRHVVSGILLHNTIYDVVPLSSKGLALVPFWDDRQGTITGMLTASDFVLILRKLQRNIQVIGNEEPISAWKEAKLQFYGGPDGAVMQRTPLIHFVQTGNIDLRAKKEAQLGMLPV

SEQ ID NO: 194252 - protein, 140 aa, Zea Mays
MPLEPSSQNPSMQIAVIRHVVSGILLHNTIYDVVPLSSKLTVLDTQLPVKQAFKIMHDVGLALVPFWDDRQGTITGMLTASDFVLILRKLQRNIQVIGNEEPISAWKEAKLQFYGGPDGAVMQRTPLIHVLLHIFADSFI

SEQ ID NO: 194253 - protein, 160 aa, Zea Mays
MDKGTILKTMPLEPSSQNPSMQIAVIRHVVSGILLHNTIYDVVPLSSKLTVLDTQLPVKQAFKIMHDVGLALVPFWDDRQGTITGMLTASDFVLILRKLQRNIQVIGNEEPISAWKEAKLQFYGGPDGAVMQRTPLIHFVQTGNIDLRAKKEAQLGMLPV

SEQ ID NO: 194254 - protein, 119 aa, Zea Mays
MPLEPSSQNPSMQIAVIRHVVSGILLHNTIYDVVPLSSKGTITGMLTASDFVLILRKLQRNIQVIGNEEPISAWKEAKLQFYGGPDGAVMQRTPLIHFVQTGNIDLRAKKEAQLGMLPV

SEQ ID NO: 194255 - protein, 149 aa, Zea Mays
MDKGTILKTMPLEPSSQNPSMQIAVIRHVVSGILLHNTIYDVVPLSSKLTVLDTQLPVKQAFKIMHDVGLALVPFWDDRQGTITGMLTASDFVLILRKLQRNIQVIGNEEPISAWKEAKLQFYGGPDGAVMQRTPLIHVLLHIFADSFI

SEQ ID NO: 194256 - protein, 157 aa, Zea Mays
MDKGTILKTMPLEPSSQNPSMQIAVIRHVVSGILLHNTIYDVVPLSSKLTVLDTQLPVKQAFKIMHDVGLALVPFWDDRQGTITGMLTASDFVLILRKLQRNIQVIGNEEPISAWKEAKLQFYGGPDGAVMQRTPLIHTGNIDLRAKKEAQLGMLPV

SEQ ID NO: 194257 - protein, 262 aa, Zea Mays
MYRFLVDGVWRCDETKPFVRDEYGLISNEVLVENNVLPVVQPEPSIRGTNMDKGTILKTMPLEPSSQNPSMQIAVIRHVVSGILLHNTIYDVVPLSSKLTVLDTQLPVKQAFKIMHDVGLALVPFWDDRQGTITGMLTASDFVLILRKLQRNIQVIGNEEPISAWKEAKLQFYGGPDGAVMQRTPLIHATLISGPRKKLNSACFLFEARATNLPHQISVAKAGLVNKLCFLPDCHCFYICAFILRETFCPKKACSARFKQVI

SEQ ID NO: 194258 - protein, 122 aa, Zea Mays
MKCLWKTMYYPLCSQSLLSEELIWIRMPLEPSSQNPSMQIAVIRHVVSGILLHNTIYDVVPLSSKRNIQVIGNEEPISAWKEAKLQFYGGPDGAVMQRTPLIHTGNIDLRAKKEAQLGMLPV

SEQ ID NO: 194259 - protein, 116 aa, Zea Mays
MPLEPSSQNPSMQIAVIRHVVSGILLHNTIYDVVPLSSKGTITGMLTASDFVLILRKLQRNIQVIGNEEPISAWKEAKLQFYGGPDGAVMQRTPLIHTGNIDLRAKKEAQLGMLPV

SEQ ID NO: 194260 - protein, 148 aa, Zea Mays
MDKGTILKTMPLEPSSQNPSMQIAVIRHVVSGILLHNTIYDVVPLSSKLTVLDTQLPVKQAFKIMHDVGTITGMLTASDFVLILRKLQRNIQVIGNEEPISAWKEAKLQFYGGPDGAVMQRTPLIHFVQTGNIDLRAKKEAQLGMLPV

SEQ ID NO: 194261 - protein, 192 aa, Zea Mays
MDKGTILKTMPLEPSSQNPSMQIAVIRHVVSGILLHNTIYDVVPLSSKGLALVPFWDDRQGTITGMLTASDFVLILRKLQRNIQVIGNEEPISAWKEAKLQFYGGPDGAVMQRTPLIHATLISGPRKKLNSACFLFEARATNLPHQISVAKAGLVNKLCFLPDCHCFYICAFILRETFCPKKACSARFKQVI

SEQ ID NO: 194262 - protein, 134 aa, Zea Mays
MKCLWKTMYYPLCSQSLLSEELIWIRMPLEPSSQNPSMQIAVIRHVVSGILLHNTIYDVVPLSSKGLALVPFWDDRQGTITGMLTASDFVLILRKLQRNIQVIGNEEPISAWKEAKLQFYGGPDGAVMQRTPLI

SEQ ID NO: 194263 - protein, 92 aa, Zea Mays
MLDVRASRLKRNTNRAHVFYFALHYLLLLCGGVIYSMWPVCCVVPAEGRAGRRCLRKCCCQHQPPGRARTQAAPQLVTPSARCYFMWSWYVG

SEQ ID NO: 194264 - protein, 92 aa, Zea Mays
MGAAGGRAVAVAAMVAVAAALPLLACGGYAECYDYCFKDCISKDKSMRDYCSYACDKTCAPDARRRRPAVVPMNCQLACVRESCHRRRAAGG

SEQ ID NO: 194265 - protein, 135 aa, Zea Mays
MAARLAQLRAQAVQAAEFASKHGGSYYKELMEKNKQYVVQPPTIEKCQELSKQLFYTRLARALVLTNTPYVSKFLPGRYESFWKELDGVKQVWKNRKDLKVEDLGIATLFGVELYAWFCVGEIVGRGFTLTGYKV

SEQ ID NO: 194266 - protein, 62 aa, Zea Mays
MPAKTGTWLQHCLNNLPAQFLILMHVILCQLHVLQSLRADSFRVFRSAHKINSFCVTYDRFG

SEQ ID NO: 194267 - protein, 88 aa, Zea Mays
MGFSNDNDYLPMDIVELSSDHLIEDKVSDEVVFKAMGRAINKTVMVVELIKRRIVGLHQNTTTGSTDITDMWERIGRRPTSVSDLFLF

SEQ ID NO: 194268 - protein, 149 aa, Zea Mays
MMSSLKKQGTRSRSKVANSCDPTHRTYHSGEERNRAKKQARKMAGGGVVKHILLASFKEEVTQERLDELIRGYAALVGVVPSMKAFHWGTDVSIENMHQGFTHVFESTFESTEGIKEYIEHPAHVEFASVFLPVLEKVLIIDYKPTSAN

SEQ ID NO: 194269 - protein, 174 aa, Zea Mays
MPTASSRRTFSEAVSTDDEEAARGGKVGRPSPPRCSSRSKVANSCDPTHRTYHSGEERNRAKKQARKMAGGGVVKHILLASFKEEVTQERLDELIRGYAALVGVVPSMKAFHWGTDVSIENMHQGFTHVFESTFESTEGIKEYIEHPAHVEFASVFLPVLEKVLIIDYKPTSAN

SEQ ID NO: 194270 - protein, 511 aa, Zea Mays
MLTPQQQQQLMLHAQQNMSSPTSSDVDNRRLRMMLNRNAVLGRDGQTNSGSDIIPNIGSPSQSGGDIDMLIKKKLAQQQQLLQQQSNSQQLPQQHQLQQPAVSSQQSQSSNQHLQQEKPGIGSMPADGGIPNSFGGAEQTAKKRKKPGSSSGRANSSGTANTAGPSPSSAPSTPSTHTPGDVMSVPQLQQNGGSAKPMDDMDPRDNLGRCMDASKGFGFSEVAKARASTAKVVCCHFSADGKLLATGGHDKKVTLWCTDSLNPKSYLEEHSFLITDVRFSPSMSRLATSSFDKTVRVWDADNTDYSLRTFTGHSATVMSLDFHPNKEDMICSCDSDGEVRSWSINNGSCLTCVKGGATQMRFQPRKGKYLAAASDKAIYILDGETQHACRSPLQGHNKNIQSLCWDSAGEYLASVSEDSVRIWSFSSGREGEFVHELNRSGNQFHSCVFHPTYQSLLVIGCYESLELWDIREKNTMTFNNAHDGLVAALASSSATGKVASVSHDRTLKLWK

SEQ ID NO: 194271 - protein, 303 aa, Zea Mays
MSQTNWEADKMLDVYIYDYFMKRNLQATAKAFQAEGKVSSDPVAIDAPGGFLFEWWSVFWDIFIARTNEKHSDVAASYIETQLMKAREQQHQQQQQIPQQRQQQPQHIQMQQMLLQRAVQQQQQQQQQQQQQQQQQQQQQQQQQPQQQQQQQLQQQQLQQQRRDGSHLLNGSANGISGNNPLMRQNQSTANVMATKMYEERLKVPSERDSLEEASLKQRYGENAGQLLDSNEASLLKAASSAQSSGQILHGTVGGLSGTLQQVQARSPQLPGPAQGIKTEINPILTPRAAGPEGSFIGAQALQ

SEQ ID NO: 194272 - protein, 997 aa, Zea Mays
MNLSQAAIEKAQPPKTMQFLGNIRGMDLLVLLDSGSSHCFLSTQVADQLQGLTPLPQVLSVQVANGSKLQCTHELVQASWSLGGCEFQSTLRILPLQTYDLIVGMDWLEQFSPMWVHWADKWLTITYKGSPKQLFGLHSPKGQYSVVELCHIAELPDKDHSILSALPADLQTLLYKFQSVFAVPKGLPPPRDCDHHINLLPGAQPFHMRPYRYAPALKSEVEKQVEEMLAAGIIQPSQSAFSSSVILVKKKDDTYRFCVDYRHLNAITVKTRFPIPVVDEFLDELHGAAWFSTLDLRAGFHQIRMAPDDQHKTAFQTHNGHYEFRVMSFGLTGAPATFQGAMNKTLSSLLRKCVLVFFDDILVYSHTWEDHLLHIELVLQLLVQDCWQVKLSKCSFGRQEISYLGHIISQAGVATDPSKVAAVSSWPAPKTCKELRGFLGLAGYYRKFVKNFGILAKPLTNLLKKHTVFVWTEVQDSAFQAIKQALSSAPVLALPNFHRSFAIETDASGTGIGAVLQQDGHPLAFVSKALGVAHLGLSAYEKEYLAILLAVDQWRSYLQHAEFLILTDHRSLSHLNEQRLHTSWQQKVFTKLLGLQYRIVYKKGVDNAAADALSRRPHHEDLECCALSVASPSWLQDVVAGYNNDSEALKLLTALSVGSQPPYSLHNGIIRYKNRVWLGNNSELHNKVVAALHSSALGGHSGFPVTYRRIKQLFYWPHMKQTIKDLVDACSVCHQAKPDRSRYPGLLQPLPVPQHAWQAISLDFIEGLPRSGVYNTILVVVDRLSKYAHFVAMHHPFTALKVAKIFMTSVYRLHGMPESIVSDTDRIFTSALWKELFQLSGTCLHMSSSYHPQTDGQTERVNQCVETYLRCFVQSCPSKWSSWLPMAEYWYNCCFHTSLGRSPFEVLYGHSPRHFGLSVDDSVNHADLKLWLSQRELMLRAVQQHLLRAQQRMKNQADKRRSEREYQVGDMVYLKLQPYVQTSVALRANHKLAYKYF

SEQ ID NO: 194273 - protein, 1178 aa, Zea Mays
MHMLTELSRREKAANIKPDADIDAFMKAAALGGQDANVVTDYILKILGLDICADTMVGDEMLRGISGGQRKRVTTGEMLVGPARALFMDEISTGLDSSTTFQIVNSLRQSIHILGGTAVISLLQPAPETYNLFDDIILLSDGQVVYQGPREEVVEFFESVGFRCPERKGVADFLQEVTSKKDQKQYWARPDEPYRFVSVKELATAFKSSHTGRALANELAVPFDKSKSHPAALTTTRYGVSGKELLKANIDREILLMKRNSFVYMFRTFQLMVMSIIAMTLFFRTKMKHDTVNDGGIYMGALFFGVLMIMFNGLSELALTVFKLPVFFKQRDLLFFPAWSYTIPAWILKVPITFIEVGGYVFLTYYVIGFDPNVGRFFKQYLLLLAVNQMTAALFRFVGGVSRNMIVANVFASFMLLVVMVLGGFILQRDKVKKWWIWGYWISPMMYAQNAISVNEMLGHSWDKILNSTASNETLGVQVLKSRGVFPEAKWYWIGFGAMVGFTILFNALFTLALTYLKPYGNSRPSVSKEELKEKHANIKGEVVDGNHLVSVNPVTDSAIMEDDSASTKKGMILPFVPLSVTFDNIKYSVDMPQEMKGQGVQEDRLELLKSISGSFRPGVLTALMGVSGAGKTTLMDVLAGRKTGGYIEGDIRISGYPKKQETFARVSGYCEQNDIHSPQVTVYESLLFSAWLRLPKDVDSNKRKIFIEEVMELVELKPLRNALVGLPGVNGLSTEQRKRLTIAVELVANPSIIFMDEPTSGLDARAAAIVMRTVRNTVDTGRTVVCTIHQPSIDIFEAFDELFLMKRGGEEIYAGPLGHNSSELIKYFEEIQGVSKIKDGYNPATWMLEVTTISQEQILGVDFSDIYKKSELYQRNKALIKELSQPAPGSTDLHFSSKYAQSFNTQCVACLWKQNLSYWRNPPYNTVRFFFTGIIALLLGTIFWDLGSKVYTSQDLLNAMGSMYSAVLFIGVMNCTSVQPVVAVERTVFYRERAAGMYSAFPYAFGQVVIELPYALAQDILYAVIVYSMIGFEWTVAKFFWYLFFGYFTLLYFTFYGMMTVGLTPNYHIAAIVSAAFYAIWNLFSGFVIPRPKVPIWWRWYCWICPVAWTLYGLVVSQYGDIMTEMDDKRTVKVFVEDYFDFKHSWLGWVAAVVVAFGVLFATLFAFAIMKLNFQKR

SEQ ID NO: 194274 - protein, 251 aa, Zea Mays
MHGFFLLHASHTHDKKHSADARAFSFIKILNLMQDMSYPPQMLFVENVVGFEVSDTHDQLLEVLSSLNFNTQEFILSPLQFGVPYSRPRYFCLAKREPVRFRHAFVNNKLLQTPMCLSLTLSSTSQGSDHQTEEELEPVCKPIKDFLVKEADGGTPDETVLQDYMVPVNLIERWGNAMDIVYPEFKRCCCFTKSYYRYVKGTGSLLATSKNLNVPEEKLQISSLKELGLRFFTPREVAALLHLCLNPSPGS

SEQ ID NO: 194275 - protein, 218 aa, Zea Mays
MHGFFLLHASHTHDKKHSADARAFSFIKILNLMQDMSYPPQMLFVENVVGFEVSDTHDQLLEVLSSLNFNTQEFILSPLQFGVPYSRPRYFCLGSDHQTEEELEPVCKPIKDFLVKEADGGTPDETVLQDYMVPVNLIERWGNAMDIVYPEFKRCCCFTKSYYRYVKGTGSLLATSKNLNVPEEKLQISSLKELGLRFFTPREVAALLHLCLNPSPGS

SEQ ID NO: 194276 - protein, 224 aa, Zea Mays
MEAPAPWRVLEFYSGIGGLRYSLMASGVRAEVVEAFDINDVANDVYEHNFGHRPCQGNIQTLTASDLDKYKAHAWLLSPPCQPYTRQGLQKHSADARAFSFIKILNLMQDMSYPPQMLFVENVVGFEVSDTHDQLLEVLSSLNFNTQEFILSPLQFGVPYSRPRYFCLAKREPVRFRHAFVNNKLLQTPMCLSLTLSSTSQGSDHQTEEELEPVCKPIKDFLGG

SEQ ID NO: 194277 - protein, 286 aa, Zea Mays
MEAPAPWRVLEFYSGIGGLRYSLMASGVRAEVVEAFDINDVANDVYEHNFGHRPCQVSDTHDQLLEVLSSLNFNTQEFILSPLQFGVPYSRPRYFCLAKREPVRFRHAFVNNKLLQTPMCLSLTLSSTSQGSDHQTEEELEPVCKPIKDFLVKEADGGTPDETVLQDYMVPVNLIERWGNAMDIVYPEFKRCCCFTKSYYRYVKGTGSLLATSKNLNVPEEKLQISSLKELGLRFFTPREVANFHSFPSNFCFPDHISLRQQYAMLGNSLSIAVVGPLLHYLFAEA

SEQ ID NO: 194278 - protein, 282 aa, Zea Mays
MHGFFLLHASHTHDKKHSADARAFSFIKILNLMQDMSYPPQMLFVENVVGFEVSDTHDQLLEVLSSLNFNTQEFILSPLQFGVPYSRPRYFCLAKREPVRFRHAFVNNKLLQTPMCLSLTLSSTSQGSDHQTEEELEPVCKPIKDFLVKEADGGTPDETVLQDYMVPVNLIERWGNAMDIVYPEFKRCCCFTKSYYRYVKGTGSLLATSKNLNVPEEKLQISSLKELGLRFFTPREVANFHSFPSNFCFPDHISLRQQYAMLGNSLSIAVVGPLLHYLFAEA

SEQ ID NO: 194279 - protein, 262 aa, Zea Mays
MEAPAPWRVLEFYSGIGGLRYSLMASGVRAEVVEAFDINDVANDVYEHNFGHRPCQVSDTHDQLLEVLSSLNFNTQEFILSPLQFGVPYSRPRYFCLAKREPVRFRHAFVNNKLLQTPMCLSLTLSSTSQGSDHQTEEELEPVCKPIKDFLVKEADGGTPDETVLQDYMVPVNLIERWGNAMDIVYPEFKRCCCFTKSYYRYVKGTGSLLATSKNLNVPEEKLQISSLKELGLRFFTPREVANFHSFPSNFCFPDHISLRQQ

SEQ ID NO: 194280 - protein, 70 aa, Zea Mays
MEEPAVIESYYNKRIVGCPGGEGEDEHDVVWFWLKKDEPHECPVCSQYFLKVIGDGGDPDGHDDEDDGHH

SEQ ID NO: 194281 - protein, 307 aa, Zea Mays
MDPFSKKRKPDDNGAVTASPAGGAATLGLTREDVLRLLEPLSRDQLADIAAAAALVSAHALDAVRAAADRDPALRKLFIRGLGWETTSDSLRAIFSAYGDLEEAVVITDKSTGRSKGYGFVTFRHADSAVLALKEPSKKIDGRMTVTQLAAAGSAGGPSVGAPGSGGAPVADVSLRKIFVGNVPADMSSERLLAHFASYGEIEEGPLGFDKQTGKFRGFALFVYKTPEGAQASLVDSVKVIDSHQLVCKLAIDGKKGKQGQSQQSGPGNQQQQQQQQMLPGGPQEIQGGLGLGSQMGAQYGGPGSER

SEQ ID NO: 194282 - protein, 1022 aa, Zea Mays
MAGAGAMGFPRELMVQRIQSLVEEGFWDALRRHKLDVLGTDDSPIPITGYYTPRQRRPMASFFNLRSGSLVPPSHSSVGDRNNCPVPGTLINTNNMRGFENLDREQLLKAEAKKILHDIVSGKVEEDPSVLLRFLVTSFADLKNWKVYYNVAFPSLVFNSRITLLSLQPASKVLTKEEAASMYTSLQKWRTSSETTVIPFFLVSISSDSSASIRQLKEWKACQGNYQKLLFGFYDHGCRSDCPGWVLRNYVAFLSIRWKIEKAQIFCYREYKGNPDLEQSLIGEASFPSPYGWDNPEFLPDAIGWEGVKPGKGTKEMKPKEIDLQSMNPASQDEEKQLMHLKLMGWRHFPVNIDRLSHVRVLLLGAGTLGCEVARLLMTWGVRKLTVVDSGSVVMSDLAKQSLYIDKDCGVPRVSAIAPHLKERCPAVEVESIQLEIPMPGHPVSSSKMASVLDDCKHLQTLVAANDAIFLLTDTWESRWLPTLLCSSENKIAISALLGHDSYLVMRHGAGPGTSGGTDEVTTQKLSTENALGHQRLGCCFCNDTASLINPISYETLPGLTSVASGKAVELFARMLHHPDEIRAPGDTAGTETEHQLGLLPHQLRGSLPKCDLFVELNNSSVNCTACSVAVLSEYRRRGLDFVMQAINYPAYLKDFTGISDSKRPDTCPKIPPNISVNSDKISDVRCLLLGAGTLGCDVARILMDCGVRKITVVDSGHVVVSNLARQSLYTSDDRGAPKATAILRHLVERCPSVDAQGIKMEIPMPGHPVSPGEAAGVLQDCERLKELVLSHDAIFLLTDTRESRWLPTLLCTNENKIAITAALGYDSYLVMRHGAGPGISCEASSVVTAIDKMSTEDALGRQRLGCYFCNDVIAPVDSVSNRTLDQQCTVTRPGLASIASGRAADLFRRMLHHPDGIHAPGEIAGTGSGHEHGLLPHQMRGSLSQYNILTLLGYSSSNCTACSHAVLYQYRRRGMDFVMQVINEPTYLEDLTGLTELMKSASCSQVEWVDEIDEDDFVEGW

SEQ ID NO: 194283 - protein, 871 aa, Zea Mays
MLHSPHWFSTQESPCSACNLPQKCSPKKAASMYTSLQKWRTSSETTVIPFFLVSISSDSSASIRQLKEWKACQGNYQKLLFGFYDHGCRSDCPGWVLRNYVAFLSIRWKIEKAQIFCYREYKGNPDLEQSLIGEASFPSPYGWDNPEFLPDAIGWEGVKPGKGTKEMKPKEIDLQSMNPASQDEEKQLMHLKLMGWRHFPVNIDRLSHVRVLLLGAGTLGCEVARLLMTWGVRKLTVVDSGSVVMSDLAKQSLYIDKDCGVPRVSAIAPHLKERCPAVEVESIQLEIPMPGHPVSSSKMASVLDDCKHLQTLVAANDAIFLLTDTWESRWLPTLLCSSENKIAISALLGHDSYLVMRHGAGPGTSGGTDEVTTQKLSTENALGHQRLGCCFCNDTASLINPISYETLPGLTSVASGKAVELFARMLHHPDEIRAPGDTAGTETEHQLGLLPHQLRGSLPKCDLFVELNNSSVNCTACSVAVLSEYRRRGLDFVMQAINYPAYLKDFTGISDSKRPDTCPKIPPNISVNSDKISDVRCLLLGAGTLGCDVARILMDCGVRKITVVDSGHVVVSNLARQSLYTSDDRGAPKATAILRHLVERCPSVDAQGIKMEIPMPGHPVSPGEAAGVLQDCERLKELVLSHDAIFLLTDTRESRWLPTLLCTNENKIAITAALGYDSYLVMRHGAGPGISCEASSVVTAIDKMSTEDALGRQRLGCYFCNDVIAPVDSVSNRTLDQQCTVTRPGLASIASGRAADLFRRMLHHPDGIHAPGEIAGTGSGHEHGLLPHQMRGSLSQYNILTLLGYSSSNCTACSHAVLYQYRRRGMDFVMQVINEPTYLEDLTGLTELMKSASCSQVEWVDEIDEDDFVEV

SEQ ID NO: 194284 - protein, 889 aa, Zea Mays
MAGAGAMGFPRELMVQRIQSLVEEGFWDALRRHKLDVLGTDDSPIPITGYYTPRQRRPMASFFNLRSGSLVPPSHSSVGDRNNCPVPGTLINTNNMRGFENLDREQLLKAEAKKILHDIVSGKVEEDPSVLLRFLVTSFADLKNWKVYYNVAFPSLVFNSRITLLSLQPASKVLTKEEAASMYTSLQKWRTSSETTVIPFFLVSISSDSSASIRQLKEWKACQGNYQKLLFGFYDHGCRSDCPGWVLRNYVAFLSIRWKIEKAQIFCYREYKGNPDLEQSLIGEASFPSPYGWDNPEFLPDAIGWEGVKPGKGTKEMKPKEIDLQSMNPASQDEEKQLMHLKLMGWRHFPVNIDRLSHVRVLLLGAGTLGCEVARLLMTWGVRKLTVVDSGSVVMSDLAKQSLYIDKDCGVPRVSAIAPHLKERCPAVEVESIQLEIPMPGHPVSSSKMASVLDDCKHLQTLVAANDAIFLLTDTWESRWLPTLLCSSENKIAISALLGHDSYLVMRHGAGPGTSGGTDEVTTQKLSTENALGHQRLGCCFCNDTASLINPISYETLPGLTSVASGKAVELFARMLHHPDEIRAPGDTAGTETEHQLGLLPHQLRGSLPKCDLFVELNNSSVNCTACSVAVLSEYRRRGLDFVMQAINYPAYLKDFTGISDSKRPDTCPKIPPNISVNSDKISDVRCLLLGAGTLGCDVARILMDCGVRKITVVDSGHVVVSNLARQSLYTSDDRGAPKATAILRHLVERCPSVDAQGIKMEIPMPGHPVSPGEAAGVLQDCERLKELVLSHDAIFLLTDTRESRWLPTLLCTNENKIAITAALGYDSYLVMRHGAGPGISCEASSVVTAIDKMSTEDALGRQRLGCYFCNDVIAPVDFPIGHWINNVQ

SEQ ID NO: 194285 - protein, 117 aa, Zea Mays
MYSLADSPWTDTSATAGGMGGRVQSPVSLTPSPPPRPWQVGMTSSPVWPSPSRRVWRWRESDGRLHTPDVVAAAAEPVASVWHVVRRVGRCEHGGERREQSRIEESEGRTSRMAMLD

SEQ ID NO: 194286 - protein, 74 aa, Zea Mays
MIKPQHDSRGKRVLDPGEKRGRQTGSARMINRNVIKFRDRIYGKKHGLDRVCATRHQTTIFFDITTCIREFRFG

SEQ ID NO: 194287 - protein, 351 aa, Zea Mays
MMLGLRKKKKQQTLDERRWRAVHCAKTANTRRASMACCSLRSKKQRATRRRWGCCAFCRAPSKHQRRRRSSTHTGRKPSHKAWRECSAASAAARHGRGLRLRGEAGRAAAVSRHEGEMELSSLFAARRGQQGEEEDPAAVARGRTSKGEEGASVWGIFLGVHGRELPRRHGQGGNAMRKLELEPWGREGSSLGHLLRHGRKQDAMAGGARGAGSLLLAFSKGAELGWKQPRRELARAVKESSAARVPGGRSSPQGRLAPWEQLGRELLCAMSRREEGTGWEKWRRGGTQAGRRGLGVHGCKPCSLLAAVGAREEEGRGMRALAGRRRGRNVVAARGVDAIFQIGKGRHFYL

SEQ ID NO: 194288 - protein, 153 aa, Zea Mays
MLKILILSDQGNQIVLCKFKSKCKFNHPKDMVNALGTGTNNESLIADSAVLPVRPSEPICVFYAKTGKCKFGAICKFNHPKDIKTSPLIAKETIYTATTDAADAPTEACNAKGLPIRQGEVDCSFYMKTGSCKYGSICRFNHPDRPGPGLFFS

SEQ ID NO: 194289 - protein, 137 aa, Zea Mays
MVPLVQATLPSSAPIVPAVVEPLPMIYPQRPGETVCDFYMKTGSCKYSQKCKFHHPISRFAPHSKENGDPQQPATLASLPRREDAEACAFYMRSGMCRFGAHCKFDHPPREEAISELQAAGKEGIEGPSLVQRDHDV

SEQ ID NO: 194290 - protein, 170 aa, Zea Mays
MSARDDPRKAPNVEDSYPERPGEPDCPYLLNNRCKFKSKCKFNHPKDMVNALGTGTNNESLIADSAVLPVRPSEPICVFYAKTGKCKFGAICKFNHPKDIKTSPLIAKETIYTATTDAADAPTEACNAKGLPIRQGEVDCSFYMKTAANMVLFVASTILIGQGQVCSFHN

SEQ ID NO: 194291 - protein, 575 aa, Zea Mays
MPALHCDPYLNTDAGTMSPFEHGEVFVLDDGGEVDLDLGNYERFLDIKLTRDNNITTGKIYQSVIDKERKGEYLGKTVQVVPHITNAIQEWIERVAKIPVDGKEGPADVCVIELGGTIGDIESMPFIEALGQFSYRVGPGNFCLVHVSLVPVLNVVGEQKTKPTQHSVRGLRGLGLTPNILACRSTKELEENVKEKLSQFCHVPAANIITLYDVSNIWRIPLLLHEQKAHEAILKVLNLERMDSIAREPKLDEWIARATIFDTLHDTVRIAMVGKYTGLSDSYLSVLKALLHASVDCHRKLVVDWVASTDLEDSTAIEAPDSYKTAWNLLKGAGGILVPGGFGDRGVQGKILAAKYAREKNVPYLGICLGMQIAVVEYARHVMNLTDANSTEFDPNTKTPCVIFMPEGSKTHMGATMRLGSRRTFFKIADCKSSKLYGNVTYVDERHRHRYEVNPDMVPEFENAGLQFVGKDDTGRRMEIIEIPNHRYFVGAQFHPEFKSRPSKPSPLFVGLIAAASGQLDRVLQDRCTGHAVSEKHVLSNGSYTPAIHQNGHPKKLPNGLSNGTYYGNGNGVHA

SEQ ID NO: 194292 - protein, 591 aa, Zea Mays
MKYVLVTGGVVSGLGKGVTASSIGVVLKACGLRITSIKIDPYLNTDAGTMSPFEHGEVFVLDDGGEVDLDLGNYERFLDIKLTRDNNITTGKIYQVVPHITNAIQEWIERVAKIPVDGKEGPADVCVIELGGTIGDIESMPFIEALGQFSYRVGPGNFCLVHVSLVPVLNVVGEQKTKPTQHSVRGLRGLGLTPNILACRSTKELEENVKEKLSQFCHVPAANIITLYDVSNIWRIPLLLHEQKAHEAILKVLNLERMDSIAREPKLDEWIARATIFDTLHDTVRIAMVGKYTGLSDSYLSVLKALLHASVDCHRKLVVDWVASTDLEDSTAIEAPDSYKTAWNLLKGAGGILVPGGFGDRGVQGKILAAKYAREKNVPYLGICLGMQIAVVEYARHVMNLTDANSTEFDPNTKTPCVIFMPEGSKTHMGATMRLGSRRTFFKIADCKSSKLYGNVTYVDERHRHRYEVNPDMVPEFENAGLQFVGKDDTGRRMEIIEIPNHRYFVGAQFHPEFKSRPSKPSPLFVGLIAAASGQLDRVLQDRCTGHAVSEKHVLSNGSYTPAIHQNGHPKKLPNGLSNGTYYGNGNGVHA

SEQ ID NO: 194293 - protein, 601 aa, Zea Mays
MAPSLSKPLLRLSPQPPCLHCLSTPFSSLSPPKTSIARAHERPRRGLQLVCPCERAVFLSRTVAPVRGLRRWGGGGGFVGPEIPGQGEMKYVLVTGGVVSGLGKGVTASSIGVVLKACGLRITSIKIDPYLNTDAGTMSPFEHGEVFVLDDGGEVDLDLGNYERFLDIKLTRDNNITTGKIYQSVIDKERKGEYLGKTVQVVPHITNAIQEWIERVAKIPVDGKEGPADVCVIELGGTIGDIESMPFIEALGQFSYRVGPGNFCLVHVSLVPVLNVVGEQKTKPTQHSVRGLRGLGLTPNILACRSTKELEENVKEKLSQFCHVPAANIITLYDVSNIWRIPLLLHEQKAHEAILKVLNLERMDSIAREPKLDEWIARATIFDTLHDTVRIAMVGKYTGLSDSYLSVLKALLHASVDCHRKLVVDWVASTDLEDSTAIEAPDSYKTAWNLLKGAGGILVPGGFGDRGVQGKILAAKYAREKNVPYLGICLGMQIAVVEYARHVMNLTDANSTEFDPNTKTPCVIFMPEGSKTHMGATMRLGSRRTFFKIADCKSSKLYGNVTYVDERHRHRYEVNPDMVPEFENAGLQFVGKDDTGRRMEG

SEQ ID NO: 194294 - protein, 50 aa, Zea Mays
MAESTDFTRASLPALSSIFPFQAASLLASLSRSGWMSNLLRGLMLSGRPR

SEQ ID NO: 194295 - protein, 766 aa, Zea Mays
MSALQASLLLRPLFSPLPPRRRQLLSSASFSFPRGAHAPRLRALVPGAPQPDAAEPPAIASSAAAAAAAEAEPEAEPTTAAAQPVAMSAKEGLEDMVDKARAWAVAVAAAVLAAARRFVDWVLSRDWMGWWPFWRSEHRLQRLIDEADANPNDAAKQSALLHELNNPEDVIKRFEERSHAVDSRGAAEYLRALILTNTIADYLPDEQSGRSASLPALLQELKQRVSGNEDKPFMNPGISEKQPLHVVMVDPKSTGRSTRFAQEIFSTILFTIAVGVMWVMGAAALQKYIGSLGGIGASGAGSSSSYSPKEMNKDMMPEKNVKTFKDVKGCDDAKKELEEVVEYLKNPSKFTRLGGKLPKGILLTGAPGTGKTLLAKAIAGEAGVPFFYRAGSEFEEMFVGVGARRVRSLFQAAKKKAPCIVFIDEIDAVGSTRKQWEGHTKKTLHQLLVEMDGFEQNEGIIVMAATNLPDILDPALTRPGRFDRHIVVPSPDVRGRQEILELYLQDKPVANDVDINAIARSTPGFNGADLANLVNIAAIKAAVEGADKLNAVQLEFAKDRIIMGTERRSMFISDESRKLTAYHESGHAIVALNTQGAHPIHKATILPRGSALGMVTQLPSQDETSISKKQLLARLDVCMGGRVAEELIFGEDNVTTGARNDLHTATELAQYMVSNCGMSDAIGPVHVKERPSIEMQSRIDAEVVKLLREAYGRVKRLLRKHEKQLHALANALLERETLTADEINKVVHPYQEEPHLSFQDEEFALA

SEQ ID NO: 194296 - protein, 304 aa, Zea Mays
MAATNLPDILDPALTRPGRFDRHIVVPSPDVRGRQEILELYLQDKPVANDVDINAIARSTPGFNGADLANLVNIAAIKAAVEGADKLNAVQLEFAKDRIIMGTERRSMFISDESRKLTAYHESGHAIVALNTQGAHPIHKATILPRGSALGMVTQLPSQDETSISKKQLLARLDVCMGGRVAEELIFGEDNVTTGARNDLHTATELAQYMVSNCGMSDAIGPVHVKERPSIEMQSRIDAEVVKLLREAYGRVKRLLRKHEKQLHALANALLERETLTADEINKVVHPYQEEPHLSFQDEEFALA

SEQ ID NO: 194297 - protein, 80 aa, Zea Mays
MDSRIQELPAKCYFFVVYDSQKKIICFVRLLYSLEGPLVQSTTNSERQYDTEKNANLIYDKDYTSAQAAISGTGSSDMIM

SEQ ID NO: 194298 - protein, 102 aa, Zea Mays
MGRECIGIVPPFIREFNYPMAKNCAGGDTGVFVNGRELHQRDLDLLVGRGLPRTSGMSYSIEMSGNVIDEATGKKLRSLGKLAPTIEKLKRGFGMHVPEEFR

SEQ ID NO: 194299 - protein, 630 aa, Zea Mays
MGSDLKEMKYRRRIGAEERPQCSDRRGGAGWAALQQDPVELLRKLDELRDQIARSCNVVAQRREPRRASRRAVSMLPAEHLEEPPPLPGYHRSRHGGRFGPGLPPPGPYAPPRPEHGERYVRQSSGHYRQYPGRQWENGGMGPGSFHHYGCACPHCLHGQRTSPQEENIPMARYFARQHESYRFERSPSVSSDYDRRSVASSLYSHRSVSKRRAEYFRKKAEHICRPVDGAAPFSVCSSCYKLLQMPTEKCIGRKQNRFQCGSCCQIVSLKHDEENGIPFAPSLSLYAPETEQSSSDQMRRDTVHQHHEDFNSMFYNSNDHSNMQNNMDSTDDNSLSSTMSNDRIGKDCGSTRSIQSKAEDLPFSPSRSVDNGSPKDILCERDTDCKVEPSVGGPVSPRSPALEDKLVDPLCAQEKCNDEDDQGMAMAYKSDLTCKGEYDVNDQYDGGISTRSKQESNEDDKDATEDEISCRSYEQKSKEDNSCNIEDSSKTYEQNSGEDDTSSLVNGSEKYQCMNIKDEDSSPGGEDTCNKYESKVKRDENYVLGAESIRKNCDENNADVMETGSISERHDGLKIEEDNEKLQQPFIEDANSQTGSGSSVNERTNSGFSRGSSEAGLDEDQSSTVHGQC

SEQ ID NO: 194300 - protein, 628 aa, Zea Mays
MGSDLKEMKYRRRIGAEERPQCSDRRGGAGWAALQQDPVELLRKLDELRDQIARSCNVVAQRREPRRASRRAVSMLPAEHLEEPPPLPGYHRSRHGGRFGPGLPPPGPYAPPRPEHGERYVRQSSGHYRQYPGRQWENGGMGPGSFHHYGCACPHCLHGQRTSPQEENIPMARYFARQHESYRFERSPSVSSDYDRRSVASSLYSHRSVSKRRAEYFRKKAEHICRPVDGAAPFSVCSSCYKLLQMPTEKCIGRKQNRFQCGSCCQIVSLKHDEENGIPFAPSLSLYAPETEQSSSDQMRRDTVHQHHEDFNSMFYNSNDHSNMQNNMDSTDDNSLSSTMSNDRIGKDCGSTRSIQSKAEDLPFSPSRSVDNGSPKDILCERDTDCKVEPSVGGPVSPRSPALEDKLVDPLCAQEKCNDEDDQGMAMAYKSDLTCKGEYDVNDQYDGGISTRSKQESNEDDKDATEDEISCRSYEQKSKEDNSCNIEDSSKTYEQNSGEDDTSSLVNGSEKYQCMNIKDEDSSPGGEDTCNKYESKVKRDENYVLGAESIRKNCDENNADVMETGSISERHDGLKIEEDNEKLQQPFIEDANSQTGSGSSVNERTNSGFSRGSSEAGLDEDQSSTGFN

SEQ ID NO: 194301 - protein, 755 aa, Zea Mays
MGSDLKEMKYRRRIGAEERPQCSDRRGGAGWAALQQDPVELLRKLDELRDQIARSCNVVAQRREPRRASRRAVSMLPAEHLEEPPPLPGYHRSRHGGRFGPGLPPPGPYAPPRPEHGERYVRQSSGHYRQYPGRQWENGGMGPGSFHHYGCACPHCLHGQRTSPQEENIPMARYFARQHESYRFERSPSVSSDYDRRSVASSLYSHRSVSKRRAEYFRKKAEHICRPVDGAAPFSVCSSCYKLLQMPTEKCIGRKQNRFQCGSCCQIVSLKHDEENGIPFAPSLSLYAPETEQSSSDQMRRDTVHQHHEDFNSMFYNSNDHSNMQNNMDSTDDNSLSSTMSNDRIGKDCGSTRSIQSKAEDLPFSPSRSVDNGSPKDILCERDTDCKVEPSVGGPVSPRSPALEDKLVDPLCAQEKCNDEDDQGMAMAYKSDLTCKGEYDVNDQYDGGISTRSKQESNEDDKDATEDEISCRSYEQKSKEDNSCNIEDSSKTYEQNSGEDDTSSLVNGSEKYQCMNIKDEDSSPGGEDTCNKYESKVKRDENYVLGAESIRKNCDENNADVMETGSISERHDGLKIEEDNEKLQQPFIEDANSQTGSGSSVNERTNSGFSRGSSEAGLDEDQSSTALKKAEKKAGPVDPGTYWYDYHAGFWGVMGRECIGIVPPFIREFNYPMAKNCAGGDTGVFVNGRELHQRDLDLLVGRGLPRTSGMSYSIEMSGNVIDEATGKKLRSLGKLAPTIEKLKRGFGMHVPEEFR

SEQ ID NO: 194302 - protein, 346 aa, Zea Mays
MTICSSEEIIDEFELLTRDARRVQQDTLRKILELNGDAEYLNRFNLGRRTDSKSFKSCIPLCVHSDIESYIQRIADGDDSPVLTGKPITSLSLSSGTTQGKPKFLPFNDELLESTFQIFRTSYAFRNREYPIVNGKALQFVYGSKQVFTQGGILAATATTNLYRSQRFKEAMKDVMTQCCSPDEVIFGPDFHQSLYCHLLCGLINSDEVQFVFSPFAHSLVHAFHSLEEVWEDLCADIRDGVLSKRVTAPSIRQAVSKILRPNPELASSIYIKCQSLSNWYGVIPTLWPNVKYIYGIMTGSMEPYLKKLRHYAGHLPLLSADYGASEGWVGSNINPTLPPEESRSL

SEQ ID NO: 194303 - protein, 80 aa, Zea Mays
MASAAAATQVGTYFLRNYYNLLQQTPDVVHQFYSEASTMVRVDDLTGNNTATRSCRSAIAKPRAGDGAGTLLELMKQKRN

SEQ ID NO: 194304 - protein, 82 aa, Zea Mays
MASAAAATQVGTYFLRNYYNLLQQTPDVVHQFYSEASTMVRVDDLTGNNTATRSCRSAIAKPRAGDGAGTLLELMVMHDLPW

SEQ ID NO: 194305 - protein, 56 aa, Zea Mays
MASAAAATQFYSEASTMVRVDDLTGNNTATRSCRSAIAKPRAEAEEKLRRTQLRSD

SEQ ID NO: 194306 - protein, 78 aa, Zea Mays
MASAAAATQVGTYFLRNYYNLLQQTPDVVHQFYSEASTMVRVDDLTGNNTATRSCRSAIAKPRAEAEEKLRRTQLRSD

SEQ ID NO: 194307 - protein, 356 aa, Zea Mays
MMLPTATATAVFLTAAPSSFSTRRRRSRAIFASLSPSFSSSEEPLLVRAARGEDGLPRPPAWMMRQAGRYMAEYQALAKRHPSFRERSENTDLIVEITLQPWRAFAPDGVILFSDILTPLPAIGVPFDISDSKGPVIQSPVRSKEQVRELVPIDLDMLQFVGESLKILRNEIDGKAALLGFVGAPWTIATYIVEGGMTNTYTNIKSMCHTAPDVLKGLLSHLAQAISDYIIYQVNSGAQCIQIFDSWGGQLPPHVWEQWSKPYIKQIVSRIKKECPNVPLVLYINGNGGLLERMKNTGADVIGLDWTVDMTDGRRRLGNGISVQGNVDPAFLFSPLPVLTDEIHRYGALGKTLIEA

SEQ ID NO: 194308 - protein, 126 aa, Zea Mays
MMRQAGRYMAEYQALAKRHPSFRERSENTDLIVEITLQPWRAFAPDGVILFSDILTPLPAIGVPFDISDSKGPVIQSPVRSKEQVRELVPIDLDMLQFVGESLKILRNEDLWGPHGQLQLTLLKGG

SEQ ID NO: 194309 - protein, 280 aa, Zea Mays
MMLPTATATAVFLTAAPSSFSTRRRRSRAIFASLSPSFSSSEEPLLVRAARGEDGLPRPPAWMMRQAGRYMAEYQALAKRHPSFRERSENTDLIVEITLQPWRAFAPDGVILFSDILTPLPAIGVPFDISDSKGPVIQSPVRSKEQVRELVPIDLDMLQFVGESLKILRNEIDGKAALLGFVGAPWTIATYIVEGGMTNTYTNIKSMCHTAPDVLKGLLSHLAQAISDYIIYQVNSGAQCIQIFDSWGGQLPPHVWEQWSKPYIKQYLVPHYKTCYGYKL

SEQ ID NO: 194310 - protein, 185 aa, Zea Mays
MSAQICLARHPVVFLPETPWPASSPRSSSSRRCRLPGPLPACFHAFASVCSERLHFLYESRLAVGKSSEGFQALQQSTPGPASRPLLHRRVRLIVPRWASALVLSLLAKILEKHVSFSQVMGKEKLHINIVVNGHVDSGKSTTTGHLIYKLGGIDKRVIERFRMFRLSLRRRSKKKQNFDKCWIT

SEQ ID NO: 194311 - protein, 105 aa, Zea Mays
MSAQICLARHPVVFLPETPWPASSPRSSSSRRCRLPGPLPACFHAFASVCSERLHFLYESRLAVGKSSEGFQALQQSTPGPASRPLLHRRVRLIVPSLSFTSSHG

SEQ ID NO: 194312 - protein, 450 aa, Zea Mays
MVFPCKGFPCKWTNSFTWFGPIPRVIIPDPELMREVLSNKFGHFGKPLFSRVGKLLANGLANHEGEKWAKHRRILNPAFHHEKIKRMLPVFATCCADMINRWENSMSSKEPSEMDVWPEFQNLTGDVISRTAFGSNYQEGRNIFQLQGEQAERLIQSFQTIFIPGYWLLPTKNNRRMKEIDREIRKILHGIIRKRERAFIDSEGTNDDLLGLLVESNMRESNGNAKLGMTTEDIIEECKLFYFAGMETTSVLLTWTLILLSMHPEWQEQAREEVLNHFGMGTPDFDNLNRLKIVTMILYEVLRLYPPVVFLSRRTYKEMELGGIKYPSGVSLLLPIIFIHHDPNIWGKDASEFNPQRFEDGISNATKHQAAFFPFGWGPRICIGQNFALLEAKMALSTILQRFSFELSSSYTHAPYTVITLHPQHGAQIRFKFSFDMNNENQVCMNGVGV

SEQ ID NO: 194313 - protein, 280 aa, Zea Mays
MATLPLLLHLLWEASPWARAGAATAAVVLVWLAAWTLEWAWWTPRRLDRALRAQGLKGTRYRLLTGDVRENARLNREARTKPLPLGSHDIIPRVLPMFHNAVKENGTNSFTWFGPIPRVIIPDPELMREVLSNKFGHFGKPLFSRVGKLLANGLANHEGEKWAKHRRILNPAFHHEKIKRMLPVFATCCADMINRWENSMSSKEPSEMDVWPEFQNLTGDVISRTAFGSNYQEGRNIFQLQGEQAERLIQSFQTIFIPGYWYGDNISPAYMDVNSAKHAP

SEQ ID NO: 194314 - protein, 607 aa, Zea Mays
MQHDQRKKGSVEAEFFTEYGDASRYKIQEVIGKGSYGVVCSAVDVHTGEKVAIKKIHDIFEHISDAARILREIKLLRLLRHPDIVEIKHIMLPPSRREFKDIYVVFELMESDLHQVIKANDDLTKEHYQFFLYQLIRALKYIHTANVYHRDLKPKNILANSNCKLKICDFGLARVAFNDTPTTIFWTDYVATRWYRAPELCGSFFSKYTPAIDIWSIGCIFAEVLTGKPLFPGKNVVHQLDLMTDLLGTPSMDTISRVRNEKARRYLSSMRKKETISFSQKFPNADPLALDLLQRLLAFDPKDRPTAEQALAHPYFKGLAKVEREPSCQPITKMEFEFERRRVTKEDIRELIFREILEYHPQLLKDYINGTERTTFLYPRKQFAHLEENSGNGPVIPMERKHTSLPRSTIVHSSPIPVKEQPRIGPCRERPSSDESYRNPRETEQYSGNLPRTSQAPQRVPTARPGRVVGPVMPYQNGDTKDPYDTRRLAMSSGYPPQQIPQTFGYYQTHGKPACCEPSQAERYTLHQQAAYACANRTAASDVALDMRAPPFQHLSAGQRSDSCDRLTAETNLYTRSTNGIAATAAGVAATTHRKVGVVPFGMSNMY

SEQ ID NO: 194315 - protein, 90 aa, Zea Mays
MGRRGEGRLTVDGTHEARKEWRRRAFSGSLLRSNGINVHVPHHGADAAQLASTKKQKKKTPGSSNANHGHPRHKRRHADKSWKFDHVTFH

SEQ ID NO: 194316 - protein, 101 aa, Zea Mays
MEPTRRARSGAGAPSLAPCSAPMASMSMCHIMERMQHNWLVPRSRRRKHLGAVMPTMVIQDISVGTQTKWASTISREACPRRLSSRPRKIDLVDWLDRDFR

SEQ ID NO: 194317 - protein, 53 aa, Zea Mays
MPASGLICGILSNSTSYCRKASKKRLVRAVERVLHYVYSDLLGVLCSLPWLKK

SEQ ID NO: 194318 - protein, 225 aa, Zea Mays
MAALEAQAAERVIEACVRTESVRKCVFTSSLLACVWRQDYPHDRRCPTTIDESCWSDESFCRDNKLWFALGKTAAEKAAWRAARGRDLKLVTICPALVTGPGFRRRNSTASIAYLKGARAMLADGLLATANVETVAEAHVHAYEAMGDNTAGGRYICYDHVVKRPEEFAELERQLGLPGGAAPAPAHGSDDRPARFELCKRKLSRLMSSRRRCAYDTYYSVAFEV

SEQ ID NO: 194319 - protein, 246 aa, Zea Mays
MGVLRSTQSLEAEVDELRAALLAGGWRRSAGHADAKRAPRGDAGGAAARAVCVTGGISFVGFAVVDRLLRHGYTVRLALETQEDMDKLREMEMFGEDGRDGGVSTVMANVMDPDGLRRAFDGCAGVFHTSAFVDPGGMSGYTKHMAALEAQAAERVIEACVRTESVRKCVFTSSLLACVWRQDYPHDRRCPTTIDESCWSDESFCRDNKSLRKKPHTVMRRFSSCGSHLAKRRQRRLRGGRRGDET

SEQ ID NO: 194320 - protein, 381 aa, Zea Mays
MGVLRSTQSLEAEVDELRAALLAGGWRRSAGHADAKRAPRGDAGGAAARAVCVTGGISFVGFAVVDRLLRHGYTVRLALETQEDMDKLREMEMFGEDGRDGGVSTVMANVMDPDGLRRAFDGCAGVFHTSAFVDPGGMSGYTKHMAALEAQAAERVIEACVRTESVRKCVFTSSLLACVWRQDYPHDRRCPTTIDESCWSDESFCRDNKEEATYCDASFFQLWFALGKTAAEKAAWRAARGRDLKLVTICPALVTGPGFRRRNSTASIAYLKGARAMLADGLLATANVETVAEAHVHAYEAMGDNTAGGRYICYDHVVKRPEEFAELERQLGLPGGAAPAPAHGSDDRPARFELCKRKLSRLMSSRRRCAYDTYYSVAFEV

SEQ ID NO: 194321 - protein, 369 aa, Zea Mays
MGVLRSTQSLEAEVDELRAALLAGGWRRSAGHADAKRAPRGDAGGAAARAVCVTGGISFVGFAVVDRLLRHGYTVRLALETQEDMDKLREMEMFGEDGRDGGVSTVMANVMDPDGLRRAFDGCAGVFHTSAFVDPGGMSGYTKHMAALEAQAAERVIEACVRTESVRKCVFTSSLLACVWRQDYPHDRRCPTTIDESCWSDESFCRDNKLWFALGKTAAEKAAWRAARGRDLKLVTICPALVTGPGFRRRNSTASIAYLKGARAMLADGLLATANVETVAEAHVHAYEAMGDNTAGGRYICYDHVVKRPEEFAELERQLGLPGGAAPAPAHGSDDRPARFELCKRKLSRLMSSRRRCAYDTYYSVAFEV

SEQ ID NO: 194322 - protein, 361 aa, Zea Mays
MRRGRGTEPKRNESKEAHKTGKATRNLSPPIPSFHPSATRGSGSSHSHAHTMASTPRTPAPERSPPPVPTPPPPLEDEPPPYLADGSPREEASFSSDGREGAPPKNPQLSPTHHAAPRLVPPPSSPARQDGQEQEGSANKAAAATAEPAREPLRQMATGLARPLSSQTSPATTNSPTPSASPTPSSPAPVANNSKRSGQSTPKRAETKLPLSSPAVAVHFDPVEEAVTSPLRLGKARLDQQQQQQHAAGAAESGASVVPGVAAAVAAVAERRELLLALRLATAVLSLAAFSVIASARTSGWAGDYYARHLQYRFWRTSSCRRRRRPRRATTCGCPGSARTPSSGRSPAPCGCPSSRSWCSL

SEQ ID NO: 194323 - protein, 202 aa, Zea Mays
MGMGEPFHNIDNVIKASAIMVDEQGLHFSPRKVTVSTSGLVPQLKRFLQESNCSLAVSLNATTDEVRNWIMPINRKYNLNLLLGTLREELNLRQKQIVLFEYVMLSGVNDSMDDAKRLIELVQGIPCKINLISFNPHGGSQFKPTPDDKIIEFRNVLIQGGLTVFVRLSRGDDQMAACGQLGEPGGYQLPLLRVPEKFQVAL

SEQ ID NO: 194324 - protein, 190 aa, Zea Mays
MEPVRGRTTICVSSQVGCAMNCQFCFTGRMGLRKHLSTAEIVEQAVFARRLFSDELGSINNVVFMGMGEPFHNIDNVIKASAIMVDEQGLHFSPRKVTVSTSGLVPQLKRFLQESNCSLAVSLNATTDEVRNWIMPINRKYNLNLLLGTLREELNLRQKQIVLFEYVMLSGVNDRSDICFSVFADCFCML

SEQ ID NO: 194325 - protein, 152 aa, Zea Mays
MNCQFCFTGRMGLRKHLSTAEIVEQAVFARRLFSDELGSINNVVFMGMGEPFHNIDNVIKASAIMVDEQGLHFSPRKVTVSTSGLVPQLKRFLQESNCSLAVSLNATTDEVVIILFFFFFFALGRPSAGGTHMSQVWERIVSLFCKLTCFAG

SEQ ID NO: 194326 - protein, 213 aa, Zea Mays
MEPVRMLQILFSLEDGSVIETVIIPCARGRTTICVSSQVGCAMNCQFCFTGRMGLRKHLSTAEIVEQAVFARRLFSDELGSINNVVFMGMGEPFHNIDNVIKASAIMVDEQGLHFSPRKVTVSTSGLVPQLKRFLQESNCSLAVSLNATTDEVRNWIMPINRKYNLNLLLGTLREELNLRQKQIVLFEYVMLSGVNDRSDICFSVFADCFCML

SEQ ID NO: 194327 - protein, 63 aa, Zea Mays
MASLKAAKPSGVAAQGKEPAPKLSETATKPSAAKSGGVKKAEQKPRETKRKVKSSKQAAAAKK

SEQ ID NO: 194328 - protein, 85 aa, Zea Mays
MSSEEARASFSELVVGSPTRTEGETYSSGDMSSEEGAHVTCFTEDLHDVTLHFQIVRFSKQIYVWVGCNTAKFGHLYAAATTRPE

SEQ ID NO: 194329 - protein, 98 aa, Zea Mays
MSSEEARASFSELVVGSPTRTEGETYSSGDMSSEEGAHVTCFTEDLHDVTLHFQIVRFSKQIYVWVGCNTAKFGHLYAAATTRPEEHLITPVQVWLAV

SEQ ID NO: 194330 - protein, 370 aa, Zea Mays
MAFEKIKVSNPIVEMDGDEMTRVFWQSIKDKLILPFLDLDIKYYDLGILHREATDDKVTVEAAEATLKYNVAIKCATITPDETRVKEFNLKHMWKSPNGTIRNIINGTVFREPIICKNVPRLVPGWTKPICIGRHAFGDQYRATDAVLKGPGKLKLVFEGKEEQIDLEVFNFTGAGGVALSMYNTDESIRAFAEASMTTAYEKKWPLYLSTKNTILKKYDGRFKDIFQEVYEADWKSKFEAAGIWYEHRLIDDMVAYALKSEGGYVWACKNYDGDVQSDFLAQGFGSLGLMTSVLVCPDGKTIEAEAAHGTVTRHFRVHQKGGETSTNSIASIFAWTRGLAHSVTRSHYLNTEEFIDAVATELRSRLGAN

SEQ ID NO: 194331 - protein, 406 aa, Zea Mays
MAFEKIKVSNPIVEMDGDEMTRVFWQSIKDKLILPFLDLDIKYYDLGILHREATDDKVTVEAAEATLKYNVAIKCATITPDETRVKEFNLKHMWKSPNGTIRNIINGTVFREPIICKNVPRLVPGWTKPICIGRHAFGDQYRATDAVLKGPGKLKLVFEGKEEQIDLEVFNFTGAGGVALSMYNTDESIRAFAEASMTTAYEKKWPLYLSTKNTILKKYDGRFKDIFQEVYEADWKSKFEAAGIWYEHRLIDDMVAYALKSEGGYVWACKNYDGDVQSFGSLGLMTSVLVCPDGKTIEAEAAHGTVTRHFRVHQKGGETSTNSIASIFAWTRGLAHRAKLDDNARLLDFALKLEAACVETVESGKMTKDLAILVHGSSSVTRSHYLNTEEFIDAVATELRSRLGAN

SEQ ID NO: 194332 - protein, 372 aa, Zea Mays
MIWGYCTVKQLMTRSQWRLQRLLSSTTWLLSVRPLLQHVIDETRVKEFNLKHMWKSPNGTIRNIINGTVFREPIICKNVPRLVPGWTKPICIGRHAFGDQYRATDAVLKGPGKLKLVFEGKEEQIDLEVFNFTGAGGVALSMYNTDESIRAFAEASMTTAYEKKWPLYLSTKNTILKKYDGRFKDIFQEVYEADWKSKFEAAGIWYEHRLIDDMVAYALKSEGGYVWACKNYDGDVQSDFLAQGFGSLGLMTSVLVCPDGKTIEAEAAHGTVTRHFRVHQKGGETSTNSIASIFAWTRGLAHRAKLDDNARLLDFALKLEAACVETVESGKMTKDLAILVHGSSSVTRSHYLNTEEFIDAVATELRSRLGAN

SEQ ID NO: 194333 - protein, 422 aa, Zea Mays
MAFEKIKVSNPIVEMDGDEMTRVFWQSIKDKLILPFLDLDIKYYDLGILHREATDDKVTVEAAEATLKYNVAIKCATITPGTFDCYVDAIYETRVKEFNLKHMWKSPNGTIRNIINGTVFREPIICKNVPRLVPGWTKPICIGRHAFGDQYRATDAVLKGPGKLKLVFEGKEEQIDLEVFNFTGAGGVALSMYNTDESIRAFAEASMTTAYEKKWPLYLSTKNTILKKYDGRFKDIFQEVYEADWKSKFEAAGIWYEHRLIDDMVAYALKSEGGYVWACKNYDGDVQSDFLAQGFGSLGLMTSVLVCPDGKTIEAEAAHGTVTRHFRVHQKGGETSTNSIASIFAWTRGLAHRAKLDDNARLLDFALKLEAACVETVESGKMTKDLAILVHGSSSVTRSHYLNTEEFIDAVATELRSRLGAN

SEQ ID NO: 194334 - protein, 955 aa, Zea Mays
MSMAEISAKEKYNNPDMQAEKHSRRKDDSEDTDKWSTDNRDSDDRKTLSRYEHGKSRSSKEQRFDDDKYKEKYKDDYVRDKRQHDDKFSNERVARSHESDRAEYKSAKDGRRSSESHYRKDAVQDVDHYEDYNNRYKESRGKKRPPEENDDQYDLKPPSTRDQRVHLEKSSGSGRLDSLTERARPDRSSSPSKIHSRSSPSPSSYHDKDQSRHGSKVVDHGKREIPYDERNNRPRASSGRERTPASRLRDRDAENWSSERLKQKDDYQPRDVTLEISTSHYDRTPSKDKHTSPKQLSEKSPSSGDHRFSGRLSGGRSLDNKGERKSLTKYRDRDGDIAQERSHHQDRMPAKVPFREPTPSNSSISRGGHFLGSSPNNPLPPARNGDPSFQGPHDDDRRPQNGDRRFHGHQKRNDMNSVRGHGHGWNSQPNWPSPVSNGFVPIQHGGAPGFHPPVHQFPGPPMFNLRPQMKLNQPGVSYPMHDAVDRFSTHMRPFGWPNHLDESCPPHMQVWNGGSGVFPGEPYIYGRQEWDQNRPHAGSRGWELTGDVSKGPNDVPDAELLVAKKDPDSAITAVSDSGGQHNLQPEADQKEIGRLTAENFEAKNHTKSSKSLEAPQGAQLVTSMLSKNSVVFCKNYLSRISVSHDLVEPELYKRCISLLGDLDVTKTSHLVRNEIQDNGNIGKMSTKYGNLNPFSSRYLKSDNTIFERALALHKNQTQKGLTTASASVKMEEKMAVPEDDHDMELLEPVVSNPAPQRHTDVMEEGSVSKHELGDGIGRTIAATIGSGVLDAPPEISLPQPEVVVATTVITQPNKHMEDVLPPAIEDGALQATLEHAVGIPEVTPADVLLDVAPSAVGESGDDMEIIPSAMAEPQLGKEPAPVASPDSQEKPFMLDSETGMEVEVKVIDDNPGDGRVSSILGTKLDFAAIDGDSEALLVESRVNLSRIPNSPESTH

SEQ ID NO: 194335 - protein, 956 aa, Zea Mays
MSMAEISAKEKYNNPDMQAEKHSRRKDDSEDTDKWSTDNRDSDDRKTLSRYEHGKSRSSKEQRFDDDKYKEKYKDDYVRDKRQHDDKFSNERVARSHESDRAEYKSAKDGRRSSESHYRKDAVQDVDHYEDYNNRYKESRGKKRPPEENDDQYDLKPPSTRDQRVHLEKSSGSGRLDSLTERARPDRSSSPSKIHSRSSPSPSSYHDKDQSRHGSKVVDHGKREIPYDERNNRPRASSGRERTPASRLRDRDAENWSSERLKQKDDYQPRDVTLEISTSHYDRTPSKDKHTSPKQLSEKSPSSGDHRFSGRLSGGRSLDNKGERKSLTKYRDRDGDIAQERSHHQDRMPAKVPFREPTPSNSSISRGGHFLGSSPNNPLPPARNGDPSFQGPHDDDRRPQNGDRRFHGHQKRNDMNSVRGHGHGWNSQPNWPSPVSNGFVPIQHGGAPGFHPPVHQFPGPPMFNLRPQMKLNQPGVSYPMHDAVDRFSTHMRPFGWPNHLDESCPPHMQVWNGGSGVFPGEPYIYGRQEWDQNRPHAGSRGWELTGDVSKGPNDVPDAELLVAKKDPDSAITAVSDSGGQHNLQPEADQKEIGRLTAENFEAKNHTKSSKSLEAPQGAQLVTSMLSKNSVVFCKNYLSRISVSHDLVEPELYKRCISLLGDLDVTKTSHLVRNEIQQDNGNIGKMSTKYGNLNPFSSRYLKSDNTIFERALALHKNQTQKGLTTASASVKMEEKMAVPEDDHDMELLEPVVSNPAPQRHTDVMEEGSVSKHELGDGIGRTIAATIGSGVLDAPPEISLPQPEVVVATTVITQPNKHMEDVLPPAIEDGALQATLEHAVGIPEVTPADVLLDVAPSAVGESGDDMEIIPSAMAEPQLGKEPAPVASPDSQEKPFMLDSETGMEVEVKVIDDNPGDGRVSSILGTKLDFAAIDGDSEALLVESRVNLSRIPNSPESTH

SEQ ID NO: 194336 - protein, 812 aa, Zea Mays
MSGSGSGSGGGGARGQSGPVPASARKLVQGLKEIVNRPDAEIYAALRECGMDPDEAVSRLLCQDTFQEVKSKRDKKKEVKETLDPRSRGASNSCRSSRGGMDRAGRSSSVQSGSSGTDYVTSRSSILGPAVPVKPTVPSLSTNKDVVFNGSVGAPQSSSGFQHNWFGVPGQMSMADIVKMGRPQVRSSGKPMAAADTSYAGQTPSLSSSVNQNSKQSASTTLPTTFDQGFPALPDPIPHTVNSSHGSAGNNHTHENDWFPQDEPQSGVQSTGIEASEENNSTAVKATVSSERHLEIVEEDNHYNDGLLQNCAYQAQVHSYVDNEVGVSNVDAESAVANFQHLSLQNEDIVVTKSEDNHAVILPDHLQATNADCAHLSFGSFESGAFSGLFSSKVTKDSLEDNEVHIPDESPSVNLDARNQDYYDNDALNLSANEDVETRIGTNMDNIDGPSVSQSDVPRQGAIDVPGLQYDMPSVPSHAYSSTTQPSKMEDPQGNTQAQPLSHFSGLLQANTLPNYLLGSNLTPIREFDFSQLLQTQSATKYNPSAAPNNLPAISMQETLKPGGFPNTQSTQHVPNTSIPSGLPLPQQLPVYSQPTLPLGPFTSLVGYPYLPQNYYLPSAAFQQAYSSNGPFHQSGAPAVPGAGMKYSMPQYKSSPPASSLPQPSSLSGYGGFGNANNIPGNFSLNQGAPSAPTTLGFDEALGTQFKDPNHYAALQQSDNSAMWLHGGAGSRTVSAVPPGNFYGLQGQSQQGGFRQAHQPSQYGGLGYPSFYQSQSQASLPQEHPQNLTEGSLNNSQGVPSQPSHHLWQHSY

SEQ ID NO: 194337 - protein, 233 aa, Zea Mays
MLVYEYVNNGNLEQWLHGMNQHGVLSWENRMKILLGTAKALAYLHEAIDPKVVHRDIKSSNILIDDEFNSKVSDFGLAKLLNSDKSHINTRVMGTYGYVAPEYANSGMLNEKSDIYSFGVVLLECATARDPVDYSKPADEVNLIEWLKMMVTSKRAEEVVDPNLNVKPPKRALKRTILVGFKCVDPDADKRPKMSHVVQMLEAVQNAYHEDQSKLSQVGSQQSLEETSNSADA

SEQ ID NO: 194338 - protein, 452 aa, Zea Mays
MSSPNNSVSAALSETTPVFQLRVWQLIAIAVGIVMAILLVIALCLSLQRKKKTVKGFDNSSLAEIPIVSKEINVDRVGAQSLHDSEAPFMPVRDKYTQTKGAGQLGESRSVDADTFSQFSSVYNVEKGGSSYSEDYSHSSSGPARKGSSPYAYSASPLVGLPELSHLGWGHWFTLRDLECATNRFAKSNVLGEGGYGVVYKGRLVNGTEIAVKKILNNLMLVYEYVNNGNLEQWLHGMNQHGVLSWENRMKILLGTAKALAYLHEAIDPKVVHRDIKSSNILIDDEFNSKVSDFGLAKLLNSDKSHINTRVMGTYGYVAPEYANSGMLNEKSDIYSFGVVLLECATARDPVDYSKPADEVNLIEWLKMMVTSKRAEEVVDPNLNVKPPKRALKRTILVGFKCVDPDADKRPKMSHVVQMLEAVQNAYHEDQSKLSQVGSQQSLEETSNSADA

SEQ ID NO: 194339 - protein, 299 aa, Zea Mays
MSSPNNSVSAALSETTPVFQLRVWQLIAIAVGIVMAILLVIALCLSLQRKKKTVKGFDNSSLAEIPIVSKEINVDRVGAQSLHDSEAPFMPVRDKYTQTKGAGQLGESRSVDADTFSQFSSVYNVEKGGSSYSEDYSHSSSGPARKGSSPYAYSASPLVGLPELSHLGWGHWFTLRDLECATNRFAKSNVLGEGGYGVVYKGRLVNGTEIAVKKILNNLGQAEKEFRVEVEAIGHVRHKNLVRLLGYCVEGIHRMLVYEYVNNGNLEQWLHGMNQHGVLSWENRMKILLGTAKASRVPS

SEQ ID NO: 194340 - protein, 225 aa, Zea Mays
MTKSEVDHLEDGYRWRKYGQKAVKNSPYPRSYYRCTTQRCPVKKRVERSHQDPAVVITTYEGKHTHPIPSTLRGSSTHLLAAQLHHHHHHNIVGAFPPPPPPPQTMCLPFVGRTGDGGGVIDMLGLCLPPRNHAAVPPAATGLAPSPCCMSGPVGTVAGATTTTAPTTTTVTTTTTSSPPPPPSLQTMQHFMAQDDFGLLQDMLPSSSSSLSFVVHSNGSNVQLP

SEQ ID NO: 194341 - protein, 328 aa, Zea Mays
MVIACFIQGVYLLELDRQDKRDERTALAPQWWRHFMYRLSQTLVDERDGSIYGAVLEWDRRALLAGYAPFRPAGAPAAVVALRGTLLSGATFRRDVVDDLRFLAWDSLKGSVRFAGALAALRSAARRHGTGNVCVGGHSLGAGFALQVGKALAKEGVFVECHVFNPPSVSLATSLRGFAETAGEMWGYVRAWLPYVGSAAAADAGGEAKEVSLGRAGTAKWLPHLYINTNDYICCYYTDTAAGTATVTARGGSGGSKVAGGDGGIGKPGLARMLTVSKGPTKFLDAHGLQQWWADDVELQVALNHSKLIDRQLRSLYAAQPASPQVNQ

SEQ ID NO: 194342 - protein, 129 aa, Zea Mays
MVAFRFHQYQVVGRALPTPGDEHPKIYRMKLWATNEVRAKSKFWYFLRKLKKVKKSNGQVLAINEIFERNPTTIKNYGIWLRYQSRTGYHNTKQFHNSEIKFPLVHRKVRPPTRKLRTTFKASRPNLFM

SEQ ID NO: 194343 - protein, 184 aa, Zea Mays
MGGQMPDADGKARSADSSSSYGYPPSAPPQHQYGTFGPPSGASGEFPQPAVGFPQPAAPPGMQHYPQPPPASYAVYPPPQQPYSAAAPYYAQGYQIAQGYIPVVEGRPVRIRPLPCCGLGMGWFLFIIGFFFAAIPWYLGAFVLICVRVRDYREKPGYVACTIAASLAAIAVLLGATKGAEVWS

SEQ ID NO: 194344 - protein, 394 aa, Zea Mays
MDESSRNDSIGESAREHIKRKNAAVAGSYHFVNGFASSSSSSHAPQNPMLGPWDPSFESTVSSNVAPFNPSEYHGHNNSWPSLEGSSITGSNGFNSMVVHPDSVQRGNYTFPPTHISHSWMSHATNGIADGVPQWEYANATANIQGRFAHSGATEIANVGFHEYQNGPSTICRGPVPYFHQHAMHGMQALDPTQMQVPYQQCHSNGFLHGGINYPGNRLQLGPRNPVLFTSSERAFGPPQHPFLANPVNHRNIRILPPEHATIMDFSRLYEVSNTVDEHRDMRLDIDSMTYEELLALEEQIGDVNTGLTKSHIVDKLRTSLYVPGISSMSDQPSKSSLENDACIICQVLLLHCILYLLTIKSQLSQTKNHHPPTCPRFDINIAAAGLVSPCNQP

SEQ ID NO: 194345 - protein, 88 aa, Zea Mays
MHQYHMGSDEEEKDGELVVSKVFYQTQPRQCGTVSSTARDAVPLAASATTGHHHHDGGNGGDDENSMLMKEVGIVDFYSRGGGGGGGR

SEQ ID NO: 194346 - protein, 246 aa, Zea Mays
MTNSDRIVVHQVQQAAAIQDLPGLPAGVKFDPTDQELLEHLEGKARPDTRKLHPLVDEFIPTIEGENGICYTHPERLPGVGKDGLIRHFFHRPSKAYTTGTRKRRKVHTDEEGGETRWHKTGKTRPVFTGGKLSGYKKILVLYTNYGKQRKPEKTNWVMHQYHMGSDEEEKDGELVVSKVFYQTQPRQCGTVSSTARDAVPLAASATTGHHHHDGGNGGDDENSMLMKEVGIVDFYSRGGGGGGGR

SEQ ID NO: 194347 - protein, 261 aa, Zea Mays
MTWCNSFNDVRAVEDNLATAAAAKKQQLQASSHVNLIRTCPSCGHRAQYDEQVQQAAAIQDLPGLPAGVKFDPTDQELLEHLEGKARPDTRKLHPLVDEFIPTIEGENGICYTHPERLPGTLPAGNLRSATVLQCLLTICRRWWSLIGCLMPLIAFAVCSSRRVTDLCYGFKCLVAWDNVCRLKDIGGLAIKNLKLQNQCLLLKFAVKLLHGNHVPWITWCCRGSNPVLILSLPPPQFTWATPTILPLTYERMFRETSPEL

SEQ ID NO: 194348 - protein, 53 aa, Zea Mays
MINIDGFHHLRGSTLPSLHMSVSAWGQQILNPLLVSRRVGLHLNADSFYGWQP

SEQ ID NO: 194349 - protein, 682 aa, Zea Mays
MRTDSAESSSKYLGISVSHSEVHHARSPLPAFPSPTPVFIPPRSAPRARSRRYRQLTDLAVLHWGAACNCKCIAALHSSLSFPAASSSRLGFPPPAPAPHLTAPTQNSSPRMASPARPAAASVSGAFGLPPDARCSYDQPLPRRREGLQDGRLVRTFVAAYGQPPPPQQQQQQQDGFLYPKDAVVAAVEECTRKQADALLHSLGAIGGRLSQLELYCYKLERSIGELRSDVMDYHSDSNANFKCIDRNLRQVHKSLQLLQDRQDLAETAKELSKLQIAHEAPSQTKGEAAGFPMLAARENGHSTRAPKHEVALLPLHQVNGTMHSPAVPVQVQTSNGFVLQHLVPVALSTQQHEQQQLNQAPVFYVQSRDRAKCTEGKAALEPLVQVVQPLAHSPDAVVQVELPQKASQAAAAELYPQPQTQSHRLQTPTQQVDLHTWHPQQPMVQVQQQQYSIQQVSRHMVVAQQPSSSPQSQLSAPQATPLFPPFSSVKPSSCNTETITRRMAGQPPYSSSQQQYQQQQHEVAHSFYGQGNTVLLPVADHNAQHQQPQPVQLHSQGPSCPPQPGKPSHCSAAPYAVQGNGQTYSSAYKNPSNCPATAAVVALLPQPPAIACMAYHPLGPQVVHNHPFGNTMVETSRSSVVGYPRDQFEMLPAITAAQPVLPVDKLNAGSNVTSSPREWSA

SEQ ID NO: 194350 - protein, 302 aa, Zea Mays
MRNLAETLLRDIIRGSPDVKWESIKGLENAKRLLKEAVVMPIKYPKYFTGLLSPWKGILLFGPPGTGKTMLAKAVATECKTTFFNISASSIVSKWRGDSEKLVKVLFELARHHAPSTIFLDEIDAIISQRGEARSEHEASRRLKTELLIQMDGLTKTDELVFVLAATNLPWELDAAMLRRLEKRILVPLPEPDARHAMFEELLPYTPGTMEIPYDVLVEKTEGYSGSDIRLVCKEAAMQPLRRVMAVLEGRKEEVPEGELPEVGPVTTEDIELALRNTRPSAHLHAHRYEKFNQDYGSHVHG

SEQ ID NO: 194351 - protein, 496 aa, Zea Mays
MEAPSRSVRLGSGKTIPARQRRFHRRPAVPGSRPLVCCLLLFFLPVSPTATDASSPTPPPSSPLQESGELASRVRGRGCVRRRSTSTTLSRRARARVSMADGEPSLTRWTFEDFVVHYEARFGLRREADGDDAPPPRGSDHGASRPATARANGGADLAVFEQFERMERKVEISNGAIEDGPLQKSLLPSFESAEMRNLAETLLRDIIRGSPDVKWESIKGLENAKRLLKEAVVMPIKYPKYFTGLLSPWKGILLFGPPGTGKTMLAKAVATECKTTFFNISASSIVSKWRGDSEKLVKVLFELARHHAPSTIFLDEIDAIISQRGEARSEHEASRRLKTELLIQMDGLTKTDELVFVLAATNLPWELDAAMLRRLEKRILVPLPEPDARHAMFEELLPYTPGTMEIPYDVLVEKTEGYSGSDIRLVCKEAAMQPLRRVMAVLEGRKEEVPEGELPEVGPVTTEDIELALRNTRPSAHLHAHRYEKFNQDYGSHVHG

SEQ ID NO: 194352 - protein, 285 aa, Zea Mays
MADGEPSLTRWTFEDFVVHYEARFGLRREADGDDAPPPRGSDHGASRPATARANGGADLAVFEQFERMERKVEISNGAIEDGPLQKSLLPSFESAEMRNLAETLLRDIIRGSPDVKWESIKGLENAKRLLKEAVVMPIKYPKYFTGLLSPWKGILLFGPPGTGKTMLAKAVATECKTTFFNISASSIVSKWRGDSEKLVKVLFELARHHAPSTIFLDEIDAIISQRGEARSEHEASRRLKTELLIQMDGLTKTDELVFVLAATNLPWELDAAMLRRLEKRVSFSK

SEQ ID NO: 194353 - protein, 300 aa, Zea Mays
MSLLAVASSTRAAAVRPLCASAASDEAVPAPAVADTAGRRPVKVILPKKKPQKWSTGMAPGEYGGGPATIKPRKYWWGKEDRDPVGNTDDFIWNKDFLPHMERVIANGGADAEPTITRLAPVDEEGESGFLSINRAMSLDSVEVDLSQELQAPTRPILQTQVEAAWRGRAIGAEAVNGASAPRWRLVPTRREQAKWDRAAKAATGGSDVILRESKSRVQQGDPKVLAARSREDYLQLKQRLQWFTLGIGGVGVISAYISYTPEIAVSFGAGLIGSLVYLRMLGTSIDSLAGGTGETVKYV

SEQ ID NO: 194354 - protein, 298 aa, Zea Mays
MSLLAVASSTRAAAVRPLCASAASDEAVPAPAVADTAGRRPVKVILPKKKPQKWSTGMAPGEYGGGPATIKPRKYWWGKEDRDPVGNTDDFIWNKDFLPHMERVIANGGADAEPTITRLAPVDEEGESGFLSINRAMSLDSVEVDLSQELQAPTRPILQTQVEAAWRGRAIGAEAVNGASAPRWRLVPTRREQAKWDRAAKAATGGSDVILRESKSRVQQGDPKVLAARSREDYLQLKQRLQWFTLGIGGVGVISAYISYTPEIAVSFGAGLIGSLVYLRMLGTSIDSLAGGTGETVK

SEQ ID NO: 194355 - protein, 221 aa, Zea Mays
MRTRHLYFTSLGMEVQVLDLSSDSEGEVSAHSPDHKRPSQQPGVDPNRRVGDNGSSAVDSLFEEAGAARPPRHPSDALNKGKEKVVDVESVESPKHGGESLGAAGRVLGAGSDPWSALVSKCKAGDSGNNGTECWDSWGDWGDQLTNSAPVARLGSERTGFHETYELRGTPQLHSDSSAFSDQWKGILGASPADPVNSLWCSRDTSMKDSEDETLSQRSRG

SEQ ID NO: 194356 - protein, 494 aa, Zea Mays
MEYLKVEERATGPAAHELEGTDRRVLCSIPRRHQPPKPPAARPFSRSWWARSTLRLPRPPPLPLSFALLSFQTPRRCRAHRRAPAHPTASPRILLQQFVALLLPLPSSTGVRRLGSMRTRHLYFTSLGMEVQVLDLSSDSEGEVSAHSPDHKRPSQQPGVDPNRRVGDNGSSAVDSLFEEAGAARPPRHPSDALNKGKEKVVDVESVESPKHGGESLGAAGRVLGAGSDPWSALVSKCKAGDSGNNGTECWDSWGDWGDQLTNSAPVARLGSERTGFHETYELRGTPQLHSDSSAFSDQWKGILGASPADPVNSLWCSRDTSMKDSEDETLSQSSSWLSKVKGLNFPLPDEHQLRTRQIENDEMFARRLQEQLNQQQPGSQHSEAVDKTIAWTLHEQDAEHARFAAREVQSSSSQRDRSMAHLYSYGRHSPVQSFASWASNHTPISMSSRGGLQRNSNCPQAEQRNMLISQLTRGCFREDMDLQTRLGCTGLTF

SEQ ID NO: 194357 - protein, 493 aa, Zea Mays
MAFSSARKNRQVYSNQPMKPRCSEFAYSIPRCQLNSRSRLIRHPTRYEVMEYLKVEERATGPAAHELEGTDRRVLCSIPRRHQPPKPPAARPFSRSWWARSTLRLPRPPPLPLSFALLSFQTPRRCRAHRRAPAHPTASPRILLQQFVALLLPLPSSTGVRRLGSMRTRHLYFTSLGMEVQVLDLSSDSEGEVSAHSPDHKRPSQQPGVDPNRRVGDNGSSAVDSLFEEAGAARPPRHPSDALNKGKEKVVDVESVESPKHGGESLGAAGRVLGAGSDPWSALVSKCKAGDSGNNGTECWDSWGDWGDQLTNSAPVARLGSERTGFHETYELRGTPQLHSDSSAFSDQWKGILGASPADPVNSLWCSRDTSMKDSEDETLSQRSVSVREISSCDYFLTEDSSSSWLSKVKGLNFPLPDEHQLRTRQIENDEMFARRLQEQLNQQQPGSQHSEAVDKTIAWTLHEQDAEHARFAAREVQSSSVSCHVARIVYRL

SEQ ID NO: 194358 - protein, 383 aa, Zea Mays
MAFSSARKNRQVYSNQPMKPRCSEFAYSIPRCQLNSRSRLIRHPTRYEVMEYLKVEERATGPAAHELEGTDRRVLCSIPRRHQPPKPPAARPFSRSWWARSTLRLPRPPPLPLSFALLSFQTPRRCRAHRRAPAHPTASPRILLQQFVALLLPLPSSTGVRRLGSMRTRHLYFTSLGMEVQVLDLSSDSEGEVSAHSPDHKRPSQQPGVDPNRRVGDNGSSAVDSLFEEAGAARPPRHPSDALNKGKEKVVDVESVESPKHGGESLGAAGRVLGAGSDPWSALVSKCKAGDSGNNGTECWDSWGDWGDQLTNSAPVARLGSERTGFHETYELRGTPQLHSDSSAFSDQWKGILGASPADPVNSLWCSRDTSMKDSEDETLSQS

SEQ ID NO: 194359 - protein, 516 aa, Zea Mays
MNLAFSQFLLMAFSSARKNRQVYSNQPMKPRCSEFAYSIPRCQLNSRSRLIRHPTRYEVMEYLKVEERATGPAAHELEGTDRRVLCSIPRRHQPPKPPAARPFSRSWWARSTLRLPRPPPLPLSFALLSFQTPRRCRAHRRAPAHPTASPRILLQQFVALLLPLPSSTGVRRLGSMRTRHLYFTSLGMEVQVLDLSSDSEGEVSAHSPDHKRPSQQPGVDPNRRVGDNGSSAVDSLFEEAGAARPPRHPSDALNKGKEKVVDVESVESPKHGGESLGAAGRVLGAGSDPWSALVSKCKAGDSGNNGTECWDSWGDWGDQLTNSAPVARLGSERTGFHETYELRGTPQLHSDSSAFSDQWKGILGASPADPVNSLWCSRDTSMKDSEDETLSQRSVSVREISSCDYFLTEDSSSSWLSKVKGLNFPLPDEHQLRTRQIENDEMFARRLQEQLNQQQPGSQHSEAVDKTIAWTLHEQDAEHARFAAREVQSSSVFFLKVMERIIKLAKSYVLKRKRMA

SEQ ID NO: 194360 - protein, 455 aa, Zea Mays
MVEHTILGAVPNDSPEHPLMRARGRSILGSEKQSFQEYTESGAASRSDGLGGPSTSNARRIRRRSISITPEIGDDIVRAVRAMNETLKQNRLQRDHVEGSCSYVMEDQSNTNDCPNKDDASWRIGATDSDSRNRTGSTQKAMSLPSSPHEYRGQVTQKSDDFISKEKMALAWNKVFQSSPFLNKALLPFKEWNIDFSEITIGTRVGIGFFGEVFRGIWNGTDVAIKVFLEQDLTTENMEDFCNEIYILSRLRHPNVILLLGACITPPHLSMVTEYMEMGSLYYLIHMSGQKKKLSWRRKLKIIRDICRGLMCIHRIKIVHRDLKSANCLVNKHWTVKICDFGLSRLMIDSPMTDNSSAGTPEWMAPELIRNEPFTEKCDIFSLGVIMWELCTLSRPWEGISPVQVVYSVANEGSRLEIPEGPLGRLIADCWSEPENRPSCQEILTRLLDCEYTVS

SEQ ID NO: 194361 - protein, 390 aa, Zea Mays
MDETPTSSGQSEASSCEPNWWPPDFLEKIQSASIPRKHDVLGNQSSSSWKASQLLWSTGSYSGLIPNGFYSIIPDKKLKETFPTIPSLDDLQTLEADGLKADIIIVDTERDKKVFMLKQLSAALVKGLSSSPALVIKKIAGLVFDCFKRQIPDASPTRGSIEDTHFFGNKGPQLLGQIRHGSCRPRAILFKVLADAVGLESKLVVGLPDDGAVGFVDSYKHMSVVVSLNSMVLLVDLMRFPGQLIPFSAKAIFISHISAAGESDSAENDSCDSPLEPNSPLYGLSDKVEVEGIESSSYLSGRSLRNMMLRSRTFSEGKLSTSCSEPNIANAFWRRSQRRVAEEPRGASSSPEHPLMRARGRSILGSEKQSFQEYTESGAASRWSWGPFNL

SEQ ID NO: 194362 - protein, 646 aa, Zea Mays
MDETPTSSGQSEASSCEPNWWPPDFLEKIQSASIPRKHDVLGNQSSSSWKASQLLWSTGSYSGLIPNGFYSIIPDKKLKETFPTIPSLDDLQTLEADGLKADIIIVDTERDKKVFMLKQLSAALVKGLSSSPALVIKKIAGLVFDCFKRQIPDASPTRGSIEDTHFFGNKGPQLLGQIRHGSCRPRAILFKVLADAVGLESKLVVGLPDDGAVGFVDSYKHMSVVVSLNSMVLLVDLMRFPGQLIPFSAKAIFISHISAAGESDSAENDSCDSPLEPNSPLYGLSDKVEVEGIESSSYLSGRSLRNMMLRSRTFSEGKLSTSCSEPNIANAFWRRSQRRVAEEPRGASSSPEHPLMRARGRSILGSEKQSFQEYTESGAASRSDGLGGPSTSNARRIRRRSISITPEIGDDIVRAVRAMNETLKQNRLQRDHVEGSCSYVMEDQSNTNDCPNKDDASWRIGATDSDSRNRTGSTQKAMSLPSSPHEYRGQVTQKSDDFISKEKMALAWNKVFQSSPFLNKALLPFKEWNIDFSEITIGTRVGIGFFGEVFRGIWNGTDVAIKVFLEQDLTTENMEDFCNEIYILSRLRHPNVILLLGACITPPHLSMVTEYMEMGSLYYLIHMSGQKKKLSWRRKLKIIRDICREM

SEQ ID NO: 194363 - protein, 418 aa, Zea Mays
MDETPTSSGQSEASSCEPNWWPPDFLEKIQSASIPRKHDVLGNQSSSSWKASQLLWSTGSYSGLIPNGFYSIIPDKKLKETFPTIPSLDDLQTLEADGLKADIIIVDTERDKKVFMLKQLSAALVKGLSSSPALVIKKIAGLVFDCFKRQIPDASPTRGSIEDTHFFGNKGPQLLGQIRHGSCRPRAILFKVLADAVGLESKLVVGLPDDGAVGFVDSYKHMSVVVSLNSMVLLVDLMRFPGQLIPFSAKAIFISHISAAGESDSAENDSCDSPLEPNSPLYGLSDKVEVEGTSCSEPNIANAFWRRSQRRVAEEPRGASSSPEHPLMRARGRSILGSEKQSFQEYTESGAASRSDGLGGPSTSNARRIRRRSISITPEIGDDIVSSGYERNTKAKSPPKGSCRRFMLICYGRSKQHQ

SEQ ID NO: 194364 - protein, 485 aa, Zea Mays
MMLRSRTFSEGKLSTSCSEPNIANAFWRRSQRRVAEEPRGASSSPEHPLMRARGRSILGSEKQSFQEYTESGAASRSDGLGGPSTSNARRIRRRSISITPEIGDDIVRAVRAMNETLKQNRLQRDHVEGSCSYVMEDQSNTNDCPNKDDASWRIGATDSDSRNRTGSTQKAMSLPSSPHEYRGQVTQKSDDFISKEKMALAWNKVFQSSPFLNKALLPFKEWNIDFSEITIGTRVGIGFFGEVFRGIWNGTDVAIKVFLEQDLTTENMEDFCNEIYILSRLRHPNVILLLGACITPPHLSMVTEYMEMGSLYYLIHMSGQKKKLSWRRKLKIIRDICRGLMCIHRIKIVHRDLKSANCLVNKHWTVKICDFGLSRLMIDSPMTDNSSAGTPEWMAPELIRNEPFTEKCDIFSLGVIMWELCTLSRPWEGISPVQVVYSVANEGSRLEIPEGPLGRLIADCWSEPENRPSCQEILTRLLDCEYTVS

SEQ ID NO: 194365 - protein, 671 aa, Zea Mays
MDETPTSSGQSEASSCEPNWWPPDFLEKIQSASIPRKHDVLGNQSSSSWKASQLLWSTGSYSGLIPNGFYSIIPDKKLKETFPTIPSLDDLQTLEADGLKADIIIVDTERDKKVFMLKQLSAALVKGLSSSPALVIKKIAGLVFDCFKRQIPDASPTRGSIEDTHFFGNKGPQLLGQIRHGSCRPRAILFKVLADAVGLESKLVVGLPDDGAVGFVDSYKHMSVVVSLNSMVLLVDLMRFPGQLIPFSAKAIFISHISAAGESDSAENDSCDSPLEPNSPLYGLSDKVEVEGIESSSYLSGRSLRNMMLRSRTFSEGKLSTSCSEPNIANAFWRRSQRRVAEEPRGASSSPEHPLMRARGRSILGSEKQSFQEYTESGAASRSDGLGGPSTSNARRIRRRSISITPEIGDDIVRAVRAMNETLKQNRLQRDHVEGSCSYVMEDQSNTNDCPNKDDASWRIGATDSDSRNRTGSTQKAMSLPSSPHEYRGQVTQKSDDFISKEKMALAWNKVFQSSPFLNKALLPFKEWNIDFSEITIGTRVGIGFFGEVFRGIWNGTDVAIKVFLEQDLTTENMEDFCNEIYILSRLRHPNVILLLGACITPPHLSMVTEYMEMGSLYYLIHMSGQKKKLSWRRKLKIIRDICSNIVLKPTCLGLSLEYFTYEALKKVGLP

SEQ ID NO: 194366 - protein, 194 aa, Zea Mays
MLRLTRILLQIRRFRAFVATFFTLMSSLLPYLGTVFCILCVYCSIGLQFFGGIVYAGNLKLEETDLFGNDYLLFNFNDYPSGMVTLFNLLVMGNWQVWMESYAHLTGSSWSLVYFISFYLISVLLLLNLIVAFVLEAFFAEMELEKAGEADTQDSTPQGRNKRRSMRVRTKGTMVDILLHHMLSNELDGSQNSD

SEQ ID NO: 194367 - protein, 318 aa, Zea Mays
MNKLKVLLLFILACDILVFMLSSGPFRVAPYIRVVFLIMTISWLAYVTFEDTPQGKTIFTSYGTTLYQMFVLFTTSNNPDVWVPAYKSSRWNALFIVIYVLLGVYFLTNLILAVIYDSFKEQLAKQLAQMDSIRKSILQKAFDLIDTNGQGYLNKEQCISLLDELNKYRSLPKTWREDFELIFSELDRSGDFKVTSEEFADLCNTIAIKFQKEPPPSYLEKYPSFYHSPQCERLKSFVRSRLFEYIVVFVLLVNLIAVVIETTLDIENSSSQKVWQEVEFVFGWIYVVEMALKIFSLGFGAYWMEGQNKFDFVITWTI

SEQ ID NO: 194368 - protein, 432 aa, Zea Mays
MTEVEAPLITEVEGVEGRGFCGSASTGGGSSGLGSGVRGTRQYHRRSDALAYGDRYQKAAALVDLAEDGVGIPEDVLNDTRFERAMRFYFVYLRLDWLWSLNLFALILLNFLEKPLWCQKYAPHTCDQRDLYFLGQLPYLSKTESLIYEALTLVILVLDIFYPLSYEGLNLFWKNSMNKLKVLLLFILACDILVFMLSSGPFRVAPYIRVVFLIMTISWLAYVTFEDTPQGKTIFTSYGTTLYQMFVLFTTSNNPDVWVPAYKSSRWNALFIVIYVLLGVYFLTNLILAVIYDSFKEQLEETDLFGNDYLLFNFNDYPSGMVTLFNLLVMGNWQVWMESYAHLTGSSWSLVYFISFYLISVLLLLNLIVAFVLEAFFAEMELEKAGEADTQDSTPQGRNKRRSMRVRTKGTMVDILLHHMLSNELDGSQNSD

SEQ ID NO: 194369 - protein, 359 aa, Zea Mays
MTEVEAPLITEVEGVEGRGFCGSASTGGGSSGLGSGVRGTRQYHRRSDALAYGDRYQKAAALVDLAEDGVGIPEDVLNDTRFERAMRFYFVYLRLDWLWSLNLFALILLNFLEKPLWCQKYAPHTCDQRDLYFLGQLPYLSKTESLIYEALTLVILVLDIFYPLSYEGLNLFWKNSMNKLKVLLLFILACDILVFMLSSGPFRVAPYIRVVFLIMTISWLAYVTFEDTPQGKTIFTSYGTTLYQMFVLFTTSNNPDVWVPAYKSSRWNALFIVIYVLLGVYFLTNLILAVIYDSFKEQLAKQLAQMDSIRKSILQKAFDLIDTNGQGYLNKEQCISLLDELNKYRLPPRNLLTYAILLQ

SEQ ID NO: 194370 - protein, 408 aa, Zea Mays
MTEVEAPLITEVEGVEGRGFCGSASTGGGSSGLGSGVRGTRQYHRRSDALAYGDRYQKAAALVDLAEDGVGIPEDVLNDTRFERAMRFYFVYLRLDWLWSLNLFALILLNFLEKPLWCQKYAPHTCDQRDLYFLGQLPYLSKTESLIYEALTLVILVLDIFYPLSYEGLNLFWKNSMNKLKVLLLFILACDILVFMLSSGPFRVAPYIRVVFLIMTISWLAYVTFEDTPQGKTIFTSYGTTLYQMFVLFTTSNNPDVWVPAYKSSRWNALFIVIYVLLGVYFLTNLILAVIYDSFKEQLAKQLAQMDSIRKSILQKAFDLIDTNGQGYLNKEQCISLLDELNKYRSLPKTWREDFELIFSELDRSGDFKVTSEEFADLCNTIAIKFQKEPPESCTLFHKIWRKKQHKG

SEQ ID NO: 194371 - protein, 209 aa, Zea Mays
MNKLKVLLLFILACDILVFMLSSGPFRVAPYIRVVFLIMTISWLAYVTFEDTPQGKTIFTSYGTTLYQMFVLFTTSNNPDVWVPAYKSSRWNALFIVIYVLLGVYFLTNLILAVIYDSFKEQLAKQLAQMDSIRKSILQKAFDLIDTNGQGYLNKEQCISLLDELNKYRSLPKTWREDFELIFSELDRSGDFKGMNYFLKFISTMMKKK

SEQ ID NO: 194372 - protein, 169 aa, Zea Mays
MLIENQRTVTCAPTNTAVAEVASRVLGVIEESSGGGAATKCFFGDVVLFGNEDRMAVDRKLENIFLDTRVRRLRQCLMPITGWTKSLSSMIALQEDSMVPYERYDEAIQGCVLDLVSEEIKLRNVTVVCSLRTMDDKKVKEMQKRFTGSAEKSTRSRARENVIRDLLPE

SEQ ID NO: 194373 - protein, 88 aa, Zea Mays
MISFRGSFVYSKERHLKQGEKISKLENALQTLIHLPLTICKRTLKTFTKDFCKYKTYGAKCGPICQKQNKQSMRIMNQKPKLLLHKRV

SEQ ID NO: 194374 - protein, 68 aa, Zea Mays
MPWIWDRVSLNPVIPYMKRQSRTGSGEMARVARTLLAKDRLKGVVRSRVARTCSCSRGSVGTVDICKG

SEQ ID NO: 194375 - protein, 66 aa, Zea Mays
MSHTPCVKVGYHSKVNKFSKEKWTGCYTGLAVIGVLITPARHMECRLFSRLLLWFSEFLTTFGALW

SEQ ID NO: 194376 - protein, 1133 aa, Zea Mays
MEPLPDGSMNPRRSAIKQVASGRFGVSSYYLTNADELQIKMAQGAKPGEGGELPGHKVIGDIAVTRHSTAGVGLISPPPHHDIYSIEDLAQLIHDLKNSNPGARISVKLVSEAGVGVVASGVVKGHADHVLISGHDGGTGASRWTGIKNAGLPWELGLAETHQTLVANGLRGRAVLQTDGQLKTGRDVAVACLLGAEEFGFSTAPLITLGCIMMRKCHMNTCPVGIATQDPVLREKFAGEPEHVINFFFMLAEELREIMANLGFRTITEMVGRSDMLEVDPEVVKTNEKLENIDLSLILKPASEIRPGVAQYCVEKQDHGLDMALDNKLIDLSRTAIEKQVRVFIETPIQNTNRAVGTMLSHEVTKRYHINGLPAGTIHVKFTGSAGQSFGAFLCPGVTLELEGDSNDYLGKGLSGGKIVVYPPRNSSFSPEDNIVIGNVALYGATMGEAYFNGMAAERFCVRNSGAQAVVEGIGDHGCEYMTGGTVVILGKTGRNFAAGMSGGIAYVYDVDGKFSARCNNELVDLYHVEEEDDIITLKMMIEQHRRNTESVLARDILSDFDNLLPKFVKVYPRDYKRVLENMKLEKSVANHAKEPKMVNGISVTTKKVQPDQSASRPTRVANAKKYRGFITYERESISYRDPKERVKDWKEVAIESTPGPLLNTQSARCMDCGTPFCHQESSGAGCPLGNKIPEFNELVHQNRWREALDRLLETNNFPEFTGRVCPAPCEGSCVLGIIENPVSIKSIECAIIDKGFEEGWMIPRPPLQRTGRKVAIVGSGPAGLAAADQLNKMGHFVTVFERADRIGGLMMYGVPNMKTDKIGIVQRRVNLMAEEGVTFVVNANVGSDPLYSIERLRSENDAVILACGATKPRDLTIPGRELSGVHFAMEFLHANTKSLLDSNLEDGKYISARGKKVVVIGGGDTGTDCIGTSIRHGCTSLVNLELLTKPPSNRAADNPWPQWPRIFRVDYGHQEAATKFGKDPRTYEVLTKRFIGDENGKVKALELVRVKWEKVDGRFQLKEIQGSEEIIEADLVLLAMGFLGPEASIAEKLGLEKDNRSNFKAQFGDFATSVDGVFAAGDCRRGQSLVVWAITEGRQAAAAVDKYISRHDQNVAGDITPFGAGLVQPVGA

SEQ ID NO: 194377 - protein, 1867 aa, Zea Mays
MKFCATDAFFLVHSRFSTNTFPSWDRAQPMRVLGHNGEINTLRGNKNWMTAREGLLEAEKLGLSKEQLARILPIVDATSSDSGAFDNVLELLVRGGRSLLEAVMMMIPEAWQNDGNMDPEKKALYEFLSALMEPWDGPALISFTDGRYLGATLDRNGLRPGRFYVTHSGRVIMGSEVGVVDVPPEDVLRKGRLNPGMMLLVDFENHTVVDDEALKAQYSKAHPYGEWLKRQKIYLKDIVESVPETDRVAPSISSSLPAKNENKDHVGINGILTPLKAFGYTVEALDMLLLPMAKDGVEALGSMGNDTPLAVMSNREKLTFEYFKQMFAQVTNPPIDPIREKIVTSMECMIGPEGDLLETTEKQCNRLSLKGPLVSIDEMEAIKKMNYRGWRSKVLDITYPKKSGRKGLEETLNRMCAEAREAIREGYTILVLSDRGFSSDRVAASSLLAVGAVHQHLVANLERTRIGLLVESAEPREVHHFCTLLGFGADAICPYLAIEAIWCLQNDGKIPPNGDGQPNSKEELVKKYFYASNYGMMKVLAKMGISTLASYKGAQIFEALGLSSEVIGKCFEGTPSRIEGATFEMLARDALRLHELAFPSRTPPAGSADAKALPNPGDYHWRKNGEVHLNDPLAMGKLQEAARVNSRAAYKEYSKRIQELNKACNLRGMLKFKDISDKISLDDVEPASEIVKRFCTGAMSYGSISLEAHTALAIAMNKLGGKSNTGEGGEQPSRMEPLPDGSMNPRRSAIKQVASGRFGVSSYYLTNADELQIKMAQGAKPGEGGELPGHKVIGDIAVTRHSTAGVGLISPPPHHDIYSIEDLAQLIHDLKNSNPGARISVKLVSEAGVGVVASGVVKGHADHVLISGHDGGTGASRWTGIKNAGLPWELGLAETHQTLVANGLRGRAVLQTDGQLKTGRDVAVACLLGAEEFGFSTAPLITLGCIMMRKCHMNTCPVGIATQDPVLREKFAGEPEHVINFFFMLAEELREIMANLGFRTITEMVGRSDMLEVDPEVVKTNEKLENIDLSLILKPASEIRPGVAQYCVEKQDHGLDMALDNKLIDLSRTAIEKQVRVFIETPIQNTNRAVGTMLSHEVTKRYHINGLPAGTIHVKFTGSAGQSFGAFLCPGVTLELEGDSNDYLGKGLSGGKIVVYPPRNSSFSPEDNIVIGNVALYGATMGEAYFNGMAAERFCVRNSGAQAVVEGIGDHGCEYMTGGTVVILGKTGRNFAAGMSGGIAYVYDVDGKFSARCNNELVDLYHVEEEDDIITLKMMIEQHRRNTESVLARDILSDFDNLLPKFVKVYPRDYKRVLENMKLEKSVANHAKEPKMVNGISVTTKKVQPDQSASRPTRVANAKKYRGFITYERESISYRDPKERVKDWKEVAIESTPGPLLNTQSARCMDCGTPFCHQESSGAGCPLGNKIPEFNELVHQNRWREALDRLLETNNFPEFTGRVCPAPCEGSCVLGIIENPVSIKSIECAIIDKGFEEGWMIPRPPLQRTGRKVAIVGSGPAGLAAADQLNKMGHFVTVFERADRIGGLMMYGVPNMKTDKIGIVQRRVNLMAEEGVTFVVNANVGSDPLYSIERLRSENDAVILACGATKPRDLTIPGRELSGVHFAMEFLHANTKSLLDSNLEDGKYISARGKKVVVIGGGDTGTDCIGTSIRHGCTSLVNLELLTKPPSNRAADNPWPQWPRIFRVDYGHQEAATKFGKDPRTYEVLTKRFIGDENGKVKALELVRVKWEKVDGRFQLKEIQGSEEIIEADLVLLAMGFLGPEASIAEKLGLEKDNRSNFKAQFGDFATSVDGVFAAGDCRRGQSLVVWAITEGRQAAAAVDKYISRHDQNVAGDITPFGAGLVQPVGA

SEQ ID NO: 194378 - protein, 2045 aa, Zea Mays
MLERMAHRGACGCEKNTGDGAGIMVALPHDFFKEVTKDAGFELPPPGDYAVGMFFMPTDEKRREKGKAEFKKVAESLGHVILGWRPVPTDNSDLGESALETEPVIEQVFVTKSSRSEAEFEQQLYILRRLSIISVRASLNIKRGGERDFYMCSLSSRTIVYKGQLKPCQLKGYYYADLGQENFMSYMALVHSRFSTNTFPSWDRAQPMRVLGHNGEINTLRGNKNWMTAREGLLEAEKLGLSKEQLARILPIVDATSSDSGAFDNVLELLVRGGRSLLEAVMMMIPEAWQNDGNMDPEKKALYEFLSALMEPWDGPALISFTDGRYLGATLDRNGLRPGRFYVTHSGRVIMGSEVGVVDVPPEDVLRKGRLNPGMMLLVDFENHTVVDDEALKAQYSKAHPYGEWLKRQKIYLKDIVESVPETDRVAPSISSSLPAKNENKDHVGINGILTPLKAFGYTVEALDMLLLPMAKDGVEALGSMGNDTPLAVMSNREKLTFEYFKQMFAQVTNPPIDPIREKIVTSMECMIGPEGDLLETTEKQCNRLSLKGPLVSIDEMEAIKKMNYRGWRSKVLDITYPKKSGRKGLEETLNRMCAEAREAIREGYTILVLSDRGFSSDRVAASSLLAVGAVHQHLVANLERTRIGLLVESAEPREVHHFCTLLGFGADAICPYLAIEAIWCLQNDGKIPPNGDGQPNSKEELVKKYFYASNYGMMKVLAKMGISTLASYKGAQIFEALGLSSEVIGKCFEGTPSRIEGATFEMLARDALRLHELAFPSRTPPAGSADAKALPNPGDYHWRKNGEVHLNDPLAMGKLQEAARVNSRAAYKEYSKRIQELNKACNLRGMLKFKDISDKISLDDVEPASEIVKRFCTGAMSYGSISLEAHTALAIAMNKLGGKSNTGEGGEQPSRMEPLPDGSMNPRRSAIKQVASGRFGVSSYYLTNADELQIKMAQGAKPGEGGELPGHKVIGDIAVTRHSTAGVGLISPPPHHDIYSIEDLAQLIHDLKNSNPGARISVKLVSEAGVGVVASGVVKGHADHVLISGHDGGTGASRWTGIKNAGLPWELGLAETHQTLVANGLRGRAVLQTDGQLKTGRDVAVACLLGAEEFGFSTAPLITLGCIMMRKCHMNTCPVGIATQDPVLREKFAGEPEHVINFFFMLAEELREIMANLGFRTITEMVGRSDMLEVDPEVVKTNEKLENIDLSLILKPASEIRPGVAQYCVEKQDHGLDMALDNKLIDLSRTAIEKQVRVFIETPIQNTNRAVGTMLSHEVTKRYHINGLPAGTIHVKFTGSAGQSFGAFLCPGVTLELEGDSNDYLGKGLSGGKIVVYPPRNSSFSPEDNIVIGNVALYGATMGEAYFNGMAAERFCVRNSGAQAVVEGIGDHGCEYMTGGTVVILGKTGRNFAAGMSGGIAYVYDVDGKFSARCNNELVDLYHVEEEDDIITLKMMIEQHRRNTESVLARDILSDFDNLLPKFVKVYPRDYKRVLENMKLEKSVANHAKEPKMVNGISVTTKKVQPDQSASRPTRVANAKKYRGFITYERESISYRDPKERVKDWKEVAIESTPGPLLNTQSARCMDCGTPFCHQESSGAGCPLGNKIPEFNELVHQNRWREALDRLLETNNFPEFTGRVCPAPCEGSCVLGIIENPVSIKSIECAIIDKGFEEGWMIPRPPLQRTGRKVAIVGSGPAGLAAADQLNKMGHFVTVFERADRIGGLMMYGVPNMKTDKIGIVQRRVNLMAEEGVTFVVNANVGSDPLYSIERLRSENDAVILACGATKPRDLTIPGRELSGVHFAMEFLHANTKSLLDSNLEDGKYISARGKKVVVIGGGDTGTDCIGTSIRHGCTSLVNLELLTKPPSNRAADNPWPQWPRIFRVDYGHQEAATKFGKDPRTYEVLTKRFIGDENGKVKALELVRVKWEKVDGRFQLKEIQGSEEIIEADLVLLAMGFLGPEASIAEKLGLEKDNRSNFKAQFGDFATSVDGVFAAGDCRRGQSLVVWAITEGRQAAAAVDKYISRHDQNVAGDITPFGAGLVQPVGA

SEQ ID NO: 194379 - protein, 1838 aa, Zea Mays
MRVLGHNGEINTLRGNKNWMTAREGLLEAEKLGLSKEQLARILPIVDATSSDSGAFDNVLELLVRGGRSLLEAVMMMIPEAWQNDGNMDPEKKALYEFLSALMEPWDGPALISFTDGRYLGATLDRNGLRPGRFYVTHSGRVIMGSEVGVVDVPPEDVLRKGRLNPGMMLLVDFENHTVVDDEALKAQYSKAHPYGEWLKRQKIYLKDIVESVPETDRVAPSISSSLPAKNENKDHVGINGILTPLKAFGYTVEALDMLLLPMAKDGVEALGSMGNDTPLAVMSNREKLTFEYFKQMFAQVTNPPIDPIREKIVTSMECMIGPEGDLLETTEKQCNRLSLKGPLVSIDEMEAIKKMNYRGWRSKVLDITYPKKSGRKGLEETLNRMCAEAREAIREGYTILVLSDRGFSSDRVAASSLLAVGAVHQHLVANLERTRIGLLVESAEPREVHHFCTLLGFGADAICPYLAIEAIWCLQNDGKIPPNGDGQPNSKEELVKKYFYASNYGMMKVLAKMGISTLASYKGAQIFEALGLSSEVIGKCFEGTPSRIEGATFEMLARDALRLHELAFPSRTPPAGSADAKALPNPGDYHWRKNGEVHLNDPLAMGKLQEAARVNSRAAYKEYSKRIQELNKACNLRGMLKFKDISDKISLDDVEPASEIVKRFCTGAMSYGSISLEAHTALAIAMNKLGGKSNTGEGGEQPSRMEPLPDGSMNPRRSAIKQVASGRFGVSSYYLTNADELQIKMAQGAKPGEGGELPGHKVIGDIAVTRHSTAGVGLISPPPHHDIYSIEDLAQLIHDLKNSNPGARISVKLVSEAGVGVVASGVVKGHADHVLISGHDGGTGASRWTGIKNAGLPWELGLAETHQTLVANGLRGRAVLQTDGQLKTGRDVAVACLLGAEEFGFSTAPLITLGCIMMRKCHMNTCPVGIATQDPVLREKFAGEPEHVINFFFMLAEELREIMANLGFRTITEMVGRSDMLEVDPEVVKTNEKLENIDLSLILKPASEIRPGVAQYCVEKQDHGLDMALDNKLIDLSRTAIEKQVRVFIETPIQNTNRAVGTMLSHEVTKRYHINGLPAGTIHVKFTGSAGQSFGAFLCPGVTLELEGDSNDYLGKGLSGGKIVVYPPRNSSFSPEDNIVIGNVALYGATMGEAYFNGMAAERFCVRNSGAQAVVEGIGDHGCEYMTGGTVVILGKTGRNFAAGMSGGIAYVYDVDGKFSARCNNELVDLYHVEEEDDIITLKMMIEQHRRNTESVLARDILSDFDNLLPKFVKVYPRDYKRVLENMKLEKSVANHAKEPKMVNGISVTTKKVQPDQSASRPTRVANAKKYRGFITYERESISYRDPKERVKDWKEVAIESTPGPLLNTQSARCMDCGTPFCHQESSGAGCPLGNKIPEFNELVHQNRWREALDRLLETNNFPEFTGRVCPAPCEGSCVLGIIENPVSIKSIECAIIDKGFEEGWMIPRPPLQRTGRKVAIVGSGPAGLAAADQLNKMGHFVTVFERADRIGGLMMYGVPNMKTDKIGIVQRRVNLMAEEGVTFVVNANVGSDPLYSIERLRSENDAVILACGATKPRDLTIPGRELSGVHFAMEFLHANTKSLLDSNLEDGKYISARGKKVVVIGGGDTGTDCIGTSIRHGCTSLVNLELLTKPPSNRAADNPWPQWPRIFRVDYGHQEAATKFGKDPRTYEVLTKRFIGDENGKVKALELVRVKWEKVDGRFQLKEIQGSEEIIEADLVLLAMGFLGPEASIAEKLGLEKDNRSNFKAQFGDFATSVDGVFAAGDCRRGQSLVVWAITEGRQAAAAVDKYISRHDQNVAGDITPFGAGLVQPVGA

SEQ ID NO: 194380 - protein, 103 aa, Zea Mays
MAEYNAISYSDQMRLRTAVELLKATKDIESQLEKISSPLLILHGAADMVTDPQVSKFLYEKASTKDKTLKLYEGSYHSILEGEPDDRISTAINDIISWLDSHC

SEQ ID NO: 194381 - protein, 99 aa, Zea Mays
MPPHMAAISHRIAGSGPRVAVVAPPRPRGRAAVVAGAAAKGAHRERTLEGASDDLRAAAAQCLDWAPARRRVRAAFAPVLPTLDHCLFKVRCASRSVLA

SEQ ID NO: 194382 - protein, 184 aa, Zea Mays
MVKVKQASRHCRVQSASRLVPAPDSPLLTGVASSQTLTRHKPTCPRARQAGKATREIPSRAERSNTCAEVTAPIDKPAKQPHMPPHMAAISHRIAGSGPRVAVVAPPRPRGRAAVVAGAAAKGAHRERTLEGASDDLRAAAAQCLDWAPARRRVRAAFAPVLPTLDHCLFKMAHNEIQMEEVRA

SEQ ID NO: 194383 - protein, 1094 aa, Zea Mays
MVIFPALDIRVKNVAGTYSLEHKGESDLFSQLFDLLQLDIHNDDGLRRELASCTGAIQTCLSQHMSKEEEQVFPLLTKKFSCEEQADLVWQFLCNIPVNMVAEFLPWLSTSVTSDEHQDIRNCLCKVVPDEKLLQQVVFTWMEGKATREVAESIAAGISARNNSVEDVPDQGKIHICLHHNSKLGSKNCGESNGPQADKHPIDDILYWHNAIRMELRDIKEETRRVQQSGDFSDISAFNERLQFIADVCIYHSIAEDQVVFPAVDSELSFVQEHAEEECRFNNFRCLIQQIQIAGAESTALDFYSKLCSHADKILEAIEKHFCNEETKVLPQARMLFSLEKQRELSYKSLCVMPLKLLERVLPWLVSKLSDVQATSFLQNIRLAASPSETALVTLISGWACKGRDKSKDGEYLCLTSGAARCLSDDVDDLGKCRSFCPCASPNSSDLSLQLHTENDSRPGKRGKDAVSFSHTNGIYCSQTADIEAIPCSKKPCCIPGLRVESSNLGIGSLASAKSFHSLSYNSTAPSLYSSLFSWETDTSLSCSDSISRPIDTIFKFHKAIRKDLEYLDVESGKLIDGNESCLRQFIGRFRLLWGLYRAHSNAEDEIVFPALESRETLHNVSHSYTLDHKQEEQLFEDISNVLFQLSQLHDSQGHAQTEVNEVKKSCFHSSNDVDFARKYNELATKLQGMCKSIRVALTNHVHREELELWPLFDKHFSVEEQDKLVGRIIGSTGAEVLQSMLPWVTSVLTQEEQNKMLDMWKQATKNTMFGEWLNEWWKGAGTASDSSAEASSAPEDSHLQDKLEQNDQMFKPGWKDIFRMNQSELEAEVRKVSRDSTLDPRRKAYLIQNLMTSRWIAAQQKLPEPNSEECNHDASIPGCAPSYRDQEKQIYGCEHYKRNCKLVAACCNKLFTCRFCHDKVSDHTMERTVYHCPFCNLCRLGKGLGVDFFHCMKCNCCLGMKLTEHKCREKGLETNCPICCDFLFTSSAAVRALPCGHFMHSACFQAYTCSHYTCPICCKSLGDMAVYFGMLDALLAAEELPEEYRDRCQDILCNDCERKGRCRFHWLYHKCGSCGSYNTRVIKTATADCSTPN

SEQ ID NO: 194384 - protein, 1140 aa, Zea Mays
MVIFPALDIRVKNVAGTYSLEHKGESDLFSQLFDLLQLDIHNDDGLRRELASCTGAIQTCLSQHMSKEEEQVFPLLTKKFSCEEQADLVWQFLCNIPVNMVAEFLPWLSTSVTSDEHQDIRNCLCKVVPDEKLLQQVVFTWMEGKATREVAESIAAGISARNNSVEDVPDQGKIHICLHHNSKLGSKNCGESNGPQADKHPIDDILYWHNAIRMELRDIKEETRRVQQSGDFSDISAFNERLQFIADVCIYHSIAEDQVVFPAVDSELSFVQEHAEEECRFNNFRCLIQQIQIAGAESTALDFYSKLCSHADKILEAIEKHFCNEETKVLPQARMLFSLEKQRELSYKSLCVMPLKLLERVLPWLVSKLSDVQATSFLQNIRLAASPSETALVTLISGWACKGRDKSKDGEYLCLTSGAARCLSDDVDDLGKCRSFCPCASPNSSDLSLQLHTENDSRPGKRGKDAVSFSHTNGIYCSQTADIEAIPCSKKPCCIPGLRVESSNLGIGSLASAKSFHSLSYNSTAPSLYSSLFSWETDTSLSCSDSISRPIDTIFKFHKAIRKDLEYLDVESGKLIDGNESCLRQFIGRFRLLWGLYRAHSNAEDEIVFPALESRETLHNVSHSYTLDHKQEEQLFEDISNVLFQLSQLHDSQGHAQTEVNEVKKSCFHSSNDVDFARKYNELATKLQGMCKSIRVALTNHVHREELELWPLFDKHFSVEEQDKLVGRIIGSTGAEVLQSMLPWVTSVLTQEEQNKMLDMWKQATKNTMFGEWLNEWWKGAGTASDSSAEASSAPEDSHLQDKLEQNDQMFKPGWKDIFRMNQSELEAEVRKVSRDSTLDPRRKAYLIQNLMTSRWIAAQQKLPEPNSEECNHDASIPGCAPSYRDQEKQIYGCEHYKRNCKLVAACCNKLFTCRFCHDKVSDHTMERKATQEMMCMVCLKIQPVGSFCQTPSCNRLSMAKYYCNICKFFDDERTVYHCPFCNLCRLGKGLGVDFFHCMKCNCCLGMKLTEHKCREKGLETNCPICCDFLFTSSAAVRALPCGHFMHSACFQAYTCSHYTCPICCKSLGDMAVYFGMLDALLAAEELPEEYRDRCQDILCNDCERKGRCRFHWLYHKCGSCGSYNTRVIKTATADCSTPN

SEQ ID NO: 194385 - protein, 911 aa, Zea Mays
MATPTPMPGGEGTLAAVMPRSPSPTPAEAGTSATETPVLIFLYFHKAIRAELEALHGAAVLLATERTGDVEMLAKRCRFFFNIYKHHCDAEDAVIFPALDIRVKNVAGTYSLEHKGESDLFSQLFDLLQLDIHNDDGLRRELASCTGAIQTCLSQHMSKEEEQVFPLLTKKFSCEEQADLVWQFLCNIPVNMVAEFLPWLSTSVTSDEHQDIRNCLCKVVPDEKLLQQVVFTWMEGKATREVAESIAAGISARNNSVEDVPDQGKIHICLHHNSKLGSKNCGESNGPQADKHPIDDILYWHNAIRMELRDIKEETRRVQQSGDFSDISAFNERLQFIADVCIYHSIAEDQVVFPAVDSELSFVQEHAEEECRFNNFRCLIQQIQIAGAESTALDFYSKLCSHADKILEAIEKHFCNEETKVLPQARMLFSLEKQRELSYKSLCVMPLKLLERVLPWLVSKLSDVQATSFLQNIRLAASPSETALVTLISGWACKGRDKSKDGEYLCLTSGAARCLSDDVDDLGKCRSFCPCASPNSSDLSLQLHTENDSRPGKRGKDAVSFSHTNGIYCSQTADIEAIPCSKKPCCIPGLRVESSNLGIGSLASAKSFHSLSYNSTAPSLYSSLFSWETDTSLSCSDSISRPIDTIFKFHKAIRKDLEYLDVESGKLIDGNESCLRQFIGRFRLLWGLYRAHSNAEDEIVFPALESRETLHNVSHSYTLDHKQEEQLFEDISNVLFQLSQLHDSQGHAQTEVNEVKKSCFHSSNDVDFARKYNELATKLQGMCKSIRVALTNHVHREELELWPLFDKHFSVEEQDKLVGRIIGSTGAEVLQSMLPWVTSVLTQEEQNKMLDMWKQATKNTMFGEWLNEWWKGAGTASDSSAEASSAPEVIYKISLNKMTRCSSLAGRTYFE

SEQ ID NO: 194386 - protein, 1054 aa, Zea Mays
MATPTPMPGGEGTLAAVMPRSPSPTPAEAGTSATETPVLIFLYFHKAIRAELEALHGAAVLLATERTGDVEMLAKRCRFFFNIYKHHCDAEDAVIFPALDIRVKNVAGTYSLEHKGESDLFSQLFDLLQLDIHNDDGLRRELASCTGAIQTCLSQHMSKEEEQVFPLLTKKFSCEEQADLVWQFLCNIPVNMVAEFLPWLSTSVTSDEHQDIRNCLCKVVPDEKLLQQVVFTWMEGKATREVAESIAAGISARNNSVEDVPDQGKIHICLHHNSKLGSKNCGESNGPQADKHPIDDILYWHNAIRMELRDIKEETRRVQQSGDFSDISAFNERLQFIADVCIYHSIAEDQVVFPAVDSELSFVQEHAEEECRFNNFRCLIQQIQIAGAESTALDFYSKLCSHADKILEAIEKHFCNEETKVLPQARMLFSLEKQRELSYKSLCVMPLKLLERVLPWLVSKLSDVQATSFLQNIRLAASPSETALVTLISGWACKGRDKSKDGEYLCLTSGAARCLSDDVDDLGKCRSFCPCASPNSSDLSLQLHTENDSRPGKRGKDAVSFSHTNGIYCSQTADIEAIPCSKKPCCIPGLRVESSNLGIGSLASAKSFHSLSYNSTAPSLYSSLFSWETDTSLSCSDSISRPIDTIFKFHKAIRKDLEYLDVESGKLIDGNESCLRQFIGRFRLLWGLYRAHSNAEDEIVFPALESRETLHNVSHSYTLDHKQEEQLFEDISNVLFQLSQLHDSQGHAQTEVNEVKKSCFHSSNDVDFARKYNELATKLQGMCKSIRVALTNHVHREELELWPLFDKHFSVEEQDKLVGRIIGSTGAEVLQSMLPWVTSVLTQEEQNKMLDMWKQATKNTMFGEWLNEWWKGAGTASDSSAEASSAPEDSHLQDKLEQNDQMFKPGWKDIFRMNQSELEAEVRKVSRDSTLDPRRKAYLIQNLMTSRWIAAQQKLPEPNSEECNHDASIPGCAPSYRDQEKQIYGCEHYKRNCKLVAACCNKLFTCRFCHDKVSDHTMESNTGDDVHGMPKDSTCWFVLPNPILQQTIDGKVLL

SEQ ID NO: 194387 - protein, 93 aa, Zea Mays
MLLATCWCGLFTRMKQVKANRAISYRRTAYRSRPQDVPIFKSSSAFGLVHLGPFAMVSVRTMLSCQRKYYIYVLEVVSANLPAKWWCIKKIKI

SEQ ID NO: 194388 - protein, 172 aa, Zea Mays
MEAASNQEPGRCGGDDDEAKRREAELASSRLLDPGFKPSKLSQDRLDKFKRKRSRCQLYTQKHKCTMNLSNQRRGPTEKSATELHKKRLQITEKPKYKRKPKGTTERSIKVTSNYKFTDKDASADSSPRDVHHMSSVTGIQGDPASGLSSRNKRKLHWGLDIKERWERKANM

SEQ ID NO: 194389 - protein, 111 aa, Zea Mays
MEAASNQEPGRCGGDDDEAKRREAELASSRLLDPGFKPSKLSQDRLDKFKELHKKRLQITEKPKYKRKPKGTTERSIKVTSNYKFTDKDASADSSPRDVHHMSSVTGIQGA

SEQ ID NO: 194390 - protein, 113 aa, Zea Mays
MEAASNQEPGRCGGDDDEAKRREAELASSRLLDPGFKPSKLSQDRLDKFKELHKKRLQITEKPKYKRKPKGTTERSIKVTSNYKFTDKDASADSSPRDVHHMSSVTGIQGKAR

SEQ ID NO: 194391 - protein, 112 aa, Zea Mays
MEAASNQEPGRCGGDDDEAKRREAELASSRLLDPGFKPSKLSQDRLDKFKELHKKRLQITEKPKYKRKPKGTTERSIKVTSNYKFTDKDASADSSPRDVHHMSSVTGIQGAR

SEQ ID NO: 194392 - protein, 111 aa, Zea Mays
MEAASNQEPGRCGGDDDEAKRREAELASSRLLDPGFKPSKLSQDRLDKFKELHKKRLQITEKPKYKRKPKGTTERSIKVTSNYKFTDKDASADSSPRDVHHMSSVTGIQGG

SEQ ID NO: 194393 - protein, 376 aa, Zea Mays
MRKRKQKKKVINSSSKLLKYSGSGGTPRSRVGDMESGSIEDPPTHHFTYEELEEATNRFDESRELGDGGFGTVYKGYLRDGRVVAVKRLYNNGYRRVEQFQNEAAILSGLRHPNLVMFYGCTSSHSRELLLVYEFVANGTVADHLHGQRAPERALSWPLRLSVAVESAAALTYLHAIEPPVVHRDVKTTNILLDADYHVKVADFGLSRLFPLDVTHVSTAPQGTPGYVDPEYHQCYQLTDKSDVYSFGVVLVELISSKPAVDITRHRSEINLASMAISKIQKCQLEELVDLGLGYDTDPATRKMMTMVAELAFRCLQQNGEMRPPIKEVLEVLRNIQGECLTSGKDGDKSKDGPFSPTTVHAPWDSRSTTPNTSRD

SEQ ID NO: 194394 - protein, 143 aa, Zea Mays
MGVGFTGSLASSRPKHGDHRFYVSTWTHNCLRTSHVTLSKGLRSREEEDKVSSYFLLKAIADTCRVSATIQSDIHKSEIPEEIMEQFDEDQELQQVINGQVCMKVYNFAAPAESNLNRKIILPGSFNPLHDGHLRLLEAAVRN

SEQ ID NO: 194395 - protein, 297 aa, Zea Mays
MSSEAVKVTMLESMFRRRKREEQWAVKKKKAMPEKKKSIERRKLIFSRAKRCIPGSIGLQCCWRKGTGQITPSSRPVVTRRVAVAAPAPTGIVMESWVRAVVEAIHSSRSQTVIYLAGGASQALGWLLSVPGASGTVLEVVVPYSRASMAQLLGKMPLQFTSKQAAEDMALAAYNRALKLSGPGLQVMGVGFTGSLASSRPKHGDHRFYVSTWTHNCLRTSHVTLSKGLRSREEEDKVSSYFLLKAIADTCRVSATIQSDIHKSEIPEEIMEQFDEDQELQQVINGQVCMKLRRKVT

SEQ ID NO: 194396 - protein, 290 aa, Zea Mays
MSSEAVKVTMLESMFRRRKREEQWAVKKKKAMPEKKKSIERRKLIFSRAKRCIPGSIGLQCCWRKGTGQITPSSRPVVTRRVAVAAPAPTGIVMESWVRAVVEAIHSSRSQTVIYLAGGASQALGWLLSVPGASGTVLEVVVPYSRASMAQLLGKMPLQFTSKQAAEDMALAAYNRALKLSGPGLQVMGVGFTGSLASSRPKHGDHRFYVSTWTHNCLRTSHVTLSKGLRSREEEDKVSSYFLLKAIADTCRVSATIQSDIHKSEIPEEIMEQFDEDQELQQVINGSGGK

SEQ ID NO: 194397 - protein, 413 aa, Zea Mays
MSSEAVKVTMLESMFRRRKREEQWAVKKKKAMPEKKKSIERRKLIFSRAKRCIPGSIGLQCCWRKGTGQITPSSRPVVTRRVAVAAPAPTGIVMESWVRAVVEAIHSSRSQTVIYLAGGASQALGWLLSVPGASGTVLEVVVPYSRASMAQLLGKMPLQFTSKQAAEDMALAAYNRALKLSGPGLQVMGVGFTGSLASSRPKHGDHRFYVSTWTHNCLRTSHVTLSKGLRSREEEDKVSSYFLLKAIADTCRVSATIQSDIHKSEIPEEIMEQFDEDQELQQVINGQVCMKVYNFAAPAESNLNRKIILPGSFNPLHDGHLRLLEAAVSMCDDGLPFFEISAINADKPPLSIAEIKRRVEQFRKAGKNVIISNQPYFYKKAELFPGSAFIIGADTAARLVNLQIGLQGFLHWS

SEQ ID NO: 194398 - protein, 87 aa, Zea Mays
MSSCLILSGFFEKETWMHPIFPALFYACERVIRKFHENDYHSGIVSNLSGRCALYSHEEASGFQVLKWNASFFCKIPSLAFRLVSFY

SEQ ID NO: 194399 - protein, 94 aa, Zea Mays
MSSCLILSGFFEKETWMHPIFPALFYACERVIRKFHENDYHSGIVSNLSGRCALYSHEEASGFQVLKWNASFFCKIPSLAFRLAPLLYNSGTRR

SEQ ID NO: 194400 - protein, 113 aa, Zea Mays
MFIFCKFVCSFQTWMHPIFPALFYACERVIRKFHENDYHSGIVSNLSGRCALYSHEEASGFQVLKWNASFFCKIPSLAFRLRHPFSITLAPGDNYLTVHIRALGDRASKLSIL

SEQ ID NO: 194401 - protein, 92 aa, Zea Mays
MFIFCKFVCSFQTWMHPIFPALFYACERVIRKFHENDYHSGIVSNLSGRCALYSHEEASGFQVLKWNASFFCKIPSLAFRLAPLLYNSGTRR

SEQ ID NO: 194402 - protein, 347 aa, Zea Mays
MVKWLKVGGYIFFRESCFHQSGDSKRKVNPTHYREPSFYTKVFKECHTFDQDGNSFELSLVTCKCIGAYVKNKKNQNQICWLWQKVHSTEDKGFQRFLDNVQYKASGILRYERIFGEGYVSTGGVETTKEFVDKLDLKPGHKVLDVGCGIGGGDFYMAEKYDAHVVGIDLSINMVSFALERAIGRSCSVEFEVADCTTKTYPDNTFDVIYSRDTILHIHDKPSLFKSFFKWLKPGGKVLISDYCRSPGKPSEEFAAYIKQRGYDLHAVEAYGQMLKSAGFRDVIAEDRTDQFLGVLDKELAEFEKNKDDFLSDFTQEDYDDIVNGWKAKLQRSSAGEQRWGLFIATK

SEQ ID NO: 194403 - protein, 84 aa, Zea Mays
MHCRCVSAAWWRSSVQTWQTNVYWCWPGGSNVVEVRTSRGLTSPVQRTECHNNFRSLPVGAADFFGLGGSRPNAPSTLRNLCHY

SEQ ID NO: 194404 - protein, 603 aa, Zea Mays
MSATIDRLATPSHEGRAHSDEKRECNSDEENSEGERKPKKDSFKKRAVTTGYRFRHSLRRKSKTKNDNHIASIEDIRDVQELEIVERFRQCLLDDGLLPEHHDDYHTMLRFLKARKFNIDKAKHMWSEMLRWRKEFGADNIEEFDYTELDEVVKYYPQFYHGVDKDGRPVYIELIGKVDTNKLVQITTIDRYLKYHVKEFERCLQMRFPACSIAAKRHIDSSTTILDVKGVSLKNFTKDARELIMRLQKINNDNYPETLYQLYIINAGQGFKILWGTIKSFLDPETASKIHVLGNKYQTKLLEIIDGSELPEFLGGKCRCEEYGGCPKSDKGPWKDPEIFKRVINGEANYGRQVLAVSSINQKEVGCTEHTTEQEKGNDASAKSISQVEDVSSSTALVDPIISPNLTHVDELKFQGHASSSDAPPIIGDSIPAAGKVMDACSNPRNSSTPSSSGSFSLRNIPATLGGLKTRIVAWSTFVILTLSAFLCSVLSIVTKRLSNQAITCDHYSADFHQGYMGNGTLTSVLTRLGELEEKVQALEAKPPQVPFEKEELLHTAVYRVDVLEAELISMKKVLLFFRYWSEASTIQRWCSCFLKEKKVAVS

SEQ ID NO: 194405 - protein, 291 aa, Zea Mays
MSATIDRLATPSHEGRAHSDEKRECNSDEENSEGERKPKKDSFKKRAVTTGYRFRHSLRRKSKTKNDNHIASIEDIRDVQELEIVERFRQCLLDDGLLPEHHDDYHTMLRFLKARKFNIDKAKHMWSEMLRWRKEFGADNIEEFDYTELDEVVKYYPQFYHGVDKDGRPVYIELIGKVDTNKLVQITTIDRYLKYHVKEFERCLQMRFPACSIAAKRHIDSSTTILDVKGVSLKNFTKDARELIMRLQKINNDNYPETLYQLYIINAGQGFKILWGTIKSFLDPETASKIH

SEQ ID NO: 194406 - protein, 426 aa, Zea Mays
MSATIDRLATPSHEGRAHSDEKRECNSDEENSEGERKPKKDSFKKRAVTTGYRFRHSLRRKSKTKNDNHIASIEDIRDVQELEIVERFRQCLLDDGLLPEHHDDYHTMLRFLKARKFNIDKAKHMWSEMLRWRKEFGADNIEEFDYTELDEVVKYYPQFYHGVDKDGRPVYIELIGKVDTNKLVQITTIDRYLKYHVKEFERCLQMRFPACSIAAKRHIDSSTTILDVKGVSLKNFTKDARELIMRLQKINNDNYPETLYQLYIINAGQGFKILWGTIKSFLDPETASKIHVLGNKYQTKLLEIIDGSELPEFLGGKCRCEEYGGCPKSDKGPWKDPEIFKRVINGEANYGRQVLAVSSINQKEVGCTEHTTVEDVSSSTALVDPIISPNLTHVDEGIASLLLARSWMHAPIQETARHLPAQVLSL

SEQ ID NO: 194407 - protein, 116 aa, Zea Mays
MDMAMASFVAATHHHGSHLAAGFPYSARAGRSVGRSGVTISIRAQTKEDDMLRYKLDRIPFLEEKVRKNRHEYGLKKPILHVLSDRMNESGFSRPEGYLYPYPIKPGPYFIKEEGN

SEQ ID NO: 194408 - protein, 50 aa, Zea Mays
MDMAMASFVAATHHHGSHLAAGFPYSARAGRSVGRSGVTISIRAQKKSNS

SEQ ID NO: 194409 - protein, 121 aa, Zea Mays
MDEATKKNVEATVLEILRGSDMESVTEYKVRAAASDRLGIDLSIPDRKLFVRGVVEEYLLSLSSKEEAKAEEEGVTGRESKGKEHEEEDEEDDDEEEDEGKGGGKREYDDQGDLILCRVSV

SEQ ID NO: 194410 - protein, 187 aa, Zea Mays
MDEATKKNVEATVLEILRGSDMESVTEYKVRAAASDRLGIDLSIPDRKLFVRGVVEEYLLSLSSKEEAKAEEEGVTGRESKGKEHEEEDEEDDDEEEDEGKGGGKREYDDQGDLILCRLSSKRRVTLSEFKGRSLVSIREFYVKDGKEMPSAKGDSTMAPWITARMLDVMSTRMDLHLQCQLDIAGP

SEQ ID NO: 194411 - protein, 187 aa, Zea Mays
MDEATKKNVEATVLEILRGSDMESVTEYKVRAAASDRLGIDLSIPDRKLFVRGVVEEYLLSLSSKEEAKAEEEGVTGRESKGKEHEEEDEEDDDEEEDEGKGGGKREYDDQGDLILCRLSSKRRVTLSEFKGRSLVSIREFYVKDGKEMPSAKGYASPVFSCIFRSLFSAVIVLPLVSSSLRSVYPC

SEQ ID NO: 194412 - protein, 291 aa, Zea Mays
MYARWLFFPAVFGLATQLIDFGSLQWLVLPGFFIFVISWAVLFLQFWKRKNSALLARWGIHCSLSEYKNLDNVSFLSDSLTVEEKEFGVVSVVVEKRKFQRNEWFGVLLRIRNNAIIVLAIICLQLPFELAYAHLYEIAETEVMRYLLTAVYLVAIQYYTRIGGKVSVNLIKYENNQGEESSSASLVYKVLENLIENSIPYLKYSYKKYIAVHKKKRGKESTVGRSVRLSTRVEKEYLKPSYTASIGAELEDGLFDDFLELTLQFGMIMMFACAFPLIFCFAALVCALSKN

SEQ ID NO: 194413 - protein, 329 aa, Zea Mays
MYARWLFFPAVFGLATQLIDFGSLQWLVLPGFFIFVISWAVLFLQFWKRKNSALLARWGIHCSLSEYKNLDNVSFLSDSLTVEEKEFGVVSVVVEKRKFQRNEWFGVLLRIRNNAIIVLAIICLQLPFELAYAHLYEIAETEVMRYLLTAVYLVAIQYYTRIGGKVSVNLIKYENNQGEESSSASLVYKAFGLYFMQSYIGLFYHASLHRDILALRRVLIQRLIVYQVLENLIENSIPYLKYSYKKYIAVHKKKRGKESTVGRSVRLSTRVEKEYLKPSYTASIGAELEDGLFDDFLELTLQFGMIMMFACAFPLIFCFAALVCALSKN

SEQ ID NO: 194414 - protein, 531 aa, Zea Mays
MRTQGEGHVEEATGFEVGIVVPRLSRAAAAGATDNCVARLVRELEGAGLLVERVRGVSAEFIKLAAPMGTLGRAAAEMHMKKLTYIGMELQFQSDQVAAFVRQTDGSLFSWRERYSCFRYLIYGIVNKTNSEVVLKFDDKEFHWKQSESLLTRLEAEGVVKLVFPLHDEIKRKQLLRNWALNWLDFTWQPIDEIYSYFGTKIATYFAFLGMYARWLFFPAVFGLATQLIDFGSLQWLVLPGFFIFVISWAVLFLQFWKRKNSALLARWGIHCSLSEYKNLDNVSFLSDSLTVEEKEFGVVSVVVEKRKFQRNEWFGVLLRIRNNAIIVLAIICLQLPFELAYAHLYEIAETEVMRYLLTAVYLVAIQYYTRIGGKVSVNLIKYENNQGEESSSASLVYKSYIGLFYHASLHRDILALRRVLIQRLIVYQVLENLIENSIPYLKYSYKKYIAVHKKKRGKESTVGRSVRLSTRVEKEYLKPSYTASIGAELEDGLFDDFLELTLQFGMIMMFACAFPLIFCFAALVCALSKN

SEQ ID NO: 194415 - protein, 501 aa, Zea Mays
MRTQGEGHVEEATGFEVGIVVPRLSRAAAAGATDNCVARLVRELEGAGLLVERVRGVSAEFIKLAAPMGTLGRAAAEMHMKKLTYIGMELQFQSDQVAAFVRQTDGSLFSWRERYSCFRYLIYGIVNKTNSEVVLKFDDKEFHWKQSESLLTRLEAEGVVKLVFPLHDEIKRKQLLRNWALNWLDFTWQPIDEIYSYFGTKIATYFAFLGMYARWLFFPAVFGLATQLIDFGSLQWLVLPGFFIFVISWAVLFLQFWKRKNSALLARWGIHCSLSEYKNLDNVSFLSDSLTVEEKEFGVVSVVVEKRKFQRNEWFGVLLRIRNNAIIVLAIICLQLPFELAYAHLYEIAETEVMRYLLTAVYLVAIQYYTRIGGKVSVNLIKYENNQGEESSSASLVYKVLENLIENSIPYLKYSYKKYIAVHKKKRGKESTVGRSVRLSTRVEKEYLKPSYTASIGAELEDGLFDDFLELTLQFGMIMMFACAFPLIFCFAALVCALSKN

SEQ ID NO: 194416 - protein, 504 aa, Zea Mays
MRTQGEGHVEEATGFEVGIVVPRLSRAAAAGATDNCVARLVRELEGAGLLVERVRGVSAEFIKLAAPMGTLGRAAAEMHMKKLTYIGMELQFQSDQVAAFVRQTDGSLFSWRERYSCFRYLIYGIVNKTNSEVVLKFDDKEFHWKQSESLLTRLEAEGVVKLVFPLHDEIKRKQLLRNWALNWLDFTWQPIDEIYSYFGTKIATYFAFLGMYARWLFFPAVFGLATQLIDFGWGIHCSLSEYKNLDNVSFLSDSLTVEEKEFGVVSVVVEKRKFQRNEWFGVLLRIRNNAIIVLAIICLQLPFELAYAHLYEIAETEVMRYLLTAVYLVAIQYYTRIGGKVSVNLIKYENNQGEESSSASLVYKAFGLYFMQSYIGLFYHASLHRDILALRRVLIQRLIVYQVLENLIENSIPYLKYSYKKYIAVHKKKRGKESTVGRSVRLSTRVEKEYLKPSYTASIGAELEDGLFDDFLELTLQFGMIMMFACAFPLIFCFAALVCALSKN

SEQ ID NO: 194417 - protein, 505 aa, Zea Mays
MRTQGEGHVEEATGFEVGIVVPRLSRAAAAGATDNCVARLVRELEGAGLLVERVRGVSAEFIKLAAPMGTLGRAAAEMHMKKLTYIGMELQFQSDQVAAFVRQTDGSLFSWRERYSCFRYLIYGIVNKTNSEVVLKFDDKEFHWKQSESLLTRLEAEGVVKLVFPLHDEIKRKQLLRNWALNWLDFTWQPIDEIYSYFGTKWLVLPGFFIFVISWAVLFLQFWKRKNSALLARWGIHCSLSEYKNLDNVSFLSDSLTVEEKEFGVVSVVVEKRKFQRNEWFGVLLRIRNNAIIVLAIICLQLPFELAYAHLYEIAETEVMRYLLTAVYLVAIQYYTRIGGKVSVNLIKYENNQGEESSSASLVYKAFGLYFMQSYIGLFYHASLHRDILALRRVLIQRLIVYQVLENLIENSIPYLKYSYKKYIAVHKKKRGKESTVGRSVRLSTRVEKEYLKPSYTASIGAELEDGLFDDFLELTLQFGMIMMFACAFPLIFCFAALVCALSKN

SEQ ID NO: 194418 - protein, 294 aa, Zea Mays
MYARWLFFPAVFGLATQLIDFGWGIHCSLSEYKNLDNVSFLSDSLTVEEKEFGVVSVVVEKRKFQRNEWFGVLLRIRNNAIIVLAIICLQLPFELAYAHLYEIAETEVMRYLLTAVYLVAIQYYTRIGGKVSVNLIKYENNQGEESSSASLVYKAFGLYFMQSYIGLFYHASLHRDILALRRVLIQRLIVYQVLENLIENSIPYLKYSYKKYIAVHKKKRGKESTVGRSVRLSTRVEKEYLKPSYTASIGAELEDGLFDDFLELTLQFGMIMMFACAFPLIFCFAALVCALSKN

SEQ ID NO: 194419 - protein, 116 aa, Zea Mays
MEPRIGNKFRLGRKIGSGSFGEIYLGTNIQTNEEVAIKLENVKTKHPQLLYESKIYRILQGGTGIPNVRWFGVEGDYNVLVMDLLGPSLEDLFNFCSRKLSLKTVLMLADQMMSFM

SEQ ID NO: 194420 - protein, 531 aa, Zea Mays
MTCLCVLPIKVELRFGIALYTFFTLVPELAQDIASGVFMNQSQVRVMGANAAPDDPEKTIVFIDLVPLGPKFDNATAFLVFERFCNKQVIINPMDFGKYDVLYVLYQGPGSAMLGNRLESRPISASPSFSSSLVAYKGTAKTFNLVEMERATLGFDESRIIGEGGFGRVYEGILEDGERVAIKVLKRDDQQGTREFLAEVEMLSRLHHRNLVKLIGICTEGHSRCLVYELVPNGSVESHLHGSDKGAARFDWDARLKIALGAARGLAYLHEDSSPRVIHRDFKSSNILLEHDFTPKVSDFGLARTALGEGNEHISTRVMGTFGYVAPEYAMTGHLLVKSDVYSYGVVLLELLTGMKPVDMLRPPGQENLVAWAGSLLTSRDGLESIVDPSLGSSIPFDSIARVAAIASMCVQPEVDQRPFMGEVVQALKLVCDEGSEFNGSTSFSQDLRIQDVEAMSRASGDVDFVDPTLSAELFTSSARYDAMDASGSFRRYSSSGPLRVGRAGLDKERGLSTGSSSEHVGLQRFRIDSE

SEQ ID NO: 194421 - protein, 613 aa, Zea Mays
MTCLCVLPIKVELRFGIALYTFFTLVPELAQDIASGVFMNQSQVRVMGANAAPDDPEKTIVFIDLVPLGPKFDNATAFLVFERFCNKQVIINPMDFGKYDVLYVLYQGLPPSPPAASMNNGLSNVNDPSLHPLAADVVNHKERKGRGIIIIIILSSAFAFILCAGAALVVYFKLRNRSHLTEASPVPTKPAGPGSAMLGNRLESRPISASPSFSSSLVAYKGTAKTFNLVEMERATLGFDESRIIGEGGFGRVYEGILEDGERVAIKVLKRDDQQGTREFLAEVEMLSRLHHRNLVKLIGICTEGHSRCLVYELVPNGSVESHLHDKGAARFDWDARLKIALGAARGLAYLHEDSSPRVIHRDFKSSNILLEHDFTPKVSDFGLARTALGEGNEHISTRVMGTFGYVAPEYAMTGHLLVKSDVYSYGVVLLELLTGMKPVDMLRPPGQENLVAWAGSLLTSRDGLESIVDPSLGSSIPFDSIARVAAIASMCVQPEVDQRPFMGEVVQALKLVCDEGSEFNGSTSFSQDLRIQDVEAMSRASGDVDFVDPTLSAELFTSSARYDAMDASGSFRRYSSSGPLRVGRAGLDKERGLSTGSSSEHVGLQRFRIDSE

SEQ ID NO: 194422 - protein, 568 aa, Zea Mays
MTCLCVLPIKVELRFGIALYTFFTLVPELAQDIASGVFMNQSQVRVMGANAAPDDPEKTIVFIDLVPLGPKFDNATAFLVFERFCNKQVIINPMDFGKYDVLYVLYQGLPPSPPAASMNNGLSNVNDPSLHPLAADVVNHKERKGPGSAMLGNRLESRPISASPSFSSSLVAYKGTAKTFNLVEMERATLGFDESRIIGEGGFGRVYEGILEDGERVAIKVLKRDDQQGTREFLAEVEMLSRLHHRNLVKLIGICTEGHSRCLVYELVPNGSVESHLHGSDKGAARFDWDARLKIALGAARGLAYLHEDSSPRVIHRDFKSSNILLEHDFTPKVSDFGLARTALGEGNEHISTRVMGTFGYVAPEYAMTGHLLVKSDVYSYGVVLLELLTGMKPVDMLRPPGQENLVAWAGSLLTSRDGLESIVDPSLGSSIPFDSIARVAAIASMCVQPEVDQRPFMGEVVQALKLVCDEGSEFNGSTSFSQDLRIQDVEAMSRASGDVDFVDPTLSAELFTSSARYDAMDASGSFRRYSSSGPLRVGRAGLDKERGLSTGSSSEHVGLQRFRIDSE

SEQ ID NO: 194423 - protein, 672 aa, Zea Mays
MFEVLVTHASNKFPTYIKIDYILFFFLERAGELTYCFDRSNLSFHCYHYTCAGSALPPAHPPDAPAFRKPKALAPAPSQSLLPPPTNSYIASGVFMNQSQVRVMGANAAPDDPEKTIVFIDLVPLGPKFDNATAFLVFERFCNKQVIINPMDFGKYDVLYVLYQGLPPSPPAASMNNGLSNVNDPSLHPLAADVVNHKERKGRGIIIIIILSSAFAFILCAGAALVVYFKLRNRSHLTEASPVPTKPAGPGSAMLGNRLESRPISASPSFSSSLVAYKGTAKTFNLVEMERATLGFDESRIIGEGGFGRVYEGILEDGERVAIKVLKRDDQQGTREFLAEVEMLSRLHHRNLVKLIGICTEGHSRCLVYELVPNGSVESHLHGSDKGAARFDWDARLKIALGAARGLAYLHEDSSPRVIHRDFKSSNILLEHDFTPKVSDFGLARTALGEGNEHISTRVMGTFGYVAPEYAMTGHLLVKSDVYSYGVVLLELLTGMKPVDMLRPPGQENLVAWAGSLLTSRDGLESIVDPSLGSSIPFDSIARVAAIASMCVQPEVDQRPFMGEVVQALKLVCDEGSEFNGSTSFSQDLRIQDVEAMSRASGDVDFVDPTLSAELFTSSARYDAMDASGSFRRYSSSGPLRVGRAGLDKERGLSTGSSSEHVGLQRFRIDSE

SEQ ID NO: 194424 - protein, 319 aa, Zea Mays
MGRCGGGSGAGAGGGALGGCALLTAALVISTLVIQGAGGSKQSHAPAVARKVLLSITNWHPHNYLDDVLHPSQVQDQRLERLGQDAPSFHTGNELPNPHLRQVPAALPSLPVQPYAPHPKISADNPTAAPSFQKIPWLSLTSPPLPAIGRRMQSPAASPETAVHPAKHGKDHGTPVSAPSNVSHHHAMPANNTHGKTHGTPVLAPEKRRHHHLPANNSYVKGPAVSPSKSPIIHRKGHGVPVAAPPKEHWSYLPPANRRHHKGSRPAPRKSNNTSAPSHVYPGSPAPAPERLLIKGKGKEISAHAPRHPNHYHSHHNSP

SEQ ID NO: 194425 - protein, 56 aa, Zea Mays
MNCTNNNQLLIEKYRCVMCGLNVVGLHLILSIWRSEDSAILLELFETEVWRACMVF

SEQ ID NO: 194426 - protein, 133 aa, Zea Mays
MCVRSSPSDSFPPQPSLPPHLFRLRPPSPPGDAPLFHPSPVVAPVVFLLPCRASLRDARGPHPSRSEGAHGQIPAAGAAMDAEQAITVSIAGSCSLLSKPQRANRAFFSLPSRQPGNVVFSHGSRFFRLFMIC

SEQ ID NO: 194427 - protein, 201 aa, Zea Mays
MALGGLASRYSPTGTAPRPRSSQQEPMATLAPRPHILLGLTRPQPIALRACAAFSRSRHAPVPPRAAQPRRVFLGLGAAFIDQATRMASGGTSSRSFVAGARPRQGVSPVEQILKNVEWPDEFPFKPEDFSRFDESSDTLFYSVPRFVTHIDDQAIQALTEYYSEVLPPSNTPGVAILDMCSSWPLSSRLQTREDRGDGYE

SEQ ID NO: 194428 - protein, 154 aa, Zea Mays
MCSSWVSHYPPGYRQEKIVGMGMNEDELKKNSVLTQYVVQDLNVNPKLPFEDNTFDVITNVVSVDYLTKPIDVFKEMRRILKPSGLAIMSFSNRCFWTKAISIWTSTGDADHAWIVGAYFHYVGGFEPPQALDISPNPGRTDPMYVVCSRKKIG

SEQ ID NO: 194429 - protein, 216 aa, Zea Mays
MEKDCRFSRMSSGQMSSLSSLRTSAASTNHQILCSTRFHVLSLTLMTKQSKLSQSTILKFFLQVILLGWPFWTCAAAGSAIILPVTDKRRSWGWVLTQYVVQDLNVNPKLPFEDNTFDVITNVVSVDYLTKPIDVFKEMRRILKPSGLAIMSFSNRCFWTKAISIWTSTGDADHAWIVGAYFHYVGGFEPPQALDISPNPGRTDPMYVVCSRKKIG

SEQ ID NO: 194430 - protein, 127 aa, Zea Mays
MVYLDSRSLTDDGCRQCSTISGSFLVPSLQSSTPHGSETETDATRCNVREYQRRTQSQSLSSEICLRPCGAHGATTDRGLGRRSGMSTWRSVASRRVTHPPAPRHGRVRLNRSRWPLSRHGHISSSA

SEQ ID NO: 194431 - protein, 274 aa, Zea Mays
MALGGLASRYSPTGTAPRPRSSQQEPMATLAPRPHILLGLTRPQPIALRACAAFSRSRHAPVPPRAAQPRRVFLGLGAAFIDQATRMASGGTSSRSFVAGARPRQGVSPVEQNVEWPDEFPFKPEDFSRFDESSDTLFYSVPRFVTHIDDQAIQALTEYYSEVLPPSNTPGVAILDMCSSWVSHYPPGYRQEKIVGMGMNEDELKKNSVLTQYVVQDLNVNPKLPFEDNTFDVITNVVSVDYLTKPIDVFKEMRRILKPSGLAIMSYIYMDLNW

SEQ ID NO: 194432 - protein, 105 aa, Zea Mays
MLYLYVQPISLSYLLTHIIRLLTCPHDCKADNHSTALYYCSCQNTLIFVSPISSKRNGTAKSIISANLHMAPTSSDPSNNAAENSNLLYERDLTLSNLFISNMEK

SEQ ID NO: 194433 - protein, 62 aa, Zea Mays
MLMHRMSFVYVPAHTFTGCRTGNTRACLLVSRHSVASDVTLSSVLQSYPFTHKQHAYPIIYY

SEQ ID NO: 194434 - protein, 108 aa, Zea Mays
MRTLREIRTDVCPALSIQQLERIVSMYWDDVNGTNTISAEFTSSLKSAIRDESNMATNFSILLDDDSSIPFSLDDITKTLPVIELADDDFLPFVHENPSFAFLLQRGE

SEQ ID NO: 194435 - protein, 294 aa, Zea Mays
MESDSADRGEASRHRSKRERPPDPEGDACPDVGRRRVAAGPGVDAGANVPDLGDQKEFEHGEKLQRIPKQKYQVQNDMRTLAYWLSNLSTLTVFLQRSFKTTRTTISTPQRRRFSSERMFGNQTSNAGLAYLSGQSVGSAGLLQVEAKYPALLFKQQLVDLIEKVYGMISDSVKKELNPLLELCIQDPQTSQSSIAKGNLNGMGQQNQLTHWLGIVKILTSYLDVLRENHVPSILVHKLFTQMFSLIDVQLFNRLLLRRECCSFSNGEYIRAGLAELKHWSDNATREVDYISVL

SEQ ID NO: 194436 - protein, 650 aa, Zea Mays
MKVEDANEKIGHLQTKINMLEDNVAAKDVSLEAAIKENDATRKSLTEAQERNGELLKKISDSDYRIHLLQDTVQKLQVDAISRLSSFVMEKQESDIAKRAVTEAHERNEDLLKRNEDLLKRNDDLIKKIEDSSKIVTQLQEALQRLEGKASNLEVENQVLRQHATSTPPSTAKSPASRSKISRIHRSPENGHILNGDIRQTEMKPSTGTSAAITSVANVPDLGDQKEFEHGEKLQRIPKQKYQQPQDDQQWLVTCISQYLGFSGSKPVAALLIYQCLLHWKSFEAMKTGVFDSILHAINSATEVQNDMRTLAYWLSNLSTLTVFLQRSFKTTRTTISTPQRRRFSSERMFGNQTSNAGLAYLSGQSVGSAGLLQVEAKYPALLFKQQLVDLIEKVYGMISDSVKKELNPLLELCIQDPQTSQSSIAKGNLNGMGQQNQLTHWLGIVKILTSYLDVLRENHVPSILVHKLFTQMFSLIDVQLFNRLLLRRECCSFSNGEYIRAGLAELKHWSDNATREFAGSAWEALRHIRQAVDFLVISLKPMRTLREIRTDVCPALSIQQLERIVSMYWDDVNGTNTISAEFTSSLKSAIRDESNMATNFSILLDDDSSIPFSLDDITKTLPVIELADDDFLPFVHENPSFAFLLQRGE

SEQ ID NO: 194437 - protein, 528 aa, Zea Mays
MKVEDANEKIGHLQTKINMLEDNVAAKDVSLEAAIKENDATRKSLTEAQERNGELLKKISDSDYRIHLLQDTVQKLQVDAISRLSSFVMEKQESDIAKRAVTEAHERNEDLLKRNEDLLKRNDDLIKKIEDSSKIVTQLQEALQRLEGKASNLEVENQVLRQHATSTPPSTAKSPASRSKISRIHRSPENGHILNGDIRQTEMKPSTGTSAAITSVANVPDLGDQKEFEHGEKLQRIPKQKYQPSHNQQPQDDQQWLVTCISQYLGFSGSKPVAALLIYQCLLHWKSFEAMKTGVFDSILHAINSATEVQNDMRTLAYWLSNLSTLTVFLQRSFKTTRTTISTPQRRRFSSERMFGNQTSNAGLAYLSGQSVGSAGLLQVEAKYPALLFKQQLVDLIEKVYGMISDSVKKELNPLLELCIQDPQTSQSSIAKGNLNGMGQQNQLTHWLGIVKILTSYLDVLRENHVPSILVHKLFTQMFSLIDVQLFNRLLLRRECCSFSNGEYIRAGLAELKHWSDNATREVQRGRH

SEQ ID NO: 194438 - protein, 830 aa, Zea Mays
MDSRFRECWFLLLRQFGLQVLAPQSSNINFMEWWHEANEAIQGPFRDGLNSLIVLGAWALWNHRKTHASLMVLLRKLSQFLDPIGGKFLHFRHYSDNSKSPFLYRCRLEGTVSEYEALLLTERQQNEAANAAVAESQARSEALVSKLEDAVKQNDLLHEAAQRFEEATKNLESSLTFEKQRHQANLIELDEAREKIEELQREVGDTDEKSTLLQTSIQSLEERLGEKDALLTTERLESEATKKSLNESEDRNKDLLMKIEVAEKDIAHFQETVQRNEENMAALETSLRSERQQKDAIMKQLAESQGEIGELQRKLEDADARNGLLQDSLQRLEQDVSAKEVLLLTEKQAHEATRKTLTEVQEKSEELLKKIHDNDKHILQLQFTIQRLEETTVANENLLLREREQNDTTTKAHNESQEKYEELLKKFIDVDRKIDLLQGTIERLGENTTAKDSLLLSERHEKAAIKKALTEAEEKNEELLMKVEDANEKIGHLQTKINMLEDNVAAKDVSLEAAIKENDATRKSLTEAQERNGELLKKISDSDYRIHLLQDTVQKLQVDAISRLSSFVMEKQESDIAKRAVTEAHERNEDLLKRNEDLLKRNDDLIKKIEDSSKIVTQLQEALQRLEGKASNLEVENQVLRQHATSTPPSTAKSPASRSKISRIHRSPENGHILNGDIRQTEMKPSTGTSAAITSVANVPDLGDQKEFEHGEKLQRIPKQKYQPSHNQQPQDDQQWLVTCISQYLGFSGSKPVAALLIYQCLLHWKSFEAMKTGVFDSILHAINSATEDHNLNSTKEKIFVREDVWKSNFKCWACLSQWSISWICWIAPS

SEQ ID NO: 194439 - protein, 1182 aa, Zea Mays
MDSRFRECWFLLLRQFGLQVLAPQSSNINFMEWWHEANEAIQGPFRDGLNSLIVLGAWALWNHRKTHASLMVLLRKLSQFLDPIGGKFLHFRHYSDNSKSPFLYRCRLEGTVSEYEALLLTERQQNEAANAAVAESQARSEALVSKLEDAVKQNDLLHEAAQRFEEATKNLESSLTFEKQRHQANLIELDEAREKIEELQREVGDTDEKSTLLQTSIQSLEERLGEKDALLTTERLESEATKKSLNESEDRNKDLLMKIEVAEKDIAHFQETVQRNEENMAALETSLRSERQQKDAIMKQLAESQGEIGELQRKLEDADARNGLLQDSLQRLEESTADKDSLLATERHENSETKKELAGSQKKIAELLTEVQDTGAYIAELEGSVRRLEGNLTVTEASLLTEKEQNASTLKLLTEAQLRIEELIKKLEGSNRKSDSLLDTITRLEQDVSAKEVLLLTEKQAHEATRKTLTEVQEKSEELLKKIHDNDKHILQLQFTIQRLEETTVANENLLLREREQNDTTTKAHNESQEKYEELLKKFIDVDRKIDLLQGTIERLGENTTAKDSLLLSERHEKAAIKKALTEAEEKNEELLMKVEDANEKIGHLQTKINMLEDNVAAKDVSLEAAIKENDATRKSLTEAQERNGELLKKISDSDYRIHLLQDTVQKLQVDAISRLSSFVMEKQESDIAKRAVTEAHERNEDLLKRNEDLLKRNDDLIKKIEDSSKIVTQLQEALQRLEGKASNLEVENQVLRQHATSTPPSTAKSPASRSKISRIHRSPENGHILNGDIRQTEMKPSTGTSAAITSVANVPDLGDQKEFEHGEKLQRIPKQKYQVQNDMRTLAYWLSNLSTLTVFLQRSFKTTRTTISTPQRRRFSSERMFGNQTSNAGLAYLSGQSVGSAGLLQVEAKYPALLFKQQLVDLIEKVYGMISDSVKKELNPLLELCIQDPQTSQSSIAKGNLNGMGQQNQLTHWLGIVKILTSYLDVLRENHVPSILVHKLFTQMFSLIDVQLFNRLLLRRECCSFSNGEYIRAGLAELKHWSDNATREFAGSAWEALRHIRQAVDFLVISLKPMRTLREIRTDVCPALSIQQLERIVSMYWDDVNGTNTISAEFTSSLKSAIRDESNMATNFSILLDDDSSIPFSLDDITKTLPVIELADDDFLPFVHENPSFAFLLQRGE

SEQ ID NO: 194440 - protein, 1120 aa, Zea Mays
MDSRFRECWFLLLRQFGLQVLAPQSSNINFMEWWHEANEAIQGPFRDGLNSLIVLGAWALWNHRKTHASLMVLLRKLSQFLDPIGGKFLHFRHYSDNSKSPFLYRCRLEGTVSEYEALLLTERQQNEAANAAVAESQARSEALVSKLEDAVKQNDLLHEAAQRFEEATKNLESSLTFEKQRHQANLIELDEAREKIEELQREVGDTDEKSTLLQTSIQSLEERLGEKDALLTTERLESEATKKSLNESEDRNKDLLMKIEVAEKDIAHFQETVQRNEENMAALETSLRSERQQKDAIMKQLAESQGEIGELQRKLEDADARNGLLQDSLQRLEESTADKDSLLATERHENSETKKELAGSQKKIAELLTEVQDTGAYIAELEGSVRRLEGNLTVTEASLLTEKEQNASTLKLLTEAQLRIEELIKKLEGSNRKSDSLLDTITRLEQDVSAKEVLLLTEKQAHEATRKTLTEVQEKSEELLKKIHDNDKHILQLQFTIQRLEETTVANENLLLREREQNDTTTKAHNESQEKYEELLKKFIDVDRKIDLLQGTIERLGENTTAKDSLLLSERHEKAAIKKALTEAEEKNEELLMKVEDANEKIGHLQTKINMLEDNVAAKDVSLEAAIKENDATRKSLTEAQERNGELLKKISDSDYRIHLLQDTVQKLQVDAISRLSSFVMEKQESDIAKRAVTEAHERNEDLLKRNEDLLKRNDDLIKKIEDSSKIVTQLQEALQRLEGKASNLEVENQVLRQHATSTPPSTAKSPASRSKISRIHRSPENGHILNGDIRQTEMKPSTGTSAAITSVANVPDLGDQKEFEHGEKLQRIPKQKYQPSHNQQPQDDQQWLVTCISQYLGFSGSKPVAALLIYQCLLHWKSFEAMKTGVFDSILHAINSATEVQNDMRTLAYWLSNLSTLTVFLQRSFKTTRTTISTPQRRRFSSERMFGNQTSNAGLAYLSGQSVGSAGLLQVEAKYPALLFKQQLVDLIEKVYGMISDSVKKELNPLLELCIQDPQTSQSSIAKGNLNGMGQQNQLTHWLGIVKILTSYLDVLRENHVPSILVHKLFTQMFSLIDVQLFNRLLLRRECCSFSNGEYIRAGLAELKHWSDNATREVQRGRH

SEQ ID NO: 194441 - protein, 1241 aa, Zea Mays
MDSRFRECWFLLLRQFGLQVLAPQSSNINFMEWWHEANEAIQGPFRDGLNSLIVLGAWALWNHRKTHASLMVLLRKLSQFLDPIGGKFLHFRHYSDNSKSPFLYRCRLEGTVSEYEALLLTERQQNEAANAAVAESQARSEALVSKLEDAVKQNDLLHEAAQRFEEATKNLESSLTFEKQRHQANLIELDEAREKIEELQREVGDTDEKSTLLQTSIQSLEERLGEKDALLTTERLESEATKKSLNESEDRNKDLLMKIEVAEKDIAHFQETVQRNEENMAALETSLRSERQQKDAIMKQLAESQGEIGELQRKLEDADARNGLLQDSLQRLEESTADKDSLLATERHENSETKKELAGSQKKIAELLTEVQDTGAYIAELEGSVRRLEGNLTVTEASLLTEKEQNASTLKLLTEAQLRIEELIKKLEGSNRKSDSLLDTITRLEQDVSAKEVLLLTEKQAHEATRKTLTEVQEKSEELLKKIHDNDKHILQLQFTIQRLEETTVANENLLLREREQNDTTTKAHNESQEKYEELLKKFIDVDRKIDLLQGTIERLGENTTAKDSLLLSERHEKAAIKKALTEAEEKNEELLMKVEDANEKIGHLQTKINMLEDNVAAKDVSLEAAIKENDATRKSLTEAQERNGELLKKISDSDYRIHLLQDTVQKLQVDAISRLSSFVMEKQESDIAKRAVTEAHERNEDLLKRNEDLLKRNDDLIKKIEDSSKIVTQLQEALQRLEGKASNLEVENQVLRQHATSTPPSTAKSPASRSKISRIHRSPENGHILNGDIRQTEMKPSTGTSAAITSVANVPDLGDQKEFEHGEKLQRIPKQKYQPQDDQQWLVTCISQYLGFSGSKPVAALLIYQCLLHWKSFEAMKTGVFDSILHAINSATEVQNDMRTLAYWLSNLSTLTVFLQRSFKTTRTTISTPQRRRFSSERMFGNQTSNAGLAYLSGQSVGSAGLLQVEAKYPALLFKQQLVDLIEKVYGMISDSVKKELNPLLELCIQDPQTSQSSIAKGNLNGMGQQNQLTHWLGIVKILTSYLDVLRENHVPSILVHKLFTQMFSLIDVQLFNRLLLRRECCSFSNGEYIRAGLAELKHWSDNATREFAGSAWEALRHIRQAVDFLVISLKPMRTLREIRTDVCPALSIQQLERIVSMYWDDVNGTNTISAEFTSSLKSAIRDESNMATNFSILLDDDSSIPFSLDDITKTLPVIELADDDFLPFVHENPSFAFLLQRGE

SEQ ID NO: 194442 - protein, 1070 aa, Zea Mays
MDSRFRECWFLLLRQFGLQVLAPQSSNINFMEWWHEANEAIQGPFRDGLNSLIVLGAWALWNHRKTHASLMVLLRKLSQFLDPIGGKFLHFRHYSDNSKSPFLYRCRLEGTVSEYEALLLTERQQNEAANAAVAESQARSEALVSKLEDAVKQNDLLHEAAQRFEEATKNLESSLTFEKQRHQANLIELDEAREKIEELQREVGDTDEKSTLLQTSIQSLEERLGEKDALLTTERLESEATKKSLNESEDRNKDLLMKIEVAEKDIAHFQETVQRNEENMAALETSLRSERQQKDAIMKQLAESQGEIGELQRKLEDADARNGLLQDSLQRLEQDVSAKEVLLLTEKQAHEATRKTLTEVQEKSEELLKKIHDNDKHILQLQFTIQRLEETTVANENLLLREREQNDTTTKAHNESQEKYEELLKKFIDVDRKIDLLQGTIERLGENTTAKDSLLLSERHEKAAIKKALTEAEEKNEELLMKVEDANEKIGHLQTKINMLEDNVAAKDVSLEAAIKENDATRKSLTEAQERNGELLKKISDSDYRIHLLQDTVQKLQVDAISRLSSFVMEKQESDIAKRAVTEAHERNEDLLKRNEDLLKRNDDLIKKIEDSSKIVTQLQEALQRLEGKASNLEVENQVLRQHATSTPPSTAKSPASRSKISRIHRSPENGHILNGDIRQTEMKPSTGTSAAITSVANVPDLGDQKEFEHGEKLQRIPKQKYQVQNDMRTLAYWLSNLSTLTVFLQRSFKTTRTTISTPQRRRFSSERMFGNQTSNAGLAYLSGQSVGSAGLLQVEAKYPALLFKQQLVDLIEKVYGMISDSVKKELNPLLELCIQDPQTSQSSIAKGNLNGMGQQNQLTHWLGIVKILTSYLDVLRENHVPSILVHKLFTQMFSLIDVQLFNRLLLRRECCSFSNGEYIRAGLAELKHWSDNATREFAGSAWEALRHIRQAVDFLVISLKPMRTLREIRTDVCPALSIQQLERIVSMYWDDVNGTNTISAEFTSSLKSAIRDESNMATNFSILLDDDSSIPFSLDDITKTLPVIELADDDFLPFVHENPSFAFLLQRGE

SEQ ID NO: 194443 - protein, 1242 aa, Zea Mays
MDSRFRECWFLLLRQFGLQVLAPQSSNINFMEWWHEANEAIQGPFRDGLNSLIVLGAWALWNHRKTHASLMVLLRKLSQFLDPIGGKFLHFRHYSDNSKSPFLYRCRLEGTVSEYEALLLTERQQNEAANAAVAESQARSEALVSKLEDAVKQNDLLHEAAQRFEEATKNLESSLTFEKQRHQANLIELDEAREKIEELQREVGDTDEKSTLLQTSIQSLEERLGEKDALLTTERLESEATKKSLNESEDRNKDLLMKIEVAEKDIAHFQETVQRNEENMAALETSLRSERQQKDAIMKQLAESQGEIGELQRKLEDADARNGLLQDSLQRLEESTADKDSLLATERHENSETKKELAGSQKKIAELLTEVQDTGAYIAELEGSVRRLEGNLTVTEASLLTEKEQNASTLKLLTEAQLRIEELIKKLEGSNRKSDSLLDTITRLEQDVSAKEVLLLTEKQAHEATRKTLTEVQEKSEELLKKIHDNDKHILQLQFTIQRLEETTVANENLLLREREQNDTTTKAHNESQEKYEELLKKFIDVDRKIDLLQGTIERLGENTTAKDSLLLSERHEKAAIKKALTEAEEKNEELLMKVEDANEKIGHLQTKINMLEDNVAAKDVSLEAAIKENDATRKSLTEAQERNGELLKKISDSDYRIHLLQDTVQKLQVDAISRLSSFVMEKQESDIAKRAVTEAHERNEDLLKRNEDLLKRNDDLIKKIEDSSKIVTQLQEALQRLEGKASNLEVENQVLRQHATSTPPSTAKSPASRSKISRIHRSPENGHILNGDIRQTEMKPSTGTSAAITSVANVPDLGDQKEFEHGEKLQRIPKQKYQQPQDDQQWLVTCISQYLGFSGSKPVAALLIYQCLLHWKSFEAMKTGVFDSILHAINSATEVQNDMRTLAYWLSNLSTLTVFLQRSFKTTRTTISTPQRRRFSSERMFGNQTSNAGLAYLSGQSVGSAGLLQVEAKYPALLFKQQLVDLIEKVYGMISDSVKKELNPLLELCIQDPQTSQSSIAKGNLNGMGQQNQLTHWLGIVKILTSYLDVLRENHVPSILVHKLFTQMFSLIDVQLFNRLLLRRECCSFSNGEYIRAGLAELKHWSDNATREFAGSAWEALRHIRQAVDFLVISLKPMRTLREIRTDVCPALSIQQLERIVSMYWDDVNGTNTISAEFTSSLKSAIRDESNMATNFSILLDDDSSIPFSLDDITKTLPVIELADDDFLPFVHENPSFAFLLQRGE

SEQ ID NO: 194444 - protein, 1135 aa, Zea Mays
MDSRFRECWFLLLRQFGLQVLAPQSSNINFMEWWHEANEAIQGPFRDGLNSLIVLGAWALWNHRKTHASLMVLLRKLSQFLDPIGGKFLHFRHYSDNSKSPFLYRCRLEGTVSEYEALLLTERQQNEAANAAVAESQARSEALVSKLEDAVKQNDLLHEAAQRFEEATKNLESSLTFEKQRHQANLIELDEAREKIEELQREVGDTDEKSTLLQTSIQSLEERLGEKDALLTTERLESEATKKSLNESEDRNKDLLMKIEVAEKDIAHFQETVQRNEENMAALETSLRSERQQKDAIMKQLAESQGEIGELQRKLEDADARNGLLQDSLQRLEQDVSAKEVLLLTEKQAHEATRKTLTEVQEKSEELLKKIHDNDKHILQLQFTIQRLEETTVANENLLLREREQNDTTTKAHNESQEKYEELLKKFIDVDRKIDLLQGTIERLGENTTAKDSLLLSERHEKAAIKKALTEAEEKNEELLMKVEDANEKIGHLQTKINMLEDNVAAKDVSLEAAIKENDATRKSLTEAQERNGELLKKISDSDYRIHLLQDTVQKLQVDAISRLSSFVMEKQESDIAKRAVTEAHERNEDLLKRNEDLLKRNDDLIKKIEDSSKIVTQLQEALQRLEGKASNLEVENQVLRQHATSTPPSTAKSPASRSKISRIHRSPENGHILNGDIRQTEMKPSTGTSAAITSVANVPDLGDQKEFEHGEKLQRIPKQKYQPSHNQQPQDDQQWLVTCISQYLGFSGSKPVAALLIYQCLLHWKSFEAMKTGVFDSILHAINSATEVQNDMRTLAYWLSNLSTLTVFLQRSFKTTRTTISTPQRRRFSSERMFGNQTSNAGLAYLSGQSVGSAGLLQVEAKYPALLFKQQLVDLIEKVYGMISDSVKKELNPLLELCIQDPQTSQSSIAKGNLNGMGQQNQLTHWLGIVKILTSYLDVLRENHVPSILVHKLFTQMFSLIDVQLFNRLLLRRECCSFSNGEYIRAGLAELKHWSDNATREFAGSAWEALRHIRQAVDFLVISLKPMRTLREIRTDVCPALSIQQLERIVSMYWDDVNGTNTISAEFTSSLKSAIRDESNMATNFSILLDDDSSIPFSLDDITKTLPVIELADDDFLPFVHENPSFAFLLQRGE

SEQ ID NO: 194445 - protein, 462 aa, Zea Mays
MDSRFRECWFLLLRQFGLQVLAPQSSNINFMEWWHEANEAIQGPFRDGLNSLIVLGAWALWNHRKTHASLMVLLRKLSQFLDPIGGKFLHFRHYSDNSKSPFLYRCRLEGTVSEYEALLLTERQQNEAANAAVAESQARSEALVSKLEDAVKQNDLLHEAAQRFEEATKNLESSLTFEKQRHQANLIELDEAREKIEELQREVGDTDEKSTLLQTSIQSLEERLGEKDALLTTERLESEATKKSLNESEDRNKDLLMKIEVAEKDIAHFQETVQRNEENMAALETSLRSERQQKDAIMKQLAESQGEIGELQRKLEDADARNGLLQDSLQRLEESTADKDSLLATERHENSETKKELAGSQKKIAELLTEVQDTGAYIAELEGSVRRLEGNLTVTEASLLTEKEQNASTLKLLTEAQLRIEELIKKLEGSNRKSDSLLDTITRHTRQQGRLSLKFRKKVKNF

SEQ ID NO: 194446 - protein, 718 aa, Zea Mays
MDSRFRECWFLLLRQFGLQVLAPQSSNINFMEWWHEANEAIQGPFRDGLNSLIVLGAWALWNHRKTHASLMVLLRKLSQFLDPIGGKFLHFRHYSDNSKSPFLYRCRLEGTVSEYEALLLTERQQNEAANAAVAESQARSEALVSKLEDAVKQNDLLHEAAQRFEEATKNLESSLTFEKQRHQANLIELDEAREKIEELQREVGDTDEKSTLLQTSIQSLEERLGEKDALLTTERLESEATKKSLNESEDRNKDLLMKIEVAEKDIAHFQETVQRNEENMAALETSLRSERQQKDAIMKQLAESQGEIGELQRKLEDADARNGLLQDSLQRLEQDVSAKEVLLLTEKQAHEATRKTLTEVQEKSEELLKKIHDNDKHILQLQFTIQRLEETTVANENLLLREREQNDTTTKAHNESQEKYEELLKKFIDVDRKIDLLQGTIERLGENTTAKDSLLLSERHEKAAIKKALTEAEEKNEELLMKVEDANEKIGHLQTKINMLEDNVAAKDVSLEAAIKENDATRKSLTEAQERNGELLKKISDSDYRIHLLQDTVQKLQVDAISRLSSFVMEKQESDIAKRAVTEAHERNEDLLKRNEDLLKRNDDLIKKIEDSSKIVTQLQEALQRLEGKASNLEVENQVLRQHATSTPPSTAKSPASRSKISRIHRSPENGHILNGDIRQTEMKPSTGTSAAITSVPVQTSCPLKRVSLKLRRLARSL

SEQ ID NO: 194447 - protein, 774 aa, Zea Mays
MDSRFRECWFLLLRQFGLQVLAPQSSNINFMEWWHEANEAIQGPFRDGLNSLIVLGAWALWNHRKTHASLMVLLRKLSQFLDPIGGKFLHFRHYSDNSKSPFLYRCRLEGTVSEYEALLLTERQQNEAANAAVAESQARSEALVSKLEDAVKQNDLLHEAAQRFEEATKNLESSLTFEKQRHQANLIELDEAREKIEELQREVGDTDEKSTLLQTSIQSLEERLGEKDALLTTERLESEATKKSLNESEDRNKDLLMKIEVAEKDIAHFQETVQRNEENMAALETSLRSERQQKDAIMKQLAESQGEIGELQRKLEDADARNGLLQDSLQRLEESTADKDSLLATERHENSETKKELAGSQKKIAELLTEVQDTGAYIAELEGSVRRLEQDVSAKEVLLLTEKQAHEATRKTLTEVQEKSEELLKKIHDNDKHILQLQFTIQRLEETTVANENLLLREREQNDTTTKAHNESQEKYEELLKKFIDVDRKIDLLQGTIERLGENTTAKDSLLLSERHEKAAIKKALTEAEEKNEELLMKVEDANEKIGHLQTKINMLEDNVAAKDVSLEAAIKENDATRKSLTEAQERNGELLKKISDSDYRIHLLQDTVQKLQVDAISRLSSFVMEKQESDIAKRAVTEAHERNEDLLKRNEDLLKRNDDLIKKIEDSSKIVTQLQEALQRLEGKASNLEVENQVLRQHATSTPPSTAKSPASRSKISRIHRSPENGHILNGDIRQTEMKPSTGTSAAITSVPVQTSCPLKRVSLKLRRLARSL

SEQ ID NO: 194448 - protein, 830 aa, Zea Mays
MDSRFRECWFLLLRQFGLQVLAPQSSNINFMEWWHEANEAIQGPFRDGLNSLIVLGAWALWNHRKTHASLMVLLRKLSQFLDPIGGKFLHFRHYSDNSKSPFLYRCRLEGTVSEYEALLLTERQQNEAANAAVAESQARSEALVSKLEDAVKQNDLLHEAAQRFEEATKNLESSLTFEKQRHQANLIELDEAREKIEELQREVGDTDEKSTLLQTSIQSLEERLGEKDALLTTERLESEATKKSLNESEDRNKDLLMKIEVAEKDIAHFQETVQRNEENMAALETSLRSERQQKDAIMKQLAESQGEIGELQRKLEDADARNGLLQDSLQRLEESTADKDSLLATERHENSETKKELAGSQKKIAELLTEVQDTGAYIAELEGSVRRLEGNLTVTEASLLTEKEQNASTLKLLTEAQLRIEELIKKLEGSNRKSDSLLDTITRLEQDVSAKEVLLLTEKQAHEATRKTLTEVQEKSEELLKKIHDNDKHILQLQFTIQRLEETTVANENLLLREREQNDTTTKAHNESQEKYEELLKKFIDVDRKIDLLQGTIERLGENTTAKDSLLLSERHEKAAIKKALTEAEEKNEELLMKVEDANEKIGHLQTKINMLEDNVAAKDVSLEAAIKENDATRKSLTEAQERNGELLKKISDSDYRIHLLQDTVQKLQVDAISRLSSFVMEKQESDIAKRAVTEAHERNEDLLKRNEDLLKRNDDLIKKIEDSSKIVTQLQEALQRLEGKASNLEVENQVLRQHATSTPPSTAKSPASRSKISRIHRSPENGHILNGDIRQTEMKPSTGTSAAITSVPVQTSCPLKRVSLKLRRLARSL

SEQ ID NO: 194449 - protein, 266 aa, Zea Mays
MEQEEYTREQINWSYIEFVDNQDVLDLIEKKPGGIIALLDEACMFPKSTHETLSQKLYEKFKTHKRFTKPKLSRTAFTIQHYAGDVTYQSDQFLDKNKDYVVAEHQELLNGSKCSFVSGLFPPATEENTKSSKSSIATRFKMQLHELMETLSSTEPHYIRCIKPNSVLKPGIFENTNVLQQLRCSGVLEAIRISCAGYPTRKQFHDFLHRFCVLAPEILKEKNDEKVSCQKILDKMGLQGYQVKNTSLTNLLNMYWKRVFRFPNWW

SEQ ID NO: 194450 - protein, 536 aa, Zea Mays
MASMLNIVIGSHVWVEDKDLSWVDGEVFRIDGQNAHVHTTKGKTVIANISNIHPKDTEAPPDGVDDMTRLSYLHEPGVLDNLAVRYAKNIIYTYTGNILIAINPFQRLPSLVDALTMEKYKGANLGDLDPHVFAIADAAYRQMINEGKSNSVLVSGESGAGKTETTKLLMRYLAFLGGRSGTGERTVEQQVLESNPVLEAFGNAKTVRNNNSRLVNRINASIGQDPDSNKLIGVLDIYGFESFKTNSFEQLCINFTNEKLQQHFNQNVFKMEQEEYTREQINWSYIEFVDNQDVLDLIEKKPGGIIALLDEACMFPKSTHETLSQKLYEKFKTHKRFTKPKLSRTAFTIQHYAGDVTYQSDQFLDKNKDYVVAEHQELLNGSKCSFVSGLFPPATEENTKSSKSSIATRFKMQLHELMETLSSTEPHYIRCIKPNSVLKPGIFENTNVLQQLRCSGVLEAIRISCAGYPTRKQFHDFLHRFCVLAPEILKEKNDEKVSCQKILDKMGLQGYQVKNTSLTNLLNMYWKRVFRFPNWW

SEQ ID NO: 194451 - protein, 268 aa, Zea Mays
MINEGKSNSVLVSGESGAGKTETTKLLMRYLAFLGGRSGTGERTVEQQVLESNPVLEAFGNAKTVRNNNSSRFGKFVEIQFDKSGKISGAAIRTYLLERSRVCQINSPERNYHCFYFLCAAPSEDLKKYKLGDPSSFHYLNQSACIQVDGINDAEEYLATRNAMDTVGITDQEQEAIFRVVAAVLHLGNINFAKGREVDSSIIKDDKSRFHLKTAGELLMCDCEKLENALIKREINTPEGVITTTVGPNSATISRDGLAKQIYSRLFE

SEQ ID NO: 194452 - protein, 324 aa, Zea Mays
MLYRSTYPITEKGKQRSWVGPSGQYYRELPCPSCRGRGYTPCKECGIDRSSLDCPMCNGKGIQTCLQCSGECVIWQESVDEQPWEKVRSSSPLKVKEDDEVDKLEININNPKRSKRTYASTSPEVAKKISRSLRSLNAQTGLFTKHMKIIHQDPELRAQRVAAIKRTKGTDVARKRASEIQKAFFSDPENRLKRSIAMKGVKFYCSKCGQEGHRSFYCPTLREGSTRVRFRCRLCGREGHNSRTCGKPKSEKEHKQRPHHCSRCGEKGHNRRNCPTSTDLGSDASGYVVNKVNGSNSAVYQCSICLEKGHNRRTCPKRKATLLK

SEQ ID NO: 194453 - protein, 406 aa, Zea Mays
MLLRITYAQPTPSAAAQLRLPGPRLRRRRVAASAADGAGNSSSPLHCDPSPHAYLLGPGVEPSGSLSLSTYPITEKGKQRSWVGPSGQYYRELPCPSCRGRGYTPCKECGIDRSSLDCPMCNGKGIQTCLQCSGECVIWQESVDEQPWEKVRSRDELRLRYGFELLNPSALNSPLKVKEDDEVDKLEININNPKRSKRTYASTSPEVAKKISRSLRSLNAQTGLFTKHMKIIHQDPELRAQRVAAIKRTKGTDVARKRASEIQKAFFSDPENRLKRSIAMKGVKFYCSKCGQEGHRSFYCPTLREGSTRVRFRCRLCGREGHNSRTCGKPKSEKEHKQRPHHCSRCGEKGHNRRNCPTSTDLGSDASGYVVNKVNGSNSAVYQCSICLEKGHNRRTCPKRKATLLK

SEQ ID NO: 194454 - protein, 237 aa, Zea Mays
MICSPLKVKEDDEVDKLEININNPKRSKRTYASTSPEVAKKISRSLRSLNAQTGLFTKHMKIIHQDPELRAQRVAAIKRTKGTDVARKRASEIQKAFFSDPENRLKRSIAMKGVKFYCSKCGQEGHRSFYCPTLREGSTRVRFRCRLCGREGHNSRTCGKPKSEKEHKQRPHHCSRCGEKGHNRRNCPTSTDLGSDASGYVVNKVNGSNSAVYQCSICLEKGHNRRTCPKRKATLLK

SEQ ID NO: 194455 - protein, 368 aa, Zea Mays
MGAGLHGHRVHEAPEENHGCNEEVWLGLMRSTYPITEKGKQRSWVGPSGQYYRELPCPSCRGRGYTPCKECGIDRSSLDCPMCNGKGIQTCLQCSGECVIWQESVDEQPWEKVRSRDELRLRYGFELLNPSALNSPLKVKEDDEVDKLEININNPKRSKRTYASTSPEVAKKISRSLRSLNAQTGLFTKHMKIIHQDPELRAQRVAAIKRTKGTDVARKRASEIQKAFFSDPENRLKRSIAMKGVKFYCSKCGQEGHRSFYCPTLREGSTRVRFRCRLCGREGHNSRTCGKPKSEKEHKQRPHHCSRCGEKGHNRRNCPTSTDLGSDASGYVVNKVNGSNSAVYQCSICLEKGHNRRTCPKRKATLLK

SEQ ID NO: 194456 - protein, 249 aa, Zea Mays
MEMRLFIALQCVQCATMQVKQQKKSSNKWVCVVCNQRQSVLHVHARGYRAADLRRFVQDTNLARGRREFAPLAEPDVDRDLAAVEEGDVFPIEKSQTEWSEYLDDPGETGKGCGGLGADASDGESDEGIEVITELPQKRPKVRPRKAQSDVVGKRTKLSTHPTLCNKRQQIKQGSNPHCATTTAEAQGSKWTKYLDTSRFGGRKCFDTSGLHWTEHDESATTEATTDVVVDDEGASTECHKLSVRWLST

SEQ ID NO: 194457 - protein, 79 aa, Zea Mays
MCSQGLLLQAEGRAVLWPVVVLAVGAATTFALSSPPKVFCPSRPPPTVARAKAISPLLCCSQTPPLVLLLAKVDLVTRE

SEQ ID NO: 194458 - protein, 64 aa, Zea Mays
MFNLVVVLFHKKHSMYLSLLQLYVRIWIPNVGIVSIYYSQKGHKFRRQKREKDAISRLNNASLP

SEQ ID NO: 194459 - protein, 461 aa, Zea Mays
MLRYEFAKHAPLKDIRLVRDKFTHVSRGFAFVHFHSVEDATKALEATNGITLEKNGQVLRVAYAKSTHGPASGGSQSNSLAAAAIEAASFAQQYDAIGWAPKEYNPDDKQNSNFESQKDDGSGTAQSGFVWDEKSGYYYDSASGFYYDGTTGLYYDSNSGVWYSYDQQTQQYVPCTDQSNTKAAGETSSENMISDSICGKKVVISAPAATIKQNKKTSLPDAVQAAANAALAAEKREKEKAKEIKLASKSSLIANKKKMNNVLAMWKQRNQEGQAARIVIDDKEPPNSDDRFNHSHSGTGFSSKSKPNFEFENAMDNSVRQGIASTQMLDSDVKPRPVSNSLGTTVMGVIRGSTRGVIKSDTTFHALSDAGSTDSRTTIITRSNGLMTSPVELVTPAPYKTDVSALVSNTSSGVSGSGKRRFSEAPGQSQYRDRAAERRNLYGSSLRTDAVGLDSSKNTLS

SEQ ID NO: 194460 - protein, 906 aa, Zea Mays
MDHGLYAPQHGWENNSASNGYGAINEPDFRSGGSYNGRRSVDEGFPRDSYGRGAYCQDTHDRNMYAPPPSVGGIWSQPRRNHDEEYATARDHRSRPDFGVDRSKRIGSRESAEFHGEFEDRYHSSNQSRDDSYERDHEYGHYDYDSDHERGRRDSSWKRRDSCESKRERSGLSREREESPYMRHSRSRSHGRDDRSRSWSRSRSPRARSHGRNQRDGLYDDNRFDRRREYDWDDRRHGDSVAPSATVVVKGLSMKTNDDDLYQILSQWGPLRSVRVIKERNSGMSRGFAFIDFSTVEAACRMMEATGKSGLQIDGRNVFFQYSSKPTGVMGGSSPGQENLTRPTYGPRTVAALCDWICSICGCMNFARRTSCFQCNEPRAEDALPADATGSSPHFGRKGSELGPTHVLVVRGLDENADEEMLRYEFAKHAPLKDIRLVRDKFTHVSRGFAFVHFHSVEDATKALEATNGITLEKNGQVLRVAYAKSTHGPASGGSQSNSLAAAAIEAASFAQQYDAIGWAPKEYNPDDKQNSNFESQKDDGSGTAQSGFVWDEKSGYYYDSASGFYYDGTTGLYYDSNSGVWYSYDQQTQQYVPCTDQSNTKAAGETSSENMISDSICGKKVVISAPAATIKQNKKTSLPDAVQAAANAALAAEKREKEKAKEIKLASKSSLIANKKKMNNVLAMWKQRNQEGQAARIVIDDKEPPNSDDRFNHSHSGTGFSSKSKPNFEFENAMDNSVRQGIASTQMLDSDVKPRPVSNSLGTTVMGVIRGSTRGVIKSDTTFHALSDAGSTDSRTTIITRSNGLMTSPVELVTPAPYKTDVSALVSNTSSGVSGSGKRRFSEAPGQSQYRDRAAERRNLYGSSLRTDAVGLDSRSRKGWQRYQGTSPGKIRGRQGWTRKSAAEG

SEQ ID NO: 194461 - protein, 709 aa, Zea Mays
MSRGFAFIDFSTVEAACRMMEATGKSGLQIDGRNVFFQYSSKPTGVMGGSSPGQENLTRPTYGPRTVAALCDWICSICGCMNFARRTSCFQCNEPRAEDALPADATGSSPHFGRKGSELVVRGLDENADEEMLRYEFAKHAPLKDIRLVRDKFTHVSRGFAFVHFHSVEDATKALEATNGITLEKNGQVLRVAYAKSTHGPASGGSQSNSLAAAAIEAASFAQQYDAIGWAPKEYNPDDKQNSNFESQKDDGSGTAQSGFVWDEKSGYYYDSASGFYYDGTTGLYYDSNSGVWYSYDQQTQQYVPCTDQSNTKAAGETSSENMISDSICGKKVVISAPAATIKQNKKTSLPDAVQAAANAALAAEKREKEKAKEIKLASKSSLIANKKKMNNVLAMWKQRNQEGQAARIVIDDKEPPNSDDRFNHSHSGTGFSSKSKPNFEFENAMDNSVRQGIASTQMLDSDVKPRPVSNSLGTTVMGVIRGSTRGVIKSDTTFHALSDAGSTDSRTTIITRSNGLMTSPVELVTPAPYKTDVSALVSNTSSGVSGSGKRRFSEAPGQSQYRDRAAERRNLYGSSLRTDAVGLDSTGHYPSRKGPSEIGSMPFPPGVGERSNGEIGNNENYEVITADSAIDESNVGNRILRNMGWQEGLGLGKDGSGIKEPVQAKSVDVRAGLGSQQRKADPILEAKAGDSYKTIIQKKAMARFKEMS

SEQ ID NO: 194462 - protein, 648 aa, Zea Mays
MSLHSCLQAPSATVVVKGLSMKTNDDDLYQILSQWGPLRSVRVIKERNSGMSRGFAFIDFSTVEAACRMMEATGKSGLQIDGRNVFFQYSSKPTGVMGGSSPGQENLTRPTYGPRTVAALCDWICSICGCMNFARRTSCFQCNEPRAEDALPADATGSSPHFGRKGSELGPTHVLVVRGLDENADEEMLRYEFAKHAPLKDIRLVRDKFTHVSRGFAFVHFHSVEDATKALEATNGITLEKNGQVLRVAYAKSTHGPASGGSQSNSLAAAAIEAASFAQQYDAIGWAPKEYNPDDKQNSNFESQKDDGSGTAQSGFVWDEKSGYYYDSASGFYYDGTTGLYYDSNSGVWYSYDQQTQQYVPCTDQSNTKAAGETSSENMISDSICGKKVVISAPAATIKQNKKTSLPDAVQAAANAALAAEKREKEKAKEIKLASKSSLIANKKKMNNVLAMWKQRNQEGQAARIVIDDKEPPNSDDRFNHSHSGTGFSSKSKPNFEFENAMDNSVRQGIASTQMLDSDVKPRPVSNSLGTTVMGVIRGSTRGVIKSDTTFHALSDAGSTDSRTTIITRSNGLMTSPVELVTPAPYKTDVSALVSNTSSGVSGSGKRRFSEAPGQSQYRDRAAERRNLYGSSLRTDAVGLDSSKNTLS

SEQ ID NO: 194463 - protein, 645 aa, Zea Mays
MSLHSCLQAPSATVVVKGLSMKTNDDDLYQILSQWGPLRSVRVIKERNSGMSRGFAFIDFSTVEAACRMMEATGKSGLQIDGRNVFFQYSSKPTGVMGGSSPGQENLTRPTYGPRTVAALCDWICSICGCMNFARRTSCFQCNEPRAEDALPADATGSSPHFGRKGSELGPTHVLVVRGLDENADEEMLRYEFAKHAPLKDIRLVRDKFTHVSRGFAFVHFHSVEDATKALEATNGITLEKNGQVLRVAYAKSTHGPASGGSQSNSLAAAAIEAASFAQQYDAIGWAPKEYNPDDKQNSNFESQKDDGSGTAQSGFVWDEKSGYYYDSASGFYYDGTTGLYYDSNSGVWYSYDQQTQQYVPCTDQSNTKAAGETSSENMISDSICGKKVVISAPAATIKQNKKTSLPDAVQAAANAALAAEKREKEKAKEIKLASKSSLIANKKKMNNVLAMWKQRNQEGQAARIVIDDKEPPNSDDRFNHSHSGTGFSSKSKPNFEFENAMDNSVRQGIASTQMLDSDVKPRPVSNSLGTTVMGVIRGSTRGVIKSDTTFHALSDAGSTDSRTTIITRSNGLMTSPVELVTPAPYKTDVSALVSNTSSGVSGSGKRRFSEAPGQSQYRDRAAERRNLYGSSLRTDAVGLDSTFY

SEQ ID NO: 194464 - protein, 999 aa, Zea Mays
MFLFGTGLTLQQVLFFCDLCHAFNIYIVFCHITISSPINLICRSGGSYNGRRSVDEGFPRDSYGRGAYCQDTHDRNMYAPPPSVGGIWSQPRRNHDEEYATARDHRRHNTDYHNDGKHHEFDSYRVDRLHDNYHATDSYYESGSRPDFGVDRSKRIGSRESAEFHGEFEDRYHSSNQSRDDSYERDHEYGHYDYDSDHERGRRDSSWKRRDSCESKRERSGLSREREESPYMRHSRSRSHGRDDRSRSWSRSRSPRARSHGRNQRDGLYDDNRFDRRREYDWDDRRHGDSVAPSATVVVKGLSMKTNDDDLYQILSQWGPLRSVRVIKERNSGMSRGFAFIDFSTVEAACRMMEATGKSGLQIDGRNVFFQYSSKPTGVMGGSSPGQENLTRPTYGPRTVAALCDWICSICGCMNFARRTSCFQCNEPRAEDALPADATGSSPHFGRKGSELGPTHVLVVRGLDENADEEMLRYEFAKHAPLKDIRLVRDKFTHVSRGFAFVHFHSVEDATKALEATNGITLEKNGQVLRVAYAKSTHGPASGGSQSNSLAAAAIEAASFAQQYDAIGWAPKEYNPDDKQNSNFESQKDDGSGTAQSGFVWDEKSGYYYDSASGFYYDGTTGLYYDSNSGVWYSYDQQTQQYVPCTDQSNTKAAGETSSENMISDSICGKKVVISAPAATIKQNKKTSLPDAVQAAANAALAAEKREKEKAKEIKLASKSSLIANKKKMNNVLAMWKQRNQEGQAARIVIDDKEPPNSDDRFNHSHSGTGFSSKSKPNFEFENAMDNSVRQGIASTQMLDSDVKPRPVSNSLGTTVMGVIRGSTRGVIKSDTTFHALSDAGSTDSRTTIITRSNGLMTSPVELVTPAPYKTDVSALVSNTSSGVSGSGKRRFSEAPGQSQYRDRAAERRNLYGSSLRTDAVGLDSTGHYPSRKGPSEIGSMPFPPGVGERSNGEIGNNENYEVITADSAIDESNVGNRILRNMGWQEGLVSSCPTYFSV

SEQ ID NO: 194465 - protein, 642 aa, Zea Mays
MGPALLLHSVTGFVLYADCNEPRAEDALPADATGSSPHFGRKGSELGPTHVLVVRGLDENADEEMLRYEFAKHAPLKDIRLVRDKFTHVSRGFAFVHFHSVEDATKALEATNGITLEKNGQVLRVAYAKSTHGPASGGSQSNSLAAAAIEAASFAQQYDAIGWAPKEYNPDDKQNSNFESQKDDGSGTAQSGFVWDEKSGYYYDSASGFYYDGTTGLYYDSNSGVWYSYDQQTQQYVPCTDQSNTKAAGETSSENMISDSICGKKVVISAPAATIKQNKKTSLPDAVQAAANAALAAEKREKEKAKEIKLASKSSLIANKKKMNNVLAMWKQRNQEGQAARIVIDDKEPPNSDDRFNHSHSGTGFSSKSKPNFEFENAMDNSVRQGIASTQMLDSDVKPRPVSNSLGTTVMGVIRGSTRGVIKSDTTFHALSDAGSTDSRTTIITRSNGLMTSPVELVTPAPYKTDVSALVSNTSSGVSGSGKRRFSEAPGQSQYRDRAAERRNLYGSSLRTDAVGLDSTGHYPSRKGPSEIGSMPFPPGVGERSNGEIGNNENYEVITADSAIDESNVGNRILRNMGWQEGLGLGKDGSGIKEPVQAKSVDVRAGLGSQQRKADPILEAKAGDSYKTIIQKKAMARFKEMS

SEQ ID NO: 194466 - protein, 486 aa, Zea Mays
MLRYEFAKHAPLKDIRLVRDKFTHVSRGFAFVHFHSVEDATKALEATNGITLEKNGQVLRVAYAKSTHGPASGGSQSNSLAAAAIEAASFAQQYDAIGWAPKEYNPDDKQNSNFESQKDDGSGTAQSGFVWDEKSGYYYDSASGFYYDGTTGLYYDSNSGVWYSYDQQTQQYVPCTDQSNTKAAGETSSENMISDSICGKKVVISAPAATIKQNKKTSLPDAVQAAANAALAAEKREKEKAKEIKLASKSSLIANKKKMNNVLAMWKQRNQEGQAARIVIDDKEPPNSDDRFNHSHSGTGFSSKSKPNFEFENAMDNSVRQGIASTQMLDSDVKPRPVSNSLGTTVMGVIRGSTRGVIKSDTTFHALSDAGSTDSRTTIITRSNGLMTSPVELVTPAPYKTDVSALVSNTSSGVSGSGKRRFSEAPGQSQYRDRAAERRNLYGSSLRTDAVGLDSRSRKGWQRYQGTSPGKIRGRQGWTRKSAAEG

SEQ ID NO: 194467 - protein, 1011 aa, Zea Mays
MFLFGTGLTLQQVLFFCDLCHAFNIYIVFCHITISSPINLICRSGGSYNGRRSVDEGFPRDSYGRGAYCQDTHDRNMYAPPPSVGGIWSQPRRNHDEEYATARDHRSRPDFGVDRSKRIGSRESAEFHGEFEDRYHSSNQSRDDSYERDHEYGHYDYDSDHERGRRDSSWKRRDSCESKRERSGLSREREESPYMRHSRSRSHGRDDRSRSWSRSRSPRARSHGRNQRDGLYDDNRFDRRREYDWDDRRHGDSVAPSATVVVKGLSMKTNDDDLYQILSQWGPLRSVRVIKERNSGMSRGFAFIDFSTVEAACRMMEATGKSGLQIDGRNVFFQYSSKPTGVMGGSSPGQENLTRPTYGPRTVAALCDWICSICGCMNFARRTSCFQCNEPRAEDALPADATGSSPHFGRKGSELGPTHVLVVRGLDENADEEMLRYEFAKHAPLKDIRLVRDKFTHVSRGFAFVHFHSVEDATKALEATNGITLEKNGQVLRVAYAKSTHGPASGGSQSNSLAAAAIEAASFAQQYDAIGWAPKEYNPDDKQNSNFESQKDDGSGTAQSGFVWDEKSGYYYDSASGFYYDGTTGLYYDSNSGVWYSYDQQTQQYVPCTDQSNTKAAGETSSENMISDSICGKKVVISAPAATIKQNKKTSLPDAVQAAANAALAAEKREKEKAKEIKLASKSSLIANKKKMNNVLAMWKQRNQEGQAARIVIDDKEPPNSDDRFNHSHSGTGFSSKSKPNFEFENAMDNSVRQGIASTQMLDSDVKPRPVSNSLGTTVMGVIRGSTRGVIKSDTTFHALSDAGSTDSRTTIITRSNGLMTSPVELVTPAPYKTDVSALVSNTSSGVSGSGKRRFSEAPGQSQYRDRAAERRNLYGSSLRTDAVGLDSTGHYPSRKGPSEIGSMPFPPGVGERSNGEIGNNENYEVITADSAIDESNVGNRILRNMGWQEGLGLGKDGSGIKEPVQAKSVDVRAGLGSQQRKADPILEAKAGDSYKTIIQKKAMARFKEMS

SEQ ID NO: 194468 - protein, 987 aa, Zea Mays
MGEQQASNGYGAINEPDFRSGGSYNGRRSVDEGFPRDSYGRGAYCQDTHDRNMYAPPPSVGGIWSQPRRNHDEEYATARDHRSRPDFGVDRSKRIGSRESAEFHGEFEDRYHSSNQSRDDSYERDHEYGHYDYDSDHERGRRDSSWKRRDSCESKRERSGLSREREESPYMRHSRSRSHGRDDRSRSWSRSRSPRARSHGRNQRDGLYDDNRFDRRREYDWDDRRHGDSVAPSATVVVKGLSMKTNDDDLYQILSQWGPLRSVRVIKERNSGMSRGFAFIDFSTVEAACRMMEATGKSGLQIDGRNVFFQYSSKPTGVMGGSSPGQENLTRPTYGPRTVAALCDWICSICGCMNFARRTSCFQCNEPRAEDALPADATGSSPHFGRKGSELGPTHVLVVRGLDENADEEMLRYEFAKHAPLKDIRLVRDKFTHVSRGFAFVHFHSVEDATKALEATNGITLEKNGQVLRVAYAKSTHGPASGGSQSNSLAAAAIEAASFAQQYDAIGWAPKEYNPDDKQNSNFESQKDDGSGTAQSGFVWDEKSGYYYDSASGFYYDGTTGLYYDSNSGVWYSYDQQTQQYVPCTDQSNTKAAGETSSENMISDSICGKKVVISAPAATIKQNKKTSLPDAVQAAANAALAAEKREKEKAKEIKLASKSSLIANKKKMNNVLAMWKQRNQEGQAARIVIDDKEPPNSDDRFNHSHSGTGFSSKSKPNFEFENAMDNSVRQGIASTQMLDSDVKPRPVSNSLGTTVMGVIRGSTRGVIKSDTTFHALSDAGSTDSRTTIITRSNGLMTSPVELVTPAPYKTDVSALVSNTSSGVSGSGKRRFSEAPGQSQYRDRAAERRNLYGSSLRTDAVGLDSTGHYPSRKGPSEIGSMPFPPGVGERSNGEIGNNENYEVITADSAIDESNVGNRILRNMGWQEGLGLGKDGSGIKEPVQAKSVDVRAGLGSQQRKADPILEAKAGDSYKTIIQKKAMARFKEMS

SEQ ID NO: 194469 - protein, 576 aa, Zea Mays
MQRNTKGDEHISSQGTAGFLDSHEVVCSKDYLETYLSEETMEDDKAKAVAEVMKTLRVDKLTVDLFCAILCLCEWKVEAAAEYFNFCRGKPQIPEKSLKQKFVFQFDFVKGQLQRFFPEDYDSEKIKKNNIESPNLSDQPLQRDLIVAPVKRRLVDEFKSCDLSHRQKRKVKLQGNSLQTQTPRRSPRLVNVNNTCNKNKKVSKGRAKVLKTPPDATDQVKDRAHKSCLLDEKLDNALKAVHEEATGSLSQDLRKLDSPRCEVGLSKEHGHDQGDTGKMLDEVSDVENSKEHVGSDAMGNSESYMSTYCVEPLPTNSRLTAYSRINELSFTWKHSQHASSLEKVLLDIQRDNFVNTIARIQKIVRDDPSDVLSADVIEATVQIEILKWGLCLQDKCAHKIVNTMLDYAKKVKGRHNFNTEMRKEEFSAKLQDLLKWQLKELEFKYTSLESDYKKAMADASNFFSTFEEHRKKLHAIKDGIKDLQQACMTKDDEMQKLALQVAEHATAYQKSIMEKVRVKMALKSHEQTLGYIKEQLASAESGSIDVGALVKIEMDNMSREIELSKQNLLNINFKKE

SEQ ID NO: 194470 - protein, 576 aa, Zea Mays
MEDAVSGLRSSNSATSFVAAPVYDDDVFSSSATSQHNASILGRRQHLSRSARLQRRPLQHLTVDPVSAVHGSDDSELSHSEVDRVLATVVLSNPREKVHDGLVGVTEFAHRPLAVYDSYVEHDLYSFIPLLFYTEQAKEEQVPVDTPTRCSMRVLNCRTFPRQGLQGHPSSLVCPLVRRHDGRFHLWFEPSVLVAPHTRGRAEQMTLSYDADAEADDYYNAPDVEIMVSNFGSTSTLSYLEPDLMLPTRYRNILAGMLEKAVYEEGHDLFGVLYESRSLVGTIGSIDFSFEENDELVDRKETVVTSQLQEEMGSKEHTTGQFQTLDKPIADNSSAAVEFSNRNCWVSLIQGSSVYTPYPSNRVEQGLVATLQSDEDGCDQQRDGESLPGSDNLFARAAIVFSHWWSSAAADDFRGQQLSRLVNLAPRVQQSPGCLRCLVLGLMEEPRRPRFFKVLVVDFARRIEIPQGFLCHFPEGRDRKPGTTAVASAKVVLTNAEGSSIWPVALESTDGRVFLTTGWPKFVEDNRLGKGEILIFKYHGRMRFVVSIFGVDAVEKAGRWSARSGAQAAEKVRGNS

SEQ ID NO: 194471 - protein, 580 aa, Zea Mays
MAAPDRAGAGAGGHLRGHAHLTNCIHLRHHHGHAHGGAGAGGASSSGWRRSPASVASATLMRDLLALQRSRSLRDPSTRRSVESSRVAADPDAGSGDDVDLPAKSRRSAGALKALLDQLAENPHPHPKPGRRPPRRFKRRAGRRATAVSKPPDRAAALSVNSSSQEAVCGNKYLFHGGGDDDDGAEELQQHLPQDLRNVCGIPWNWSRLHHRGKSIIDMAGRSLSCGLSDSRSAAGRKSEAGAASGGHVNASRPLFPAKSERLASSTSSDSDALPLLVGAATSGARNHIGAISGSYSGELGIFSNQTSQMDSDLLSESQSGQKSQASQHGRGRHRSLTQKFAPKTFKDVVGQSLVVQALSNAILRRKIGLVYVFYGPHGTGKTSCARVFAKALNCLSSEHPRPCDSCTVCIAHNLGKSRSLMEIGPVGNIDIDGIVDVLDNVMLSPAPSHYRVFIFDDCDTLPADTWSAISKVVDRAPRRVVFILVSPNLELPHIILSRCQKFFFPKHRESDIVNTLQWICTSESLDVDKDALKLIASRSDGSLRDAEMTLDQLSLLGQRISLTLVQELFLVCFTGWPGV

SEQ ID NO: 194472 - protein, 980 aa, Zea Mays
MAAPDRAGAGAGGHLRGHAHLTNCIHLRHHHGHAHGGAGAGGASSSGWRRSPASVASATLMRDLLALQRSRSLRDPSTRRSVESSRVAADPDAGSGDDVDLPAKSRRSAGALKALLDQLAENPHPHPKPGRRPPRRFKRRAGRRATAVSKPPDRAAALSVNSSSQEAVCGNKYLFHGGGDDDDGAEELQQHLPQDLRNVCGIPWNWSRLHHRGKSIIDMAGRSLSCGLSDSRSAAGRKSEAGAASGGHVNASRPLFPAKSERLASSTSSDSDALPLLVGAATSGARNHIGAISGSYSGELGIFSNQTSQMDSDLLSESQSGQKSQASQHGRGRHRSLTQKFAPKTFKDVVGQSLVVQALSNAILRRKIGLVYVFYGPHGTGKTSCARVFAKALNCLSSEHPRPCDSCTVCIAHNLGKSRSLMEIGPVGNIDIDGIVDVLDNVMLSPAPSHYRVFIFDDCDTLPADTWSAISKVVDRAPRRVVFILVSPNLELPHIILSRCQKFFFPKHRESDIVNTLQWICTSESLDVDKDALKLIASRSDGSLRDAEMTLDQLSLLGQRISLTLVQELVGLVSDDKLVDLLDLALSADTVKTVKTLRDITETGVEPLALMSQLATIITDILAGSYAFNRERPKRKFFKRPTLSKEDMGKLRQALKILSETEKQLRVSSDKTTWLTAALLQLAPDKQYLLPSSSTSTSLNHGLLVGSFPDRGIGRSSAVEHKCNLAGTSYGEGTVEHTENGHVLSTSSVKGNEGTKNRKADNEMIWQAVLESIQSDTLRKMMAKEARLNSVSLGTAPTVQLIFSSRINKFKAENYRAQILQAFESVLHSAIILEIRYESKNDTKAGHVPSMFPYPENDSSNVTLRSFTKHSPLSSREGEIIEVGPSHMHWHAQTNSGVLDINGRKKENVWEEEASSSPNQESVTNQKGRNGNRQRQQNSIVKGKVSLAHVIGRAEACSQQGGWSRRKAISIAQKLEQENL

SEQ ID NO: 194473 - protein, 980 aa, Zea Mays
MAAPDRAGAGAGGHLRGHAHLTNCIHLRHHHGHAHGGAGAGGASSSGWRRSPASVASATLMRDLLALQRSRSLRDPSTRRSVESSRVAADPDAGSGDDVDLPAKSRRSAGALKALLDQLAENPHPHPKPGRRPPRRFKRRAGRRATAVSKPPDRAAALSVNSSSQEAVCGNKYLFHGGGDDDDGAEELQQHLPQDLRNVCGIPWNWSRLHHRGKSIIDMAGRSLSCGLSDSRSAAGRKSEAGAASGGHVNASRPLFPAKSERLASSTSSDSDALPLLVGAATSGARNHIGAISGSYSGELGIFSNQTSQMDSDLLSESQSGQKSQASQHGRGRHRSLTQKFAPKTFKDVVGQSLVVQALSNAILRRKIGLVYVFYGPHGTGKTSCARVFAKALNCLSSEHPRPCDSCTVCIAHNLGKSRSLMEIGPVGNIDIDGIVDVLDNVMLSPAPSHYRVFIFDDCDTLPADTWSAISKVVDRAPRRVVFILWICTSESLDVDKDALKLIASRSDGSLRDAEMTLDQLSLLGQRISLTLVQELVGLVSDDKLVDLLDLALSADTVKTVKTLRDITETGVEPLALMSQLATIITDILAGSYAFNRERPKRKFFKRPTLSKEDMGKLRQALKILSETEKQLRVSSDKTTWLTAALLQLAPDKQYLLPSSSTSTSLNHGLLVGSFPDRGIGRSSAVEHKCNLAGTSYGEGTVEHTENGHVLSTSSVKGNEGTKNRKADNEMIWQAVLESIQSDTLRKMMAKEARLNSVSLGTAPTVQLIFSSRINKFKAENYRAQILQAFESVLHSAIILEIRYESKNDTKAGHVPSMFPYPENDSSNVTLRSFTKHSPLSSREGEIIEVGPSHMHWHAQTNSGVLDINGRKKENVWEEEASSSPNQESVTNQKGRNGNRQRQQNSIVKGKVSLAHVIGRAEACSQQGGWSRRKAISIAQKLEQENLRLEPKSSLLCWRTSRTRRKVIFHICIFVLYHNL

SEQ ID NO: 194474 - protein, 140 aa, Zea Mays
MRRDAVAAAPTAAGASPPIPATVLPTDAVVIDVEGEPLPAEAPGLGCRICHLGPEDDESAVPGSEVMLLGCGCKDELGAAHQQCAEAWFRIKGDRNSNWKVQGRWLLGRRTIPEVWGTQFDGLASQPFGIQKSLLLIILL

SEQ ID NO: 194475 - protein, 143 aa, Zea Mays
MRRDAVAAAPTAAGASPPIPATVLPTDAVVIDVEGEPLPAEAPGLGCRICHLGPEDDESAVPGSEVMLLGCGCKDELGAAHQQCAEAWFRIKGDRRCEICGSDAKNITGLEVKKFMEQWHGRRVAHAQTTEERESHCWRQQPF

SEQ ID NO: 194476 - protein, 253 aa, Zea Mays
MQLLIANFTEFQLATVITFLLHETVFFLSGLPSLLFERFGLFAKYKIQRSNTSAYQNRCVLRLILYHVSVNLPVMILSYPAFKFMGLRSSLPLPHWTVVVSQVLFYFVLEDFIFYWGHRALHTKWLYKHVHSVHHEYATPFGLTSEYAHPAEILFLGFATVVGPALTGPHLFTLWLWMVLRVLETVEAHSGYHFPWSPSNFLPLYGGSDFHDYHHRVLYTKSGNYASTFVYMDWLFRTDNGYRKAKRPLRSKK

SEQ ID NO: 194477 - protein, 209 aa, Zea Mays
MAVPMSAIESAWQLATVITFLLHETVFFLSGLPSLLFERFGLFAKYKIQKRSNTSAYQNRCVLRLILYHVSVNLPVMILSYPAFKFMGLRSSLPLPHWTVVVSQVLFYFVLEDFIFYWGHRALHTKWLYKHVHSVHHEYATPFGLTSEYAHPAEILFLGFATVVGPALTGPHLFTLWLWMVLRVLETVEAHSGYHFPWSPSNFLPLYGG

SEQ ID NO: 194478 - protein, 254 aa, Zea Mays
MAVPMSAIESAWQLATVITFLLHETVFFLSGLPSLLFERFGLFAKYKIQRSNTSAYQNRCVLRLILYHVSVNLPVMILSYPAFKFMGLRSSLPLPHWTVVVSQVLFYFVLEDFIFYWGHRALHTKWLYKHVHSVHHEYATPFGLTSEYAHPAEILFLGFATVVGPALTGPHLFTLWLWMVLRVLETVEAHSGYHFPWSPSNFLPLYGGSDFHDYHHRVLYTKSGNYASTFVYMDWLFRTDNGYRKAKRPLRSKK

SEQ ID NO: 194479 - protein, 425 aa, Zea Mays
MMDLRKYDGALGLLNAVLEIDPNHSEAYRQRASVLRHKCRYEEAERDYNKHLELSPGSASVVKELSQLLQAQNSLQSAYGQFDSGDFSKVVEYINKIVLVFSPGCLKAKLLKAKALLALKDYSSVISETGFILKEDEDNLDALLLRGRAYYYLADHDVASRHYQKGLRLDPEHSELKKAYFGLKNLLKKTKSAEDNAAKGKLRVSVEDYKAALAMDPDHTAYNVHLYLGLCKTLVRLGRSKEAISTCTEALIIDSELVDALTQRGEAKLLSEDWEGAVQDLKEAAQKSPQDMGIREALMRAEKQLKLSKRKDWYKILGVSKTASAAEIKRAYKKLALQWHPDKNVDNREKAENMFREIAAAYEVLGDEDKRVRYDRGEDVEEMNMGGGGGFNPFGGGGQQYTFQYDGGFPGGGFPGGGGFQFNFG

SEQ ID NO: 194480 - protein, 303 aa, Zea Mays
MAHGSAEAATTLQLQRRRRAERPSRGGGFRWAMDTGLGWTAVVNSSCRNFSHWPSPSVAGVSATQANNGTETPAVTAPELETEIMVRAWGRRTALPPLLILGLLRLHYSSLVVAQEGQEKDPATLFAQASGMMDLRKYDGALGLLNAVLEIDPNHSEAYRQRASVLRHKCRYEEAERDYNKHLELSPGSASVVKELSQLLQAQNSLQSAYGQFDSGDFSKVVEYINKIVLVFSPGCLKAKLLKAKALLALKDYSSVISETGFILKEDEDNLDALLLRGRAYYYLADHDVASRKGFVLIQSIPN

SEQ ID NO: 194481 - protein, 190 aa, Zea Mays
MLCGLLKSKHNFIRLGFLYVLDKFLMRCKLLLDDSDMQDHTTSDHSKNCLDKAFAVIDIMNSSLLLVVQDNETDHINILKMCDMLFPQLCLRIPSTNAMHVRGLQSLGQLFGCTSKNIDNHLDALASHQSVGNKNLCQSETLQDMGMDQSGQPTLFCEASMATLLRGLAIAPIQLSPCTNFFIFLAIDTA

SEQ ID NO: 194482 - protein, 132 aa, Zea Mays
MIMERSSIAVISVVQGTVGEKQIEQEFVNLVGKNVWRWTARSIGENKFLMRFPDPKMIKDLGYFRPLGMRTAKAQITIDPWSPAVSAKSCLQRGWFRIRGIPIEQRSIKTIAKVGGLVGKVVEIDEKTPCEK

SEQ ID NO: 194483 - protein, 75 aa, Zea Mays
MNLESRVVVAEDIGRQMLSYGSRKPMDNFLQRMEGITLDDVATFARKMLASRPTMVSWGDVDKVPPYESICKRLR

SEQ ID NO: 194484 - protein, 440 aa, Zea Mays
MTTLSRMLPRLRSSATRALRKVFGLEPAAPPRRLPAPEAFVASERSLLRPLPGLDLPPCLPDNLSRSPTRVTTLPNGLRVATEDIPGPSACIGFFVNSGSVYESGETTGVSYLLERMGFKDTKHRSHLSIVSELELAGASVSVSASREQMVYSYDTLKGYMPEALEILIDCMRNPLFLQEEVQRQENFTADRVVLAAAGVDHEHMLGYADFLLKDWHRGAPMEKPKSTYVGGYSKHRAYSDMTDVALAFEVPGGWFQERDAAIMTVIQTLMGGGGSFSTGGPGKGMHSRLSLRVLNKYHFVESLSAFSNVYDNTGLFGIYLTTSPYHVAKAVDIAISELIAVATPGEVTEVELRRAKNSTISSVLMNLESRVVVAEDIGRQMLSYGSRKPMDNFLQRMEGITLDDVATFARKMLASRPTMVSWGDVDKVPPYESICKRLR

SEQ ID NO: 194485 - protein, 496 aa, Zea Mays
MTTLSRMLPRLRSSATRALRKVFGLEPAAPPRRLPAPEAFVASERSLLRPLPGLDLPPCLPDNLSRSPTRVTTLPNGLRVATEDIPGPSACIGFFVNSGSVYESGETTGVSYLLERMGFKDTKHRSHLSIVSELELAGASVSVSASREQMVYSYDTLKGYMPEALEILIDCMRNPLFLQEEVQRQLVLAREGFQELQRSPERFLHEQLNIVGFSGALANPLIAPEHVLARINDRIIQKFYHENFTADRVVLAAAGVDHEHMLGYADFLLKDWHRGAPMEKPKSTYVGGYSKHRAYSDMTDVALAFEVPGGWFQERDAAIMTVIQTLMGGGGSFSTGGPGKGMHSRLSLRVLNKYHFVESLSAFSNVYDNTGLFGIYLTTSPYHVAKAVDIAISELIAVATPGEVTEVELRRAKNSTISSVLMNLESRVVVAEDIGRQMLSYGSRKPMDNFLQRMEGITLDDVATFARKMLASRPTMVSWGDVDKVPPYESICKRLR

SEQ ID NO: 194486 - protein, 250 aa, Zea Mays
MTTLSRMLPRLRSSATRALRKVFGLEPAAPPRRLPAPEAFVASERSLLRPLPGLDLPPCLPDNLSRSPTRVTTLPNGLRVATEDIPGPSACIGFFVNSGSVYESGETTGVSYLLERMGFKDTKHRSHLSIVSELELAGASVSVSASREQMVYSYDTLKGYMPEALEILIDCMRNPLFLQEEVQRQLVLAREGFQELQRSPERFLHEQLNIVGFSGALANPLIAPEHVLARINDRIIQKFYHQQVLITNTC

SEQ ID NO: 194487 - protein, 347 aa, Zea Mays
MTTLSRMLPRLRSSATRALRKVFGLEPAAPPRRLPAPEAFVASERSLLRPLPGLDLPPCLPDNLSRSPTRVTTLPNGLRVATEDIPGPSACIGFFVNSGSVYESGETTGVSYLLERMGFKDTKHRSHLSIVSELELAGASVSVSASREQMVYSYDTLKGYMPEALEILIDCMRNPLFLQEEVQRQLVLAREGFQELQRSPERFLHEQLNIVGFSGALANPLIAPEHVLARINDRIIQKFYHENFTADRVVLAAAGVDHEHMLGYADFLLKDWHRGAPMEKPKSTYVGGYSKHRAYSDMTDVALAFEVPGGWFQERDAAIMTVIQTLMGGGGSFSTGGPGKGMHSRLF

SEQ ID NO: 194488 - protein, 325 aa, Zea Mays
MTTLSRMLPRLRSSATRALRKVFGLEPAAPPRRLPAPEAFVASERSLLRPLPGLDLPPCLPDNLSRSPTRVTTLPNGLRVATEDIPGPSACIGFFVNSGSVYESGETTGVSYLLERMGFKDTKHRSHLSIVSELELAGASVSVSASREQMVYSYDTLKGYMPEALEILIDCMRNPLFLQEEVQRQENFTADRVVLAAAGVDHEHMLGYADFLLKDWHRGAPMEKPKSTYVGGYSKHRAYSDMTDVALAFEVPGGWFQERDAAIMTVIQTLMGGGGSFSTGGPGKGMHSRLSLRVLNKYHFVESLSAFSNVYDNTGLFGIYLTTVS

SEQ ID NO: 194489 - protein, 328 aa, Zea Mays
MTTLSRMLPRLRSSATRALRKVFGLEPAAPPRRLPAPEAFVASERSLLRPLPGLDLPPCLPDNLSRSPTRVTTLPNGLRVATEDIPGPSACIGFFVNSGSVYESGETTGVSYLLERMGFKDTKHRSHLSIVSELELAGASVSVSASREQMVYSYDTLKGYMPEALEILIDCMRNPLFLQEEVQRQLVLAREGFQELQRSPERFLHEQLNIVGFSGALANPLIAPEHVLARINDRIIQKFYHENFTADRVVLAAAGVDHEHMLGYADFLLKDWHRGAPMEKPKSTYVGGYSKHRAYSDMTDVALAFEVPGGWFQERDAAIMTVIQLYVS

SEQ ID NO: 194490 - protein, 376 aa, Zea Mays
MGRAAPSSSPSSPQLGRKRTAAPTPEPPTPQRHCSMVDVMRRSRAVAAPPPVARARVYTYYETLLCETCGLGDRDDEMLLCDRCDRGCHTFCLRPIAAKVPIGPWFCPVCAPPTMAPKSFPVKQTKIVDFFRIQKDEQDAQAAKCRLSQDGRRRRKRSLVMHKRRRRILPFVPSEDGARRLKQMASLATALTSSKTKFSNELTYMPNMAPRSSNLARLEVLPKEDKENIELCRTMQQRGECPPLLVVFDPLEGFTVQADGDIKDMTFLAEYTGDVDYLENRENDDCDCIMTLLLPADPSQMLVICPDKRGNISRFVSGINNHTPDGKKKQNVKCVRYDMDGESHVLLVACRDIACGEKLYYDYNGYEHAYPTHHFF

SEQ ID NO: 194491 - protein, 261 aa, Zea Mays
MGRAAPSSSPSSPQLGRKRTAAPTPEPPTPQRHCSMVDVMRRSRAVAAPPPVARARVYTYYETLLCETCGLGDRDDEMLLCDRCDRGCHTFCLRPIAAKVPIGPWFCPVCAPPTMAPKSFPVKQTKIVDFFRIQKDEQDAQAAKCRLSQDGRRRRKRSLVMHKRRRRILPFVPSEDGARRLKQMASLATALTSSKTKFSNELTYMPNMAPRSSNLARLEVGGMQVLPKEDKENIELCRTMQQRGECPPLLVVFDPLEGYLS

SEQ ID NO: 194492 - protein, 275 aa, Zea Mays
MPSFSFAFDEGSSSSKRLYRWKRVLLKVSGEALAGDHTENIDPKITMAIAREVASVTKLGVEVAIVVGGGNIFRGASWAGCSGLDRSSADYIGMLATVMNAIFLQATMESIGIPTRVQTAFRMSEVAEPYIRRRAVRHLEKGRVVIFAAGTGNPFFTTDTAAALRCAEINAEVMLKATNVDGVYDSDPRQNPNARLLETVSYHEVTARDLSVMDMTAITLCQENNIPIVVFNLQEPGNIAKAIVGKKVGTFVGCKRNQKRNENTLVEERRLVNEV

SEQ ID NO: 194493 - protein, 326 aa, Zea Mays
MAAAAAAVPATFLSGLPSPRTPSPVLHSPVQRAHPVAAPLFLSAKRRAYACAATASGSFYSSNSGSKRLYRWKRVLLKVSGEALAGDHTENIDPKITMAIAREVASVTKLGVEVAIVVGGGNIFRGASWAGCSGLDRSSADYIGMLATVMNAIFLQATMESIGIPTRVQTAFRMSEVAEPYIRRRAVRHLEKGRVVIFAAGTGNPFFTTDTAAALRCAEINAEVMLKATNVDGVYDSDPRQNPNARLLETVSYHEVTARDLSVMDMTAITLCQENNIPIVVFNLQEPGNIAKAIVGKKVGTFVGCKRNQKRNENTLVEERRLVNEV

SEQ ID NO: 194494 - protein, 335 aa, Zea Mays
MAAAAAAVPATFLSGLPSPRTPSPVLHSPVQRAHPVAAPLFLSAKRRAYACAATASGSFYSSNSGFAFDEGSSSSKRLYRWKRVLLKVSGEALAGDHTENIDPKITMAIAREVASVTKLGVEVAIVVGGGNIFRGASWAGCSGLDRSSADYIGMLATVMNAIFLQATMESIGIPTRVQTAFRMSEVAEPYIRRRAVRHLEKGRVVIFAAGTGNPFFTTDTAAALRCAEINAEVMLKATNVDGVYDSDPRQNPNARLLETVSYHEVTARDLSVMDMTAITLCQENNIPIVVFNLQEPGNIAKAIVGKKVGTFVGCKRNQKRNENTLVEERRLVNEV

SEQ ID NO: 194495 - protein, 387 aa, Zea Mays
MDPLGLAVSTSSCLPKSHGRKSRPSSSMARTSASLDAGSSNDVGHLSSTLEKLWVWEKKLYQEVKDEEKLRMKYEKYYRRLKSMDERGAESSTIDSTRLSARLVESKISINIRTANAFSLKIQEIRDEELYPQLVDLIQRFRSLWKDIMECHEKQLLAIQDSRIHWMKAMTVSESGVVSEASRDLERELTKWYRCFNKWMISQRSCAEALNEWLKKWLPESQEEVTADGAPPFSPGRLGAPPVFVVSNDWFQAIEMVSRTDVLKAIDQFSKVVRRFKKSQEDERRQRRRADHASKDYDRKRKDLEEELGLSTMESPRYSHDNRVVDLEKLRKRRDEESTRHDRVLNHAHVTASATLPVGLVPVLQQITSFFQRNQRVYMQIRTQQGA

SEQ ID NO: 194496 - protein, 63 aa, Zea Mays
MKTMINGTQSDGQICVFKKTKICGERGSNTRPSDLQSDALPTELSPLTFFSFHLLKYTIYVST

SEQ ID NO: 194497 - protein, 198 aa, Zea Mays
MKPASPPRKRSPNRRAESPRRPPDPSPRRRPDSPPIRRRPDPSPVRRGGTPPRRRPLSPVRRRSPSPPRRHRSPMRPSPRRGRGSPSPRRRSPGPLRRRSPPPRRLRSPPRRPPPPRRYSRSPPRRPLRSRSISPRRGRGPLLRRGRSGSSYSRSPTPPPRKGPRRVSRSRSPRRPPRGRSISSDSRSSSSPSPRRGR

SEQ ID NO: 194498 - protein, 423 aa, Zea Mays
MAKPRRGRSASRSTSGSSSRSPSHSVSSGSVSSRSRSFSSSSSQSRSRSPPPAKRSSPGARKGRSPSPPPKKGSPSKKVRSPSPPPKKASPPRKASPPAESVVLCIDHLSRNVNEAHLKEIFGNFGEVVNVELSMDRMVNLPRGYGYIEFKKRADAEKALLYMDGGQIDGNVVKLRFTLQPRQRAVSPMKAPPPPPKRDVAQIEKGLSSAEKDAQQRPRESSPRRKPASPPRKRSPNRRAESPRRPPDPSPRRRPDSPPIRRRPDPSPVRRGGTPPRRRPLSPVRRRSPSPPRRHRSPMRPSPRRGRGSPSPRRRSPGPLRRRSPPPRRLRSPPRRPPPPRRYSRSPPRRPLRSRSISPRRGRGPLLRRGRSGSSYSRSPTPPPRKGPRRVSRSRSPRRPPRGRSISSDSRSSSSPSPRRGRC

SEQ ID NO: 194499 - protein, 314 aa, Zea Mays
MSFIPITSLLNGVPGSGFLIHAINLYLRHKPPIEELHQFLEFQLPRQWAPVYSDLALGPQRKRQGSTSLPVNLIGPKLYVCTNMVDVGKRPVTGLRLFLEGRKSNKLAVHLQHLCSLPQIIQLEDDPYNHQTPEYDRKYYEPIGPWKHFSHVCTAPVESDDLCIVTGAQLDVVHQGLKKILFLRLHFSKACNAVVRNSEWENSPNIAQKSGLISTLISTHFSSVAQTPPPRPADVNINSAVYPGGPPVPVQTPKLLKFVDPTEMMRGPQDSPGYWVVSGAKLNLERSKISLRVKYSLLTAMMPDDEFPLDDDEF

SEQ ID NO: 194500 - protein, 575 aa, Zea Mays
MARRATPQEAAVAAAEAAIRSVGLGFDVVSDVRLKFCKQRGAPDPWLIELDHGEVQDIVLPGGVTVAGVTASVKCDKGERMRFRSDVLSFQQMSEQFNQELSLSGKIPSGFFNTMFEFSGSWQKDAANTKALAFDGWYVTLYSVALSKGQIVLRDHVKQSVPSTWDPAALARFIKKFGTHIVVGLKMGGKDVIYLKQQHSSTLQAVDVQKRLKEMSDSRFLDANVQYDMSRNNQRRGGRDKESISHSEWLNTVQAEPDVTSMSFIPITSLLNGVPGSGFLIHAINLYLRHKPPIEELHQFLEFQLPRQWAPVYSDLALGPQRKRQGSTSLPVNLIGPKLYVCTNMVDVGKRPVTGLRLFLEGRKSNKLAVHLQHLCSLPQIIQLEDDPYNHQTPEYDRKYYEPIGPWKHFSHVCTAPVESDDLCIVTGAQLDVVHQGLKKILFLRLHFSKACNAVVRNSEWENSPNIAQKSGLISTLISTHFSSVAQTPPPRPADVNINSAVYPGGPPVPVQTPKLLKFVDPTEMMRGPQDSPGYWVVSGAKLNLERSKISLRVKYSLLTAMMPDDEFPLDDDEF

SEQ ID NO: 194501 - protein, 257 aa, Zea Mays
MARRATPQEAAVAAAEAAIRSVGLGFDVVSDVRLKFCKQRGAPDPWLIELDHGEVQDIVLPGGVTVAGVTASVKCDKGERMRFRSDVLSFQQMSEQFNQELSLSGKIPSGFFNTMFEFSGSWQKDAANTKALAFDGWYVTLYSVALSKGQIVLRDHVKQSVPSTWDPAALARFIKKFGTHIVVGLKMGGKDVIYLKQQHSSTLQAVDVQKRLKEMSDSRFLDANVQYDMSRNNQVLSEPSFLLLSPGFLPFNTIDYC

SEQ ID NO: 194502 - protein, 346 aa, Zea Mays
MSHDELADKEPSSSEEFQLAPTGSKFRSLSPAPIPIPASPGIRSLVDSVSDETVNVDVMASHQSENGSISTASSTVSLLESEKAAYEFLAQTPVRSTDAHLIEFSEALRTVAKALRQVAEGKAAAQAEAAEWKRKYELETAQKQQSKIRGYSSCISNNLDKLASQLTLETPAPDQLGCCGKHGICAHQVLQDEVPGPIPRSNHKVGGRKAPFKLSWGCNGDKNGQHKHDFVSFEKGDITTAERSNKQILLKWESPPQTVLFITKPNSSSVRVLCAEMVRWLREYKNVNIFVDPRVSKELLTEDSYYNFVQTWDNGCIIVQRTSSSSCRIRPWITGLHDTLPERALP

SEQ ID NO: 194503 - protein, 482 aa, Zea Mays
MSHDELADKEPSSSEEFQLAPTGSKFRSLSPAPIPIPASPGIRSLVDSVSDETVNVDVMASHQSENGSISTASSTVSLLESEKAAYEFLAQTPVRSTDAHLIEFSEALRTVAKALRQVAEGKAAAQAEAAEWKRKYELETAQKQQSKIRGYSSCISNNLDKLASQLTLETPAPDQLGCCGKHGICAHQVLQDEVPGPIPRSNHKVGGRKAPFKLSWGCNGDKNGQHKHDFVSFEKGDITTAERSNKQILLKWESPPQTVLFITKPNSSSVRVLCAEMVRWLREYKNVNIFVDPRVSKELLTEDSYYNFVQTWDNDDDIKMLHTKVDLIVTLGGDGTVLWAASLFKGPVPPVVAFALGSLGFMTPFPSEHYRELLDNVLNGPFSITLRNRIQCHVIRDAAKDEIVTEEPFLVLNEVTIDRGISSYLTNLEVYCDSSFVTCVQGDGLIISTTSGSTAYSLAAGGSMVHPQVPGILFTPICPQPA

SEQ ID NO: 194504 - protein, 325 aa, Zea Mays
MSHDELADKEPSSSEEFQLAPTGSKFRSLSPAPIPIPASPGIRSLVDSVSDETVNVDVMASHQSENGSISTASSTVSLLESEKAAYEFLAQTPVRSTDAHLIEFSEALRTVAKALRQVAEGKAAAQAEAAEWKRKYELETAQKQQSKIRGYSSCISNNLDKLASQLTLETPAPDQLGCCGKHGICAHQVLQDEVPGPIPRSNHKVGGRKAPFKLSWGCNGDKNGQHKHDFVSFEKGDITTAERSNKQILLKWESPPQTVLFITKPNSSSVRVLCAEMVRWLREYKNVNIFVDPRVSKELLTEDSYYNFVQTWDNGLVVWRVFTDS

SEQ ID NO: 194505 - protein, 435 aa, Zea Mays
MAPSPVTCRPSAARHRPLLVRAPAPRAADGAALMLPLPLRRREALLAAAARPHARWIAADPWASAHAWTSPGRGRGDATRCAAAGRVAGSSSAGAGRSAGMEVAIAAAAVVAMGTGNRVLYKLALVPLREYPFFLAQFATFGYVVVYFSILYLRYQAGIVTDEMLSLPQKPFLVVGLLEAFAAAAGMAAGAVLSGASIPILSQTYLVWQLLLSAIFLKRRYRINEIAGCFLVTVGVIITVASGSGTSASFKSTGILWPLLMIISFFLQAADTVLKEIIFLDASKKLKCGSVDLFVVNSYGSAYQALFMCLLLPFLSKLWGVPFRVLPTYIKDGAACFLNMGSISGCEGAPLLPLLFVLVNMGFNISLLHLLKISSAVISSLASTFSGFHTVLSAPSNLLTSADSTSSFVLWFHLTSQCWVLPVSAASSQLNYIIY

SEQ ID NO: 194506 - protein, 208 aa, Zea Mays
MAPSPVTCRPSAARHRPLLVRAPAPRAADGAALMLPLPLRRREALLAAAARPHARWIAADPWASAHAWTSPGRGRGDATRCAAAGRVAGSSSAGAGRSAGMEVAIAAAAVVAMGTGNRVLYKLALVPLREYPFFLAQFATFGYVVVYFSILYLRYQAGIVTDEMLSLPQKPFLVVGLLEAFAAAAGMAAGDLSCLAASSICYFLEEAL

SEQ ID NO: 194507 - protein, 334 aa, Zea Mays
MAPSPVTCRPSAARHRPLLVRAPAPRAADGAALMLPLPLRRREALLAAAARPHARWIAADPWASAHAWTSPGRGRGDATRCAAAGRVAGSSSAGAGRSAGMEVAIAAAAVVAMGTGNRVLYKLALVPLREYPFFLAQFATFGYVVVYFSILYLRYQAGIVTDEMLSLPQKPFLVVGLLEAFAAAAGMAAGAVLSGASIPILSQTYLVWQLLLSAIFLKRRYRINEIAGCFLVTVGVIITVASGSGTSASFKSTGILWPLLMIISFFLQAADTVLKEIIFLDASKKLKLIFLLSIHTALLIKLFLCVSCFLSCQSYGEFHSVCYQRTLKMVQPAS

SEQ ID NO: 194508 - protein, 204 aa, Zea Mays
MAPSPVTCRPSAARHRPLLVRAPAPRAADGAALMLPLPLRRREALLAAAARPHARWIAADPWASAHAWTSPGRGRGDATRCAAAGRVAGSSSAGAGRSAGMEVAIAAAAVVAMGTGNRVLYKLALVPLREYPFFLAQFATFGYVVVYFSILYLRYQAGIVTDEMLSLPQKPFLVVGLLEAFAAAAGMAAGGNFLKTRFVFFVAM

SEQ ID NO: 194509 - protein, 197 aa, Zea Mays
MNISSGMERGEDIIEEKQAGGAATSDERSSSQKVADGKGAEPPAAGVSNRLKPSDDAEKLVAFMEDHYDDVVARVQSFDEFYHAIFELIEMFCEERGQLQYRLAEKKALEEAYNKHHRSDGKVTKEEFEAMSREVVKAGSFRVGKASLELGALLFGAPACALLAKRILPGLGWLSDDVVVPLATSGSVAYLIKSKRL

SEQ ID NO: 194510 - protein, 169 aa, Zea Mays
MAARLRRSPISSPPPPPSLCISLYPPPHSSVETTYPACSTYLRSPAMTVLDAESRFHVLAVDDSIIDRKLIEMLLKSSSYQVTTVDSGNKALELLGLRDNGAEDASPPSSSSSSSSSSSPDHQVLAGWRGGVLPEAREAGRHEEAQVTPAEAEAAQPEEQASGAGGGVS

SEQ ID NO: 194511 - protein, 217 aa, Zea Mays
MAARLRRSPISSPPPPPSLCISLYPPPHSSVETTYPACSTYLRSPAMTVLDAESRFHVLAVDDSIIDRKLIEMLLKSSSYQVTTVDSGNKALELLGLRDNGAEDASPPSSSSSSSSSSSPDHQEIDVSLIITDYCMPGMTGYDLLKRVKGSSSLKDIPVVIMSSENVPARISSILRRISRPVPVEVPDGAVLLFLPAWLPVSSQLEGLGLLREQMEY

SEQ ID NO: 194512 - protein, 244 aa, Zea Mays
MERARRASHAGSCSRVFLLGPSHHYYTPKCALTRASVYCTPIGDLPVDQEVIEELSATGKFEFMDLNVDEAEHSMEMHLPYLAKVFQGHNVKVVPILVGALSSQNEALYGQLLSKYVDDPKNFFSVSSDFCHWGSRFSYTYYEKKHGAIHKSIEALDRMGMEIIETGDPVAFKEYLQEYENTICGRHPISVFLHMLKHCSTKIKIGFVRYEQSSQCKNMRDSSVSYASAAAKVAGASGEEDKQD

SEQ ID NO: 194513 - protein, 294 aa, Zea Mays
MERARRASHAGSWKLEEELNGWLGAAGLTKSPDVRAVIAPHAGYSYSGRCAAYAFGNIDPTNISRVFLLGPSHHYYTPKCALTRASVYCTPIGDLPVDQEVIEELSATGKFEFMDLNVDEAEHSMEMHLPYLAKVFQGHNVKVVPILVGALSSQNEALYGQLLSKYVDDPKNFFSVSSDFCHWGSRFSYTYYEKKHGAIHKSIEALDRMGMEIIETGDPVAFKEYLQEYENTICGRHPISVFLHMLKHCSTKIKIGFVRYEQSSQCKNMRDSSVSYASAAAKVAGASGEEDKQD

SEQ ID NO: 194514 - protein, 491 aa, Zea Mays
MIILKGGIGSGYKKLIEEKGATGETYTTEGIALIRVSGTSIHNNKTLQVDTVATSLSSMECFILQSGNAMFTWFGNSSTYEQQQWAAKVAEFLKPGVAVKHCKEGTESSGFWFALGGKQSYTNKNAPQDIITREPHLYAFSFKNGRLEVTEIFNFSQDDLLTEDMMILDTHGEVFIWIGQCVESKEKQKAFDIGQKYVEHANSIDDLSPYAPLYKVMEGNEPCFFKTYFSWDNTKSLVHGNSFQKKLSLLFGLRSEGASRSSGNGGPTQRASALAALSSAFNPSSQQRLSNERPKSTGDGPTQRASALAALSNAFNSSLKPKTPPPSRSGQGSQRAAAVAALSSVLTAEQSGSSENLRAKASSTGDKTDVDRPVITPAGPSGPSSPQSEAGESNVFRQEKDAAVDGAPSDTDGAVAETREEETTENVGEATFSYDRLISKSTDPVRGIDYKRREAYLSDSEFQSVFGMTKDAFYRQPNWKQELQKRKADLF

SEQ ID NO: 194515 - protein, 932 aa, Zea Mays
MTTCTKGGAYLYDIHFWIGKDSSQDEAGTAAIKTVELDAILGGRAIQHRELQGYESDKFLSYFKPCIIPLEGGFASGFKKPEEEKFETRLYICRGKRAIRVKEVPFARSSLNHDDVFVLDAENKIYQFNGANSNIQERAKALEVIQHLKEKYHGGVCDVAIVDDGKLQAESDSGEFWVLFGGFAPIGKKTVSDDDVVLETTAPRLYSINDGQLKLEETALTKAVLENTKCFLLDCGAEIYVWVGRVTQMEDRKSATKAVEEFLINQKRPKTTRVTQVIQGYESHAFKSKFESWPVGNATGSPGAEEGRGKVAALLKQQGVDLKGAAKSTTPVNEEVPPLLEGGGKLEVWCVDGNAKTALPKEDIGKFYSGDCYIILYTYHSGDKKEEYYLSYWIGKDSLVDDQVSASQITNTVWNSLKGRPVLGRIYQGKEPPQFVALFQPMIILKGGIGSGYKKLIEEKGATGETYTTEGIALIRVSGTSIHNNKTLQVDTVATSLSSMECFILQSGNAMFTWFGNSSTYEQQQWAAKVAEFLKPGVAVKHCKEGTESSGFWFALGGKQSYTNKNAPQDIITREPHLYAFSFKNGRLEVTEIFNFSQDDLLTEDMMILDTHGEVFIWIGQCVESKEKQKAFDIGQKYVEHANSIDDLSPYAPLYKVMEGNEPCFFKTYFSWDNTKSLVHGNSFQKKLSLLFGLRSEGASRSSGNGGPTQRASALAALSSAFNPSSQQRLSNERPKSTGDGPTQRASALAALSNAFNSSLKPKTPPPSRSGQGSQRAAAVAALSSVLTAEQSGSSENLRAKASSTGDKTDVDRPVITPAGPSGPSSPQSEAGESNVFRQEKDAAVDGAPSDTDGAVAETREEETTENVGEATFSYDRLISKSTDPVRGIDYKRREAYLSDSEFQSVFGMTKDAFYRQPNWKQELQKRKADLF

SEQ ID NO: 194516 - protein, 161 aa, Zea Mays
MQYEGGIFRILDWADIVNAHIVPGPGIVDGLKLKGLPKGRGLLLLAEMSSAGNLAHGDYTAAAVKIAEQHSDFVMGFISVNPESWSVKPSSPAFIHATPGVQMVAGGDDLGQQYNTPESVINYRGSDIIIVGRGIIKASDPMKKAWEYRLQGWQAYKNSLL

SEQ ID NO: 194517 - protein, 550 aa, Zea Mays
MEGRNPVQRFVDSPKPYNRRKARGMQTRMDSSDHGDRQGPRACEELPGKMDNDRADRQRLKACEFPAKMDNNHADRQVSKACESKGNACELPGKMDNDHPVRQGLKARGLLQPKSDASEDGVCEGLKACGLTANKMDATDQCDHKGSKVCRVVTTKTDTSDQGDCQTFKVCGIAAKMDVNDHADHQGSKASGMPTKTDANDQCSNQGFVTCPFKTAERLDHLLNQPANRYCADCGAPDPKWVSMTFGVFICIKCSGAHRSLGVHISKARHVVSVKLDEWADEQVDILADSGGNAAVNMIYEAFVPENYAKPRQDCSAEERNDFIRRKYEAQQFLTNPQLSCPPRRNEKHNHQQHSTSSSRHGLGHSFRNSWRRKEHEAKSTKKTIEVGMVEFVGLIKIDIIRGTNLAIRDVMSSDPYVIINLGHQTMKTKVVKSSLNPVWNERLMLSIPDPVPLLKLQVYDKDTFTTDDRMGEAEINIQPLVAAAKAHETSAIADTAQLNKWLAKDGIWIPRDSAISIVNGKVKQVVNARLQNVERGQLEMELECVPLTQ

SEQ ID NO: 194518 - protein, 688 aa, Zea Mays
MEGRNPVQRFVDSPKPYNRRKARGMQTRMDSSDHGDRQGPRACEELPGKMDNDRADRQRLKACEFPAKMDNNHADRQVSKACESKGNACELPGKMDNDHPVRQGLKARGLLQPKSDASEDGVCEGLKACGLTANKMDATDQCDHKGSKVCRVVTTKTDTSDQGDCQTFKVCGIAAKMDVNDHADHQGSKASGMPTKTDANDQCSNQGPFKTAERLDHLLNQPANRYCADCGAPDPKWVSMTFGVFICIKCSGAHRSLGVHISKVVSVKLDEWADEQVDILADSGGNAAVNMIYEAFVPENYAKPRQDCSAEERNDFIRRKYEAQQFLTNPQLSCPPRRNEKHNHQQHSTSSSRHGLGHSFRNSWRRKEHEAKSTKKTIEVGMVEFVGLIKIDIIRGTNLAIRDVMSSDPYVIINLGHQTMKTKVVKSSLNPVWNERLMLSIPDPVPLLKLQVYDKDTFTTDDRMGEAEINIQPLVAAAKAHETSAIADTAQLNKWLAKDGIWIPRDSAISIVNGKVKQVVNARLQNVERGQLEMELDHLNRCKYLLGMTILCCILAMDAAALESLILDLHAIEVVKLGSFTLKSGIKSPIYLDLRALVSHPRLLSAVASLLHALPATRPYGLVCGVPYTALPIAAVLSVDRSIPMLITCYTQGAQKDIFGEGESCHQPYGEEALRADGDQADQPVCCR

SEQ ID NO: 194519 - protein, 519 aa, Zea Mays
MEGGPRSRRAKPTPNGKGVSPMRDSCLELSGKGVSSERDSGLELSKSPPPPPAPWWTDPSAPVTGDHSWLILDRIVHRSRKRCGDATTSALAHECVGRPIRASLRIADPPAVSRLYVHWTSIPAIDCMKEPVVIAAHHNSILFRVSVPFDDPCFWSRMIYFPDDYFVYSSSSSPPSLTRLPPCFTRVPLCFGGGRTDPELDKWLQPHRRQQQRTMIEEDMGILCHGDKGEFTVADLTYRFNQEVQLCLLHHPPSASDAEMKWSVEKLQIPADMKISLYSFKTDAVVTIGERCLCWVDYYHGMLLIDVLAGSNNNSRLRYIPLPSKALKTGRVYKDGEPDSFRRLSVCDGGIIKLVCIITKEHPSPYPFTIETWTLVDIHQGRWEKDVNLTMGASEFFNLYNDTAKSRLPRVMPSFPVVSLVDPDVICFRLEDKFRDPFWMVQVNMRNKLLLSSSIYINEEEEEGYPPKRDCRNYFIFHDFIASKFSSYLSEDAIKSKTDATLLLGGLVQGFKISESRIK

SEQ ID NO: 194520 - protein, 520 aa, Zea Mays
MEGGPRSRRAKPTPNGKGVSPMRDSCLELSGKGVSSERDSGLELSKSPPPPPAPWWTDPSAPVTGDHSWLILDRIVHRSRKRCGDATTSALAHECVGRPIRASLRIADPPAVSRLYVHWTSIPAIDCMKEPVVIAAHHNSILFRVSVPFDDPCFWSRMIYFPDDYFVYSSSSSPPSLTRLPPCFTRVPLCFGGGRTDPELDKWLQPHRRQQQRTMIEEDMGILCHGDKGEFTVADLTYRFNQEVQLCLLHHPPSASDAEMKWSVEKLQIPADMKISLYSFKTDAVVTIGERCLCWVDYYHGMLLIDVLAGSNNNSRLRYIPLPSKALKTGRVYKDGEPDSFRRLSVCDGGIIKLVCIITKEHPSPYPFTIETWTLVDIHQGRWEKDVNLTMGASEFFNLYNDTAKSRLPRVMPSFPVVSLVDPDVICFRLEDKFRDPFWMVQVNMRNKLLLSSSIYINEEEEEGYPPKRDCRNYFIFHDFIASKFSSYLSEDAIKSRELSETMHKVKEASMAQKCEQATE

SEQ ID NO: 194521 - protein, 131 aa, Zea Mays
MNTRFLMVYVQYERSLETIIGHDQIIWLGGLNYRIMLSHQLVKALVEMRNSRERLGLEKSGTALTLTFSRLRGVHSPSRHPHHAAADPARGMTPSSPTWPRATQPQRPNPHVVADLASRLAATMPSWKLEG

SEQ ID NO: 194522 - protein, 122 aa, Zea Mays
MLNIRYCMYNYIYLCVDGPSISDFVQGLEKSGTALTLTFSRLRGVHSPSRHPHHAAADPARGMTPSSPTWPRATQPQRPNPHVVADLASRLAATMPSWKLEGMMSLPSLFFDGLLFVVPVHY

SEQ ID NO: 194523 - protein, 114 aa, Zea Mays
MLNIRYCMYNYIYLCVDGPSISDFVQGLEKSGTALTLTFSRLRGVHSPSRHPHHAAADPARGMTPSSPTWPRATQPQRPNPHVVADLASRLAATMPSWKLEGFTTYLCGADWHM

SEQ ID NO: 194524 - protein, 134 aa, Zea Mays
MSNISFLYFLVFDIFLSFIFGLSLECKETPCGCPIEPLPLYVKYLFPMRAASPIIFARGLEKSGTALTLTFSRLRGVHSPSRHPHHAAADPARGMTPSSPTWPRATQPQRPNPHVVADLASRLAATMPSWKLEG

SEQ ID NO: 194525 - protein, 154 aa, Zea Mays
MSNISFLYFLVFDIFLSFIFGLSLECKETPCGCPIEPLPLYVKYLFPMRAASPIIFARGLEKSGTALTLTFSRLRGVHSPSRHPHHAAADPARGMTPSSPTWPRATQPQRPNPHVVADLASRLAATMPSWKLEGMMSLPSLFFDGLLFVVPVHY

SEQ ID NO: 194526 - protein, 78 aa, Zea Mays
MLYLHVLHNIDIFCYTLSCCSPNYKSFMYLEKLKRLIIRRRVYNANIFLFHYPYFFTVIFYYIIGFRQITMILFVFLQ

SEQ ID NO: 194527 - protein, 87 aa, Zea Mays
MRAASPIIFARGLEKSGTALTLTFSRLRGVHSPSRHPHHAAADPARGMTPSSPTWPRATQPQRPNPHVVADLASRLAATMPSWKLEG

SEQ ID NO: 194528 - protein, 531 aa, Zea Mays
MRRIEHLKHHYKRYDQYTVLVRGIPTCPDHGAYGCYVDHFFSKHYRTYRSYQIVHDIGNIEALQKLASSIEKRIQRKRETSKCSLLGRIWSKFTSDATGIHNHEEKLKNVQDTIRLLQCENMLKQKEVPVAFVSFKSRLEAAQAAETQQLANPLSLVTTYAPEPTDTIWKNLSIPFWRMATYRLGVFAAAVLLTVFFTIPVTAVQGIAQFEKMKRWFPPARAVQLIPGLNSVVTGYLPGMILNGFIYLVPSAMLGMASFEGCVASSQREIRACDMVFYFLLGNVFFLSVLSGSLLDQIGESFTHPKNIPNRLASAVSAQSDFFITYILTNGMSGFSLEVLQFGLLIWQFLKARSIGHSEEPYLYGFPYFRVVPVVSIAILIGVVYAVVAPLLLPILLVYFLLGYAVYINQMEDVYEITYDTCGQYWPKIHHYIFLSIALMQVTMIGLFGLKSKPGASLATVPLLVLNILFNEYCKARFLPTFRHRPVQAANELDEAEGTTEGDVDDAICAYRPPWMRPTNLESSSVEPLNV

SEQ ID NO: 194529 - protein, 703 aa, Zea Mays
MDAEGLLASAAINLGLALVALSLFSLLKKQPGNAPVYRPRRMATGDLRADGGFLPLGHGRLTPSFRWIGAAFRLSEDDVLRRHGLDALVIVRLFKFGINCFSVCSIVGLLVLAPTNYTSEGRAEIRRSNSMELFTVTNVTRGSNRLWVHYSCLCFISLYVVYLLHKEYREITMRRIEHLKHHYKRYDQYTVLVRGIPTCPDHGAYGCYVDHFFSKHYRTYRSYQIVHDIGNIEALQKLASSIEKRIQRKRETSKCSLLGRIWSKFTSDATGIHNHEEKLKNVQDTIRLLQCENMLKQKEVPVAFVSFKSRLEAAQAAETQQLANPLSLVTTYAPEPTDTIWKNLSIPFWRMATYRLGVFAAAVLLTVFFTIPVTAVQGIAQFEKMKRWFPPARAVQLIPGLNSVVTGYLPGMILNGFIYLVPSAMLGMASFEGCVASSQREIRACDMVFYFLLGNVFFLSVLSGSLLDQIGESFTHPKNIPNRLASAVSAQSDFFITYILTNGMSGFSLEVLQFGLLIWQFLKARSIGHSEEPYLYGFPYFRVVPVVSIAILIGVVYAVVAPLLLPILLVYFLLGYAVYINQMEDVYEITYDTCGQYWPKIHHYIFLSIALMQVTMIGLFGLKSKPGASLATVPLLVLNILFNEYCKARFLPTFRHRPVQAANELDEAEGTTEGDVDDAICAYRPPWMRPTNLESSSVEPLNV

SEQ ID NO: 194530 - protein, 416 aa, Zea Mays
MVLRKPARKKPKDPSAVPAGGPGSRGRSGGMAPAPPAPNYMRATTCSGARSSAAAAPHPQPGREKAVLTAAALRACRATCSSAMKGPGAAGSADACPYAYCSFKGHAHAAAPVPPLGAFVAARRRLIKTQQRMKLKGASPFRNAAAGHGSGYFVEIRAGSDVTSSDLSSDEVGRTEHVVFGPLGCCGGDAEGSGAASVDGSCASSDVISAGSFEPSGTTKHRGLEEKKTLVDHGGEDMGDCRSDISEELDVKHGGNNPQGGVGGGAPKESSVDSVSSSLSGISFEDVSSACAYAAASSQQQNGSSIARRRRTSEQGVKRMRPFKPRLPNFLPSEKVDLKHQSVGDPRAAEEWMLDYALRKEVKKLARAQKRKVEMLVQAFESVMPTLANEKKPEQHDNGDNDKRTFTLAWPSQVCS

SEQ ID NO: 194531 - protein, 121 aa, Zea Mays
MGAALTAVCASSRDMTMAADCTSSRQSRSLLGSMCASPGTAPLKRRSEVSVRRMSSGVTPSTVRTLGSAWWSRSTATMSGHTISAATWSGVFPAGPAVWFTSAAPSSSSAFTTSRLQFSTA

SEQ ID NO: 194532 - protein, 311 aa, Zea Mays
MHVPDEDVLLSLGALRLDGHFSFHDVSAMARDFGNQCSFLPAAVLHPGSVSDIAATVRHVFSLGEGSPLTVAARGHGHSLMGQSQAAQGIVVRMESLRGPRLQVNDAGVSPPSVDAPGGELWINVLRETLKHGLAPKSWTDYLHLTVGGTLSNAGVSGQAFRHGPQVSNVNQLEIVTGRGDVVTCSPDDNADLFYAALGGLGQFGIITRARIALEPAPKMVRWIRVLYSDFESFTEDQEMLIMAENSFDYVEGFVIINRTGVLNNWRASFKPQDPVEASHFQSDGRVLYCLELTKNFNSDDTGVLGQGAHL

SEQ ID NO: 194533 - protein, 283 aa, Zea Mays
MVRWIRVLYSDFESFTEDQEMLIMAENSFDYVEGFVIINRTGVLNNWRASFKPQDPVEASHFQSDGRVLYCLELTKNFNSDDTDTMEQEVTVLLSRLRFIQSTLFHTDVTYLEFLDRVHTSELKLRAQGLWEVPHPWLNLLIPRSSIRRFAKEVFGKILKDSNNGPILLYPVNKSKWDNRTSVVIPDEEIFYLVGFLSSAPSLSGYGSIAHSMNLNKQIVEFCEEAGIGMKQYLAPYTTQQQWKAHFGARWETFERRKHRYDPLAILAPGQRIFPKASLPLPL

SEQ ID NO: 194534 - protein, 146 aa, Zea Mays
MILVWASIFGHSMGGHGALTIYLKNTDKYKSVSAFAPIANPINCPWGQKAFSNYLGSTKSDWEEYDATCLIKKNSKVPTTILIDQGEADKFLAEQQLLPHKFEEACKAAGAALTLRMQPGYDHSYYFIATFVDDHIAHHAQFLKSA

SEQ ID NO: 194535 - protein, 165 aa, Zea Mays
MYDYIVKELPKVLSDNFEQLNTSQASIFGHSMGGHGALTIYLKNTDKYKSVSAFAPIANPINCPWGQKAFSNYLGSTKSDWEEYDATCLIKKNSKVPTTILIDQGEADKFLAEQQLLPHKFEEACKAAGAALTLRMQPGYDHSYYFIATFVDDHIAHHAQFLKSA

SEQ ID NO: 194536 - protein, 330 aa, Zea Mays
MLPKNVTDTELTDLFSKYGNVTDLQILRGSQQTNKAGCAFIKYQTKDQALAAIEALNGKHKIEGSSVPLVVKWADTEKERQARKAQKAQSQLSHIPNASPMQQHSSVFGALQMGYMPQYNGFGYQPPGTYGLMQYPLSPMQNQGPFQNMVQPLNQGNSIRGVNPEVSPSSVQRSFNAMQLGSPYPAMPGMQYPGSYPGGPMGNRHLGNSHNPIKAPNSNANSTVSSSPSSNAGGQVEGPPGANLFIYHIPQEYGDQELSSAFQSFGRVVSAKVFVDKATGVSKCFGFVSYDSPASAQAAINRMNGYQLGGKKLKVQLKRENNTKHSSKPF

SEQ ID NO: 194537 - protein, 175 aa, Zea Mays
MGVTVAEAFVQEAPSTNARPRPRDTTGYLRHRQCPDIPHKPSQKGIDTPAGYHSSRRATTDTTPSGRAHGAMRRASHCRRPGSLHACTPRRQQGNREQAEHRARGPQKPPKGPTNRQAAGPASRRQHRCTRPRPAAAPTCTLVDSAEQPSDVQDTDDRRASTITPADVRTPPAGW

SEQ ID NO: 194538 - protein, 748 aa, Zea Mays
MDAEAGVAGADQLPRRQYYLNLLLLAYQSFGVVYGDLSTSPLYVYKSTFSGKLRHYQDEETVFGVLSLIFWTFTLIPLLKYVIIVLSADDNGEGGPFALYSLLCRHAKLSLLPNQQAADEELSSYYRNGFAPRNGSSPWSRRFLEKHKKMRTLFLLIVLCGASMVIGDGVLTPAISVLSSMSGLHVRATGLHHSSVVLLSCIVLVGLFALQHRGTQKVAFMFAPIVIIWLLSIGGIGLYNILHWNPNVYQALSPYYMVKFFRKTGKDGWIALGGILLSMTGSEAMFADLGHFTSASVRVAFITVIYPCLMLQYMGHAAFLSKNTFHMPTGFYDTIPEPVFWPVFVVATLAAVVGSQAVISATFSIVKQCHALGCFPRVKVVHTSRWIYGQIYIPEINWILMVLCVAVTIAFRDTTLIGNAYGIACMTVMLVTTFLMALIVIFVWQRNIIFSLVFLVFFGSIEAVYLSSSLMKVPQGGWVPLVLAFIFMSVMYIWHYGSRRKYQFDLQNKVSMRSILSLGPSLGIVRVPGVGLIYTELVTGVPSIFSHFVTNLPAFHEVLVFLCVKSVPVPYVSPDERYLVGRIGPKEYRMYRCIVRYGYKDVQRDDDNFENMLVMSIAKFIMMEAEDASSASYDIANEGRMAVITTTDASGSPLAMRDFDGLADSMSTRSSKSESLRSLQSSYEQESPSVNRRRRVRFEVPEEDGMGQQVKEELTALVEAKHAGIAYIMGAFLYQSQEELKFPEEVCY

SEQ ID NO: 194539 - protein, 583 aa, Zea Mays
MRTLFLLIVLCGASMVIGDGVLTPAISVLSSMSGLHVRATGLHHSSVVLLSCIVLVGLFALQHRGTQKVAFMFAPIVIIWLLSIGGIGLYNILHWNPNVYQALSPYYMVKFFRKTGSEAMFADLGHFTSASVRVAFITVIYPCLMLQYMGHAAFLSKNTFHMPTGFYDTIPEPVFWPVFVVATLAAVVGSQAVISATFSIVKQCHALGCFPRVKVVHTSRWIYGQIYIPEINWILMVLCVAVTIAFRDTTLIGNAYGIACMTVMLVTTFLMALIVIFVWQRNIIFSLVFLVFFGSIEAVYLSSSLMKVPQGGWVPLVLAFIFMSVMYIWHYGSRRKYQFDLQNKVSMRSILSLGPSLGIVRVPGVGLIYTELVTGVPSIFSHFVTNLPAFHEVLVFLCVKSVPVPYVSPDERYLVGRIGPKEYRMYRCIVRYGYKDVQRDDDNFENMLVMSIAKFIMMEAEDASSASYDIANEGRMAVITTTDASGSPLAMRDFDGLADSMSTRSSKSESLRSLQSSYEQESPSVNRRRRVRFEVPEEDGMGQQVKEELTALVEAKHAGIAYIMGAFLYQSQEELKFPEEVCY

SEQ ID NO: 194540 - protein, 434 aa, Zea Mays
MDAEAGVAGADQLPRRQYYLNLLLLAYQSFGVVYGDLSTSPLYVYKSTFSGKLRHYQDEETVFGVLSLIFWTFTLIPLLKYVIIVLSADDNGEGGPFALYSLLCRHAKLSLLPNQQAADEELSSYYRNGFAPRNGSSPWSRRFLEKHKKMRTLFLLIVLCGASMVIGDGVLTPAISVLSSMSGLHVRATGLHHSSVVLLSCIVLVGLFALQHRGTQKVAFMFAPIVIIWLLSIGGIGLYNILHWNPNVYQALSPYYMVKFFRKTGSEAMFADLGHFTSASVRVAFITVIYPCLMLQYMGHAAFLSKNTFHMPTGFYDTIPEPVFWPVFVVATLAAVVGSQAVISATFSIVKQCHALGCFPRVKVVHTSRWIYGQIYIPEINWILMVLCVAVTIAFRDTTLIGNAYGRMGASCACIHIHVSHVHLALWVKEEVPV

SEQ ID NO: 194541 - protein, 61 aa, Zea Mays
MQSSPHVRTLKAVVSTPLPMATSPSLLLFLPQQHPFLSLCEQQHAGAVQCPRRTPCVRRED

SEQ ID NO: 194542 - protein, 107 aa, Zea Mays
MGAQVSSPWWQTPCKARPMSELRRQSSLLLSPWRLRLHCFYFFPSSTPSCLYASSSTPEQSNVHDARHVFDGRIDQSSSSFFIRDTASFCTTMRLCSYLGVLFLGVD

SEQ ID NO: 194543 - protein, 269 aa, Zea Mays
MGSGEEPSQMRRALVDSLAGAISGGISRTVTSPLDVIKIRFQVQLEPTTSWGILRRDVYGPSKYTGLLQATKDILREEGLPGFWRGNVPALFMYMPYTAIQFTVLHKLKTFASGSSRTEDHLDLSPYLSYVSGAIAGCTATIGSYPFDLLRTILASQGEPKVYPNMRSAFIDIIKTRGVQGLYSGLSPTLVEIIPYAGLQFGSYDTFKRSMMTWNRYKYSHLSFGSEDDSVSSFQLFLCGFAAGTFSKAACHPLDVVKKRFQDRVQGWS

SEQ ID NO: 194544 - protein, 334 aa, Zea Mays
MGSGEEPSQMRRALVDSLAGAISGGISRTVTSPLDVIKIRFQLEPTTSWGILRRDVYGPSKYTGLLQATKDILREEGLPGFWRGNVPALFMYMPYTAIQFTVLHKLKTFASGSSRTEDHLDLSPYLSYVSGAIAGCTATIGSYPFDLLRTILASQGEPKVYPNMRSAFIDIIKTRGVQGLYSGLSPTLVEIIPYAGLQFGSYDTFKRSMMTWNRYKYSHLSFGSEDDSVSSFQLFLCGFAAGTFSKAACHPLDVVKKRFQIEGLKRHPRYGAPIESSTYKGMYHALKEIVVKEGFGGLYKGLFPSLVKSAPAGAVTFVVYEYISDWIGCKAGVE

SEQ ID NO: 194545 - protein, 340 aa, Zea Mays
MGSGEEPSQMRRALVDSLAGAISGGISRTVTSPLDVIKIRFQVQLEPTTSWGILRRDVYGPSKYTGLLQATKDILREEGLPGFWRGNVPALFMYMPYTAIQFTVLHKLKTFASGSSRTEDHLDLSPYLSYVSGAIAGCTATIGSYPFDLLRTILASQGEPKVYPNMRSAFIDIIKTRGVQGLYSGLSPTLVEIIPYAGLQFGSYDTFKRSMMTWNRYKYSHLSFGSEDDSVSSFQLFLCGFAAGTFSKAACHPLDVVKKRFQIEGLKRHPRYGAPIESSTYKGMYHALKEIVVKEGFGGLYKGLFPSLVKSAPAGAVTFVVYEYISDWLESILYPPFFSC

SEQ ID NO: 194546 - protein, 471 aa, Zea Mays
MENDCSTGGPSGESTSYQFNENNWLSSEQTANNYFSRTFSSGVVPTEWGRPNAPLWGGRVIGRRQVRCIRGSSCLSTDEYNTFMNIFERGSLLYCNMSFDALLSVRKQLEEFGFPCKAVNDGLWLQMLLCHRVQAIVADTCRNCCLTNNSCACKQAYVSSHTHHYRQEHDRSSVSGTIGNVYLADAQGDGNGVLGPVRVNVRGAVDGLAGIGRGNSNVPGAAWAPTRYVFSRVPYGLGSRNAQQFANDESEPRIDRNGDISADGLTALVNLSQENSAAHPQAESLFETGMQTRYHSVASVSTPGGSSVQMQESKEHDWETAEDATISLDMKTPLSHFPPFRFGLADGHVKHSTEVFYAGSLWKVSVQAFNDEDPHGRRTLGLFLHRRKAELLDPLRKAHLYVDPREKVTARYQLICPSKREVMVFGCLKQAGTLLPKAPKGWGWRTAILFDELADLLQGGALRIAAVVQLV

SEQ ID NO: 194547 - protein, 705 aa, Zea Mays
MLHGPWREAGAPTVVLHIDDANVDSEAIAIALAYLYGQAPKLNDNNAFRVLAAASFLDLQDLCTICTDFIISELWTSNFLQYQLFAESQDYGSHGERVRNACWGYLCQSATLELREVLPKLSSQTLHALLTSDELWVPNEEKRFELALFTLLAKVTTCEIQVSGNETSLPSADRSMRKGKAPMNESGEELLMDSKLQNLKLHDNSGNEIPHNIIAISDMNGEAPKRMENDCSTGGPSGESTSYQFNENNWLSSEQTANNYFSRTFSSGVVPTEWGRPNAPLWGGRVIGRRQVRCIRGSSCLSTDEYNTFMNIFERGSLLYCNMSFDALLSVRKQLEEFGFPCKAVNDGLWLQMLLCHRVQAIVADTCRNCCLTNNSCACKQAYVSSHTHHYRQEHDRSSVSGTIGNVYLADAQGDGNGVLGPVRVNVRGAVDGLAGIGRGNSNVPGAAWAPTRYVFSRVPYGLGSRNAQQFANDESEPRIDRNGDISADGLTALVNLSQENSAAHPQAESLFETGMQTRYHSVASVSTPGGSSVQMQESKEHDWETAEDATISLDMKTPLSHFPPFRFGVEFDDVHRLADGHVKHSTEVFYAGSLWKVSVQAFNDEDPHGRRTLGLFLHRRKAELLDPLRKAHLYVDPREKVTARYQLICPSKREVMVFGCLKQAGTLLPKAPKGWGWRTAILFDELADLLQGGALRIAAVVQLV

SEQ ID NO: 194548 - protein, 509 aa, Zea Mays
MEDWLFYSLTTLLCLLCSLILRARTPGKKARNADSSSPLPPLPPGPTPLPVLGPLLFLARRDFDIEPVLRRIARDHGKVFTFAPLGRARPGIFVADRGAAHRALVQRGAAFASRPPSTASSAVLTSGGRNVSSSPYGATWRALRRNLASGVLNPARLRAFSPARRWVLGVLARRVRADGRHGEAPVAVMEPFQYAMFCLLVHMCFGGDRLGDDARVRDIEATQRELLGSFLSFQVFSFLPWVTKLVFRRRWEKLVSLRRRQEELFVPLIQARREAADGRRDREPLLRVPQRRHRHDGHRAAVDPGEPGEEPGDAGQAPGRGVQRRRRRRRRGAGGGAAGDAVPQGRGAGGAPAPPAGPLRAPARRARGHDAGRVPRARRRARQLRGGGHRDGRGGVEGPRGVPAGAVPARRRGGRRGPHRQQGDQDDAVRRRAPGLPRHGAGAAAPRVLRGQPREGVRLAPGRRRGGGPHREARVHRRHEAAAQGQGRAAAAAAARRRSCLIERGLPSE

SEQ ID NO: 194549 - protein, 284 aa, Zea Mays
MAEANAGKEKKEVVRLERESVIPIMKPKLTMKLAYLIEHQSDREEFLKLCRRVEYTIRAWYHLQFDDMMELFALFDPVHGAKKLEQQNFLPEEIDTLEQNFLSYFFRVMEKSNFNIVNDDEVELAHSGQYLLNLPIKVDESKLDDKLLSKYFKEHRHENLPDFSDKYVIFRRGIGLDRTSNFFFMEKVDMIIARAWRRFLEKTRLQKLFSRKKNSKPKIDSKKNDDLASEIEDKELYVERIRLETMDLSFGNLFGKVTIQEPTFEESALICNIFLQEKKSKGPG

SEQ ID NO: 194550 - protein, 274 aa, Zea Mays
MAEANAGKEKKEVVRLERESVIPIMKPKLTMKLAYLIEHQSDREEFLKLCRRVEYTIRAWYHLQFDDMMELFALFDPVHGAKKLEQQNFLPEEIDTLEQNFLSYFFRVMEKSNFNIVNDDEVELAHSGQYLLNLPIKVDESKLDDKLLSKYFKEHRHENLPDFSDKYVIFRRGIGLDRTSNFFFMEKVDMIIARAWRRFLEKTRLQKLFSRKKNSKPKIDSKKNDDLASEIEDKELYVERIRLETMDLSFGNLFGKVTIQEPTFEEEKKSKGPG

SEQ ID NO: 194551 - protein, 62 aa, Zea Mays
MSDAAWYWQPSLGTSVLMAQCHGVACRVFDVMSELDMYSILLAGAMTYPVFLELVLKLKSPS

SEQ ID NO: 194552 - protein, 275 aa, Zea Mays
MKATIADLEAEAKFFEFTATEASEGLVEIREEYDEDLETNSSRSEASVATVVMSDKDREHARIMARLDELEREEKDAGSACEDDNDGDDDDGDAGTSDDGEENKESGNALSDVNEDYSSGFGASFSGSGGNDRSHGNIKKPGGDEMLIGISHKPSSHTSHLAFPGQTSATNSDVRVHTKAVTFEDDKYVVSSSKSPPLLLDSIQSDPVLKNSSDPALSRDRKIISSGRKAFTGSIIEHDDNVSTIEPSVASSLAKPGTCASSRPVSRFKMQKGGR

SEQ ID NO: 194553 - protein, 279 aa, Zea Mays
MKATIADLEAEAKFFEFTATEASEGLVEIREEYDEDLETNSSRSEASVATVVMSDKDREHARIMARLDELEREEKDAGSACEDDNDGDDDDGDAGTSDDGEENKESGNALSDVNEDYSSGFGASFSGSGGNDRSHGNIKSALKKPGGDEMLIGISHKPSSHTSHLAFPGQTSATNSDVRVHTKAVTFEDDKYVVSSSKSPPLLLDSIQSDPVLKNSSDPALSRDRKIISSGRKAFTGSIIEHDDNVSTIEPSVASSLAKPGTCASSRPVSRFKMQKGGR

SEQ ID NO: 194554 - protein, 290 aa, Zea Mays
MNSWRGQELEAQVEAMKATIADLEAEAKFFEFTATEASEGLVEIREEYDEDLETNSSRSEASVATVVMSDKDREHARIMARLDELEREEKDAGSACEDDNDGDDDDGDAGTSDDGEENKESGNALSDVNEDYSSGFGASFSGSGGNDRSHGNIKKPGGDEMLIGISHKPSSHTSHLAFPGQTSATNSDVRVHTKAVTFEDDKYVVSSSKSPPLLLDSIQSDPVLKNSSDPALSRDRKIISSGRKAFTGSIIEHDDNVSTIEPSVASSLAKPGTCASSRPVSRFKMQKGGR

SEQ ID NO: 194555 - protein, 274 aa, Zea Mays
MKATIADLEAEAKFFEFTATEASEGLVEIREEYDEDLETNSSRSEASVATVVMSDKDREHARIMARLDELEREEKDAGSACEDDNDGDDDDGDAGTSDDGEENKESGNALSDVNEDYSSGFGASFSGSGGNDRSHGNIKSALKKPGGDEMLIGISHKPSSHTSHLAFPGQTSATNSDVRVHTKDDKYVVSSSKSPPLLLDSIQSDPVLKNSSDPALSRDRKIISSGRKAFTGSIIEHDDNVSTIEPSVASSLAKPGTCASSRPVSRFKMQKGGR

SEQ ID NO: 194556 - protein, 294 aa, Zea Mays
MNSWRGQELEAQVEAMKATIADLEAEAKFFEFTATEASEGLVEIREEYDEDLETNSSRSEASVATVVMSDKDREHARIMARLDELEREEKDAGSACEDDNDGDDDDGDAGTSDDGEENKESGNALSDVNEDYSSGFGASFSGSGGNDRSHGNIKSALKKPGGDEMLIGISHKPSSHTSHLAFPGQTSATNSDVRVHTKAVTFEDDKYVVSSSKSPPLLLDSIQSDPVLKNSSDPALSRDRKIISSGRKAFTGSIIEHDDNVSTIEPSVASSLAKPGTCASSRPVSRFKMQKGGR

SEQ ID NO: 194557 - protein, 105 aa, Zea Mays
MWIQCLPKGVSLGRKLSGERVDHMTIFSNTDMAWTRSAATWYWNPCKHGCMDLDGFMDGWMDGKVTAGKSCSDRIFFQGETGNGRCCFRTRLSDLDFEFSFVTNV

SEQ ID NO: 194558 - protein, 584 aa, Zea Mays
MRQLSNVPSSVISSQSMHLGVLATAWHAINTKSMFTVYYKPRTSPSEFIIPYDQYMESVKNNYSIGMRFRMRFEGEEAPEQRFTGTIVGCENLDPLWPDSSWRYLKVRWDEPSTIPRPDKVSPWKIEPASSPPVNPLPLSRGKRPRQNAPPPSPESSVLTKEGATKIDTDSAQTPHQNSVLQSQEQMSFRNNLTESTDSDSTVQKQMMWSPSPNGKVHTNFQPRPAMDNWMPLGRRETDFKDTRSAFKDARTASQSFGDTQGFFMQAYDDSRHRLSFNNQFQDQGSAHRFADPYFYMPQQPSLTVESGTRTQTANNDLRFWSERNSMYGNPSDQQQGFSFGQNTSSWLNQPLPQVEQSRVVRPHATVAPFDLEKTREGSGFKIFGFQVDTTNPSPVQLSSPLSAIREHVVQTRPSAPVNELQPVQIECLPEVSVSTAGTAAENIQQVQQSSKDIQSKSQGASTRSCTKVHKQGVALGRSVDLSKFTDYGELKAELDKMFEFEGELVSANRNWQIVYTDNEGDMMLVGDDPWDPLLTSREFCNIVRKIYIYTKEEVQKMNSKSSVPRKEEPPAAGEGCAAAAANE

SEQ ID NO: 194559 - protein, 724 aa, Zea Mays
MPPAAMALPSQAPSNSGDPLYPELWRACAGPLVTVPRVGDLVFYFPQGHIEQVEASMNQVAGNPMRLYDLPSKLLCRVLNVELKAETDTDEVYAQIMLMPEPEQNDVAAEKTSSGSAAPPRPAVRSFCKTLTASDTSTHGGFSVLRRHADECLPALSPPTQELVAKDLHGMEWRFRHIFRGQPRRHLLQSGWSVFVSSKRLVAGDAFIFLRGENGELRVGVRRAMRQLSNVPSSVISSQSMHLGVLATAWHAINTKSMFTVYYKPRTSPSEFIIPYDQYMESVKNNYSIGMRFRMRFEGEEAPEQRFTGTIVGCENLDPLWPDSSWRYLKVRWDEPSTIPRPDKVSPWKIEPASSPPVNPLPLSRGKRPRQNAPPPSPESSVLTKEGATKIDTDSAQTPHQNSVLQSQEQMSFRNNLTESTDSDSTVQKQMMWSPSPNGKVHTNFQPRPAMDNWMPLGRRETDFKDTRSAFKDARTASQSFGDTQGFFMQAYDDSRHRLSFNNQFQDQGSAHRFADPYFYMPQQPSLTVESGTRTQTANNDLRFWSERNSMYGNPSDQQQGFSFGQNTSSWLNQPLPQVEQSRVVRPHATVAPFDLEKTREGSGFKIFGFQVDTTNPSPVQLSSPLSAIREHVVQTRPSAPVNELQPVQIECLPEVSVSTAGTAAENIQQVQQSSKDIQSKSQGASTRSCTKVLFFSVFMTMHLSIFNVHVIGNILSAIGSFGY

SEQ ID NO: 194560 - protein, 641 aa, Zea Mays
MANMDSVVVMEVAPVPIPTFMDATPLNPPLPLVVEELVLRRSARYLNRPTRPNYADQEPPKNPGGRGRGKRKRDEEKPELAAQQGTKTPGRNDSNVEAGERKPMPVTAAVPACCAGVAAEDDATPTGKSAKLRVKETLRAFNSHYLHFVQEEQKRAQAAIQEIEAKGGLKRQTKGGKKKSSKQEAEAEEKEKRPSKRPDLKAITKKEYANLTFPLATCIVMSGIYEDDLDKADEIIYTGQGGNDLLGNHRQIGSQQLKRGNLALKNSRKNGNPVRVIRGHLSKNSYTGKVYTYDGLYKVVDDWVQNGVQGHVVFKFKLKRLEGQPSLTTSEVRFTRAEAPTTISELPGLVCDDISGGQENIPIPATNLVDDPPVPPSGFTYLKSLKIPKDIKIPSSIIGCDCEGDCASNKNCSCAQRNGSDLPYVSYKNIGRLVEPKAVVFECGANCSCNHDCVNRTSQQGLQYHLEVFKTASKGWGVRTWDTILPGAPICEYTGVLRRTEDLDGSQNNYCFDIDCLQTMKGLDGREKRAGSEMHLPNLYPENDSDAPPAPEYCIDGSSIGNFARFINHSCQPNLFVQCVMSSHNDVKLAKVMLFAADTILPLQELSYDYGYRLDSVVGPDGKIVKLPCHCGAPDCRKRLY

SEQ ID NO: 194561 - protein, 240 aa, Zea Mays
MITTRTPTLSTAASLLLTHRHRILAARTLSVSVSAAAGSSSIPVKVLWDKQLKTVVNNESSEIIRMLNAEFNGIARNPGLDLYPAHLRASIDEANELVYDAINNGVYKCGFAKKQGPYDEAVTRLYEALDRCEEILGKRRYICGDQLTEADIRLFVTLIRFDEVYAVHFKCNKKLLREYPNLFNYTKDIYQIPGISSTVNMEHIRKHYYGSHPSINPYGIIPAGPNIDYNAPHDRERFSA

SEQ ID NO: 194562 - protein, 85 aa, Zea Mays
MMSSTSTFSGKGSTAHDPGSPSPASPKGVCVPSSRSRIGSLSHFPVVLCSGISQVDYLNSILRELHLSMACISFYCDSHDWELVG

SEQ ID NO: 194563 - protein, 66 aa, Zea Mays
MLLMQERNKAPALIMALQLNFKIWSAERVHKTIPNPMLNRVYPKNLKILVKISHNIPMKKAGCRTW

SEQ ID NO: 194564 - protein, 64 aa, Zea Mays
MGPPKPVGAGHHPMGCHINCHREVGTRHSVRSRCGLIGSLKQRRLPFNVVICYGFMEFIRLLAL

SEQ ID NO: 194565 - protein, 540 aa, Zea Mays
MRAAATSKYSPCAAFRCCSAGDWRAACLRGYSVSSTSSPPPRSRLPHLSPADDDDDPPAAARAPQISRSVPWSRQDEGSMKPTAGASGKGGAVYPSLPRLKCQECRRALVVVGVESYADRLPAHAAPGNHASSVQDSVMGASKMDNSYVVLSRQNKVQGPRIPPRPGSAVAAHTDPNQSTRAIEGSYIVLPPPSASIYKKSASEGGGAQLTPPGGNSSSPLSGNNSGFHSSVTVLKRAFEVASSQTQQEPYNILSETDFQKEKQKIEEEEKKLKCAIEEAEKQYSEVSSEMKDLEIKSKQFEELEERYWHEFNSFQFQLTSHQEERDAVFAKIGVSQVHLEMLKHTNVLNDAFYISCDEVIARINNFRLGRLPNVEVEWDEINVAWGQAALLLHTMAHYFTPKFRYRIKIHPMGSYPRVTDIHNHTYELFGPVNLFWSTRFDKAMTWFLTCLQEFAEFAISLDKENNVPPEKTLKLPHKIDGDKVGNHTIVLSFNQDETWTKALKYMLYDLKFVLSWFIGNTSFAPPSRSLHTQFLKNKS

SEQ ID NO: 194566 - protein, 453 aa, Zea Mays
MRAAATSKYSPCAAFRCCSAGDWRAACLRGYSVSSTSSPPPRSRLPHLSPADDDDDPPAAARAPQISRSVPWSRQDEGSMKPTAGASGKGGAVYPSLPRLKCQECRRALVVVGVESYADRLPAHAAPGNHASSVQDSVMGASKMDNSYVVLSRQNKVQGPRIPPRPGSAVAAHTDPNQSTRAIEGSYIVLPPPSASIYKKSASEGGGAQLTPPGGNSSSPLSGNNSGFHSSVTVLKRAFEVASSQTQVEQPLCLECMRVLSDKMDKEIEDCNADIKSYEACLQRLQQEPYNILSETDFQKEKQKIEEEEKKLKCAIEEAEKQYSEVSSEMKDLEIKSKQFEELEERYWHEFNSFQFQLTSHQEERDAVFAKIGVSQVHLEMLKHTNVLNDAFYISCDEVIARINNFRLGRLPNVEVEWDEINVAWGQAALLLHTMAHYFTPKFRYPFVFSQQL

SEQ ID NO: 194567 - protein, 538 aa, Zea Mays
MRAAATSKYSPCAAFRCCSAGDWRAACLRGYSVSSTSSPPPRSRLPHLSPADDDDDPPAAARAPQISRSVPWSRQDEGSMKPTAGASGKGGAVYPSLPRLKCQECRRALVVVGVESYADRLPAHAAPGNHASSVQDSVMGASKMDNSYVVLSRQNKVQGPRIPPRPGSAVAAHTDPNQSTRAIEGSYIVLPPPSASIYKKSASEGGGAQLTPPGGNSSSPLSGNNSGFHSSVTVLKRAFEVASSQTQVEQPLCLECMRVLSDKMDKEIEDCNADIKSYEACLQRLQQEPYNILSETDFQKEKQKIEEEEKKLKCAIEEAEKQYSEVSSEMKDLEIKSKQFEELEERYWHEFNSFQFQLTSHQEERDAVFAKIGVSQVHLEMLKHTNVLNDAFYISCDEVIARINNFRLGRLPNVEVEWDEINVAWGQAALLLHTMAHYFTPKFRYRIKIHPMGSYPRVTDIHNHTYELFGPVNLFWSTRFDKAMTWFLTCLQEFAEFAISLDKENNVPPEKTLKLPHNHTVRLFWSVCCGSLSEEGET

SEQ ID NO: 194568 - protein, 119 aa, Zea Mays
MEGGGHPTHADEEPPKEKAPPPKEKAAQGNLFISGCLDLLELNLVRLETVRHMLMITVTLSKKPLDTSSPGFPAYPYYSISTLRGPDARGIKEIWHNYCPWSVCTSSSTFLCCSYGHGC

SEQ ID NO: 194569 - protein, 242 aa, Zea Mays
MEGGGHPTHADEEPPKEKAPPPKEKAAQGNLFISVRHMLMITVTLSKKPLDTSSPGLGALMLGESRKYGTTIVPGLYAPVHLHFFVARMDMAVDCKLNEVHNQVVEVNVKVESAGTHNMHNNDFYAKEKLLKSMRDCDPSSLRHWILWQRKFQAPLQHYTALMDLQDYSENGTVTVVYRVILKGTDGEAYRDATGTTQFHEGRREDAVAAAEEAAFSKACAWFGFGLYLYHQDESHYDDHFH

SEQ ID NO: 194570 - protein, 140 aa, Zea Mays
MAAAVAAPPIPAPNHTPLPSSLTSSRPHSQLKELSRNREPHHRIRSSRVAGMVVAELTMTARWCRTPHRRRHRANDGEQGFSRDAGLAMEAIHSLSASKSSYPMVDLTQLFMTATQERKRLESQGQILRVICTSMGTRRH

SEQ ID NO: 194571 - protein, 191 aa, Zea Mays
MASMAFALAGAFKGLSLAPTTTTSSFPRCDRASLSVGGAAGVPVPVPARRLTIQMAHKKGAGSTKNGRDSKGQRLGVKIYGDQLAKPGAIIIRQRGTRVYPGNNVGMGKDHTLFSLIDGLVKFEKYGPDKKKVSVYPYEKEPENPNSYRARKREYFRMRRERKKARAEGAAEPQLVLAAVDENSEMSGKQM

SEQ ID NO: 194572 - protein, 136 aa, Zea Mays
MASMAFALAGAFKGLSLAPTTTTSSFPRCDRASLSVGGAAGVPVPVPARRLTIQMAHKKGAGSTKNGRDSKGQRLGVKIYGDQLAKPGAIIIRQRGTRVYPGNNVGMGKDHTLFSLIDGLVKFEKYGPDKKKCLPI

SEQ ID NO: 194573 - protein, 822 aa, Zea Mays
MLGVLRTADSSPSRFDMECNRDDAVRSKDIAETKFRENDITGAKKFALKAKALFETLEGIDQMIVALDVHVRAQTKIAGENDWYGILEVPPMADEEAIKKKYKKLAFQTHPDKNSSVCAKAAFNLISDAWNVLSNTAKRTVYDHRRRVHALGVHQNNFKATARKNSNSSMSSVDRFCARRREVAPHLAHEGIETFWTLCWSCLMNFQYSREYFNHHLKCHNCHAVFVAAEVRPPSVQIYPTEPMPMSTNNNIGGNTVPGMVAPGVQAGVSQGNQNCDPTVFKSATCAKSTKHTVQQTHDSIRKDDAAGASIPANEEANCTKVLQHAARKHAHAVSSARRANAATREHEAAKRKHANAGKQGTWQSAASYPDGDGCKPVFPVKRKPRSTSETSGAKKHKVSSGDFNCESSSDVGRTSFGRVLMKLDVRSILIEKGKLQAQKLQELSSKKANVKKKQKMQNGKKSSRKGVCNIENEVNKIEMKQSSSSVDPKKDVLELVSRRVDSEEKERQKSSKQVGLKEKLKSWPVPEVRIVYTRRNRKQHKKELGDEVTGATPGTEHHMPARYGCLNQVCPDAGSDKIPVPDADFYSVPDADFSSFGDHSESSFQNDQVWAMYDEEDGMPRYYALIRKVISTRPFKVRLVHLKANDSNEFGASSWLSCGYSKTCGEFKFDVSKHTDQVNIFSHKVKYDKGPGGIIRIFPKKGDIWALYQNWSPDWDQFTADDMIYKYELVEILDSYSPSRGISVMPIVKVPGFVSVFKPVHNATRSWRIPREEMMCFSHQVPFHVLTGEEAHNAPKGCYELDPGSTPQELLHVVPPSGDAK

SEQ ID NO: 194574 - protein, 149 aa, Zea Mays
MTMPRKQTQRDLRRMEKAERAAQLERNIENELKERLNKGVYADIYNVPFKAFDEVLDMERDEVVLEEEEEEEGEVYVEGDDMEEMDDMEDFEGLSDGGTDEDDVLDDPVSKKPKGSSSYSKQNVGKRSRKVMTEVEEDEEINTRQRQRA

SEQ ID NO: 194575 - protein, 278 aa, Zea Mays
MSDDVVWHCIRHNHCSFMSKITTGIFCRNPYNATGICNRSSCPLANSRYATIRDHEGIFYLYMKTAERAHLPNKLWERVKLPKNYEKAMEVINKHLEFWPKLLVHKIKQRLTKMTQYRIRMRKLQLKVREKVMTMPRKQTQRDLRRMEKAERAAQLERNIENELKERLNKGVYADIYNVPFKAFDEVLDMERDEVVLEEEEEEEGEVYVEGDDMEEMDDMEDFEGLSDDEDDVLDDPVSKKPKGSSSYSKQNVGKRSRKVMTEVEEDEEINTRQRQRA

SEQ ID NO: 194576 - protein, 266 aa, Zea Mays
MLELKMSSAVVAIESKPGGILTSRDILMRVIAQNLPPESTTVEKVMTQCPECASVDTPILDALHTMHDGKFLHLPVLDRDGNVVTVVDVLHITHAAIATVGNSGAAGSESTSAMMQRFWDSAMSIGPLDDDDDSTRSEGSTKVASEAADIGRSALFPASALSNTFGFKIQDKQGRMHRFNCETSSLTDLITSILQRVGDDIDRKHLPQILYEDEDHDKVILSSDSDLIAAVDHARQIGWKVASFPKQRCALVSCPKMLIDAPLCRA

SEQ ID NO: 194577 - protein, 295 aa, Zea Mays
MLELKMSSAVVAIESKPGGILTSRDILMRVIAQNLPPESTTVEKVMTQCPECASVDTPILDALHTMHDGKFLHLPVLDRDGNVVTVVDVLHITHAAIATVGNSGAAGSESTSAMMQRFWDSAMSIGPLDDDDDSTRSEGSTKVASEAADIGRSALFPASALSNTFGFKIQDKQGRMHRFNCETSSLTDLITSILQRVGDDIDRKHLPQILYEDEDHDKVILSSDSDLIAAVDHARQIGWKSLRLHLDYARRKRGDGSSDFEYAGKDAWASAYSAVAAGAALVAGLGVMAYLKRSG

SEQ ID NO: 194578 - protein, 354 aa, Zea Mays
MDGGAGAGRRSVPSSSGFRRRVPPAENGHGHDAPPPSRRSSASLSRGHSTPLTGERTVKRLRLSKALTIPDHTTVHEACRRMASRRVDAVLLTDSNALLCGILTDKDITTRVIARELKMEETLVSKVMTRNPVFVLADTLAVEALQKMVQGKFRHLPVVENGEVIAILDIAKCLYDAIARMERAAEKGKAIAAAVEGVEKHWGTAVSGPNNFIETLRERMFRPSLSTIISENSKVVTVVPSDTVLTASKKMLELKMSSAVVAIESKPGGILTSRDILMRVIAQNLPPESTTVEKVMTQCPECASVDTPILDALHTMHDGKFLHLPVLDRDGNVVTVVDVLHITHAAIATRGSWI

SEQ ID NO: 194579 - protein, 372 aa, Zea Mays
MMLLHGWKGRRRKEKRSPLLLRALKSIGEQLYLVLTILLRLFENGCLGHHCLPLSLRIQSRVVTVVPSDTVLTASKKMLELKMSSAVVAIESKPGGILTSRDILMRVIAQNLPPESTTVEKVMTQCPECASVDTPILDALHTMHDGKFLHLPVLDRDGNVVTVVDVLHITHAAIATVGNSGAAGSESTSAMMQRFWDSAMSIGPLDDDDDSTRSEGSTKVASEAADIGRSALFPASALSNTFGFKIQDKQGRMHRFNCETSSLTDLITSILQRVGDDIDRKHLPQILYEDEDHDKVILSSDSDLIAAVDHARQIGWKSLRLHLDYARRKRGDGSSDFEYAGKDAWASAYSAVAAGAALVAGLGVMAYLKRSG

SEQ ID NO: 194580 - protein, 121 aa, Zea Mays
MTDILQVLMPWKFNGCHALFVIDHVKKHVTFIDFTPTQDWCKHMSYKRFAEAIIMTSKKYKIAYSKKCSRWAEDIFKWEHTIQTSVPIDLRGFNTSYLVLQAMTMWGNDRQMKFVGNAKIL

SEQ ID NO: 194581 - protein, 266 aa, Zea Mays
MSRRGVSSARGVRRGEAKLQEAPRRTQPAPPQAAAGPSQPCRLVWRSPPWRSDKVHIVPTPLHHIHRKARMGGGRQDGDRRVPRPVLPCRPPQRRRRRRPLPRQGPEAPPIPDQPQQWMPAIHRHHDGFLREQQQAQQRQLCSLSSVRQPDTSTGTDGHDPYRAAPRRHGIAVRQAPWRRRRRRLPRRDVVHEGGRQPAGFQSDNVLTRSCHCSCNTAAPAVPPWLLLPCERWRAGQQQPRWRRHSGPPLLVVVDARLSDEDHVLG

SEQ ID NO: 194582 - protein, 352 aa, Zea Mays
MAGLGFPRSKEAARSHAVSFLLGAALPTALLFFLASDRLGDGLSTISHSWGNGPAGDDEANQHAMFKGLAELLPRVAMDDRTVIITSVNEAWARPGSLLDLYLDSFRNGQDTAHLLGHLLVVALDARGFRRCQAVHPHCYLLLNVTSSVDMSSAKPFMSTDYLELVWTKLVFQQRVLELGYNFLFTDCDMVWFRNPFQHFPVYADMSCSSDDFKPSRAPLDNPLNTGLYYIKSTHRSVEMIKYWRAARERFPGQHDQAVFVNIRHELVTKLQVRIPAAGHGVLWRDLRVPRRPREGLHHPRRLLRWAGHQGARPQGLCRGLEELHQPGAGGEAEGCFQVDLPDSVPGFHRLA

SEQ ID NO: 194583 - protein, 175 aa, Zea Mays
MSFETSASRLPANLGCTITWHNTDASVEPSHWLEGSSVVIVDPPRKGLHPSVISALQKVALSERKAYKAKSSLAKVKDEKRPWILRAREAAVHVDNTTTEEGNETWPETLIYISCGWESFKRDCKSLISSKAWQLENAHAFNFFPGTDSIEILAIFKRESEAGQKKKKKAKKKAK

SEQ ID NO: 194584 - protein, 323 aa, Zea Mays
MPPPAGLPPWPTPSTTRLATPTPTRPPPRTTHVRPPPPPYTRVRLPPPPPATTPLPPRLEPAAPKPAAVATLLPPSTASAASSSSTCLDCVHFGKCSGCTHEVDLDKPPVLQEVANFFKGHGVGDFTFSRGRLSQWRCRAKLAVRGTPENPLIGLYQEGTHAVIDIPECRAHHPSINAAVKLLRQGITELSIQPFDEDAGAGELRYVQMAVTTYNTSIPVDKRYEQGKVQVSLVWNSRDERSQNAEKLTSIIEYLWTNGGPKSSVHLIHSIWANFQTSTSNIIFGHKWRHLKGERDMWERYGGVDISLDPCSFGQANTLFNSC

SEQ ID NO: 194585 - protein, 394 aa, Zea Mays
MAESVEAVGSAESEGAEASPENVGFSPVAGRSGANIGARIGDTEDAPLKCRLRLDRQRAARGWKSRRKGERSRRGWKNRRRIPESWRGWGFAVMETEPGAKELIAGCTSVFIWKPKGCTHEVDLDKPPVLQEVANFFKGHGVGDFTFSRGRLSQWRCRAKLAVRGTPENPLIGLYQEGTHAVIDIPECRAHHPSINAAVKLLRQGITELSIQPFDEDAGAGELRYVQMAVTTYNTSIPVDKRYEQGKVQVSLVWNSRDERSQNAEKLTSIIEYLWTNGGPKSSVHLIHSIWANFQTSTSNIIFGHKWRHLKGERDMWERYGGVDISLDPCSFGQANTLVCALKLPILMYNFTKYTVLNFKKKILTIQLAASYSIPPSTCATCFVACSSKDLKCV

SEQ ID NO: 194586 - protein, 530 aa, Zea Mays
MPPPAGLPPWPTPSTTRLATPTPTRPPPRTTHVRPPPPPYTRVRLPPPPPATTPLPPRLEPAAPKPAAVATLLPPSTASAASSSSTCLDCVHFGKCSGCTHEVDLDKPPVLQEVANFFKGHGVGDFTFSRGRLSQWRCRAKLAVRGTPENPLIGLYQEGTHAVIDIPECRAHHPSINAAVKLLRQGITELSIQPFDEDAGAGELRYVQMAVTTYNTSIPVDKRYEQGKVQVSLVWNSRDERSQNAEKLTSIIEYLWTNGGPKSSVHLIHSIWANFQTSTSNIIFGHKWRHLKGERDMWERYGGVDISLDPCSFGQANTLSFNSLLHKLNKYVPRSSTVVDLYSGAGVIGLSVAASRKCRSVKCIEINKQSKMSFETSASRLPANLGCTITWHNTDASVEPSHWLEGSSVVIVDPPRKGLHPSVISALQKVALSERKAYKAKSSLAKVKDEKRPWILRAREAAVHVDNTTTEEGNETWPETLIYISCGWESFKRDCKSLISSKAWQLENAHAFNFFPGTDRVSCCRWTKRC

SEQ ID NO: 194587 - protein, 628 aa, Zea Mays
MARRRSQKNKKTPPSNVTQKEVTLEILFDDCSNYDSWSTSVINAFRTIDPRLEQIIDKSIFSSNFNEKINSKEDQRCYRLNYLAFDILTNSLSNEDYRAFISKYDEPIHDAHDIWTRIKSKFDESKHDSSFYASTSFGICDTNPCKEKEENERWRPNDESTSPKGLPSHFDSHICCVANENDRESINEDEEEERSFLQLYARLSQEDKAVMLKLLERAREQSEARQRLEDILSIKMLHFDELTKEHEELKCSHVDLVQRYETISIEQDNALHCIAQLVNRNTLLKDQVEKLKVENLAFQEKYDMLLCSHENLMDDHIILDIAHEVVIENLKSQQPHFYTCIQIETILPCVNACCPSTSKSSFELEFAGTNDDTYQKLKEENERLKMSLTQLKGKCIAQPSQDNRDHMVKKLETGTTEACTKSLEENVKDLRIAKRRNQKKKINTSSKSLNHASIKGNIQGNNQVTLHTNRIKKCSECFEEGHLIRSCPYIKNGLIINKDDKLCFKCSRKGHFIKSCPHLKQKGIGLEKKVFTNHVASNKQGKKKSSKLGKRLWYTCREKGYQCKGCPIGNSSTHSLSFDSYITRQPKIATCARKAMNLPSASTKDIWVPRSLLTNHNGFIKRWVPKHT

SEQ ID NO: 194588 - protein, 169 aa, Zea Mays
MMTRAGKATQVQFVLTATVIYQMMALDLPKWAIKAIDKIRRRFLWRGRKEANGGHCMVAWGKVTRPKELGGLGISDLQCLNRALRVRWIWLQKTDSSKPWTDLTFQSNRFLDSLCSLAMASIVGDGQSTLFWHDRWILGQRIADLAPHVFSLVPKRLVKRRTVADALGI

SEQ ID NO: 194589 - protein, 400 aa, Zea Mays
MDPVSKGAWQKRFFSVAPPAALVFFFVLIFVAGAAVTLDHKELQPKLVTAAAEMRPPATTSELRAGPAEEPDICESKCRPPGSEALPRGIVQDKSNLEMESMGGNPEREENGSGRRSKSLLAIPVGIKQKAVVDKLVSKFPDTKFTVMLFHYDGEVDGWRDLEWSGRAVHVAARDQTKWWFAKRFLHPDLVAEYDYVFLWDEDVEVDSFDPLRYLRVVRKEGLEVSQPALDRRSQIHHGLTARARRGGGVHRRYYKTKGHGRCYGNSTGPPCTGWVEMMVPVFSRAAWRCAWRMVQNDLVYAWGMDYKLGYCAQGDRRRNVGIVDSQYVLHRGIPTLGGGGGNGNGKPSFSASASALGADRLAVRQRSYTELQVFNRRWKKAVSEDGCWTDPYPNTATTG

SEQ ID NO: 194590 - protein, 247 aa, Zea Mays
MQICTSAVKESLRNIYGNKLDSFMRNFEKSFSSTLTTLHLVNEMPVYGQGPVPQCSSKHEDSEASSKLSTGGTQNLTREIKQERLNSVESQLVLYAGGYQQMTRRAHSLSSPEADQRILNAFERSLKEQTRSNELKEFEISLSMRKLKLKQSQLELNSYSHMLDKIKLSLGFQKASFQVEKFKTQMQDTRHAQIMRTLIDFLVSAVIIMSVCFGYGTYTYSYQRITDITAACSATSKCQTSILGCSS

SEQ ID NO: 194591 - protein, 204 aa, Zea Mays
MPVYGQGPVPQCSSKHEDSEASSKLSTGGTQNLTREIKQERLNSVESQLVLYAGGYQQMTRRAHSLSSPEADQRILNAFERSLKEQTRSNELKEFEISLSMRKLKLKQSQLELNSYSHMLDKIKLSLGFQKASFQVEKFKTQMQDTRHAQIMRTLIDFLVSAVIIMSVCFGYGTYTYSYQRITDITAACSATSKCQTSILGCSS

SEQ ID NO: 194592 - protein, 174 aa, Zea Mays
MFSHFKVSNFNTGLLFIRCHVIAATRMFFGIVMILAVVWLAFQRSAVSVSSMPVTFNIILLGVICGYAGRFCTNTLGGDGNMWLICWEVLCSVHLIGNCYPSVLYRVLHGPISVSHSKESVWFPYWIRRWMFYAVLGFFIPALNGLLPFASLSDWNNHFTKELKSIFIDERIEA

SEQ ID NO: 194593 - protein, 134 aa, Zea Mays
MAAFNKLGGLLRHSALVSGITGGSSPAVFNAARLMSTKLFIGGLDWGVDDVKLREAFSSFGEVTEARVITDRETGRSRGFGFVNYSDSDAAKEAISAMDGKEIDGRQVRVNMANERPAGNRGGGGYGGSQSYDA

SEQ ID NO: 194594 - protein, 197 aa, Zea Mays
MNPPHPEPGLPRRHHHMVHLHLDPRHHHHVHIHLRCCHHHHHGTHLLAPAPPARLNDNQQRHPAPVLFPNTYPNPSAAPGQPEPPRAAVREDVEDLDPEPGLLHAEEEEEEDEEPVFVLTDEWAEFFAKSEAKRRLLNSRRRRAGSDLMCLGHHQTVWPESGAREENGRIACQHIRIALPGVHYVFFLLYTESYEFT

SEQ ID NO: 194595 - protein, 94 aa, Zea Mays
MAAFNKLGGLLRHSALVSGITGGSSPAVFNAARLMSTKLFIGGLDWGVDDVKLREAFSSFGEVTEARVITDRETGRSRGFGGQDPIKCIINQDI

SEQ ID NO: 194596 - protein, 74 aa, Zea Mays
MGTDMRQNLHPLGKRVWVWEAIIRTRLPMGISYVCICRVCMNELRSSQPPSPARQRTRPQVLAQQSNTTRQLAD

SEQ ID NO: 194597 - protein, 175 aa, Zea Mays
MARALGACVLLAVLLGALAPAPAPAAAARAHDDQGSGAGIRQPSGEYRGRKVGARTEVRDVEGDGEVQELGRFSVAEYNRQLREGGGGGGRLEFGRVVAAQRQVVSGLKYYLRVVAVEEGGGAGNGGERVFDAVVVVKPWLDSRTLLTFAPAAANVLESEDGRTLRCRAQIDVFF

SEQ ID NO: 194598 - protein, 145 aa, Zea Mays
MVYNGDTTAPHTACARAHHKLSQTQHTITLTHTHHTTAPLVRSRAGGHAARTAMARALGACVLLAVLLGALAPAPAPAAAARAHDDQGSGAGIRQPSGEYRGRKVGARTEVRDVEGDGEVQELGRFSVAEYNRQLREVSAALPPV

SEQ ID NO: 194599 - protein, 343 aa, Zea Mays
MLMRRQIRTRRTKPVNVGGWVFSSPFASSCSSDHDAARTGGLISWPMSLPGRKAPAGASGVRRWLVTVVVSVLALVLTLVVISLSQGSSLPRTSLHGYLPIGATDLGKRSSSEHADENRSGAAIGEELSQASGKMDDNEPDPASSSDTTTIPDEDTSNESQKAEQDNCDLYRGEWVTDSSGPLYTNNSCPIITQMQNCQGNGRPDKDYENWRWKPEQCNLPRFDARKFLELMRGKTLAFVGDSVARNQMESLLCILWQVDVPQNRGNKRMHKWLFKSTKTTIARVWSSWLVHRSTEAVGIAPKGIDKVFLDIPDETFMEFLPSFGGLVKQEKCRPSNCAHMVT

SEQ ID NO: 194600 - protein, 120 aa, Zea Mays
MATSSTHQSPGGGGGVGGCKNTSQIQSFQPLLSTRYHQTYGSGYEIQMQQAMPLGLWRSREETDSGGLSKDLAMQKCRIQSLLIHLLCQLITFNPPFLLYTPVGPHLSSGYEIRPSVRTC

SEQ ID NO: 194601 - protein, 149 aa, Zea Mays
MIFGKAPLASSPCREAAGISCRGPRPQLPWASTSVARSRGASFLPSSPPEAQQFLSPPSLEQRTAHASIDHRIAVGRGRELGHLEEILVVVLLCRRRGEEEGPCLKVLGDGHVVPQVPVAERRDLAPLAVVLRLSEKTKRNKAYSSGLW

SEQ ID NO: 194602 - protein, 159 aa, Zea Mays
MATPTATALTCSCRPSSPSSSSAAFRRLNIFAPVSGAHSPPRRRLRLAPLHVVDDSKNPPEERSETDKMVDGMDFGELCSDFECISSPYVESTARQVARDILELREDNRAFNCYAVSVKYKDPLRTFVGREKYRRPLWITKALENPVVSRKCQCSRRAT

SEQ ID NO: 194603 - protein, 267 aa, Zea Mays
MARSLNLIGAPWKNKALRSDEHRPVVRPEVILCVEIYQKTYASVKSQELLLLGSQFLTDLRDNIYCLTDKVMKVAGQHDHSGYFLIEDTFYNDTRHRSATDYSKPILDWLENSSDEVTEKWDAITSGVLKKRQKDLLRGLSISNVPEFKSEKMQTTRISDLHFRPGAGYLYCHQGNCKHTIVIRDMRLIHPDDTQNQAEYPLQTFQLQRRLQKCSVCQIYLATKVTVDDKWALNNPCYFCIKCYYLLHYKEDSTLLYPHTVYDFIQE

SEQ ID NO: 194604 - protein, 536 aa, Zea Mays
MTGDGEGVESSAAGERQGVPFALGGPLFVPFMVGPITTIPEFMSSALHELQALEDELGDTRDEFSNELCVDELKVLSEEELVERALQEAMEDSDSGTQPQPEDQTLDGGMSANPTPTIQAPTLSPLAERESSGLQDMADVLNEPQSSNGKPRGKEANSRCRKGETGTFTLDSPVVGESHGSAIDMSIVPFEPEEGINGQTTCRKGKKRGRHFDREVRAEILQGSYLTKADKWVQIKAKQDEDKFAARLHSFSGNSVKPKGSKSSCEKIEMARSLNLIGAPWKNKALRSDEHRPVVRPEVILCVEIYQKTYASVKSQELLLLGSQFLTDLRDNIYCLTDKVMKVAGQHDHSGYFLIEDTFYNDTRHRSATDYSKPILDWLENSSDEVTEKWDAITSGVLKKRQKDLLRGLSISNVPEFKSEKMQTTRISDLHFRPGAGYLYCHQGNCKHTIVIRDMRLIHPDDTQNQAEYPLQTFQLQRRLQKCSVCQIYLATKVTVDDKWALNNPCYFCIKCYYLLHYKEDSTLLYPHTVYDFIQE

SEQ ID NO: 194605 - protein, 349 aa, Zea Mays
MSANPTPTIQAPTLSPLAERESSGLQDMADVLNEPQSSNGKPRGKEANSRCRKGETGTFTLDSPVVGESHGSAIDMSIVPFEPEGSEGNGTMPSNPSAENGASESPVDGMSIVPHDPEGINGQTTCRKGKKRGRHFDREVRAEILQGSYLTKADKWVQIKAKQDEDKFAARLHSFSGNSVKPKGSKSSCEKIEMARSLNLIGAPWKNKALRSDEHRPVVRPEVILCVEIYQKTYASVKSQELLLLGSQFLTDLRDNIYCLTDKVMKVAGQHDHSGYFLIEDTFYNDTRHRSATDYSKPILDWLENSSDEVTEKWDAITSGVLKKRQKDLLRGELQAHDRDKGHEVDSPR

SEQ ID NO: 194606 - protein, 435 aa, Zea Mays
MSANPTPTIQAPTLSPLAERESSGLQDMADVLNEPQSSNGKPRGKEANSRCRKGETGTFTLDSPVVGESHGSAIDMSIVPFEPEGSEGNGTMPSNPSAENGASESPVDGMSIVPHDPEGINGQTTCRKGKKRGRHFDREVRAEILQGSYLTKADKWVQIKAKQDEDKFAARLHSFSGNSVKPKGSKSSCEKIEMARSLNLIGAPWKNKALRSDEHRPVVRPEVILCVEIYQKTYASVKVMKVAGQHDHSGYFLIEDTFYNDTRHRSATDYSKPILDWLENSSDEVTEKWDAITSGVLKKRQKDLLRGLSISNVPEFKSEKMQTTRISDLHFRPGAGYLYCHQGNCKHTIVIRDMRLIHPDDTQNQAEYPLQTFQLQRRLQKCSVCQIYLATKVTVDDKWALNNPCYFCIKCYYLLHYKEDSTLLYPHTVYDFIQE

SEQ ID NO: 194607 - protein, 131 aa, Zea Mays
MSDFSSLEEVSSSIPDDQLRMIDNINSLMSELVVEREALLRALRIESSNCSKLKELNKDLTQKLEIQTQRLELLTSQRMANENALAKPIDTRSINDATMYADEGDEVVERVLGWIMKLFPGGPKRRTSKLL

SEQ ID NO: 194608 - protein, 463 aa, Zea Mays
MSNGHQQDAVSDGGRKFYGNLSFSDLVNGHHENWRGDGARKKDEHSPYKDVESKSKLSAFGNGSSLNLPSTENMPSWGRNSLSSQVHDTEQSSSYSSSTLFGKSKNAYAQDYSTNSDIFGRLRATSEDSSKVEQSMYASTRDYGNAFNSSMIAGTVDHDTNVGITRTSADSTPVNSERQDPFLSSGYPTTYTRSRPSFLDMIGVQRAPLTTEASYREPAKANQLSSYSNYQSSFLQQSNQQSTGSNAADIPFASESQEYSHEKGSYGSSTPPDFLLPKEERSKHHGNQTFQNFTTHGKDDDFAALEQLIEDLTKEKFSLQQSLQKSQELAETLATDNSALTDKFNQQAHVISQLTSDMERLQEEIQAQLLALESIRTEYANAQLECSAADERAKVLAAEVILLEDKGLRLRSSELKLEKEVEGLHSEISSYRRKVSSLEKERQHLQSTVKALQEEAIEEHSRE

SEQ ID NO: 194609 - protein, 650 aa, Zea Mays
MSNGHQQDAVSDGGRKFYGNLSFSDLVNGHHENWRGDGARKKDEHSPYKDVESKSKLSAFGNGSSLNLPSTENMPSWGRNSLSSQVHDTEQSSSYSSSTLFGKSKNAYAQDYSTNSDIFGRLRATSEDSSKVEQSMYASTRDYGNAFNSSMIAGTVDHDTNVGITRTSADSTPVNSERQDPFLSSGYPTTYTRSRPSFLDMIGVQRAPLTTEASYREPAKANQLSSYSNYQSSFLQQSNQQSTGSNAADIPFASESQEYSHEKGSYGSSTPPDFLLPKEERSKHHGNQTFQNFTTHGKDDDFAALEQLIEDLTKEKFSLQQSLQKSQELAETLATDNSALTDKFNQQAHVISQLTSDMERLQEEIQAQLLALESIRTEYANAQLECSAADERAKVLAAEVILLEDKGLRLRSSELKLEKEVEGLHSEISSYRRKVSSLEKERQHLQSTVKALQEEKKLLRNIPVNEKATTTVEKPWVDKRDASTATEDLDIGENSSSETLTSTVDTLEDAGISVLRSNIMSDFSSLEEVSSSIPDDQLRMIDNINSLMSELVVEREALLRALRIESSNCSKLKELNKDLTQKLEIQTQRLELLTSQRMANENALAKPIDTRSINDATMYADEGDEVVERVLGWIMKLFPGGPKRRTSKLL

SEQ ID NO: 194610 - protein, 651 aa, Zea Mays
MSNGHQQDAVSDGGRKFYGNLSFSDLVNGHHENWRGDGARKKDEHSPYKDVESKSKLSAFGNGSSLNLPSTENMPSWGRNSLSSQVHDTEQSSSYSSSTLFGKSKNAYAQDYSTNSDIFGRLRATSEDSSKVEQSMYASTRDYGNAFNSSMIAGTVDHDTNVGITRTSADSTPVNSERQDPFLSSGYPTTYTRSRPSFLDMIGVQRAPLTTEASYREPAKANQLSSYSNYQSSFLQQSNQQSTGSNAADIPFASESQEYSHEKGSYGSSTPPDFLLPKEERSKHHGNQTFQNFTTHGKDDDFAALEQLIEDLTKEKFSLQQSLQKSQELAETLATDNSALTDKFNQQAHVISQLTSDMERLQEEIQAQLLALESIRTEYANAQLECSAADERAKVLAAEVILLEDKGLRLRSSELKLEKEVEGLHSEISSYRRKVSSLEKERQHLQSTVKALQEEKKLLRNIPVNEKATTTVEKPWVDKRDASTATEDLDIGENSSSETLTSTVDTLEDAGISVLRSNIMSDFSSLEEVSSSIPDDQLRMIDNINSLMSELVVEREALLRALRIESSNCSKLKELNKDLTQKLEIQTQRLELLTSQRMANENALAKPIDTRSINDATMYADEGDEVVERVLGWIMKLFPGGPKRRTSKLLR

SEQ ID NO: 194611 - protein, 748 aa, Zea Mays
MASAQAPSSAAAPSRKDHLEAGKKRLEQFRKKKAAKKATAASAEQAKAPAPDVVENPPPIVNAGSLGDGLVSDVDPNQASTSSVPLSVYENGPASASRGAEFMSNGHQQDAVSDGGRKFYGNLSFSDLVNGHHENWRGDGARKKDEHSPYKDVESKSKLSAFGNGSSLNLPSTENMPSWGRNSLSSQVHDTEQSSSYSSSTLFGKSKNAYAQDYSTNSDIFGRLRDSSKVEQSMYASTRDYGNAFNSSMIAGTVDHDTNVGITRTSADSTPVNSERQDPFLSSGYPTTYTRSRPSFLDMIGVQRAPLTTEASYREPAKANQLSSYSNYQSSFLQQSNQQSTGSNAADIPFASESQEYSHEKGSYGSSTPPDFLLPKEERSKHHGNQTFQNFTTHGKDDDFAALEQLIEDLTKEKFSLQQSLQKSQELAETLATDNSALTDKFNQQAHVISQLTSDMERLQEEIQAQLLALESIRTEYANAQLECSAADERAKVLAAEVILLEDKGLRLRSSELKLEKEVEGLHSEISSYRRKVSSLEKERQHLQSTVKALQEEKKLLRNIPVNEKATTTVEKPWVDKRDASTATEDLDIGENSSSETLTSTVDTLEDAGISVLRSNIMSDFSSLEEVSSSIPDDQLRMIDNINSLMSELVVEREALLRALRIESSNCSKLKELNKDLTQKLEIQTQRLELLTSQRMANENALAKPIDTRSINDATMYADEGDEVVERVLGWIMKLFPGGPKRRTSKLL

SEQ ID NO: 194612 - protein, 565 aa, Zea Mays
MASAQAPSSAAAPSRKDHLEAGKKRLEQFRKKKAAKKATAASAEQAKAPAPDVVENPPPIVNAGSLGDGLVSDVDPNQASTSSVPLSVYENGPASASRGAEFMSNGHQQDAVSDGGRKFYGNLSFSDLVNGHHENWRGDGARKKDEHSPYKDVESKSKLSAFGNGSSLNLPSTENMPSWGRNSLSSQVHDTEQSSSYSSSTLFGKSKNAYAQDYSTNSDIFGRLRATSEDSSKVEQSMYASTRDYGNAFNSSMIAGTVDHDTNVGITRTSADSTPVNSERQDPFLSSGYPTTYTRSRPSFLDMIGVQRAPLTTEASYREPAKANQLSSYSNYQSSFLQQSNQQSTGSNAADIPFASESQEYSHEKGSYGSSTPPDFLLPKEERSKHHGNQTFQNFTTHGKDDDFAALEQLIEDLTKEKFSLQQSLQKSQELAETLATDNSALTDKFNQQAHVISQLTSDMERLQEEIQAQLLALESIRTEYANAQLECSAADERAKVLAAEVILLEDKGLRLRSSELKLEKEVEGLHSEISSYRRKVSSLEKERQHLQSTVKALQEEAIEEHSRE

SEQ ID NO: 194613 - protein, 368 aa, Zea Mays
MASAQAPSSAAAPSRKDHLEAGKKRLIEDLTKEKFSLQQSLQKSQELAETLATDNSALTDKFNQQAHVISQLTSDMERLQEEIQAQLLALESIRTEYANAQLECSAADERAKVLAAEVILLEDKGLRLRSSELKLEKEVEGLHSEISSYRRKVSSLEKERQHLQSTVKALQEEKKLLRNIPVNEKATTTVEKPWVDKRDASTATEDLDIGENSSSETLTSTVDTLEDAGISVLRSNIMSDFSSLEEVSSSIPDDQLRMIDNINSLMSELVVEREALLRALRIESSNCSKLKELNKDLTQKLEIQTQRLELLTSQRMANENALAKPIDTRSINDATMYADEGDEVVERVLGWIMKLFPGGPKRRTSKLL

SEQ ID NO: 194614 - protein, 188 aa, Zea Mays
MVVVRNDIVKLFDTIKSYDDGTFYFDEKHVDATEYKGPIMTSASVVRGVTSFAAVASGKLDIPGDKILGLAKFFLGIGLPGSSKDCFNQIDSLSVLEDNRVFVPLILSLPTKVFSLSLKDQLKVEVTTVFGSAAPLLKVNLVQVLGTDSKVITNGNRELQYDLDKNVHYLDIAPLEIDVGKYSVVFED

SEQ ID NO: 194615 - protein, 687 aa, Zea Mays
MAGRRPAPAALLLLAVAFAPISSAVRPVSDAHRSAAEELFAPSADGSFGDLESTYEAVKTFQILGLEKYNSLSGKACKFAAENLASTDSTAKDLFHAVRISGALGCGVDAGVYDGVVARLKAVIKDTNSLLEFYYSVGGLLSIKEQGHNVVLPDAESTFHAIKALSQSDGRWRYGTNSAESSTFAAGIALEALAGVVSLADAEVDPSMMVVVRNDIVKLFDTIKSYDDGTFYFDEKHVDATEYKGPIMTSASVVRGVTSFAAVASGKLDIPGDKILGLAKFFLGIGLPGSSKDCFNQIDSLSVLEDNRVFVPLILSLPTKVFSLSLKDQLKVEVTTVFGSAAPLLKVNLVQVLGTDSKVITNGNRELQYDLDKNVHYLDIAPLEIDVGKYSVVFEISLQEQERETVYATGGRNTESVFVTGLIKVDKAEIGISDNDAGTVESVQKLDLLKDTKVSLSANHLQKLRLSFQLTTPLGLTFKPHQLKHESKVEHLFVVPGSARQFKIVLDFLGLVEKFYYLSGRYDLELAVGDAAMENSFLRPLGHLELDLPEAPEKAPRPPAQAVDPFSKFGPKAEILHIFRAPEKRPPKELSLAFTGLTLLPFIGFLIGLVRLGVNVKNFPSLPGPAAFASVFHAGIGAVLLLYVLFWLKLDLFTTLKYLGFLGIFLVFVGHRTLSYLSSASAKQKTA

SEQ ID NO: 194616 - protein, 540 aa, Zea Mays
MLFCLMQKVHFMPLSQSDGRWRYGTNSAESSTFAAGIALEALAGVVSLADAEVDPSMMVVVRNDIVKLFDTIKSYDDGTFYFDEKHVDATEYKGPIMTSASVVRGVTSFAAVASGKLDIPGDKILGLAKFFLGIGLPGSSKDCFNQIDSLSVLEDNRVFVPLILSLPTKVFSLSLKDQLKVEVTTVFGSAAPLLKVNLVQVLGTDSKVITNGNRELQYDLDKNVHYLDIAPLEIDVGKYSVVFEISLQEQERETVYATGGRNTESVFVTGLIKVDKAEIGISDNDAGTVESVQKLDLLKDTKVSLSANHLQKLRLSFQLTTPLGLTFKPHQVFLKLKHESKVEHLFVVPGSARQFKIVLDFLGLVEKFYYLSGRYDLELAVGDAAMENSFLRPLGHLELDLPEAPEKAPRPPAQAVDPFSKFGPKAEILHIFRAPEKRPPKELSLAFTGLTLLPFIGFLIGLVRLGVNVKNFPSLPGPAAFASVFHAGIGAVLLLYVLFWLKLDLFTTLKYLGFLGIFLVFVGHRTLSYLSSASAKQKTA

SEQ ID NO: 194617 - protein, 428 aa, Zea Mays
MAGRRPAPAALLLLAVAFAPISSAVRPVSDAHRSAAEELFAPSADGSFGDLESTYEAVKTFQILGLEKYNSLSGKACKFAAENLASTDSTAKDLFHAVRISGALGCGVDAGVYDGVVARLKAVIKDTNSLLEFYYSVGGLLSIKEQGHNVVLPDAESTFHAIKALSQSDGRWRYGTNSAESSTFAAGIALEALAGVVSLADAEVDPSMMVVVRNDIVKLFDTIKSYDDGTFYFDEKHVDATEYKGPIMTSASVVRGVTSFAAVASGKLDIPGDKILGLAKFFLGIGLPGSSKDCFNQIDSLSVLEDNRVFVPLILSLPTKVFSLSLKDQLKVEVTTVFGSAAPLLKVNLVQVLGTDSKVITNGNRELQYDLDKNVHYLDIAPLEIDVGKYSVVFEVRSSERYKGVSFCKPPTEAAFIFSINYSAWAHI

SEQ ID NO: 194618 - protein, 398 aa, Zea Mays
MPRRALRAQSPARETPSSIRPPTSSSSTRKASSPAPSLPLLPVCGNPEPTDCLLSLTECRVRVSLSVCACFHDSGKSLHTCYLPSSDDDRKDYLEIPWAELRSMVEPSFAERSLIYHKDYLSDATIVTSSAVNITEHVVLTVDGHSLPYDYLIIATGHALASPASRAERINEFQRDNGKIESSESVLIIGGGPTGVELAGEIVVDYPGKRVTLIHRGPRLLEFIGDKASKKCLDWLTSKKVDVLLQQSVDLGSLSDTEKVYKTSDGETVTADCHFVCIGKPLSSSWLHDTILKESLDSKGRVMVEKDLRVKGFNNIFAIGDITDIPTPASAAEAKQESVLETEETKQAVAAAAAAAGGVQAMAVTVVRDVETGLDTSTNDRDGDKPSWFTPKSCSGLT

SEQ ID NO: 194619 - protein, 395 aa, Zea Mays
MPRRALRAQSPARETPSSIRPPTSSSSTRKASSPAPSLPLLPVCGNPEPTDCLLSLTECRVRVSLSVCACFHDSGKSLHTCYLPSSDDDRKDYLEIPWAELRSMVEPSFAERSLIYHKDYLSDATIVTSSAVNITEHVVLTVDGHSLPYDYLIIATGHALASPASRAERINEFQRDNGKIESSESVLIIGGGPTGVELAGEIVVDYPGKRVTLIHRGPRLLEFIGDKASKKCLDWLTSKKVDVLLQQSVDLGSLSDTEKVYKTSDGETVTADCHFVCIGKPLSSSWLHDTILKESLDSKGRVMVEKDLRVKGFNNIFAIGDITDIPTPASAAEAKQESVLETEETKQAVAAAAAAAGGVQAMAVTVVRDVETGLDTSTNDRDGDKPSWFTPKSLT

SEQ ID NO: 194620 - protein, 126 aa, Zea Mays
MMLSDCNAKDPSVFGDDAKSSNGEAARGGSNGGEKQGDESNGGGILSAVASRIGVVVSSANGDRSGSAEDGAKTSAGDAGHGSKGEEKGRGVNGGRIVEQIISNLPSDDQAPDADEASLLIAIIED

SEQ ID NO: 194621 - protein, 114 aa, Zea Mays
MADAEDIQPLVCDNGTGMVKAGFAGDDAPRAVFPSIVGRPRHIGVMVGMGQKDAYVGDEVQSKRGILTLKFCKPIMTKPKVALKPQTLSPQPEAQAPHDPQTPEQQQSGTGVGV

SEQ ID NO: 194622 - protein, 241 aa, Zea Mays
MTLAAIAGQHKRLIFSPPVAVFPHPLASDLSFSRYWNYLRKQTFVLESYVSNVNWMMNRALFTSHCYLSWGFVWPYIMALVHVLAALRAPYSKVVKEASDSSWGLFLVGLLFTCTLIELVSMWNLTKVEIQLCNMLSPEGPKVSLDSYNWGLVFIAVLVDNFLYPVSAIRSHFSQSINWSGIRYYLRDGKISKIERENSSKYTDLGGKHLYGKRTYPPNKSLLGYLSRTLVQWHQPKKYDV

SEQ ID NO: 194623 - protein, 523 aa, Zea Mays
MLGDLSVSSRQVLSISACPTPCVTCYCLLLSAPIPIGCMICLVLALGWAAASIVRKGVIKNMRRNIVDGNSFAFLCDNIDELEHSVQENLPRVSVVMPLKGFGEHNLQNWRTQITSLYGGPLEFLFIVESKDDPAYHAVSRLITEYKDNLEAKVVVAGLSTTCSQKIHNQLIGVEKMHKDTKYVLFLDDDVRLHPGTIGALTKEMEKNPEIFIQTGYPLDLPSGSLGSYCIYEYHMPCSMGFATGGKTFFLWGGCMMMHADDFRQDRYGIVSGLRDGGYSDDMTLAAIAGQHKRLIFSPPVAVFPHPLASDLSFSRYWNYLRKQTFVLESYVSNVNWMMNRALFTSHCYLSWGFVWPYIMALVHVLAALRAPYSKVVKEASDSSWGLFLVGLLFTCTLIELVSMWNLTKVEIQLCNMLSPEGPKVSLDSYNWGLVFIAVLVDNFLYPVSAIRSHFSQSINWSGIRYYLRDGKISKIERENSSKYTDLGGKHLYGKRTYPPNKSLLGYLSRTLVQWHQPKKYDV

SEQ ID NO: 194624 - protein, 302 aa, Zea Mays
MTAMEAAVDAMLAAASRAFTSTFAIAIQIQGCMICLVLALGWAAASIVRKGVIKNMRRNIVDGNSFAFLCDNIDELEHSVQENLPRVSVVMPLKGFGEHNLQNWRTQITSLYGGPLEFLFIVESKDDPAYHAVSRLITEYKDNLEAKVVVAGLSTTCSQKIHNQLIGVEKMHKDTKYVLFLDDDVRLHPGTIGALTKEMEKNPEIFIQTGYPLDLPSGSLGSYCIYEYHMPCSMGFATGGKTFFLWGGCMMMHADDFRQDRYGIVSGLRDGGYSDDMTLAAIAAQKAHIFTTCCCVSTPPCQ

SEQ ID NO: 194625 - protein, 391 aa, Zea Mays
MHIWPTCTFLKRQPHVHTDGCIPTPKSMASSPRSPPPAPTPEFEISRQSRLFVAKVIDLDELRMLAAQGVPDAAGVRATVWKLLLGYLPNDRSLWEQELAKKRGQYAAFKDEFLTNPVERAQQVPTEGHHNVSAEHVDNGFLHRSEVTREEHPLSLGKTSAWNQFFEYSEIMEQIDRDVKRTHPDMQFFCGDSSFAKSNQESLKNVLLIFAKLNAGIRYVQGMNEVLAPLFFVFRSDPDDKNAEFAEADSFFCFVELLSGFRDNFCQKLDNSAVGIRGTLAKLSQLVAKYDGELQQHLEITTEVNPQFYAFRWITLLLTQEFNFADTIHIWDTLLSDPGGPQETLLRICCAMLILVRKRLLAGDFTSNLKLLQNYPPTNISHLLYVANKLH

SEQ ID NO: 194626 - protein, 357 aa, Zea Mays
MNGEVECSVCHAKVPVPPPVSKAYDSHRSTVSSRQRALNVLLVSGDCVLAGLQPILVYISKVDGKFKFSPISVNFLTEITKIMFTIVMLFIQARRLKVGDKPLFTVSIFMQAARNNVLLSVPAFLYAINNYLKFIMQLYFNPASVKMLSNLKVLVIAVLLKMIMRRRFSVIQVTVPALASVYNEKALKSQFDTSIYLQNLFLYGYGAIFNFIGLVVTAIIQGPSSFNILEGHSKATMFLICNNAAQGILSSFFFKYADTILKKYSSTIATIFTGVASAVLFGHTLTINFVLGISIVIISMHQYLSNQIKDEVPSSKVEMAEAHDHRKEPSYVNVPDSGASESKHRHGSDERQPLLPV

SEQ ID NO: 194627 - protein, 267 aa, Zea Mays
MNGEVECSVCHAKVPVPPPVSKAYDSHRSTVSSRQRALNVLLVSGDCVLAGLQPILVYISKVDGKFKFSPISVNFLTEITKIMFTIVMLFIQARRLKVGDKPLFTVSIFMQAARNNVLLSVPAFLYAINNYLKFIMQLYFNPASVKMLSNLKVLVIAVLLKMIMRRRFSVIQWEALALLLIGISVNQLKSLPEGSSVLGLPVAAGAYLYTLFFFPHWLQFTTKRLLKASLIPVFTFRTCFCMVMVRYLTLLGLLSLLSSKGPVVLTF

SEQ ID NO: 194628 - protein, 599 aa, Zea Mays
MHFAIEASNANADCDKWYSALYVALEECLVQLTEKVGDVGPILDMVGVMLENLSHTATIARTTISSVYRTSQIAASVYKSSYHQKAFPEALFHQLLLAMLHSDNKTRIGSHRVLSTIVAPSMACPWSDISFPIPMKGDDSHNLHLLVLSAFSSEAIINETRTKNKIQESLQENNKSEAIVDPENGYTQTEPDKRKYSGGPCLNEHYRTAFNDENLKFMKLNDHQIVLLLSSIWSQASLDDNLPANFEAMGLVYSIALLCSKPKSSSHVTRIRCFQLAFSLRRNSLSPESDLKPSRRRCLYTMASAMLIFSAKIADLHQIIPLVKAAAPEKMVDPHLRLMDDCQLVNTSAESSNSEMVYGSEEDESDALAFLSAINKPDTELIETVMCHFREKFENLPEKVNGIEEQLLQEFSLDDSFPLGAPLFMEMPHSCSMYAEKDEECFDEDTVPSELDDDDIIFEHSGSQSDRKTSGSMASSDVLTVNQLIESVHETARQVANVPVPANPVPYDQMKSQCEALVMEKQQKMSVLLSLKHSRTDSHGSAGVDGLETNESSLLSEPELQSTRKGRMRRCDSASSESDCSFRLPPASPYDKFLKAAGR

SEQ ID NO: 194629 - protein, 946 aa, Zea Mays
MGVMSRRVLPACSSLCYFCPSLRARSRQPVKRYKKIIADIYQLQPDGEPNDRRIGKLCDYVSRNPTRIPKITEYLEQRFYKDLRHENFTLAKVVPCIYRKILCSCKELRPLLATSSLSTIRTLLDMKAHDDLQVLGCLMLVDFLNGQVDSTHMFNLEGLIPKLCKIGHELREDDEGLRLRSAALQALASMVQYMGDHSHISMELDEVVSVIISCYEANQTLSIKEVVRFQDDDDLVINGNLAVLPVSGQNSAKVASDTIHDYWSPESGIALSVLQEMQKLMDKSGQHGHLLLSFTIKHIDHKSIAKNSVKQINIVKVASHLARHAKLKASVTIASAISDLIKHLRKCMHFAIEASNANADCDKWYSALYVALEECLVQLTEKVGDVGPILDMVGVMLENLSHTATIARTTISSVYRTSQIAASVYKSSYHQKAFPEALFHQLLLAMLHSDNKTRIGSHRVLSTIVAPSMACPWSDISFPIPMKGDDSHNLHLLVLSAFSSEAIINETRTKNKIQESLQENNKSEAIVDPENGYTQTEPDKRKYSGGPCLNEHYRTAFNDENLKFMKLNDHQIVLLLSSIWSQASLDDNLPANFEAMGLVYSIALLCSKPKSSSHVTRIRCFQLAFSLRRNSLSPESDLKPSRRRCLYTMASAMLIFSAKIADLHQIIPLVKAAAPEKMVDPHLRLMDDCQLVNTSAESSNSEMVYGSEEDESDALAFLSAINKPDTELIETVMCHFREKFENLPEKVNGIEEQLLQEFSLDDSFPLGAPLFMEMPHSCSMYAEKDEECFDEDTVPSELDDDDIIFEHSGSQSDRKTSGSMASSDVLTVNQLIESVHETARQVANVPVPANPVPYDQMKSQCEALVMEKQQKMSVLLSLKHSRTDSHGSAGVDGLETNESSLLSEPELQSTRKGRMRRCDSASSESDCSFRLPPASPYDKFLKAAGR

SEQ ID NO: 194630 - protein, 151 aa, Zea Mays
MGSTGREPEVTRANFPDGFVFGVATSAYQIEGARREGGKGDNIWDVFTDDKERVLDRSNAEIAVDHYHRYKEDIELMASLGFSAYRFSISWARIFPDGLGEKVNEQGVAFYNDLINFMISKGIEPYATLYHWDLPNNLQKTLGGWISDKIV

SEQ ID NO: 194631 - protein, 264 aa, Zea Mays
MGSTGREPEVTRANFPDGFVFGVATSAYQIEGARREGGKGDNIWDVFTDDKERVLDRSNAEIAVDHYHRYKEDIELMASLGFSAYRFSISWARIFPDGLGEKVNEQGVAFYNDLINFMISKGIEPYATLYHWDLPNNLQKTLGGWISDKIVEYFALYAEACFANFGDRVKRWITINEPLQTAINGYGIGIFAPGGCQGETARCYLAAHHQILAHAAAVDVYRRKFKAAQSGEVGLVVDCEWAEPFSEKLEDQIAAQRRIDFQLG

SEQ ID NO: 194632 - protein, 342 aa, Zea Mays
MGSTGREPEVTRANFPDGFVFGVATSAYQIEGARREGGKGDNIWDVFTDDKERVLDRSNAEIAVDHYHRYKEDIELMASLGFSAYRFSISWARIFPDGLGEKVNEQGVAFYNDLINFMISKGIEPYATLYHWDLPNNLQKTLGGWISDKIVEYFALYAEACFANFGDRVKRWITINEPLQTAINGYGIGIFAPGGCQGETARCYLAAHHQILAHAAAVDVYRRKFKAAQSGEVGLVVDCEWAEPFSEKLEDQIAAQRRIDFQLGWYLDPIYFGDYPESMRQRLGSDLPTFSEKDKKFIKNKIDFIGLNHYTSRLIAHHQNPDDVYFYKVQQMERVGIHSGRN

SEQ ID NO: 194633 - protein, 364 aa, Zea Mays
MISKGIEPYATLYHWDLPNNLQKTLGGWISDKIVEYFALYAEACFANFGDRVKRWITINEPLQTAINGYGIGIFAPGGCQGETARCYLAAHHQILAHAAAVDVYRRKFKAAQSGEVGLVVDCEWAEPFSEKLEDQIAAQRRIDFQLGWYLDPIYFGDYPESMRQRLGSDLPTFSEKDKKFIKNKIDFIGLNHYTSRLIAHHQNPDDVYFYKVQQMERVEKWSSGESIGERAASEWLVIVPWGLHKLLNYIVKKYNNPVIYVTENGMDDEDDQSATIDQVLNDTKRVGYFKGYLNSVAQAIKDGADVRGYFAWSFLDNFEWAMGYTKRFGIVYVDYKDGLSRHPKASALWFSRLLKGEAAENSYS

SEQ ID NO: 194634 - protein, 299 aa, Zea Mays
MGGFVKTHKTNAYFKRFQVKFKRRRAGKTDYRARIRLINQDKNKYNTPKYRFVVRFDITAQIISASIAGDMVLASAYSHELPRYGLEVGLTNYAAAYCTGLLLARRVLKIRGLDQEYEGNVEATGEDFSVEPADERRPFRALLDVGLIRTTTGNRVFGALKGALDGGLDIPHSEKRFAGFKKDDKQLDADTHRRYIYGGHVADYMKNLAEEEPEKYQSHFSAYIKKGVEADEIEALYKKVHAAIRADPSIVKSTKQPPKEHKRYNPKKLTYEQRKASLIERLNQLNSSGGADDDDEDDE

SEQ ID NO: 194635 - protein, 667 aa, Zea Mays
MVERVAQKNLERGVKVAGSAIKELKQETEKNDQNLRRLEDTSVSELQNGNSPDNEKEVQKAQKQVEKEIKRQEKEEARMKKLQKKQQEDVLREQKRREKEEAEAKKQQKKQEEEALKEQKRREKEEAEMKKQHKKQQEEAEKEQKRLEKEAAQLKKQLAVQKQASMMQRFFKSKKDNGKLQKSGENNSADGPCNDNKETVPSTTSKIDYSLSQQESWVLEDLWRLQITGWKKLSSHNRSSRWGVRCKPKTKAFNELKLQKSSDDMVDEILSTPNKDGCHTSSQENEHATLESDIDMLQAIEVQCHDTNNPKPLQTRLIRRKLLQFDKSNRPAYYGSWRKKSVVIGPRCPLKMDPNLDYEVDSDDEWEEEDPGESLSDCEKDNDEFMEEDSKITDEEDEDSFVVPDGYLSDNEGIQIESLLDDKDEEASSSPTGQCAEVEEFRSLLRQQRVLNILTEQALRKSQPLIISNLNHEKAELLTAEDLKGTAKIEQLCLQVLSMHICPGGAVVDVPLTDSSSATVEEINQPNPKDGSPGAASAIPETDLPEIVQVIRSCRDGIHKVVELLQHKFPNVSKTQLNRKVREISDFVDNHWKVKKEVLDKLGLDSSPVKSKKNKSIAMYFSKRCLPPEEAVNALSASPELRLKSRTIQNGNGGTEAPQINLFPSKQ

SEQ ID NO: 194636 - protein, 225 aa, Zea Mays
MNDDLTKMRQATAQVLASQKRLENKYKAAEQASADWYRRAQLALQKGDEDLAREALKRRKSYADNASSLRSQLDQQKGVVENLISNTRVLESKIAEAKQKKDTLKARAQSAKTATKVSEMLGNVNTSSALSAFEKMEEKVMAMESQAEALGQLATDDLEGKFALLENSSVDDDLSQLKKELSGSSLKGELPSGRRAASNSGAGRPFPDLEIESELNELRRKAKEY

SEQ ID NO: 194637 - protein, 275 aa, Zea Mays
MFGPDICGTQTKKLHLILSYQGQNYPIKKDLECETDKLTHVYTFILRPDASYSLLVDNRERESGSMYTDWDILPPRKIKDVHAKRPKDWDDREYIEDPDEVKPEGYDSIPKQIPDPKDKKPDTWDEDEDGIWKPRMVSNPAYKGPWKRKRIKNPNYKGKWKTPWIDNPEFEDDPDLYVLKPLKYIGIEVWQVKAGSVFDNILICDDPEYARKVVEETWGANREAEKEAFEEAEKERKAREDREGQKAKDDGGRHRIHRRHKKHYRDHWDDYHDEL

SEQ ID NO: 194638 - protein, 464 aa, Zea Mays
MRHGLTTAVPRSFWTRCSDVFGAATVDLDRSRRPTTTPAMGTGRRGGGGGGVFHRLLALSSLLLLASGEVVFEERFEDGWETRWVESDWKRSEGKAGRFKHTAGRYSADPDDKGIQTTIDARHFAISAKFPEFSNKNRTLVVQYSIKFEQDIECGGGYIKLMSGYVNQKKFSGDTPYSLMFGPDICGTQTKKLHLILSYQGQNYPIKKDLECETDKLTHVYTFILRPDASYSLLVDNRERESGSMYTDWDILPPRKIKDVHAKRPKDWDDREYIEDPDEVKPEGYDSIPKQIPDPKDKKPDTWDEDEDGIWKPRMVSNPAYKGPWKRKRIKNPNYKGKWKTPWIDNPEFEDDPDLYVLKPLKYIGIEVWQVKAGSVFDNILICDDPEYARKVVEETWGANREAEKEAFEEAEKERKAREDRVKRQRTMVAGIEYTGVIKNTTEITGTTTMMSYKSPQILHSSKA

SEQ ID NO: 194639 - protein, 62 aa, Zea Mays
MSLGHHPNARSNASLAIFRINLLPWTTIFCSFFLCRIAQESNQKQQRKMMLEGSSIVLLPKH

SEQ ID NO: 194640 - protein, 69 aa, Zea Mays
MPYSYYISWASACLNNRTWPVGLSTATWYRSDSPLCTSGRHSRKELIDCGTYKLSLAVSGYRAPVKNEV

SEQ ID NO: 194641 - protein, 98 aa, Zea Mays
METRGKRLLFPVLLVLIAAAAAPSAMSRDEREVMEVSGAAVCRTGLCGWPSPSSRISTSACTMRSAPTTSGGMSARRWPWSTPTSCRSQGTLTGLVNE

SEQ ID NO: 194642 - protein, 180 aa, Zea Mays
MNSLAYEADMRIRDPVYGCVGVISILQHNLRQLQQDLARAKYELSKYQAAAAASASTAPTGPQAMAEFIGSAMPNGAAHNFINLGHSAALGSLGGSTAMFGQQEQFGSNAQMLSRSYDGGEPIARIGMNNGGYEFGYSSATTMGGSAGAVSGGLGTLGISSPPFLKSGTAGGDEKPSGGQ

SEQ ID NO: 194643 - protein, 269 aa, Zea Mays
MASSVRAPSGSVIAVASSSSSAALAGVCGTGSPCAACKFLRRKCQPDCVFAPYFPPDNPQKFVRVHRVFGASNVTKLMNEIHPLQREDAMNSLAYEADMRIRDPVYGCVGVISILQHNLRQLQQDLARAKYELSKYQAAAAASASTAPTGPQAMAEFIGSAMPNGAAHNFINLGHSAALGSLGGSTAMFGQQEQFGSNAQMLSRSYDGGEPIARIGMNNGGYEFGYSSATTMGGSAGAVSGGLGTLGISSPPFLKSGTAGGDEKPSGGQ

SEQ ID NO: 194644 - protein, 639 aa, Zea Mays
MAAGAGDPGQLDQLLLLDPYAEDDITNYCVEFHNAVVITIYSSIIIKPETGSSSSSSFACSTKCPSQALHNIGKPSLVAVVTIAGTPSSTLIDAQVVLGEMQPREHSTLMTATIELRFILWYFFILYLVALQQSPPWPQPVKSLVVVEYILPKPPWLAFDLGNLFRIHYTCSTRSASLQYTLQLSPDVGNIQNQCLDLCLVNLITGSALNVMVQQLLVSVGSPSNALVLKIPIQGVVDALHRKTLQGTGLNEEQMRQASVADNGHRQLNKIIVDLDQDNITAKNYAIAFYTEKHIQIPCLGGEHEVTFFHEYRDSVERVFVDHPSYHRPGNLYGAKVVLLGFQHYPVMLGTTVIIPTALVPQMGGKYEDKVVVIQTLMFVVGMNTLRQSFLGTRLPAVTGGSYAFVMYTISIILGGRSANEPSSHIKFLGIMRGTHGALIVASALQIIVAFSGLWCNVARYLSSLSATALVALVVFGLYELEIPRAGKIKALSVDAVIVFGSQRIPQEERQCTKISYSGAAGSAAASLVRCLGERGGADARPAGALHLGLQVVGATAQSRPTATAAAASTATTASMEITGPYEYDGPLPAAPTGAPPVAYATGIRSAGGMGVDIAHGLDAAERVCSNRARAAPDEMAAL

SEQ ID NO: 194645 - protein, 55 aa, Zea Mays
MLRRRWTTVNTVSINWEYSSYKLGHKLVCLESLQFVQTRLLKIECFQTGPKLNRA

SEQ ID NO: 194646 - protein, 112 aa, Zea Mays
MWTQESLHFVHSLKTFCQLKEVKEVVVVCDPDYSDVFEGSIDNLQIPLKFARPGKERQDSVFNGLQEIDGDSELVCVHDSARPLVSSEDVLEDAAVHGAAVLGVPVKATIKE

SEQ ID NO: 194647 - protein, 118 aa, Zea Mays
MPKQYLPLLGLPIAFLKTFCQLKEVKEVVVVCDPDYSDVFEGSIDNLQIPLKFARPGKERQDSVFNGLQEIDGDSELVCVHDSARPLVSSEDVKKVLEDAAVHGAAVLGVPVKATIKE

SEQ ID NO: 194648 - protein, 207 aa, Zea Mays
MELRLCLRLHARLPPATTPPPFQATAVLPASRRLRTGGSYGVALRRHTRRSSPAICASITDGEQGVAVKERSVSVILLSGGQGKRMGANMPKQYLPLLGLPIAFLKTFCQLKEVKEVVVVCDPDYSDVFEGSIDNLQIPLKFARPGKERQDSVFNGLQEIDGDSELVCVHDSARPLVSSEDVKKVLEDAAVHGAAVLGVPVKATIKE

SEQ ID NO: 194649 - protein, 212 aa, Zea Mays
MVIIALVPQDGAGRVGKMLFARQGKKFDNDLKQLRFSSDLLLEIGAGIELTTAAFPQFFLPMACVANVVKNVAAVTSTSTRTPIYKAYARGENIGDVTAKGESVGNIADLLGTGLSIFISKRNPSLVTSFAFLSCGYLLSSYQEVRSVVLNTLNRARFTVAVDSFIKTGHIPSLKEGNSQETIFNPPWRHETVAIGLCKCKCYSNCVPFLRY

SEQ ID NO: 194650 - protein, 69 aa, Zea Mays
MKADWSEWCAVSGRGTGAADSRAARKRWLFRACLLDCLEFSVCGEEGGRNSIPFFVCARVINSDSVGRE

SEQ ID NO: 194651 - protein, 190 aa, Zea Mays
MKELSLTIMELLELSLGVELRGYYREFFEDSRSIMRCNYYPPCPEPERTLGTGPHCDPTALTILLQDDVGGLEVLVDGEWRPVRPVPGAMVINIGDTFMALSNGRYKSCLHRAVVNQRRARRSLAFFLCPREDRVVRPPASAAPRRYPDFTWADLMRFTQRHYRADTRTLDAFTRWLSHGPAQAAAPPCT

SEQ ID NO: 194652 - protein, 163 aa, Zea Mays
MQSLKKLSAFTWENIAVTKRILMMYQMMISMTLRILSLMMLNCLQSYGLKVSWIVLESKMPFIDERSEEDYTTASKSEERMKRKRLAAAAKLEDGFPVVMRAGVAPQVSQPPITNNITYQIMDRTRGLNFLTGLVKRAPVEFLMTATEILARSRRKENLNTML

SEQ ID NO: 194653 - protein, 129 aa, Zea Mays
MEDPVAAPSSSSAAPAASAAARISAAAAAAVTSAVTSAPPALAPLQPSGTAAAVPEAASTCRRQLFTVELRPGESTIVSWKKLLKEAGHTATAPPVAPEPKFAAHAGPSGAVPVLYLPEMFYSEYQFLL

SEQ ID NO: 194654 - protein, 59 aa, Zea Mays
MSELMNLADRQMSLQRKGEERMHQVLIWRLIILLQLIILILAMYLENPLQEVLRRWENN

SEQ ID NO: 194655 - protein, 657 aa, Zea Mays
MTDATNFFWLLFNSQCWMRIFSFSLFFFYSEDTAKRRTQKSKSFKEVEKFDVFVLEKSSGCKFRSMQLLLFAIMSAAFLTILYTPSVYEHQLQSSSRLVNGWIWDKRSSDPRYVSSASIQWEDVYKSIQNLNVGEQKLSVGLLNFNRTEFDAWTHMLPESDFSIIRLEHANESITWQTLYPEWIDEEEETEIPSCPSLPDPSVPRATHFDVIAVKLPCSRVAGWSRDVARLHLQLSAAKLAATTARGNSGIHVLFVTDCFPIPNLFSCKDLVKREGNAWMYKPDVKALKEKLRLPVGSCELAVPLNAKARLYTVDRRREAYATILHSASEYVCGAITAAQSIRQAGSTRDLVILVDDTISDHHRKGLESAGWKVRIIQRIRNPKAERDAYNEWNYSKFRLWQLTDYDKVIFIDADLLILRNIDFLFALPEITATGNNATLFNSGVMVIEPSNCTFRLLMEHIDEITSYNGGDQGYLNEIFTWWHRIPKHMNFLKHFWEGDEEEVKAKKTRLFGANPPVLYVLHYLGRKPWLCFRDYDCNWNVEILREFASDVAHARWWKVHNRMPRKLQSYCLLRSSLKAGLEWERRQAEKANFTDGHWKRNVTDPRLKTCFEKFCFWESMLWHWGEKSKSNSTTTRNSAVPATTTTTPAAASLSSS

SEQ ID NO: 194656 - protein, 736 aa, Zea Mays
MDCSCSNPNSCNSVGLQPAEHAHIYTISSCCSPLGPLPLFKPTQSSAQEKGRKDEPEPLSRHLTPPIGRLRPTTRSCCRACRPLLSPLKPSPPPPPPPACLPSCRLPPGEDTAKRRTQKSKSFKEVEKFDVFVLEKSSGCKFRSMQLLLFAIMSAAFLTILYTPSVYEHQLQSSSRLVNGWIWDKRSSDPRYVSSASIQWEDVYKSIQNLNVGEQKLSVGLLNFNRTEFDAWTHMLPESDFSIIRLEHANESITWQTLYPEWIDEEEETEIPSCPSLPDPSVPRATHFDVIAVKLPCSRVAGWSRDVARLHLQLSAAKLAATTARGNSGIHVLFVTDCFPIPNLFSCKDLVKREGNAWMYKPDVKALKEKLRLPVGSCELAVPLNAKARLYTVDRRREAYATILHSASEYVCGAITAAQSIRQAGSTRDLVILVDDTISDHHRKGLESAGWKVRIIQRIRNPKAERDAYNEWNYSKFRLWQLTDYDKVIFIDADLLILRNIDFLFALPEITATGNNATLFNSGVMVIEPSNCTFRLLMEHIDEITSYNGGDQGYLNEIFTWWHRIPKHMNFLKHFWEGDEEEVKAKKTRLFGANPPVLYVLHYLGRKPWLCFRDYDCNWNVEILREFASDVAHARWWKVHNRMPRKLQSYCLLRSSLKAGLEWERRQAEKANFTDGHWKRNVTDPRLKTCFEKFCFWESMLWHWGEKSKSNSTTTRNSAVPATTTTTPAAASLSSS

SEQ ID NO: 194657 - protein, 230 aa, Zea Mays
MSPPSVMGQFGDTTYTKVFVGGLAWETQKETMRKYFEQFGEILEAVVITDKNTGRSKGYGFVTFRDSDAAMRACVDPAPVIDGRRANCNLASLGVQRSRPPTPQHGGARNFKVMKSFSQQAGIQGGLGAAFPSHATFPHYAIPQGLPYHIYGYSPYTLDYGYPTFGQSGNTTTNYTSGQGYNLQYPQMFHFSTVSSTAAAVNGFAQQYGGPLSLAASPQAQAVCIPIKQA

SEQ ID NO: 194658 - protein, 258 aa, Zea Mays
MSPPSVMGQFGDTTYTKVFVGGLAWETQKETMRKYFEQFGEILEAVVITDKNTGRSKGYGFVTFRDSDAAMRACVDPAPVIDGRRANCNLASLGVQRSRPPTPQHGGARNFKVMKSFSQQAGIQGGLGAAFPSHATFPHYAIPQGLPYHIYGYSPYTLDYGYPTFGQSGNTTTNYTSGQGYNLQYPQMFHFSTVSSTAAAVNGFAQQYGGPLSLAASPQAQAGMTMALAAPTMPTPTQAAHPYRLIPSVSTAPEQPLA

SEQ ID NO: 194659 - protein, 296 aa, Zea Mays
MSPPSVMGQFGDTTYTKVFVGGLAWETQKETMRKYFEQFGEILEAVVITDKNTGRSKGYGFVTFRDSDAAMRACVDPAPVIDGRRANCNLASLGVQRSRPPTPQHGGARNFKVMKSFSQQAGIQVWAIRKHYYQLYKWTRLQLAIPTNVPLLNCIIYSCSCERLCSAVWRTIVTSSKSSSPSRHDYGTRSSNHANSNTGCSSLPVDSLSVHCSRATLGLTMVSLLVIAVLSRFQLVESMHPSLTPKGTIVDHVYQPKCSHPYPTWSCGNWILALAPGWAQSFMPRGWGVLTDKYKP

SEQ ID NO: 194660 - protein, 150 aa, Zea Mays
MGGGLTVILLPLGFKDLGLLLPSMNFYNIYGGPQYTFYGGGAGMVTGTSPFYPYFQFGQSGNTTTNYTSGQGYNLQYPQMFHFSTVSSTAAAVNGFAQQYGGPLSLAASPQAQAGMTMALAAPTMPTPTQAAHPYRLIPSVSTAPEQPLA

SEQ ID NO: 194661 - protein, 100 aa, Zea Mays
MQCLSSVSFFYSSSSLFNLSPTSLLLYRTYPLLQPPPHHTCSLVMLGCLQHEEAISANHLIFSLPSVVELPIQIISISNRKVILPSIFISNSTDIELVDS

SEQ ID NO: 194662 - protein, 120 aa, Zea Mays
MEHVVVMVAALLLSSWSLHQRRVAEQWNQNTGHFPTSRLDAIQLISSLRYCNGRDCSYVLLVLFRLYGQRNRSYYTREIEDTILLASQKPEVYDDIARDTCCKFGIDRPQVVPVQGLPQV

SEQ ID NO: 194663 - protein, 104 aa, Zea Mays
MGSRPAAPSCWSPAEPPSVPDAASPWCSPLFPPALDDLALPPCSRFLHGRPFPCPGWRARPCIPARLISTSLFQPPPMDASPQPWMPNPLSLVPFFTAPASPCV

SEQ ID NO: 194664 - protein, 102 aa, Zea Mays
MDAEPPLFSAFLYSPCVAVRVRCLYKCSRGVPCHGQLFWRRRMFDVLCIPSTTPSTIGEEEMEHVVVMVAALLLSSWSLHQRRVAGLLLCVIGAIPLVRPTK

SEQ ID NO: 194665 - protein, 87 aa, Zea Mays
MLPDKYIGTYIVSKLHAIYINELLLKHEASICNLLARCLCSLQATASSSTMTACFWLFITLFRTPCTHVSTKDRPSKPLFSTQLQHR

SEQ ID NO: 194666 - protein, 471 aa, Zea Mays
MCHRTSKGPLPRAVQCQQAMVDTVAGATDYRGQPASRAATGGWKPSVFVMAMEIAERFAYKGVAANLITYLTGPLGQPMARAAASIDAWKGVSQMLPLPLACVADAWLGRYRAIVLASLIFAVSMGALSLSSALPALRGGHVAIFYVALYLVALGEGAHKPCAQAFAADQFDEKDPRESVARSSFFNWWYFGMCAGTAVTTMVSSYVQDNVGWGLGFGIPCIVIVASLALFLLGTRSYRFYTTAAASPFSRVGKALLALVQSWAPKHRTRRQRRRRRRRRGSEERAPPAAHMGVVHNLRDHLLPDIDVLHEAGRDAGPPDRREVQGAGGGAADVHQRQHRRLHPGVRPALRAPGAALHGEADGDHHAAEGRRRPGARPRRRGPVGARGDEAAPGCGGSRPGEYPQGAAPHGALVDGPAVRPHRRRRRVRHDRAAGVLLRPGPQRGAEPWAGPVPEHLRNRPPPQQLPHLRH

SEQ ID NO: 194667 - protein, 433 aa, Zea Mays
MDKYEAVRDIGSGNFGVARLMRNSETRELVAVKCIERGYRIDENVYREIINHRSLRHPNIIRFKEVILTPTHLMIVMEFAAGGELFDQICDRGRFSEDEARYFFQQLICGVSYCHYMQICHRDLKLENVLLDGSPAPRLKICDFGYSKSSVLHSRPKSAVGTPAYIAPEVLSRHEYDGKLADVWSCGVTLYVMLVGAYPFEDPDDPKNIRKTIQQIMQVQYKIPDYVHISTECQQLIARIFVANPVRRITMKEIKSHPWFLKNLPRELTETAQGMYYRRDNKVPSYSDQTSEEIMKIVRDARTMPKSSRSGYGWSAEYSDEEEKEEEHRLEEDEYDRRVKEVHASGELRSSGMYAVLASELLVLGQFSCNIIQYTEADYHVLVLTSTTERRTAVALAARHQRPARGPDDWTAKAVVATGKRRYAARPFYRFRN

SEQ ID NO: 194668 - protein, 398 aa, Zea Mays
MYVNHITEMEDGLNDDGMEYPFEGDANTSNNDQIVEDHADDAPIASGDNAIVQQQVGLRKKKYMYVNYHRVEQPDGSSVKQKWAKCLRCSHKAKSDASNGTKAFSNHLKLKHCLVKGQQQLIQSGNDIATYKYDEKASVRLLYYAIIMHEYPFTVAEHKYFVKFIKSLRPSFPFKSRITVRKEIMQLYKEEKNMLYAQFKKLTCRVSFTMDAWTSIQNKSYLCVTAHWIDDNWNMQKRIINFMHVEDSHGGIKLSDIFFVNVLNWNLDKKMFALSLDNAAANKVAVDIVIDNAKDLLICGGKFFHVRCANHILNLVAKDGLAVMGNAIANIRMFITAIKRSPLQFEAFQKCAKECDLDTKKVLSLDVATRWNSTYIMVRDAIYYKDAFDRLAKKDKDR

SEQ ID NO: 194669 - protein, 86 aa, Zea Mays
MDEIMEQNGQIWRTCQQQQGCSPTSQNEVTLPRNPWRWCARQRVEQVMVGAYQDKLPCQVWLAGKSDIAAQMNGRTTSYSSTQICF

SEQ ID NO: 194670 - protein, 87 aa, Zea Mays
MVGFRDFDRTMVKLEWLLNWTTFVTARVICHILITYKLVADAHKFGKGIELPLALLGMAGMNLLNIFLGLDLLKAFTRERNQQSHQD

SEQ ID NO: 194671 - protein, 168 aa, Zea Mays
MSHNHGDTIPLHPSSAQSDMDEIESLIHAAPSPATVLPARPPSPTRASIPVSSSPALAPAPVPTKPPLPAASIPISVSVSPVLTSVSVPIGADGFGPPPNTLTEPVWDTVKRDLARIVSNLKLVVFPNPYREDPGKALRDWDLWGPFFFIVFLGLTLSWSASVKKLGL

SEQ ID NO: 194672 - protein, 349 aa, Zea Mays
MARTKQTARKSTGGKAPRKQLATKAARKSAPATGGVKKPHRFRPGTVALREIRKYQKSTELLIRKLPFQRLVREIAQDFKTDLRFQSSAVSALQEAAEAYLVGLFEDTNLCAIHAKRVTIMPKDIQLARRIRGSIQPRGRVRVDLCVEAMKITALLVLKPSTSGAGSSSSGGESGPEAVVLANAIDVSHFGYFQRSAAREFIVFVARTVAQRTQPGQRQSVQHEEYKVHSHNRNGLCAVAFMDDHYPVLDEYQKAYGDSWKSVTADETQQWAFLTDALTKFQDPAEADKLMKIQRDLDETKIILHKTIESVLARGERLDSLVEKSSDLSAASQMFYKQAKKTNQCCTIL

SEQ ID NO: 194673 - protein, 294 aa, Zea Mays
MARTKQTARKSTGGKAPRKQLATKAARKSAPATGGVKKPHRFRPGTVALREIRKYQKSTELLIRKLPFQRLVREIAQDFKTDLRFQSSAVSALQEAAEAYLVGLFEDTNLCAIHAKRVTIMPKDIQLARRIRGSIQPRGRVRVDLCVEAMKITALLVLKPSTSGAGSSSSGGESGPEAVVLANAIDVSHFGYFQRSAAREFIVFVARTVAQRTQPGQRQSVQHEEYKVHSHNRNGLCAVAFMDDHYPVRSAFSLLNQVLDEYQKAYGDSWKSVTADETQQWAFLTDALTKFQVR

SEQ ID NO: 194674 - protein, 129 aa, Zea Mays
MRSCSSARQMLLTRLSSVSCSSTAQQLHAGVGKFAAAACWSWKKKREELPCFRARLAGKPPRASPAKGGIVPASDDDDGVSLGTVKLPGNIDTARLESLLFQWGNSLCQGANLPLPVPLKISSPDAIDQ

SEQ ID NO: 194675 - protein, 111 aa, Zea Mays
MRSCSSARQMLLTRLSSVSCSSTAQQLHAGVGKFAAAACWSWKKKREELPCFRARLAGKPPRASPAKGGIVPASDDDDGVSLGTVKLPGNIDTARLESLLFQISSPDAIDQ

SEQ ID NO: 194676 - protein, 104 aa, Zea Mays
MQREEGKVSGRSSSAWASEAVSTMEMTHSKLFPFFMTGLLPQEAMQYLDLVCRCTKNTRHLVSMLRSLAERLEDANPSIIHNNPTKLVANVFGGFWTIVKAWRV

SEQ ID NO: 194677 - protein, 55 aa, Zea Mays
MLKVYLFVICLLANFCPQKESKLRKVEIKLTKWRSQSAFTPMREKIIHRKPCSFL

SEQ ID NO: 194678 - protein, 72 aa, Zea Mays
MCALLVALGFAEDWKAAAQMIREKRPSISMNTLHRKSLEEWSKHLLSSKRSGESDVIKLVKHTRRDGKPRGC

SEQ ID NO: 194679 - protein, 261 aa, Zea Mays
MGWGISRLIGLKAAALLSVACFFQGLGVTLISFPLIYASIIAILVSIASRPSIDLPLLLGKASDGSFPLWSWIIFSPFLLFIHLFVLLRRFVKNEPLYTEVADGVFVGGWPSSVEHLPPGDPAIIDCTCELPKSSTISNNAYLCIATWDTRAPQPSQIESAVQWAVRKRSQNKPVYVHCAYGHGRSVCVMCALLVALGFAEDWKAAAQMIREKRPSISMNTLHRKSLEEWSKHLLSSKRSGESDVIKLVKHTRRDGKPRGC

SEQ ID NO: 194680 - protein, 255 aa, Zea Mays
MGWGISRLIGLKAAALLSVACFFQGLGVTLISFPLIYASIIAILVSIASRPSIDLPLLLGKASDGSFPLWSWIIFSPFLLFIHLFVLLRRFVKNEPLYTEVADGVFVGGWPSSVEHLPPGDPAIIDCTCELPKSSTISNNAYLCIATWDTRAPQPSQIESAVQWAVRKRSQNKPVYVHCAYGHGRSVCVMCALLVALGFAEDWKAAAQMIREKRPSISMNTLHRKSLEEWSKHLLSSKRSGESDVTDYCLPTKMC

SEQ ID NO: 194681 - protein, 66 aa, Zea Mays
MADDIGSRVDFGILSLLISDKLISNNVKIASPFLHLSIDRSGLASYNLLVSLCKIPIAVFTCVAQY

SEQ ID NO: 194682 - protein, 254 aa, Zea Mays
MGWGISRLIGLKAAALLSVACFFQGLGVTLISFPLIYASIIAILVSIASRPSIDLPLLLGKASDGSFPLWSWIIFSPFLLFIHLFVLLRRFVKNEPLYTEVADGVFVGGWPSSVEHLPPGDPAIIDCTCELPKSSTISNNAYLCIATWDTRAPQPSQIESAVQWAVRKRSQNKPVYVHCAYGHGRSVCVMCALLVALGFAEDWKAAAQMIREKRPSISMNTLHRKSLEEWSKHLLSSKRSGESDQPPNSAVHGR

SEQ ID NO: 194683 - protein, 384 aa, Zea Mays
MASEMSKNVKALDEQEVTSQHSRAQTSDAAEEQQQQQQAVDPLARQSSIMSLTLEELQNSLCEPGRNFGSMNMDEFMANIWNAEEFQAATAGCNKEGAEREPVPVATTTGTGENGGGGGSGRGLVRQGSFALPPPLSRKTVEEVWAEISQGPADFQASAAPQPVAQPQAASGGGVAASGRQATLGEMTLEDFLVKAGVVRGAFAGHGHGVGMVPAGPMGMQHNAAPPMMYQVAAAAAPPPGAVYPVMGDGMGYHGGGYPGGVAVVPPPPPSQCVAAAASPGSSDGMSAMTQAEMMNCIGNGGVVRNGGGGARKRDFPEDGCTEKTVERRQRRMIKNRESAARSRARKQAYTVELEAELNHLKEENERLRAEERTILLSKKKMVQ

SEQ ID NO: 194684 - protein, 78 aa, Zea Mays
MPARDHAAGLAPRLPTRSLRFSGSSLLSLRRRGSIAKLGPLAHRGCRTRTHAAAWRRAAPFRLPRRLRRRIPWSLRLS

SEQ ID NO: 194685 - protein, 80 aa, Zea Mays
MMGEIRRMLISISSKLNFYLRTCQKGIMKLHECQLRHGPTISIILVPFMILICICMFVYVCISELGLLLHVAPHIVLLFV

SEQ ID NO: 194686 - protein, 123 aa, Zea Mays
MPKIKTSRVKYPEGWELIEPTIRELDAKMREAENDPHDGKRKCEALWPIFRISHQRSRYIYDLYYRRKEISQELYEFCLDQGYADRNLIAKWKKVTSAFAASGAYRHVITTSQRHASAASPSI

SEQ ID NO: 194687 - protein, 147 aa, Zea Mays
MKTSSHVSLTGPRGERGWGMLPHPHPRLPVGGEIFPVYIPVGEEISPSPSPNRGIPHGESGIGSPLPSLPTVRYGSVARALYSLWGGQRAWDGAITPGPARVRVRRPPLAVGEMWRTRVQTDHPHPHPHYAGRLCACSQRGEEQRSL

SEQ ID NO: 194688 - protein, 62 aa, Zea Mays
MSAYIFFSLGYVWTQEESDWVPNQVILKLNRATFLCYVDPKRLVSSLPISVTFIHFLTLLVN

SEQ ID NO: 194689 - protein, 360 aa, Zea Mays
MEVAAVACRAGLLARARPSSRARTWAVAVGPAPSAARRRLLVASLGVGEPLPAQSLGEEAVALEVIRFRCRLAVGEEEDDLNSIVSVENLPPAAAHVPEARRTTVRVRFVLRKQCAFGHQFLVAGDDAALGLWDPAKAISLVWSEGHVWTANTDLPANRSIEFKFLLRDASGHAHWQHGANRTLRITTETPNTVVVHEDWDHGNKQKVSEEEELSIGEDVMFPDDLAGTDGASAMPADNPEKHQNVETDSDRSAAVVADAPPQQEMVAANGTGQPQLVVDGHKTILEEVPGEENGTLSAANYAGNGSIDDDDDDDTTLYQGGDVLPNRPTSIFENDLAWAGKAMQQLLRVLGFQIGTTRT

SEQ ID NO: 194690 - protein, 377 aa, Zea Mays
MEVAAVACRAGLLARARPSSRARTWAVAVGPAPSAARRRLLVASLGVGEPLPAQSLGEEAVALEVGEEEDDLNSIVSVENLPPAAAHVPEARRTTVRVRFVLRKQCAFGHQFLVAGDDAALGLWDPAKAISLVWSEGHVWTANTDLPANRSIEFKFLLRDASGHAHWQHGANRTLRITTETPNTVVVHEDWDHGNKQKVSEEEELSIGEDVMFPDDLAGTDGASAMPADNPEKHQNVETDSDRSAAVVADAPPQQEMVAANGTGQPWWWTGTRRFLKRSPEKKTAPFLPPIMLVMAASTTMTTTTLPCIREVMCYRTGRQVYLRTTWLGPGKPCSSCSGSSVSRSAQQEREVQLQMPLCVYVANLQLTSLRRKKRRC

SEQ ID NO: 194691 - protein, 539 aa, Zea Mays
MTQFLKDEGVVLSPEDENKREKVIRELKKIVMHWANAVAYEQSVPQGLATATVLTYDSYTLGVGRMAGQFAKPRSEPLEERDGVKLPSYRGDNVNGDDFTEKSRVPDPQRMIRAYSQSVATLNLLRALATGGYAAMQRVTQWNLDFMDHSEQAHMLWVGERTRQLDGAHVEFLCGVANPLGIKVSDKMNPSDLVKLIEILNPSNKPGRITIITRMGAENMRYSDLSNNNLNGDLPYQLPPNVVELNLGKNHLSGQLTDMFSQLPKLSTLNVESNQFSGHIDVLAKLPLEDLDYIWVYANRHRIWWLRQSQANIQWACEDVARQQQEIQNQAASMLKHEASLKRDDKTIILHLHLGHPPARVEDELLPCLCQLCAPSFAACLPRPQGGCVGVASDKAKAPSTGASPSSPCRASTGAPSASEGSEKSRGFWVRAIVVNGLLQREDWETAIKVPLGIISAGTGNGMARSLLHAAGEPFSISNAVFAIIRGHKRALDVTSVVQGKARFFSVLMLTWGLVADVDIESEKYRWMGSARLDFYLLL

SEQ ID NO: 194692 - protein, 342 aa, Zea Mays
MERFYYVAVATFVLVFLLHHLLTRKKQQRLPPGPRFAYPILGHLPLLKKPLQTSFADLVSRHGPIIHLRLGRRHAVVVGSAAVAKECFSGELDVAIANRPHFPSAREVTFDYSVLTAVNYGALWRTMRRVSTVHLLSAHRVNVMSDTVIARELRVMVRRLARASASAPGDAARVELKRRLFDLSHSVLMEIMAQTRNTYSDDPEEDMSREARDMKDIIEEIIPLVGAANLWNYVPLLRWLDLYGAKRKLADVVNRRDLIFDNMIGAERQKLRQLERKKGEAHASESDKMGMIGVMLSLQKTEPDVYTDTFINALVICWPPARRRPRRLWNGQCRSCLTTQTC

SEQ ID NO: 194693 - protein, 91 aa, Zea Mays
MAEGVVAGVVAPMAVARAVAGDRGLEQRLGEDKVKILEQAFMEAADNALPHPMEDAYLEACHTNNMEWKMCIYGADCSEISLVQVRGSAMN

SEQ ID NO: 194694 - protein, 76 aa, Zea Mays
MCIYGADCSEISLVQVRGSGMLKDSACHELDKIRSLKRPYIKRVQDRHKEVQVFEESDLMRSLRKINLKVTFMMIQ

SEQ ID NO: 194695 - protein, 65 aa, Zea Mays
MATTMTPTTSSPWTPKLKIMLAVEPLIPSEGPKIGEHISVTRNGKCAYMVLIAVRLASSKLGDLP

SEQ ID NO: 194696 - protein, 111 aa, Zea Mays
MDLLSSGTSFEEAVKPRKWLNPTDWGRRAWCRSRLGPHEVNSEARMATTMTPTTSSPWTPKLKIMLAVEPLIPSEGPKIGEHISVTRNGKCAYMVLIAVRLASSKLGDLVC

SEQ ID NO: 194697 - protein, 95 aa, Zea Mays
MATTMTPTTSSPWTPKEWKMCIYGADCSEISLVQVRGSGMLKDSACHELDKIRSLKRPYIKRVQDRHKEVQVFEESDLMRSLRKINLKVTFMMIQ

SEQ ID NO: 194698 - protein, 53 aa, Zea Mays
MEGYIRPLDVVIIVLQYIPCSDDQHSDGVADDHPSDSLFSPTYHHHKVRYLNK

SEQ ID NO: 194699 - protein, 81 aa, Zea Mays
MAHLEKTLEMSAGSPSVAALARRLLTRRRSLLTRPTPDQRHYSSSRRQSRVPVPAVARGPLHQHAGITLGHGLRPPATLRR

SEQ ID NO: 194700 - protein, 118 aa, Zea Mays
MTSVDPMHFLRLARTERTTREKLMGRNRKVKKRQFLQLQNQVRLPRRARMTMILMRTRLMILTRTRQTILMRVRVCLLKKAMMMIQVMKMIPVTMRRKTLQLLRSMRQARRELLKVSC

SEQ ID NO: 194701 - protein, 132 aa, Zea Mays
MDLPRNQTPLNRSHHQRTTIRVLLRCSSTTEAQSEPHRLARTERTTREKLMGRNRKVKKRQFLQLQNQVRLPRRARMTMILMRTRLMILTRTRQTILMRVRVCLLKKAMMMIQVMKMIPVTMRRKTLQLLRR

SEQ ID NO: 194702 - protein, 97 aa, Zea Mays
MLMGRNRKVKKRQFLQLQNQVRLPRRARMTMILMRTRLMILTRTRQTILMRVRVCLLKKAMMMIQVMKMIPVTMRRKTLQLLRSMRQARRELLKVSC

SEQ ID NO: 194703 - protein, 100 aa, Zea Mays
MDLCYTNLLGWGRGRGEVELRSERMGLDLFVSLSLSPLPTAWLVTGERAALGPPRWTGPSNSTTPAASAWLGERAAQLRQRGQPKREDEEAERDGPMEGA

SEQ ID NO: 194704 - protein, 128 aa, Zea Mays
MYTELKRMPHCRPWRLVLDERSRSELPRAGSWTTRLCHSSSSSHEGLHVHHQGAGGGVGGGRGRRRARGVAWEVDGGDVVDAGPPLVLAAGAEPDEVLLRVAGHLLGTEGMEQALGLRWVLWLEPSGV

SEQ ID NO: 194705 - protein, 222 aa, Zea Mays
MTELKVEPADLELLARNCKSLISLKMSDCDLSDLIGFLQTSKALQEFAGGAFFEVGEYTKYEKVKLPPRLCFLGGLTFMGKNEMPVIFPYSASLKKLDLQYTFLTTEDHCQLIAKCPNLLVLEVRNVIGDRGLEVVADTCKKLRRLRIERGDDDPGQEEQESLSDRPDSRSCRLRELEYIAAYVSDITNSGFSHQSAIGIISGFGGDDFSGIFVEGMATAPV

SEQ ID NO: 194706 - protein, 61 aa, Zea Mays
MKIRPRAATFLHSTSGVAKMAFAIVIPSIPISPSRLLEGLHLAVEPLQYLPRQTPQLFVKQ

SEQ ID NO: 194707 - protein, 223 aa, Zea Mays
MMKDGCKPNSHVYNALINGFCRACKISDAVKIYIEMTGNGCCPTIITYNTLIDGLCKAEKYQEASSLTKEMLERGFKPDIRTYGSLIRGLCRVKKIDAALCIWNEILDAGIQVDVIVHNILIHGLCSAGKVNDAFCIYLEMKEKNCSPNLVTYNTLMDGFYEIGSIDTAASLWAAILDNGLKPDIVTYNTRIKGLCSCNRTPEGVLLLNEVLATASGGEISCS

SEQ ID NO: 194708 - protein, 81 aa, Zea Mays
MKLVQWLNLLIERYKRKKKNVLCCMPHACVRYFWVACMLWWVGTWCMPRGVGLLLHLRGCARVWCEIALPCVCIKAFIYVE

SEQ ID NO: 194709 - protein, 158 aa, Zea Mays
MFSLADHGICIEQEKLPLEDQISQTWFCGKYCKEIFIGLRSHVGTDNILDSDLSWSILRCNNDGQKLHSVQKIACLAECNMKLAVALTLLEECIIRMVDPRTGVDMIPHVLYNKGSNFARVDYQGFYTVILEKGDKILCVASIRLSTARNVPNSNEHH

SEQ ID NO: 194710 - protein, 191 aa, Zea Mays
MYVARESTKLWRRVCAETTAELQLLLQKWQLLLAGLVFQYIHGLAARGVHYLHQPGPLLQDLGFMALPELGQEKGYLSESVFTFIFISFLLWSFHPFIYHSKRFYTVLLWRRVLAFLVASQFLRIMTFYSTQLPGPNYHCREGSKLATLPPPNNALEVLLINCTRLIWLYFLLITSCQKWQTVQMDCLCFQ

SEQ ID NO: 194711 - protein, 165 aa, Zea Mays
MALPELGQEKGYLSESVFTFIFISFLLWSFHPFIYHSKRFYTVLLWRRVLAFLVASQFLRIMTFYSTQLPGPNYHCREGSKLATLPPPNNALEVLLINFPRGVLFGCGDLIFSSHMIFTLVFVRTYHKYGSNRLIKLLSWFMAVIQSLLIIASRKHYTVDVVVAW

SEQ ID NO: 194712 - protein, 229 aa, Zea Mays
MYVARESTKLWRRVCAETTAELQLLLQKWQLLLAGLVFQYIHGLAARGVHYLHQPGPLLQDLGFMALPELGQEKGYLSESVFTFIFISFLLWSFHPFIYHSKRFYTVLLWRRVLAFLVASQFLRIMTFYSTQLPGPNYHCREGSKLATLPPPNNALEVLLINFPRGVLFGCGDLIFSSHMIFTLVFVRTYHKYGSNRLIKLLSWFMAVIQSLLIIASRKHYTVDVVVAW

SEQ ID NO: 194713 - protein, 104 aa, Zea Mays
MTFYSTQLPGPNYHCREGSKLATLPPPNNALEVLLINFPRGVLFGCGDLIFSSHMIFTLVFVRTYHKYGSNRLIKLLSWFMAVIQSLLIIASRKHYTVDVVVAW

SEQ ID NO: 194714 - protein, 320 aa, Zea Mays
MYVARESTKLWRRVCAETTAELQLLLQKWQLLLAGLVFQYIHGLAARGVHYLHQPGPLLQDLGFMALPELGQEKGYLSESVFTFIFISFLLWSFHPFIYHSKRFYTVLLWRRVLAFLVASQFLRIMTFYSTQLPGPNYHCREGSKLATLPPPNNALEVLLINLLFGCGDLIFSSHMIFTLVFVRTYHKYGSNRLIKLLSWFMAVIQSLLIIASRKHYTVDVVVAWYTVNLVVFFVDNKLPEMADRTNGLSLLPVSTKDKDGRMKEELHKLEKDGRMMDEFHKLLNGNSIDATDWRQRVQMNGKHGEDTSHTVADATSAGT

SEQ ID NO: 194715 - protein, 162 aa, Zea Mays
MEPKKSSVQRQPHAMEPNKSSPCGATATAPAATTEAESPLCSLFYPPAPAPTAANGKDSDLYSILYKGQSGSAQAGVTGNGKPQWAPSRSRAANAKDGKHSPPYDSVDTSCFGSSVDYGGRDYFYGSSTPKKVTESSTDYKGNKKDPAADSHGDWWQGSFYY

SEQ ID NO: 194716 - protein, 146 aa, Zea Mays
MEPKKSSVQRQPHAMEPNKSSPCGATATAPAATTEAESPLCSLFYPPAPAPTAANGKDSDLYSILYKGQSGSAQAGVTDGKPQWAPSRSRAANAKDGKHSPPYDSVDTSCFGSSVDYGGRDYFYGSSTPKKVTESSTDVRITETFK

SEQ ID NO: 194717 - protein, 180 aa, Zea Mays
MEAGAQNATRRAVSSDPPCSPRPRLSAAACNRFTCPSQVPFPTPNGAEEILRPAPAPRHGAQQVLSMRRHRHRSRRHHRSRVPVVQLVLPAGAGADRDGKPQWAPSRSRAANAKDGKHSPPYDSVDTSCFGSSVDYGGRDYFYGSSTPKKVTESSTDYKGNKKDPAADSHGDWWQGSFYY

SEQ ID NO: 194718 - protein, 684 aa, Zea Mays
MPKQLVFKIIFMVKQLNFQGYEVILVTSGAVGVGRQRLQYRKLIHSSFADLQNPQMNFDGKACAAVGQSVLMAIYDTLFSQLDVTSSQLLVTDRDFKDPSFGDQLRETVFSLLDLKVVPLFNENDAISTRRQPYEDSSGIFWDNDSLAALLAAELNADLLIMLSDVEGLYSGPPSDPQSKIIHTYVNEKHGKLISFGEKSSVGRGGMQAKVSAAANAASKGVPVVIASGFATDSIITVLKGEKIGTLFHNEANLWACSKEATAREMAVAARDCSRRLQKLSSEERKQILLDIADALEANEDAIRSENDADVEAAQVAGYEKSLVARMTLKPGKITNLARSIRKTADMEDPISHTLKRTEVAKDLVFEKAYCPLGVLLIIFESRPDALVQIASLAIRSGNGLLLKGGKEVMRSNAILHKVITGVIPDTVGKKLIGLVTSKEEIADLLALDDVIDLVIPRGSKSLVSQIKATTKIPVLGHADGICHVYIDKSADMDMAKRIVLDAKIDYPAACNAMETLLVHKDLNKSEGLDDLLVELEKEGVVIYGGPVAHDKLKVPKVDSFRHEYSSMACTVEFVDDVQSAIDHINRYGSAHTDCIITTDRSAAEAFLQQVDSAAVFHNASTRFCDGTRFGLGAEVGISTERIHARGPVGVDGLLTTRCILRGSGQVVNGDKGVVYTHKDLPLQ

SEQ ID NO: 194719 - protein, 629 aa, Zea Mays
MNFDGKACAAVGQSVLMAIYDTLFSQLDVTSSQLLVTDRDFKDPSFGDQLRETVFSLLDLKVVPLFNENDAISTRRQPYEDSSGIFWDNDSLAALLAAELNADLLIMLSDVEGLYSGPPSDPQSKIIHTYVNEKHGKLISFGEKSSVGRGGMQAKVSAAANAASKGVPVVIASGFATDSIITVLKGEKIGTLFHNEANLWACSKEATAREMAVAARDCSRRLQKLSSEERKQILLDIADALEANEDAIRSENDADVEAAQVAGYEKSLVARMTLKPGKITNLARSIRKTADMEDPISHTLKRTEVAKDLVFEKAYCPLGVLLIIFESRPDALVQIASLAIRSGNGLLLKGGKEVMRSNAILHKVITGVIPDTVGKKLIGLVTSKEEIADLLALDDVIDLVIPRGSKSLVSQIKATTKIPVLGHADGICHVYIDKSADMDMAKRIVLDAKIDYPAACNAMETLLVHKDLNKSEGLDDLLVELEKEGVVIYGGPVAHDKLKVPKVDSFRHEYSSMACTVEFVDDVQSAIDHINRYGSAHTDCIITTDRSAAEAFLQQVDSAAVFHNASTRFCDGTRFGLGAEVGISTERIHARGPVGVDGLLTTRCILRGSGQVVNGDKGVVYTHKDLPLQ

SEQ ID NO: 194720 - protein, 459 aa, Zea Mays
MLHQKVYLLSLQVLKGEKIGTLFHNEANLWACSKEATAREMAVAARDCSRRLQKLSSEERKQILLDIADALEANEDAIRSENDADVEAAQVAGYEKSLVARMTLKPGKITNLARSIRKTADMEDPISHTLKRTEVAKDLVFEKAYCPLGVLLIIFESRPDALVQIASLAIRSGNGLLLKGGKEVMRSNAILHKVITGVIPDTVGKKLIGLVTSKEEIADLLALDDVIDLVIPRGSKSLVSQIKATTKIPVLGHADGICHVYIDKSADMDMAKRIVLDAKIDYPAACNAMETLLVHKDLNKSEGLDDLLVELEKEGVVIYGGPVAHDKLKVPKVDSFRHEYSSMACTVEFVDDVQSAIDHINRYGSAHTDCIITTDRSAAEAFLQQVDSAAVFHNASTRFCDGTRFGLGAEVGISTERIHARGPVGVDGLLTTRCILRGSGQVVNGDKGVVYTHKDLPLQ

SEQ ID NO: 194721 - protein, 577 aa, Zea Mays
MAVPIQRPSARHVSEIGHVGVRCGAPAPEETDTAPTLASQPHARKSKWPPQARNQHQRFARLLRCPLPSASDRNQRWIRRPRLPEEMNGRGTGGGGGGEDEMEEDSGPSCAQGEGAGNKERVVLMWGYLPGVSPQRSPLLGPVPVRLPPTAATAAGDGWRDVCGGGCGFAMAISESGKLLTWGSADDMGQSYVTAGKHEETPEAFPLPSSVVIVRADAGWAHCVAITECVPTGRVIGDQSSVGTMEKDERQMAMATDQVSPRSQVSRTSSGAAAGSSESRGTDDSTKRRKLSLAKHGPESSTSSDESLSAPPCVVTFSTGVKIVAVAAGGRHTLALSDLGQVWGWGYGGEGQLGLGSRIRTVSSPHPVPCIESALYTKDRPSAMKGNKAAEGHVSKVLGNCVRAIACGGRHSAVVTDSGALLTFGWGLYGQCGQGNTDDVLSPTCVSSILGIKMQDVAAGLWHTVCTSVDGDVYSFGGNQFGQLGTGSDQAETLPKLVDATSLENKNARSVSCGARHSAIITDEGEVFCWGWNKYGQLGLGDSMDRNVPCSVRVDAYHPLNVSCGWWHTLVLAESPA

SEQ ID NO: 194722 - protein, 208 aa, Zea Mays
MAVPIQRPSARHVSEIGHVGVRCGAPAPEETDTAPTLASQPHARKSKWPPQARNQHQRFARLLRCPLPSASDRNQRWIRRPRLPEEMNGRGTGGGGGGEDEMEEDSGPSCAQGEGAGNKERVVLMWGYLPGVSPQRSPLLGPVPVRLPPTAATAAGDGWRDVCGGGCGFAMAISESGKLLTWGSADDMGQSYVTAGKHEKLFHFLAVS

SEQ ID NO: 194723 - protein, 334 aa, Zea Mays
MEKDERQMAMATDQVSPRSQVSRTSSGAAAGSSESRGTDDSTKRRKLSLAKHGPESSTSSDESLSAPPCVVTFSTGVKIVAVAAGGRHTLALSDLGQVWGWGYGGEGQLGLGSRIRTVSSPHPVPCIESALYTKDRPSAMKGNKAAEGHVSKVLGNCVRAIACGGRHSAVVTDSGALLTFGWGLYGQCGQGNTDDVLSPTCVSSILGIKMQDVAAGLWHTVCTSVDGDVYSFGGNQFGQLGTGSDQAETLPKLVDATSLENKNARSVSCGARHSAIITDEGEVFCWGWNKYGQERALQCTCGRLPPAKRIMWLVAHLGARGVACLKPDKEITLD

SEQ ID NO: 194724 - protein, 333 aa, Zea Mays
MEKDERQMAMATDQVSPRSQVSRTSSGAAAGSSESRGTDDSTKRRKLSLAKHGPESSTSSDESLSAPPCVVTFSTGVKIVAVAAGGRHTLALSDLGQVWGWGYGGEGQLGLGSRIRTVSSPHPVPCIESALYTKDRPSAMKGNKAAEGHVSKVLGNCVRAIACGGRHSAVVTDSGALLTFGWGLYGQCGQGNTDDVLSPTCVSSILGIKMQDVAAGLWHTVCTSVDGDVYSFGGNQFGQLGTGSDQAETLPKLVDATSLENKNARSVSCGARHSAIITDEGEVFCWGWNKYGQLGLGDSMDRNVPCSVRVDAYHPLNVSCGWWHTLVLAESPA

SEQ ID NO: 194725 - protein, 589 aa, Zea Mays
MAVPIQRPSARHVSEIGHVGVRCGAPAPEETDTAPTLASQPHARKSKWPPQARNQHQRFARLLRCPLPSASDRNQRWIRRPRLPEEMNGRGTGGGGGGEDEMEEDSGPSCAQGEGAGNKERVVLMWGYLPGVSPQRSPLLGPVPVRLPPTAATAAGDGWRDVCGGGCGFAMAISESGKLLTWGSADDMGQSYVTAGKHEETPEAFPLPSSVVIVRADAGWAHCVAITDEYDVYTWGWKECVPTGRVIGDQSSVGTMEKDERQMAMATDQVSPRSQVSRTSSGAAAGSSESRGTDDSTKRRKLSLAKHGPESSTSSDESLSAPPCVVTFSTGVKIVAVAAGGRHTLALSDLGQVWGWGYGGEGQLGLGSRIRTVSSPHPVPCIESALYTKDRPSAMKGNKAAEGHVSKVLGNCVRAIACGGRHSAVVTDSGALLTFGWGLYGQCGQGNTDDVLSPTCVSSILGIKMQDVAAGLWHTVCTSVDGDVYSFGGNQFGQLGTGSDQAETLPKLVDATSLENKNARSVSCGARHSAIITDEGEVFCWGWNKYGQERALQCTCGRLPPAKRIMWLVAHLGARGVACLKPDKEITLD

SEQ ID NO: 194726 - protein, 264 aa, Zea Mays
MCQNMMHEVVADEHRKADCSGEETAWKAVMERSFARLDEQAASWATSRSRDEPSCRCEQQKPLRCDHVGSTAVVAVVSPTHVVVANAGDSRAVLSRAGVPVPLSVDHKPDRPDELARIKAAGGRVIYWDGARVLGVLAMSRAIGDGYLKPFVSSEPEVTVTERTDDDECLILASDGLWDVVTNEMACEVVRACFHSNGPPAPAARANGAALRAAENGSAAAKGVSVEDSDKACSDAAMLLAKLALARRSADNVSVVVVDLRRGI

SEQ ID NO: 194727 - protein, 176 aa, Zea Mays
MQIKFLISFSVRLCVHKCTMRISSARRSSSLLPWPSASPAAGACPLPWPRRIEAPAMALRFLCDVLLPLIFLLAGSNIQSRPGFARSYARPVDLPAPALRPTPASSAPLSLCSASFLCPLSPSIACSYAARNFLCVQVPQLASMPRRPGPYLTVSLCARVAVWFRAPGSSFPCARS

SEQ ID NO: 194728 - protein, 82 aa, Zea Mays
MVRKAITATWDERQTVTGEHTIPHPQRPAVATTLTPFVGDENHQVRRLAQHRCHFACCSKLEWTGLSLFNILIISHCVEQGG

SEQ ID NO: 194729 - protein, 83 aa, Zea Mays
MDPIQVGSQVNPTVFANKFRYKSRTQTDSVHAWTADSLDRGPFGHRGGQSAWYFCCSTFLHQRQTKDIISVQIDQVRPTKIGR

SEQ ID NO: 194730 - protein, 353 aa, Zea Mays
MGDVLHSQPGAADVAVWPGELDEQLITELLSDDSLLLGALQQAPAGDSEHCCSSDPGGASSAPAPCISGDGGTATEQELLLPQPEAVSRALCSVYTGPTIRDIEKALSASKPYPWSRSRYSPMHLLGAVSRAPEKYTTKVKSCDGKTPSDGYKWRKYGQKSIKNNPHPRSYYKCTSSRCGAKKHVEKSPDDPEMLSVTYEGAHLHGPQPLFPRRRQWLPVGMGATTTKQQQQQACSASSLSPAALASDDAGGGWPSSSQQLVTSNVQAREPTAAAAAGESETVPGPQTAGHAGDAASTQTHLLLLTADSCDDGSTASMPPPRLAAATFHCDSPPAPTTWSCSVLESILPRIDS

SEQ ID NO: 194731 - protein, 577 aa, Zea Mays
MVVRNEDRTYTAIREMCNLVLSDAKRLIGRRFSDPSVQSDMKLWPFKVIPGPGDKPMIVVNYKGEEKQFAAEEISSMVLIKMKEIAEAYLGSTIKNAVVTVPAYFNDSQRQATKDAGVIAGLNVMRIINEPTAAAIAYGLDKKATSSGEKNVLIFDLGGGTFDVSLLTIEEGIFEVKATAGDTHLGGEDFDNRMVNHFVQEFKRKNKKDISGNPRALRRLRTACERAKRTLSSTAQTTIEIDSLFEGIDFYSTITRARFEELNMDLFRKCMEPVEKCLRDAKMDKSSVHDVVLVGGSTRIPKVQQLLQDFFNGKELCKSINPDEAVAYGAAVQAAILSGEGNEKVQDLLLLDVTPLSLGLETAGGVMTVLIPRNTTIPTKKEQVFSTYSDNQPGVLIQVYEGERARTKDNNLLGKFELSGIPPAPRGVPQITVTFDIDANGILNVSAEDKTTGQKNKITITNDKGRLSKEEAKNALENYAYNMRNTIKDDKIASKLPAEDKKKIEDAVDGAISWLDSNQLAEVEEFEDKMKELEGICNPIIAKMYQGEGAGMGAAAGMDEDAPSGGSGAGPKIEEVD

SEQ ID NO: 194732 - protein, 146 aa, Zea Mays
MLLQWHTSSSWIGRMSFERPNLQRRRLLNESLLIHGPSHVLANSGQDLKSPRARKRTAYELIARLCPNRRKFGTREMYLCFAYWSCNRSNYMIKFVYASVCQSCVAVSVDRYVRLVSDDVSFHRLPVLNQKNVIAISSTEKKNAQE

SEQ ID NO: 194733 - protein, 215 aa, Zea Mays
MKQKGVNPPSHEAFSDEWLENGQCPLARSYRAMSGVLPLVAKALQPPAGMKLKCPPAVVAVRAALARTALVKSLRPQPLPSKMVAIALLGMAANIPLGVWREHTKKFSPQWFAAVHAAVPFIAMLRKSVVMPRTAMAFTIAASIVGQTIGSRAERIRLRNQAANGTGDSSTHTAMYPNKNGHCSDTEGKAWDPLATKITGSTARGSPAPTPSVCF

SEQ ID NO: 194734 - protein, 164 aa, Zea Mays
MEMFFGSFLSESVSPQNLFGHPDVEKCPFLRNINGATTFSLASALPVAAQGGKGPIFEEGSGFESAFKLFHGRDGIVPLSERSYVSDENHNESIDVRTEPALPFNPLAARAATISLSAFGPFGFGFFNGKGKRQNKKPNNLDQSHQKPKTPDQSSMKCSLPWFF

SEQ ID NO: 194735 - protein, 236 aa, Zea Mays
MHTETQHSAQADIIPTRFWYTTSSSDNGKAGGATVPPRPSDDRDVRLLLVVAADAEEADAVARAVAGERGLHGHHMAAVVSHAGDEDALQPPIQRQPELLAAAEPLVDHGDRGRPERVRPRQGAQPAAADWPLVREDRAPRGRSCGFGRRDAGAGGVQRDRLGGAAGRRRRRGTAACRTGAGCRARHREQERESGGAGLLEDASARLRVHLRARPGPCVCVFASGWSVFKWCLKGF

SEQ ID NO: 194736 - protein, 148 aa, Zea Mays
MISTVAPSWRVIPATDMIDKVCKDPQLKKEIRSNPYMYRGNLALQTGRELLSVSLDTEKNLHEVSLPFLVLHGTDDVVADPSGSRLLHERASSRDKTLKLYPGMWHVLMGERPEDVERVFADVISWLEDRVGVSQCNTPGCTNTPECY

SEQ ID NO: 194737 - protein, 559 aa, Zea Mays
MGLFDRLPPMDHMRSEKMCFVQLIMPAESSRLAVTYLGELGLLQFKDLNEDKSPFQRIFVNQVKRCAEMSRKLKFFSDQINRAGLRSSVRPALEPDIDLEELEARLGEHEHELLEMNTNSDKLKQTYNELLEFKLVLSKAGHILASSHSHAASAEHELDENIYDNGIHEGNAYLLEQVEKAVFVVFFSGEQAKAKILKICDSFGASCYPVPEEMVKQRQIFNEVSARLSDLEVTLDAGIQHRNKALESIGSQLWRWTIMVKKEKAVYDTLNMLNFDVTKKCLVGEGWCPIFAKSQIKDCLQRSTIHSNSQVGTIFHEMDTIESPPTYFRTDKFTNAFQEIVDAYGVARYQEANPAVYSVVTFPFLFAVMFGDWGHGICLLLGALVLILREKRFSSQKLGSFMELAFGGRYVILLMAIFSIYCGLIYNEFFSVPFHIFGKSAYECRDKSCSDAHTFGLIKVREPYPFGVDPSWRGSRSELPFLNSLKMKMSILMGVAQMNLGIVLSYFDARYHGNALDIRSWRKSTVLGPKGTSDIVVTSGFDRCSMDALPKTFYLEETS

SEQ ID NO: 194738 - protein, 627 aa, Zea Mays
MGLFDRLPPMDHMRSEKMCFVQLIMPAESSRLAVTYLGELGLLQFKDLNEDKSPFQRIFVNQVKRCAEMSRKLKFFSDQINRAGLRSSVRPALEPDIDLEELEARLGEHEHELLEMNTNSDKLKQTYNELLEFKLVLSKAGHILASSHSHAASAEHELDENIYDNGIHEGNAYLLEQGVHQGAHGHSGVRFVSGIILKSKALAFERMLFRATRGNMLFNQASAGEPVTDPISGEEVEKAVFVVFFSGEQAKAKILKICDSFGASCYPVPEEMVKQRQIFNEVSARLSDLEVTLDAGIQHRNKALESIGSQLWRWTIMVKKEKAVYDTLNMLNFDVTKKCLVGEGWCPIFAKSQIKDCLQRSTIHSNSQVGTIFHEMDTIESPPTYFRTDKFTNAFQEIVDAYGVARYQEANPAVYSVVTFPFLFAVMFGDWGHGICLLLGALVLILREKRFSSQKLGSFMELAFGGRYVILLMAIFSIYCGLIYNEFFSVPFHIFGKSAYECRDKSCSDAHTFGLIKVREPYPFGVDPSWRGSRSELPFLNSLKMKMSILMGVAQMNLGIVLSYFDARYHGNALDIRCCIFLCIFSSDTAKIERNCSALTVHILQILEKINCSGAKRNFRYCCYFWL

SEQ ID NO: 194739 - protein, 333 aa, Zea Mays
MLFRATRGNMLFNQASAGEPVTDPISGEEVEKAVFVVFFSGEQAKAKILKICDSFGASCYPVPEEMVKQRQIFNEVSARLSDLEVTLDAGIQHRNKALESIGSQLWRWTIMVKKEKAVYDTLNMLNFDVTKKCLVGEGWCPIFAKSQIKDCLQRSTIHSNSQVGTIFHEMDTIESPPTYFRTDKFTNAFQEIVDAYGVARYQEANPAVYSVVTFPFLFAVMFGDWGHGICLLLGALVLILREKRFSSQKLGSFMELAFGGRYVILLMAIFSIYCGLIYNEFFSVPFHIFGKSAYECRDKSCSDAHTFGLIKVREPYPFGVDPSWRGSRSELPF

SEQ ID NO: 194740 - protein, 210 aa, Zea Mays
MLNFDVTKKCLVGEGWCPIFAKSQIKDCLQRSTIHSNSQVGTIFHEMDTIESPPTYFRTDKFTNAFQEIVDAYGVARYQEANPAVYSVVTFPFLFAVMFGDWGHGICLLLGALVLILREKRFSSQKLGSFMELAFGGRYVILLMAIFSIYCGLIYNEFFSVPFHIFGKSAYECRDKSCSDAHTFGLIKVREPYPFGVDPSWRGSRSELPF

SEQ ID NO: 194741 - protein, 305 aa, Zea Mays
MVEKAVFVVFFSGEQAKAKILKICDSFGASCYPVPEEMVKQRQIFNEVSARLSDLEVTLDAGIQHRNKALESIGSQLWRWTIMVKKEKAVYDTLNMLNFDVTKKCLVGEGWCPIFAKSQIKDCLQRSTIHSNSQVGTIFHEMDTIESPPTYFRTDKFTNAFQEIVDAYGVARYQEANPAVYSVVTFPFLFAVMFGDWGHGICLLLGALVLILREKRFSSQKLGSFMELAFGGRYVILLMAIFSIYCGLIYNEFFSVPFHIFGKSAYECRDKSCSDAHTFGLIKVREPYPFGVDPSWRGSRSELPF

SEQ ID NO: 194742 - protein, 402 aa, Zea Mays
MSFLNSSWSCQSHAASAEHELDENIYDNGIHEGNAYLLEQGVHQGAHGHSGVRFVSGIILKSKALAFERMLFRATRGNMLFNQASAGEPVTDPISGEEVEKAVFVVFFSGEQAKAKILKICDSFGASCYPVPEEMVKQRQIFNEVSARLSDLEVTLDAGIQHRNKALESIGSQLWRWTIMVKKEKAVYDTLNMLNFDVTKKCLVGEGWCPIFAKSQIKDCLQRSTIHSNSQVGTIFHEMDTIESPPTYFRTDKFTNAFQEIVDAYGVARYQEANPAVYSVVTFPFLFAVMFGDWGHGICLLLGALVLILREKRFSSQKLGSFMELAFGGRYVILLMAIFSIYCGLIYNEFFSVPFHIFGKSAYECRDKSCSDAHTFGLIKVREPYPFGVDPSWRGSRSELPF

SEQ ID NO: 194743 - protein, 268 aa, Zea Mays
MVKQRQIFNEVSARLSDLEVTLDAGIQHRNKALESIGSQLWRWTIMVKKEKAVYDTLNMLNFDVTKKCLVGEGWCPIFAKSQIKDCLQRSTIHSNSQVGTIFHEMDTIESPPTYFRTDKFTNAFQEIVDAYGVARYQEANPAVYSVVTFPFLFAVMFGDWGHGICLLLGALVLILREKRFSSQKLGSFMELAFGGRYVILLMAIFSIYCGLIYNEFFSVPFHIFGKSAYECRDKSCSDAHTFGLIKVREPYPFGVDPSWRGSRSELPF

SEQ ID NO: 194744 - protein, 279 aa, Zea Mays
MVKQRQIFNEVSARLSDLEVTLDAGIQHRNKALESIGSQLWRWTIMVKKEKAVYDTLNMLNFDVTKKCLVGEGWCPIFAKSQIKDCLQRSTIHSNSQVGTIFHEMDTIESPPTYFRTDKFTNAFQEIVDAYGVARYQEANPAVYSVVTFPFLFAVMFGDWGHGICLLLGALVLILREKRFSSQKLGSFMELAFGGRYVILLMAIFSIYCGLIYNEFFSVPFHIFGKSAYECRDKSCSLGGRERVKKGVGKREASFLIFSQPSRKMKRQVEICWGGGYLY

SEQ ID NO: 194745 - protein, 550 aa, Zea Mays
MGLFDRLPPMDHMRSEKMCFVQLIMPAESSRLAVTYLGELGLLQFKDLNEDKSPFQRIFVNQVKRCAEMSRKLKFFSDQINRAGLRSSVRPALEPDIDLEELEARLGEHEHELLEMNTNSDKLKQTYNELLEFKLVLSKAGHILASSHSHAASAEHELDENIYDNGIHEGNAYLLEQGVHQGAHGHSGVRFVSGIILKSKALAFERMLFRATRGNMLFNQASAGEPVTDPISGEEVEKAVFVVFFSGEQAKAKILKICDSFGASCYPVPEEMVKQRQIFNEVSARLSDLEVTLDAGIQHRNKALESIGSQLWRWTIMVKKEKAVYDTLNMLNFDVTKKCLVGEGWCPIFAKSQIKDCLQRSTIHSNSQVGTIFHEMDTIESPPTYFRTDKFTNAFQEIVDAYGVARYQEANPAVYSVVTFPFLFAVMFGDWGHGICLLLGALVLILREKRFSSQKLGSFMELAFGGRYVILLMAIFSIYCGLIYNEFFSVPFHIFGKSAYECRDKSCSLGGRERVKKGVGKREASFLIFSQPSRKMKRQVEICWGGGYLY

SEQ ID NO: 194746 - protein, 398 aa, Zea Mays
MGNCCRSPAAVAREDVSSSHFPASNAKKKPHQARNGGGAGQKRLSVLGDEGCEVVGIDDKYVLDRELGRGEFGVTYLCMDRGTKELLACKSISKRKLRTAVDVEDVRREVAIMRHLPKSPSVVSLREACEDDGAVHLVMELCEGGELFDRIVARGHYTERAAASVTRTILEVVQLCHRHGVIHRDLKPENFLFANKKENSPLKAIDFGLSIFFKPETEQGVAQAILRGNIDFKREPWPNVSENAKDLVRHMLEPDPKLRLTAKQVLEHHWLQNAKKAPNVPLGDIVKSRLKQFSRMNRFKRRALRVIADHLSAEEVEDIKDMFKTMDTDNDGIVSYEELKTGIAKLGSHLAESEVQMLIEASSQIQECRRSSSALPNRPNKRTEVMGVVLPTCLALFI

SEQ ID NO: 194747 - protein, 365 aa, Zea Mays
MGNCCRSPAAVAREDVSSSHFPASNAKKKPHQARNGGGAGQKRLSVLGDEGCEVVGIDDKYVLDRELGRGEFGVTYLCMDRGTKELLACKSISKRKLRTAVDVEDVRREVAIMRHLPKSPSVVSLREACEDDGAVHLVMELCEGGELFDRIVARGHYTERAAASVTRTILEVVQLCHRHGVIHRDLKPENFLFANKKENSPLKAIDFGLSIFFKPETEQGVAQAILRGNIDFKREPWPNVSENAKDLVRHMLEPDPKLRLTAKQVLEHHWLQNAKKAPNVPLGDIVKSRLKQFSRMNRFKRRALRVIADHLSAEEVEDIKDMFKTMDTDNDGIVSYEELKTGIAKLGSHLAESEVQMLIEALARL

SEQ ID NO: 194748 - protein, 413 aa, Zea Mays
MGNCCRSPAAVAREDVSSSHFPASNAKKKPHQARNGGGAGQKRLSVLGDEGCEVVGIDDKYVLDRELGRGEFGVTYLCMDRGTKELLACKSISKRKLRTAVDVEDVRREVAIMRHLPKSPSVVSLREACEDDGAVHLVMELCEGGELFDRIVARGHYTERAAASVTRTILEVVQLCHRHGVIHRDLKPENFLFANKKENSPLKAIDFGLSIFFKPGEKFSEIVGSPYYMAPEVLKRNYGPEIDIWSAGVILYILLCGVPPFWAETEQGVAQAILRGNIDFKREPWPNVSENAKDLVRHMLEPDPKLRLTAKQVLEHHWLQNAKKAPNVPLGDIVKSRLKQFSRMNRFKRRALRVIADHLSAEEVEDIKDMFKTMDTDNDGIVSYEELKTGIAKLGSHLAESEVQMLIEALARL

SEQ ID NO: 194749 - protein, 205 aa, Zea Mays
MMSGRSGGRDGEAAGPVIRIRVSHGATFREVVVPAQATFGVKDGAKLLLLEKPSPANIEQKVEPVIMDESVMKACEAVARVRAEVDRLSAKVCDLEKNVLAGRKVDDKEFVVLTELLMIQLLKLDGIEAEGEARAQRKAEVRRVQSLVETLDKLKARNANPFSDHNNAVSVTTQWETFENGMGSFSAPPPHVPSEQVNTDWEQFD

SEQ ID NO: 194750 - protein, 238 aa, Zea Mays
MLSDLPGISEEEKCRLLHCVVVGGGPTGVEFSGELSDFIIRDVKQRYSHVKDYIHVTLIEANEILSSFDVRLRQYATKQLIKSGVRLVQGIVKDVQPNKIILDNGEEVPYGLLVWSTGVGASPFVKSLPFPKSPGGRIGVNEWLRVPSVHDVYAIGDCSGFLESTGKEVLPALAQVAERQGKYLASLLNHVMKAGGGHANSETEADLGRPPFVYKHLGSMATVGRYKALVDLRQSKDL

SEQ ID NO: 194751 - protein, 346 aa, Zea Mays
MAIAADSAADQDPNPIPNEAAGESVELPAYTDHGEPNADLADVDYEDEEELDGVTAEAAARDKVEAVFQRLSEAPVGIRVHDIIIKGNTKTRDALIEAEVVGLIRSAVTVQDLVRTANIAAVRLRLLDVFDSVHVLLDAGPPELPGTTNVIIQVVEAANPIDGSVGCFSKPEARSWTVEGSVRWRNIFGYGDIWDASGAYGWDQSSEISIGVSLPRFRSIPTPSTARASLLSHDWLKFSSYKERLLGLSFGLLSDMHHDLSYNLTWRTLTDPSQAASKSITRQLGHNLLSALRYTYTIDQRDSHLRPTKGYAFVSTSQVSGLWGSKGLRFFRQISMDLHFFIFHNC

SEQ ID NO: 194752 - protein, 351 aa, Zea Mays
MAIAADSAADQDPNPIPNEAAGESVELPAYTDHGEPNADLADVDYEDEEELDGVTAEAAARDKVEAVFQRLSEAPVGIRVHDIIIKGNTKTRDALIEAEVVGLIRSAVTVQDLVRTANIAAVRLRLLDVFDSVHVLLDAGPPELPGTTNVIIQVVEAANPIDGSVGCFSKPEARSWTVEGSVRWRNIFGYGDIWDASGAYGWDQSSEISIGVSLPRFRSIPTPSTARASLLSHDWLKFSSYKERLLGLSFGLLSDMHHDLSYNLTWRTLTDPSQAASKSITRQLGHNLLSALRYTYTIDQRDSHLRPTKGYAFVSTSQVSGLWGSKGLRFFRQSAVVELGEQFLGSAPKSG

SEQ ID NO: 194753 - protein, 352 aa, Zea Mays
MAIAADSAADQDPNPIPNEAAGESVELPAYTDHGEPNADLADVDYEDEEELDGVTAEAAARDKVEAVFQRLSEAPVGIRVHDIIIKGNTKTRDALIEAEVVGLIRSAVTVQDLVRTANIAAVRLRLLDVFDSVHVLLDAGPPELPGTTNVIIQVVEAANPIDGSVGCFSKPEARSWTVEGSVRWRNIFGYGDIWDASGAYGWDQSSEISIGVSLPRFRSIPTPSTARASLLSHDWLKFSSYKERLLGLSFGLLSDMHHDLSYNLTWRTLTDPSQAASKSITRQLGHNLLSALRYTYTIDQRDSHLRPTKGYAFVSTSQVSGLWGSKGLRFFRQHGYGLEPSYGTIWHFPIQG

SEQ ID NO: 194754 - protein, 142 aa, Zea Mays
MASYPMASAIWSGVAPRLVRALASAPMSSSSSTASAWPPSTARWSGLCPSTSSHSTSMHPGPASSAIASPCPLIAARCSAVRPYWSRPRTPARLLSRDSRLPRSPRLAAVITSSHRSRTSTTSWYPLSRATSSGVLPRASTA

SEQ ID NO: 194755 - protein, 246 aa, Zea Mays
MAMASRPPLHRRRRLPLVPLLVLLCLSPGCAAGRVPVSVYYETLCPFCSAFVVNDLSRIFRDGIFSIADLRLVPFGNGRVSADGTVTCQHGEDECQLNAIEACVIRIWPDAEQHFPFIQCVEHLALTRKWDAWQSCFHETGLAYQPAIDCYNSGYGRQLVLQYAAETNALQPPHRFVPWVVVNGKPLGDDYMNFEAYICSAYDGKLPKACKGKHLAIAQETKASRGDKRNAHEVVIALAICIAVWL

SEQ ID NO: 194756 - protein, 220 aa, Zea Mays
MSIPTSHIPIHIHPPTPTRPPTVFLVFTFLTQFTHPLTISPIDHCCHIPNPLPVVFGVFPAAAAAVAVVHHTVPLAVISMRARSIKNTNEALAPDRQCRSQPQGRHSSSTAVWPPTGGPWRCARVTRACPTRWRGTTSTLWQRGNAAPPWCSPSQRRWTRCGRWCVASTSRSGTSASSGAATSWTATAPRWGPCGSSCSCPGCPPRAAASGLRSGTTSGG

SEQ ID NO: 194757 - protein, 1186 aa, Zea Mays
MVAACCVKWSGSLFLMNQNCAIFSWNVRGLNDHAKRASVRHTIMSYGASIVCLQETKISNWSNVLLKETVGNKLANQVFHLPSLGTSGGILIAADSDFFDMALLPCSAAYSLSVRISSRSQEEVWDLTGVYGPQLDNEKMIFLSELRNIQAMVRPEWVLLGDFNMIRRAREKNKGSINRRVMRQFNNTIDYLHLLELELTDRAFTWSNEQINPTMTKIDRFLATTEWHDLFPSADLRSMCTMTSDHCPLIMQSHSLGSPYHGFRFESFWPQIEGFKEVVNQAWNSAVNSDDAILRLHVKMSRTAKALLAWRRNTVGNFKVQMAIIQIILTLLEKAQEIRQLSFEEMDFRRSLKTKILDMASAERARARQHSRLTWMRLGDANTKFFHMTANNRRRKNLIRSLMSDGNLLTSQEDKMNEVQHHFTQVLGTTGRRCRAVRWDHLGYTPFELSELDNLIDDSEIKNVVMGLQSEKAPGPDGFIGLFYKSCFELIKNDLSMAINDFFHHRSKSLLRVNEANIILIPKGENADRIDRFRPISLINSFMKIITKIMANRLAPRMNEIISSAQNAFIQNRSIHDNFLYVQRVIMNLHKKGKPALFVKLDISKAFDTLNWAYLLDVLRACGFSLKWRNWVADILRSSSSRIIINGQRSNAIIHRRGVRQGDPLSPFLFILAMDPLHRMIEKAADVGLLGQVLPRGAKLRCSLYADDAGVFIKADKSDLEVLKEILNAFEGCSGLKINYDKTEIYPIRHPESSWPVLKEVFPGKYSSLPGKYLGLPLHYKNVKRIDLQPLIEKINNRLAGWKGKLLSKAGRETLVKAVLSAQPIYHLTVFRPKKWLLQAIDKIRRNFLWRGSNPLACSGGHCLINWSTTCLPKNKGGLGILDLDRFARGLRLRWLWLRWKSKDRPWTAMRLPCDKIDEDLFNASTTVTVGNGKIAGFWNSSWIQGQAPRNIAPSLFKKAKRKNITVAKALTNNTWIRLCYPFSGEGEFREFFSLWQAIGSMPELNGSEDNISWRWTADGQYSASSAYKIQFASNFSRMNLCHIWKAKVEPKCRFFAWTLLHKRILTADNLQKRGWPCNPICCLCNSAPETILHLCKDCPFSREVWTKVLSRANLHFLTGFPSGSSLYDWWTDLRSLCSSQIRRDFDGLLIQFWWNLWLERNFRIFQGQHRGVDQVAMATLGIASS

SEQ ID NO: 194758 - protein, 103 aa, Zea Mays
MRPSHDSEEELEAATKLRAGSDSEAHPTATVRPPTAPPSSSEYQIGVPATVYRSNPSLQQSNIKSEASVCWLDSCTVHYAVRCYSLYYLCSQWSFDPSLPLEG

SEQ ID NO: 194759 - protein, 114 aa, Zea Mays
MRVVCVVLTSRQSRQGDEPVTGSAGSGRAADSPGPLSPLGSGRAPDFDSPNLGGMCPLRLHVDGERDQLVWLGAAQIENVSCGKVPVISSVVVTSDHGLRASPEEPLNQPENRY

SEQ ID NO: 194760 - protein, 157 aa, Zea Mays
MAEPTTSDLAKIIETLTSTVAALQSSVAELQRGKTSSGGHGTNDGQHHNDRPPRFQKMDFPRYDGKSDPLIFTSLCESYFHQQRIMEEEKVWMASYNLEEGAQMWYLMVQEDEGTPSWRRFTELLHLRYGPPLRSAPLAELAECRRTGTVAEYQDRF

SEQ ID NO: 194761 - protein, 186 aa, Zea Mays
MANSAVPKNTSAPCSRSSTPTSRSRTLSSSSSSSTSAVSRPSSSSGKVPAITYSSSSSSTVSSVSRSSSRSSTPTRQPAMRSSTPSARRISGSNNMTSNGRPLASSGRSSAPSSAPSSRPSSPNIRTQAPVHPLGIPDFPNETPPNLRAKLPERPLSAGRVRPGITSGVRSTPNPEPVLSVTVKKR

SEQ ID NO: 194762 - protein, 482 aa, Zea Mays
MGNSEVGHNALGAGRIFAQGAKLVDQALASGKIYDGDGFNYIKESFESGTLHLIGLLSDGGVHSRLDQLQLLLKGVSERGAKKIRVHILTDGRDVLDGSSIGFVETLENDLLELRAKGVDAQIASGGGRMYVTMDRYENDWDVVKRGWDAQVLGEAPYKFKSALEAVKTLRAQPKANDQYLPPFVIVDDSGNAVGPVLDGDAVVTINFRADRMVMLAKALEYADFDNFDRVRVPKIRYAGMLQYDGELKLPSRYLVSPPEIDRTSGEYLVKNGIRTFACSETVKFGHVTFFWNGNRSGYFDATKEEYVEVPSDSGITFNVAPNMKALEIAEKARDALLSGKFDQVRVNLPNGDMVGHTGDIEATVVACKAADEAVKIILDAVEQVGGIYLVTADHGNAEDMVKRNKSGKPLLDKNDRIQILTSHTLQPVPVAIGGPGLHPGVKFRNDIQTPGLANVAATVMNLHGFEAPADYEQTLIEVADN

SEQ ID NO: 194763 - protein, 863 aa, Zea Mays
MDATPITEELPPNITEQMRNATTLPKASSTVVCYSPMMITTNGIWQGFNPLEFSLPLFILQTAVIVVTTRLLVLVLRPFRQPRVIAEILIETWATMVFPMRSLLTLETVAHLGLLYFLFLVGLEMDIDVIRRSGKKALFVALAGMALPFCMGIATSFIFRHQVSRNVHQASFLLFLGVALSVTAFPVLARILAEIKLLGTDLGQIAMSAAIVNDMCAWILLAIAIAISEVSSAALSSTWVLLSGALFVLFCFYVVRPGMWWLIRRTPEGEGISDMQVSLILTGVMLAGVCTDAIGIHSVFGAFVYGLVIPTGPLGVVLIEKIEDFVTGLLLPLFFAISGLRTNVRKIRDPVTVGLLVLVFVMASFAKIMGTIIIAALYTMPFREGIALGFLMNTRGLVEMIVLNIGRDKEVLDDESFAVMVLVSVAMTTLVTPVVTSVYRPSRRLVGYKRRNLQRIRHDSELRMLACVHTTRNVPSVLSLLELSNPNKRSPIFIYALHLVELTGRASNMLAAAAASASKQSRGGSGSSLPPVTEHIFNAFENYERLTGGVSIQTLAAVSPYQSMHEDVSVLAEDKHVSLIVVPFHKQQTVDGGMEPINPHVRGFNESLLSTSPCSVAILVDRGLSAAAARMATEHHVALFFFGGPDDREALAYAWRMVEHPGVTLSIVRFVPPDYRARTVSCSAYRPPADSDSRAITINTEGKSELEMDEDYLSEFRARNHGNIAITYATRTVANSEETVAAIRAMDNNLQELYIVGRRPGEVRSPMTAALEEWMENPELGPIGDMLVSSDFSMSVSVLVVQQYVVAAAPAPVPAPAASSDPVRQYVSNANQRAAAAASGAYRTSAASAANSRWSGSGGTVGF

SEQ ID NO: 194764 - protein, 63 aa, Zea Mays
MGGQTEFKVGCSCRSRELTSFSLDSCWLRSTPVTRSHETLSRHAGRVPVLFLVLCAGRETWSD

SEQ ID NO: 194765 - protein, 154 aa, Zea Mays
MPPVRPPSSTSSSSARSSPPSPLSDSMLKLLSIRTLASLFGMLVARTRPLWRHYFQNTQGLIFVVDSNDRERVVEARDELHRMLNEDELRDAVLLVFANKQDLPNAMNAAEITDKLGLHSLRQRHWYIQSTCATSGEGLYEGLDWLSSNISSKS

SEQ ID NO: 194766 - protein, 193 aa, Zea Mays
MGLSFGKLFSRLFAKKEMRILMVGLDAAGKTTILYKLKLGEIVTTIPTIGFNVETVEYKNISFTVWDVGGQDKIRPLWRHYFQNTQGLIFVVDSNDRERVVEARDELHRMLNEDELRDAVLLVFANKQDLPNAMNAAEITDKLGLHSLRQRHWYIQSTCATSGEGLYEGLDWLSSNISSKPRYSWDFSASIGI

SEQ ID NO: 194767 - protein, 474 aa, Zea Mays
MMSQDQMDSPVDNDVSSSRRSPRRGVGAPLKKGPWTDAEDAILIDYVKKHGVGNWNAVRKNTELLRCGKSCRLRWANHLRPNLKKEAFTPEEERLIIQLHAKLGNKWSRMAIHLPGRTDNEIKNYWNTRKKRCERASLPIYPAGVRNQSSNEDQQLSGDLNGGENMSNDLLSGNSLCLPDFNNDSFRAKLKALPPQLPAVSISNLLGQSFASKGCSFMDQVDQAGMLKQSGSALPTLSDAIDDVISSVDQFSNDSEKLMQTLGFGYLNEANATSKSIAPFGVALTGSHAPLNGIFSASRLTNGPSKMEPPSVQNSRLKYTVDPAMQPTELVDPYMQSLSATPSVKSECASPRNSGLFEELLHEPHALRSGKSQQPSVRSSSSSAGTPYGTMVSSEFDMGQEYWEEQPGSLLSEYAHFSGNYLAECAPPVSAASTDIFPLPKISPESPSMGSGEQALEPKHESAASRTSSWKLEA

SEQ ID NO: 194768 - protein, 219 aa, Zea Mays
MILIDQATVFVKRTVVGIKCKDGIVLGVEKLVTSKMMLEGSNRRIHSVHRHSGLVVAGLAADGRQIVSRAKSEAASYEKVYGEPIPVKDLADRVASYVHLCTLYWWLRPFGCGVILGGYDRDGPQLYMIEPSGVSYKYFGAALGKGRQAAKTEIEKLKLSELTCREGIVEVAKIIYGVHDESKDKAFELELSWICDESNRQHQKAKAAAQAALEEMDAD

SEQ ID NO: 194769 - protein, 52 aa, Zea Mays
MEGGRDIDRLNHGTKEATGNDVLSGGVCIKVAPAILELDDPLVLRTMRFAAS

SEQ ID NO: 194770 - protein, 190 aa, Zea Mays
MAAPCDLIRHALRVLSKTAVDTAPLARFPLDSSRRACVRGPSTQRTTRDLGNLNLSGHLVPELGKLEHLQYLELYKNNIQGTIPSELGNLKNLISFDLYKNNISGTIPPALGKLKSLVFLRLNGNHLTGPIPRELAGISSLKVVDVSSNDLCGTIPTSGPFEHIPLSNFEKNPRLEGPELQGLAIYDTNC

SEQ ID NO: 194771 - protein, 99 aa, Zea Mays
MWLHQLCLPTSSTAAATATSSIVPVFLGILMASGWHFVQLIRSRCDRITSRRSGDDAVARDTGAKVVVLRWWQDRKETKKQEPGLFNNVTESLRRGRVR

SEQ ID NO: 194772 - protein, 88 aa, Zea Mays
MPQHRCRPITTEAKKYCKAKHSGQLLCLGWMWLHQLCLPTSSTAAATATSSIVPVFLGILMASGWHFVQLIRCVNTEIHSYGHVLLLH

SEQ ID NO: 194773 - protein, 70 aa, Zea Mays
MQYMEARFMIRFLYTREHSSLPTARLPRLDVAPPALPPYFLYCCGYCYIIYRACFSRNLNGIRLAFCSTH

SEQ ID NO: 194774 - protein, 335 aa, Zea Mays
MGTLLISKIREEYPDRMMLTFSVFPSPKVSDTVVEPYNATLSVHQLVENADECMVLDNEALYDICFRTLKLTTPSFGDLNHLISATMSGVTCCLRFPGQLNSDLRKLAVNLIPFPRLHFFMVGFAPLTSRGSQQYRALTVPELTQQMWDAKNMMCAADPRHGRYLTASAMFRGKMSTKEVDEQMINVQNKNSSYFVEWIPNNVKSSVCDIPPRGLSMASTFVGNSTSIQEMFRRVSEQFTAMFRRKAFLHWYTGEGMDEMEFTEAESNMNDLVSEYQQYQDATADDDEEAEYEDEEEPADGIIPPSWPIPSIVAVDACVSLFYRTLLLSKKIIKK

SEQ ID NO: 194775 - protein, 68 aa, Zea Mays
MNYHTWQNPHVTLLKSLLEVGTYMAEFSHYLAQVFGLEVYMQIFWSHDDPIQSQLGQFRLYLVNQASA

SEQ ID NO: 194776 - protein, 64 aa, Zea Mays
MQRTGCFGCIKKCPFLHFFVLGLPISCMISVADLESALSATPIWKSPCQTIPTQNCSCTPIKKA

SEQ ID NO: 194777 - protein, 527 aa, Zea Mays
MPLLLRGASLLRLCQCTSGLSSVKFSSRVTVLVNLNAMRDGMRATYSRRAASKNSEVKKDEQPVTEKVSRAASKNSEVKKDEQPLTEKEDAAETDLEVERGRSSSPSQLQSMTVKELRELTRRRGISVKGTKKDLVSALMNSMAVEANGEGGKSSVELVSPLEVPLKRKGGASVVVEQKLESSEIISETPNKKSRTKQKSSKNTTREEISVTNVKLSKTVVQKETVAGLSPDDDSEPWTILVHKKPQASWIPYNPRTMRPPPLSKDTRALKIMSWNVNGLKALLKSRGFSVQQLAQREDFDVLCLQETKMQEKDIEVIKDTLLDGYTNSFWTCSVSKLGYSGTAIISRVKPLSIKYGLGISDHDTEGRVVTVEFDDFYLLTAYVPNSGDGLKRLTYRVTEWDPSLGNYMKELEKSKPVILTGDLNCAHQEIDIHDPAGNRRSAGFTNEERESFGTNFLSKGFVDTFRKQHPNVVAYSYWGYRHNARKTNKGPFLHFFVLGLPISCMISVADLESALSATPIWKSPCQ

SEQ ID NO: 194778 - protein, 479 aa, Zea Mays
MRDGMRATYSRRAASKNSEVKKDEQPVTEKVSRAASKNSEVKKDEQPLTEKEDAAETDLEVERGRSSSPSQLQSMTVKELRELTRRRGISVKGTKKDLVSALMNSMAVEANGEGGKSSVELVSPLEVPLKRKGGASVVVEQKLESSEIISETPNKKSRTKQKSSKNTTREEISVTNVKLSKTVVQKETVAGLSPDDDSEPWTILVHKKPQASWIPYNPRTMRPPPLSKDTRALKIMSWNVNGLKALLKSRGFSVQQLAQREDFDVLCLQETKMQEKDIEVIKDTLLDGYTNSFWTCSVSKLGYSGTAIISRVKPLSIKYGLGISDHDTEGRVVTVEFDDFYLLTAYVPNSGDGLKRLTYRVTEWDPSLGNYMKELEKSKPVILTGDLNCAHQEIDIHDPAGNRRSAGFTNEERESFGTNFLSKGFVDTFRKQHPNVVAYSYWGYRHNARKTNKEKVHDSYILPDISASDHSPLGLVLKL

SEQ ID NO: 194779 - protein, 524 aa, Zea Mays
MPLLLRGASLLRLCQCTSGLSSVKFSSRVTVLVNLNAMRDGMRATYSRRAASKNSEVKKDEQPVTEKVSRAASKNSEVKKDEQPLTEKEDAAETDLEVERGRSSSPSQLQSMTVKELRELTRRRGISVKGTKKDLVSALMNSMAVEANGEGGKSSVELVSPLEVPLKRKGGASVVVEQKLESSEIISETPNKKSRTKQKSSKNTTREEISVTNVKLSKTVVQKETVAVQGPVPNAGLSPDDDSEPWTILVHKKPQASWIPYNPRTMRPPPLSKDTRALKIMSWNVNGLKALLKSRGFSVQQLAQREDFDVLCLQETKMQEKDIEVIKDTLLDGYTNSFWTCSVSKLGYSGTAIISRVKPLSIKYGLGISDHDTEGRVVTVEFDDFYLLTAYVPNSGDGLKRLTYRVTEWDPSLGNYMKELEKSKPVILTGDLNCAHQEIDIHDPAGNRRSAGFTNEERESFGTNFLSKGFVDTFRKQHPNVVAYSYWGYRHNARKTNKEKVHDSYILPDISASDHSPLGLVLKL

SEQ ID NO: 194780 - protein, 633 aa, Zea Mays
MGLSGSGAVASIVFLGLCATVSCWPAPPPPEMLHESFAGKSEFRTVNRRRLSSCSNPSPYLSINVSSGGAPLPDEAFLTVTVAGVLRPDADDWVAMITPCSSSVSGCPLSGVNYVQTGDLAHLPLLCHYPVKAQYMKRDPGYLGCKTAACQKRDASGACSVRTCAATVTFHVINFRTDVEFVLFSGGFRTPCVLKRSGALRFANPASPLYGHLSSTDSTATSMRLTWVSGDGRPQQVQYGGGKSATSQVATFTRNDMCSSPLLPSPAKDFGWHDPGYIHTAVMTGLQPSQSYTYRYGSDSVGWSDTNTFRMPPAAGSDETSFVIYGDMGKAPLDPSVEHYIQAVAKEIQTGKVNSVFHIGDISYATGFLVEWDFFLNLIAPLASRVPYMTAIGNHERDYAESGSVYVTPDSGGECGVAYESYFRMPAVSKDKPWYSIEQGSVHFVVMSTEHKWSEMSEQYKWMNQDLSSVNRSRTPWVIFIGHRPMYSSHVGIPVNVDLAFVASVEPLLLKHQVDLVFFGHVHNYERTCAIYKNICKGKPKKDESGIDTYDNSKYTAPVHATVGAGGFSLDKFPRIVLNKWSLSRVSEFGYARVHATRGDMLVQFVSSSTMEVLDQFRFVKPDPARRLRNKPV

SEQ ID NO: 194781 - protein, 316 aa, Zea Mays
MQKCSKTGLLLRRLYTLPGSVSVAKAVAKEIQTGNVDSIFHIGDISYATGFLVEWDFFLHLITPLASQVPYMTAIGNHERDYASSASVYVTPDSGGECGVAYESYFPMPAVSKDKPWYSIEQGTVHFIVMSTEHEWSEKSEQYNWMDEDLSSVDRSRTPWVIFIGHRPMYSSHGGILPNVDSNFVASVEPLLLNYQVDLVFFGHVHNYERTCAVYQGNCKGMPTTDKSGIDVYDNSNYTAPVHVIVGAGGFSLDSFPNKGEAWSLSRVSEFGYGKVHATRTDMLVQFVNSSSMEVRDQFRIVKGAPANKSLSLIIQ

SEQ ID NO: 194782 - protein, 373 aa, Zea Mays
MCNSNVKSAGVAQIDGRPVLQPAGNRVAAPEPDASRPLKKSLQKSLSMPVYYDSNATAGARPAPAENTTRAAANSSPLPPAKAATKAAGAFPAEKSGRSKAARRPGAVPPPVVAFAALEALEPAGSIAAAQREHAAQAQAQRKLRIAHYGRTASFSRVEGRVVGAAAAAAERAVPASPTGHDEKRCSFITPYSDPLYVAYHDEEWGVPVHDDELLFEMLTLSGVQVGADWTSILKKRHVYREAFSGFNVDAVAKYTEKQMASLSADYGLDLGTVRGTVNNACRIIEVRRDLGSLDRYVWAFVNNRPLSPSYKYSRKIPAKTSKSECISKDMVRRRFRFVGPTVVHSFMQAVGLTNDHLVSCPRHRACSAAAVN

SEQ ID NO: 194783 - protein, 319 aa, Zea Mays
MDRPVRIRHPDHSCDPSRAWPPAAGLLQDYTRGPALRAADATHVRVTRLPVGLLPLPALLVLAGRLADADAAIPAQAAASSSGRARPAAALQLAGPPPAAAAPVARGSVAALPARPGRVPPVLRAPNAAVPRRQGRGPHVPPPASGAPRHQQAAAAAHGRAPPPPAAADGGGRRRRARRRPPLAQRAVLLHRAHRARGRREAAFRRPRRWRWRCGRRRQGGAGRARRGRERGGVPQPGEPLQQGQEGGEPRGPEHQQVQEELHVARADELVLVHVSVPVRVGLHGAAAAAASRDGVSRAARGRRLLGPHGDVLGVAIAS

SEQ ID NO: 194784 - protein, 420 aa, Zea Mays
MVGSGAAGGGADHARSKEAAGMMALHEALRNVCLSSDWTYSVFWTIRPRPRCRGGNGCKVGDDNGSLLMGKVASDKCHKWVFKEPSECEPNISNYWQSSFDALPPEWTDQFASGIQTIAVIQAGHGLLQLGSCKIIPEDLHFVLRMRHMFESLGYQSGFFLSQLFSSSRGASPTPTPPFPLKQPPAAPAARAPPQLFSWPGHHQPQQLPSPAGASPLFPPGPGAFHPSSARPMPPFPGGKDEGHMFHLPPAAHHGTNKQPPQHMDEHHHHQQQPMVGAGGDAPDGDLRWPNGLSFFTALTGRADDAKLLFGGPGAGAGAADDDDKAAPDAHGGAENVEEYLSLESHSNKARKVESPAAQSTNKFKRSFTLPARMSSSSSTSAFPSVSASTAPPQQQQAGMEYRGPHEGGVYSDLMETFLE

SEQ ID NO: 194785 - protein, 157 aa, Zea Mays
MHFFNPPPVMKLIEIIRGADTSDEVFAAVRSFSERLGKSVICSQDYPGFIVNRILMPMINEAFWALYTGVATKEDIDAGMKLGTNHPMGPLQLADFIGLDVCLSVLRVLHSGLGDSKYSPCPLLVQYVDAGRLGKKRGVGVYSYGHRPSSVRPKSSL

SEQ ID NO: 194786 - protein, 139 aa, Zea Mays
MTYRCLLASFRGGEVAGVDGHRVETPGRRRQAPHLYAVRAPDHPREVHPALLARGRDPHDISASAEFHVRGGPGAPATLHQGKVRLGAQGLRRVHGGPRHRGGVPALDGGEQPRGRGQGDRGGPPRDALQAQRPGALPR

SEQ ID NO: 194787 - protein, 178 aa, Zea Mays
MAGQEKKRSRGSAPPTTVVAVASITCRRSPEARRRRLGIKMFVEGKWLEWMDTELKPQDGEGKLPTSMLFGPRIIREKFTQLCSPEDVTLMTSLLRPSSMFVEDLVLQQPYTKERYGSARKVYVVCTEDHAIAEGFQRWMVENSPVDEVREIVADHLVMLSRPSDLVRCLADIADKYA

SEQ ID NO: 194788 - protein, 139 aa, Zea Mays
MDLARREADRAAAAEFVALDIRGEGESPANDPELLMESSFVAAKEFERDRRGDVISSSSGAYEKQTVPVHVDDCPREHLQPSTPTAGGGAKRRRSSRRVLGWRDPRKILFAFAAFVGTLILLYFTLSMGKMTGGQADGQ

SEQ ID NO: 194789 - protein, 59 aa, Zea Mays
MRSRQCLCMLMTARGNTYSPPRQLQVVVQSVVVPAVVFWDGVIPGKYSSPLQHCPAWAL

SEQ ID NO: 194790 - protein, 250 aa, Zea Mays
MALQPAGVGKRNAGSGSFGVASASPPLSQTPRQEKKRNECTVQADVTRTWRRRIACPDPVGAAQGGGPALVACVCLRHDKFLVEFSVVLYPMCVFSSQFIASKILSMLLAFFRGVYLTQVCQGRTKSETGAGRRGYSYTQQVSIQGTSGCLTGNFVVEFKHQTRRLYILESDELATLCVLPTSTHLSPMSSAQLVRSPTVNETPTQGTHASLHRNMDGQIHPTQRVAHSHKQSSSSRKERRMVGWLIYQH

SEQ ID NO: 194791 - protein, 387 aa, Zea Mays
MASPAAASPARRLSVIFSSTKPRARPPKPAPAPKAPAGQAVAKPDERCESRNLTKILQVIFRERDPDKLVSQFIAESTASERFRNKHRVYDVAVARLASFGRHDGIAAIIDSQKPFIAASSVGFAARLIRLCGRASMPSHAAAIFHDLPPKHKSSMTFNALLAAYLDASDFDALATALQEIPATHPTIAPTIYSHNILISALCKKPDLSAAVDVITLMEKRGITPDIISFNILLNGFYSNDRFDDVEKVWEMMKERNVEPDARSYNAKLRGLVSQGRVEDAAALIERMQKEGPKPDSVSYNELIRGYCNEGRLNEAKKVYDNMIKNGYAPNRGTFHTLVPPRTRKDEGLKMPQPGGEGNDVEAGTDSEDSVSYEDGCEQEEESKNGQ

SEQ ID NO: 194792 - protein, 192 aa, Zea Mays
MYGHVGKLAEEIQKGASSVEGVEAKTWQVPETLPEEVLGKMGAPPKPDVPVITPQELAEADGILFGFPTRFGMMAAQMKAFFDATGGLWREQSLAGKPAGVFFCTGSQGGGQETTALTAITQLTHHGMVFVPVGYTFGAKLFGMDQVQGGSPYGAGTFAADGSRWPSEVELEHAFHQGKYFAGIAKKLKGSA

SEQ ID NO: 194793 - protein, 54 aa, Zea Mays
MALETGGKGVWNGICWFCTELGGYRFCLVHQWNENSLSFTFVLENSQTIIYRYF

SEQ ID NO: 194794 - protein, 407 aa, Zea Mays
MAALLQSSFLFPHATFPNPKPHHLAAAAATRPESPNVAPNPASARLRRLIAREDLAGAARLVELSASRDGEAPDVYLCTKLIRNLCRRGRTSDAARVLRAAEGSGSPVDVFAYNTLVAGYCRYGHLDAARRLIGSMPVAPDAYTYTPLIRVLCDRGRVADALSLLDDMLRRGCQPNVVTYTVLLEAMCKNSGFEQAMAVLDEMRAKGCTPNIVTYNVIINGMCREGRVDDARDLLNRLFSYGCQPDTVSYTTLLKGLCASKRWDDVEELFAEMMEKNCMPNEVTFDMLIRFFCRGGMVERAIQVLQQMTEHECATNTTLCNIVINSICKQGRVDDAFKFLNNMGSYGCNPDTISYTTVLKGLCRAERWNDAKELLKEMVRNNCPPNEHALQTKYHHIHYFADRLVQR

SEQ ID NO: 194795 - protein, 475 aa, Zea Mays
MAALLQSSFLFPHATFPNPKPHHLAAAAATRPESPNVAPNPASARLRRLIAREDLAGAARLVELSASRDGEAPDVYLCTKLIRNLCRRGRTSDAARVLRAAEGSGSPVDVFAYNTLVAGYCRYGHLDAARRLIGSMPVAPDAYTYTPLIRVLCDRGRVADALSLLDDMLRRGCQPNVVTYTVLLEAMCKNSGFEQAMAVLDEMRAKGCTPNIVTYNVIINGMCREGRVDDARDLLNRLFSYGCQPDTVSYTTLLKGLCASKRWDDVEELFAEMMEKNCMPNEVTFDMLIRFFCRGGMVERAIQVLQQMTEHECATNTTLCNIVINSICKQGRVDDAFKFLNNMGSYGCNPDTISYTTVLKGLCRAERWNDAKELLKEMVRNNCPPNEVTFNTFICILCQKGLIEQAIMLIEQMQEHGCTVGVVTYNALVNGFCVQGHIDSALELFRSMPCKPNTITYTTLLTGLCNAERISGRSN

SEQ ID NO: 194796 - protein, 583 aa, Zea Mays
MVFSWEPVRCHDVVDMGWSNLADLSIYEGKLLGCSYHECRVGLWAADISLIGPYALGVLPKANFFAELVQSMEDNPVKPVDSTANSRPASAMAHSRSSYKIKESGIAQSRVRGSHLTPASTDKTKKDRSSTIPRRPDSSLKSSVQSTTLMRRMKLVDSPSTNTKNVERNVGQRDISLASRAVMANNSATAKKSNLTESALVKDIYTTSQAVSAPIVVPRDILEDKTVSNVRRGTGETAAVPDDFRIPVHRRKPSLSGSAADSDSSSRSVFTEPDVCSEGLSSLKFSFGLTPYHKKEEFGDVDNEGIAQIAEKMERTVSLDHSQQLNDDKSFESPCSTTETAKVKYVRGVAVPLGKTKSLVERWEKRETSSTDYSPQTGSCGDRASRNDNHPFHLAEPSTTFEKDLSTVDEAMAPVNLVRNHDEFLNAVKLRLTKLEMMRHVFEQSGIKGAIAAVAKLPDNAVQADVVSALKGKLDLFNLEFFSNFLPVLAGLLCSKTERHAMVSLEMLLDLIKIFGPVIHSALSANLGVGVDIQAEQRLQRCSRCFNHLQKIQQSLNPLILRGGQTAQLAQELSLSLQDLVVI

SEQ ID NO: 194797 - protein, 580 aa, Zea Mays
MVFHPDGKTLFCGLDQSLKVFSWEPVRCHDVVDMGWSNLADLSIYEGKLLGCSYHECRVGLWAADISSMEDNPVKPVDSTANSRPASAMAHSRSSYKIKESGIAQSRVRGSHLTPASTDKTKKDRSSTIPRRPDSSLKSSVQSTTLMRRMKLVDSPSTNTKNVERNVGQRDISLASRAVMANNSATAKKSNLTESALVKDIYTTSQAVSAPIVVPRDILEDKTVSNVRRGTGETAAVPDDFRIPVHRRKPSLSGSAADSDSSSRSVFTEPDVCSEGLSSLKFSFGLTPYHKKEEFGDVDNEGIAQIAEKMERTVSLDHSQQLNDDKSFESPCSTTETAKVKYVRGVAVPLGKTKSLVERWEKRETSSTDYSPQTGSCGDRASRNDNHPFHLAEPSTTFEKDLSTVDEAMAPVNLVRNHDEFLNAVKLRLTKLEMMRHVFEQSGIKGAIAAVAKLPDNAVQADVVSALKGKLDLFNLEFFSNFLPVLAGLLCSKTERHAMVSLEMLLDLIKIFGPVIHSALSANLGVGVDIQAEQRLQRCSRCFNHLQKIQQSLNPLILRGGQTAQLAQELSLSLQDLVVI

SEQ ID NO: 194798 - protein, 600 aa, Zea Mays
MTPLSRVPVYVLWSFTQMVFSWEPVRCHDVVDMGWSNLADLSIYEGKLLGCSYHECRVGLWAADISLIGPYALGVLPKANFFAELVQSMEDNPVKPVDSTANSRPASAMAHSRSSYKIKESGIAQSRVRGSHLTPASTDKTKKDRSSTIPRRPDSSLKSSVQSTTLMRRMKLVDSPSTNTKNVERNVGQRDISLASRAVMANNSATAKKSNLTESALVKDIYTTSQAVSAPIVVPRDILEDKTVSNVRRGTGETAAVPDDFRIPVHRRKPSLSGSAADSDSSSRSVFTEPDVCSEGLSSLKFSFGLTPYHKKEEFGDVDNEGIAQIAEKMERTVSLDHSQQLNDDKSFESPCSTTETAKVKYVRGVAVPLGKTKSLVERWEKRETSSTDYSPQTGSCGDRASRNDNHPFHLAEPSTTFEKDLSTVDEAMAPVNLVRNHDEFLNAVKLRLTKLEMMRHVFEQSGIKGAIAAVAKLPDNAVQADVVSALKGKLDLFNLEFFSNFLPVLAGLLCSKTERHAMVSLEMLLDLIKIFGPVIHSALSANLGVGVDIQAEQRLQRCSRCFNHLQKIQQSLNPLILRGGQTAQLAQELSLSLQDLVVI

SEQ ID NO: 194799 - protein, 549 aa, Zea Mays
MCFFPASSNFHSWIQLIGPYALGVLPKANFFAELVQSMEDNPVKPVDSTANSRPASAMAHSRSSYKIKESGIAQSRVRGSHLTPASTDKTKKDRSSTIPRRPDSSLKSSVQSTTLMRRMKLVDSPSTNTKNVERNVGQRDISLASRAVMANNSATAKKSNLTESALVKDIYTTSQAVSAPIVVPRDILEDKTVSNVRRGTGETAAVPDDFRIPVHRRKPSLSGSAADSDSSSRSVFTEPDVCSEGLSSLKFSFGLTPYHKKEEFGDVDNEGIAQIAEKMERTVSLDHSQQLNDDKSFESPCSTTETAKVKYVRGVAVPLGKTKSLVERWEKRETSSTDYSPQTGSCGDRASRNDNHPFHLAEPSTTFEKDLSTVDEAMAPVNLVRNHDEFLNAVKLRLTKLEMMRHVFEQSGIKGAIAAVAKLPDNAVQADVVSALKGKLDLFNLEFFSNFLPVLAGLLCSKTERHAMVSLEMLLDLIKIFGPVIHSALSANLGVGVDIQAEQRLQRCSRCFNHLQKIQQSLNPLILRGGQTAQLAQELSLSLQDLVVI

SEQ ID NO: 194800 - protein, 605 aa, Zea Mays
MRRTSIFLFCDSLHDSSLQGTGVRSMVFHPDGKTLFCGLDQSLKVFSWEPVRCHDVVDMGWSNLADLSIYEGKLLGCSYHECRVGLWAADISSMEDNPVKPVDSTANSRPASAMAHSRSSYKIKESGIAQSRVRGSHLTPASTDKTKKDRSSTIPRRPDSSLKSSVQSTTLMRRMKLVDSPSTNTKNVERNVGQRDISLASRAVMANNSATAKKSNLTESALVKDIYTTSQAVSAPIVVPRDILEDKTVSNVRRGTGETAAVPDDFRIPVHRRKPSLSGSAADSDSSSRSVFTEPDVCSEGLSSLKFSFGLTPYHKKEEFGDVDNEGIAQIAEKMERTVSLDHSQQLNDDKSFESPCSTTETAKVKYVRGVAVPLGKTKSLVERWEKRETSSTDYSPQTGSCGDRASRNDNHPFHLAEPSTTFEKDLSTVDEAMAPVNLVRNHDEFLNAVKLRLTKLEMMRHVFEQSGIKGAIAAVAKLPDNAVQADVVSALKGKLDLFNLEFFSNFLPVLAGLLCSKTERHAMVSLEMLLDLIKIFGPVIHSALSANLGVGVDIQAEQRLQRCSRCFNHLQKIQQSLNPLILRGGQTAQLAQELSLSLQDLVVI

SEQ ID NO: 194801 - protein, 813 aa, Zea Mays
MDPEKRGYELQNFVAHDAEVRSLSIGKKSRRVFITGGNDRKVKLWAIGKQTPLLTLSGHTSAVEAVQFDSAEVLVLAGSSNGSIKLWDLEEAKVVRSLTGHRSSCTAVEFHPFGEFFASGSSDTDLKIWDIKKKGYIHTYKGHRGAIKTIRFTPDGRWVVTGGEDNIVKVWDLTAGKLLHDFKFHSGQINCIDFHPQEFLLATGSADRTVKFWDLETFELIGSSGPEGTGVRSMVFHPDGKTLFCGLDQSLKVFSWEPVRCHDVVDMGWSNLADLSIYEGKLLGCSYHECRVGLWAADISSMEDNPVKPVDSTANSRPASAMAHSRSSYKIKESGIAQSRVRGSHLTPASTDKTKKDRSSTIPRRPDSSLKSSVQSTTLMRRMKLVDSPSTNTKNVERNVGQRDISLASRAVMANNSATAKKSNLTESALVKDIYTTSQAVSAPIVVPRDILEDKTVSNVRRGTGETAAVPDDFRIPVHRRKPSLSGSAADSDSSSRSVFTEPDVCSEGLSSLKFSFGLTPYHKKEEFGDVDNEGIAQIAEKMERTVSLDHSQQLNDDKSFESPCSTTETAKVKYVRGVAVPLGKTKSLVERWEKRETSSTDYSPQTGSCGDRASRNDNHPFHLAEPSTTFEKDLSTVDEAMAPVNLVRNHDEFLNAVKLRLTKLEMMRHVFEQSGIKGAIAAVAKLPDNAVQADVVSALKGKLDLFNLEFFSNFLPVLAGLLCSKTERHAMVSLEMLLDLIKIFGPVIHSALSANLGVGVDIQAEQRLQRCSRCFNHLQKIQQSLNPLILRGGQTAQLAQELSLSLQDLVVI

SEQ ID NO: 194802 - protein, 294 aa, Zea Mays
MDPEKRGYELQNFVAHDAEVRSLSIGKKSRRVFITGGNDRKVKLWAIGKQTPLLTLSGHTSAVEAVQFDSAEVLVLAGSSNGSIKLWDLEEAKVVRSLTGHRSSCTAVEFHPFGEFFASGSSDTDLKIWDIKKKGYIHTYKGHRGAIKTIRFTPDGRWVVTGGEDNIVKVWDLTAGKLLHDFKFHSGQINCIDFHPQEFLLATGSADRTVKFWDLETFELIGSSGPEVLQVFFLNQAGSGYEIDNLKTTNYGFSNSLACMFYRHGNYSTFLLWPCINIFVFLINRNCKNFLRGI

SEQ ID NO: 194803 - protein, 809 aa, Zea Mays
MDPEKRGYELQNFVAHDAEVRSLSIGKKSRRVFITGGNDRKVKLWAIGKQTPLLTLSGHTSAVEAVQFDSAEVLVLAGSSNGSIKLWDLEEAKVVRSLTGHRSSCTAVEFHPFGEFFASGSSDTDLKIWDIKKKGYIHTYKGHRGAIKTIRFTPDGRWVVTGGEDNIVKVWDLTAGKLLHDFKFHSGQINCIDFHPQEFLLATGSADRTVKFWDLETFELIGSSGPEVFSWEPVRCHDVVDMGWSNLADLSIYEGKLLGCSYHECRVGLWAADISLIGPYALGVLPKANFFAELVQSMEDNPVKPVDSTANSRPASAMAHSRSSYKIKESGIAQSRVRGSHLTPASTDKTKKDRSSTIPRRPDSSLKSSVQSTTLMRRMKLVDSPSTNTKNVERNVGQRDISLASRAVMANNSATAKKSNLTESALVKDIYTTSQAVSAPIVVPRDILEDKTVSNVRRGTGETAAVPDDFRIPVHRRKPSLSGSAADSDSSSRSVFTEPDVCSEGLSSLKFSFGLTPYHKKEEFGDVDNEGIAQIAEKMERTVSLDHSQQLNDDKSFESPCSTTETAKVKYVRGVAVPLGKTKSLVERWEKRETSSTDYSPQTGSCGDRASRNDNHPFHLAEPSTTFEKDLSTVDEAMAPVNLVRNHDEFLNAVKLRLTKLEMMRHVFEQSGIKGAIAAVAKLPDNAVQADVVSALKGKLDLFNLEFFSNFLPVLAGLLCSKTERHAMVSLEMLLDLIKIFGPVIHSALSANLGVGVDIQAEQRLQRCSRCFNHLQKIQQSLNPLILRGGQTAQLAQELSLSLQDLVVI

SEQ ID NO: 194804 - protein, 834 aa, Zea Mays
MDPEKRGYELQNFVAHDAEVRSLSIGKKSRRVFITGGNDRKVKLWAIGKQTPLLTLSGHTSAVEAVQFDSAEVLVLAGSSNGSIKLWDLEEAKVVRSLTGHRSSCTAVEFHPFGEFFASGSSDTDLKIWDIKKKGYIHTYKGHRGAIKTIRFTPDGRWVVTGGEDNIVKVWDLTAGKLLHDFKFHSGQINCIDFHPQEFLLATGSADRTVKFWDLETFELIGSSGPEGTGVRSMVFHPDGKTLFCGLDQSLKVFSWEPVRCHDVVDMGWSNLADLSIYEGKLLGCSYHECRVGLWAADISLIGPYALGVLPKANFFAELVQSMEDNPVKPVDSTANSRPASAMAHSRSSYKIKESGIAQSRVRGSHLTPASTDKTKKDRSSTIPRRPDSSLKSSVQSTTLMRRMKLVDSPSTNTKNVERNVGQRDISLASRAVMANNSATAKKSNLTESALVKDIYTTSQAVSAPIVVPRDILEDKTVSNVRRGTGETAAVPDDFRIPVHRRKPSLSGSAADSDSSSRSVFTEPDVCSEGLSSLKFSFGLTPYHKKEEFGDVDNEGIAQIAEKMERTVSLDHSQQLNDDKSFESPCSTTETAKVKYVRGVAVPLGKTKSLVERWEKRETSSTDYSPQTGSCGDRASRNDNHPFHLAEPSTTFEKDLSTVDEAMAPVNLVRNHDEFLNAVKLRLTKLEMMRHVFEQSGIKGAIAAVAKLPDNAVQADVVSALKGKLDLFNLEFFSNFLPVLAGLLCSKTERHAMVSLEMLLDLIKIFGPVIHSALSANLGVGVDIQAEQRLQRCSRCFNHLQKIQQSLNPLILRGGQTAQLAQELSLSLQDLVVI

SEQ ID NO: 194805 - protein, 444 aa, Zea Mays
MRRTSIFLFCDSLHDSSLQGTGVRSMVFHPDGKTLFCGLDQSLKVFSWEPVRCHDVVDMGWSNLADLSIYEGKLLGCSYHECRVGLWAADISLIGPYALGVLPKANFFAELVQSMEDNPVKPVDSTANSRPASAMAHSRSSYKIKESGIAQSRVRGSHLTPASTDKTKKDRSSTIPRRPDSSLKSSVQSTTLMRRMKLVDSPSTNTKNVERNVGQRDISLASRAVMANNSATAKKSNLTESALVKDIYTTSQAVSAPIVVPRDILEDKTVSNVRRGTGETAAVPDDFRIPVHRRKPSLSGSAADSDSSSRSVFTEPDVCSEGLSSLKFSFGLTPYHKKEEFGDVDNEGIAQIAEKMERTVSLDHSQQLNDDKSFESPCSTTETAKVKYVRGVAVPLGKTKSLVERWEKRETSSTDYSPQTGSCGDRASRNDNHPFHLESCVSFH

SEQ ID NO: 194806 - protein, 249 aa, Zea Mays
MHGGSYNAYTSSETTNFFFDVNVDNFEEALDRFAQFFIKPLMSQDAVLREIKAVDSEHKKNLLSDGWRMYQLQKHLASKDHPYHKFSTGSWETLETKPKARGVDIRLELLKFYKNYSANLMHLVVYGKESLDYIQGLVERMFSDIKNTDQRCFKCPSHPLSEEHLQLLVKALPIEEGDYLRIIWPITPSIQFYKEGPCHYLSHLIGHEGEGSVFHIIKELGWAMNLMAGESTDSNEYSFFSNTWRILLG

SEQ ID NO: 194807 - protein, 281 aa, Zea Mays
MHGGSYNAYTSSETTNFFFDVNVDNFEEALDRFAQFFIKPLMSQDAVLREIKAVDSEHKKNLLSDGWRMYQLQKHLASKDHPYHKFSTGSWETLETKPKARGVDIRLELLKFYKNYSANLMHLVVYGKESLDYIQGLVERMFSDIKNTDQRCFKCPSHPLSEEHLQLLVKALPIEEGDYLRIIWPITPSIQFYKEGPCHYLSHLIGHEGEGSVFHIIKELGWAMNLMAGESTDSNEYSFFSVSIRLTDAGHEHMEDIVGLIFKYLHLLKVDGVHEWIFNER

SEQ ID NO: 194808 - protein, 226 aa, Zea Mays
MHLVVYGKESLDYIQGLVERMFSDIKNTDQRCFKCPSHPLSEEHLQLLVKALPIEEGDYLRIIWPITPSIQFYKEGPCHYLSHLIGHEGEGSVFHIIKELGWAMNLMAGESTDSNEYSFFSVSIRLTDAGHEHMEDIVGLIFKYLHLLKVDGVHEWIFNELEAINEMEFHYQDKVDPISYVMRTVSTMRLFPPEEWLVGAALPSKYAPQRINMILDQLSPERCYAP

SEQ ID NO: 194809 - protein, 305 aa, Zea Mays
MSQDAVLREIKAVDSEHKKNLLSDGWRMYQLQKHLASKDHPYHKFSTGSWETLETKPKARGVDIRLELLKFYKNYSANLMHLVVYGKESLDYIQGLVERMFSDIKNTDQRCFKCPSHPLSEEHLQLLVKALPIEEGDYLRIIWPITPSIQFYKEGPCHYLSHLIGHEGEGSVFHIIKELGWAMNLMAGESTDSNEYSFFSVSIRLTDAGHEHMEDIVGLIFKYLHLLKVDGVHEWIFNELEAINEMEFHYQDKVDPISYVMRTVSTMRLFPPEEWLVGAALPSKYAPQRINMILDQLSPERCYAP

SEQ ID NO: 194810 - protein, 366 aa, Zea Mays
MLFYASEKYPGEHEYTKYITEHGGSYNAYTSSETTNFFFDVNVDNFEEALDRFAQFFIKPLMSQDAVLREIKAVDSEHKKNLLSDGWRMYQLQKHLASKDHPYHKFSTGSWETLETKPKARGVDIRLELLKFYKNYSANLMHLVVYGKESLDYIQGLVERMFSDIKNTDQRCFKCPSHPLSEEHLQLLVKALPIEEGDYLRIIWPITPSIQFYKEGPCHYLSHLIGHEGEGSVFHIIKELGWAMNLMAGESTDSNEYSFFSVSIRLTDAGHEHMEDIVGLIFKYLHLLKVDGVHEWIFNELEAINEMEFHYQDKVDPISYVMRTVSTMRLFPPEEWLVGAALPSKYAPQRINMILDQLSPERCYAP

SEQ ID NO: 194811 - protein, 278 aa, Zea Mays
MYQLQKHLASKDHPYHKFSTGSWETLETKPKARGVDIRLELLKFYKNYSANLMHLVVYGKESLDYIQGLVERMFSDIKNTDQRCFKCPSHPLSEEHLQLLVKALPIEEGDYLRIIWPITPSIQFYKEGPCHYLSHLIGHEGEGSVFHIIKELGWAMNLMAGESTDSNEYSFFSVSIRLTDAGHEHMEDIVGLIFKYLHLLKVDGVHEWIFNELEAINEMEFHYQDKVDPISYVMRTVSTMRLFPPEEWLVGAALPSKYAPQRINMILDQLSPERCYAP

SEQ ID NO: 194812 - protein, 351 aa, Zea Mays
MMRKYQHGGSYNAYTSSETTNFFFDVNVDNFEEALDRFAQFFIKPLMSQDAVLREIKAVDSEHKKNLLSDGWRMYQLQKHLASKDHPYHKFSTGSWETLETKPKARGVDIRLELLKFYKNYSANLMHLVVYGKESLDYIQGLVERMFSDIKNTDQRCFKCPSHPLSEEHLQLLVKALPIEEGDYLRIIWPITPSIQFYKEGPCHYLSHLIGHEGEGSVFHIIKELGWAMNLMAGESTDSNEYSFFSVSIRLTDAGHEHMEDIVGLIFKYLHLLKVDGVHEWIFNELEAINEMEFHYQDKVDPISYVMRTVSTMRLFPPEEWLVGAALPSKYAPQRINMILDQLSPERCYAP

SEQ ID NO: 194813 - protein, 52 aa, Zea Mays
MATASSFTAIFFSSAFVACFAEPKCRSSCKGRHHYHHHLWLQQPQLLLVEGH

SEQ ID NO: 194814 - protein, 62 aa, Zea Mays
MQSRRSVLLLPHRRVLLRPVGDIRELIRPQSAAHAMPPSQPKRHVACIRVCSHALRASVGDI

SEQ ID NO: 194815 - protein, 140 aa, Zea Mays
MYTGTMQKLPTKSNTDSNIMRCSQVPRFKYLPISAPAISSRSHKPSLQSLSSESTSKNPWKSYSNGDRSTTPEFDDNASLVGAAPLLKSFVTQVGTKFGENTSRWGSMLSDGQVGKLSDILPGPAAGFFSSFTSGARYDS

SEQ ID NO: 194816 - protein, 720 aa, Zea Mays
MAMPSLLRFLVLLTAGAAVSQVVAAWVDCGDASPSPPPYSSSPSPSPSSTPANGSSNAPFRANLMTLLDALPRAAAPTGFASLSLGAGRDRAFVRGLCRGDFDPPRCLAELQEAVRTLGGSCPSSSRRGAVWLDVYVAYADTNVSTPREDDVRMVLYDTRLVAHPAAYLQAYSALMGTLVARAVGGGGGEAGTSRQFFATGEANYASDDPNGTMYGLVQCMRDITAADCVHCLQASVPQLPCCKGNQGGVVLAYNCYLRIQVYTYYDLALDAPPPAAEPAPPVPSPPPAGETSGTGTRPRNTIVLLAVVVPLGTLLLLAFVVAGVYLRRRRGVVVEERGRERGCTAVEDEPSMTYVHPEKFTLAALRVATGNFAAGNKLGEGGFGEVFKGRLEDGHPVAVKRLSKGSSQGFDELKNELILAAKLKHRNLVQLLGVCLEESEKLVVYEYVPNRSLDTVLFDAGRRPQQALEWSERYKIIRGIARGLLYLHEESRLRIIHRDLKPSNVLLDSDMTPKISDFGLARAFWGDESRGVTRRPVGTLGYMAPEYAYYGHVSTKSDMFSFGVIVLEIMTGQRNSSPSVEDGSSNRNLLSYVRLGPVEARIRGGGGGRVAVRGRPVRRDRGALLRADRAPVRAEGPQVQARRVGGRPDAGGTVRDPAEAVKAGVLLRPHQRRLGAACCTRKCGELRASFCDRDCFRERRYSFGARPAVDRRTRLIFHW

SEQ ID NO: 194817 - protein, 233 aa, Zea Mays
MRIQSYDDQLLHLAADLAQRLLPAFDTPTGIPFGSVNLLYGVDENESKITSTAGGGTLTLEFGILSRLTNNTVFERVTKKSVRGIWSRRSKLNLVGAHINVFTGEWTQKDAGIGTSIDSFYEYLLKAYLLFGDEEYLYIFQEAYKAAMHYLHHDPWYVEVNMNSGATVWPLFNSLQAFWPGLQVLAGDVDPAIRTHAAFFSVWKKYGFTPEGFNLATSTVQVMKLLNYNSQEY

SEQ ID NO: 194818 - protein, 561 aa, Zea Mays
MRSLLSILWIPWLYWVIRRNLVLLWSGLNKTVSVFETNIRILGGLLSAHLIASDYATGMRIQSYDDQLLHLAADLAQRLLPAFDTPTGIPFGSVNLLYGVDENESKITSTAGGGTLTLEFGILSRLTNNTVFERVTKKSVRGIWSRRSKLNLVGAHINVFTGEWTQKDAGIGTSIDSFYEYLLKAYLLFGDEEYLYIFQEAYKAAMHYLHHDPWYVEVNMNSGATVWPLFNSLQAFWPGLQVLAGDVDPAIRTHAAFFSVWKKYGFTPEGFNLATSTVQNGQRSYPLRPELIESTYWLFKATRDYRYLDVGRDILASLQYGARCPCGYCHISDVETHKQDDHMESFFLAETVKYLWLLFDLAAGPDNIVENGPYKYIFSTEGHLLPVTPEIALEDEHCSYFGAFCNGGADHGYGASASSTKHRNGNYTQLDDIQTPSSHYSMSNVLFTPGYIKGVCPGLTHAQKFGISYSDEEDNFIEQTSESLDHHGESAIESSVQDQSSSIILISHPVASQQDEAFESESGSQDHANIVVTSDSDSDSTSRDNTVGSPGMNSEELMDDI

SEQ ID NO: 194819 - protein, 288 aa, Zea Mays
MRSLLSILWIPWLYWVIRRNLVLLWSGLNKTVSVFETNIRILGGLLSAHLIASDYATGMRIQSYDDQLLHLAADLAQRLLPAFDTPTGIPFGSVNLLYGVDENESKITSTAGGGTLTLEFGILSRLTNNTVFERVTKKSVRGIWSRRSKLNLVGAHINVFTGEWTQKDAGIGTSIDSFYEYLLKAYLLFGDEEYLYIFQEAYKAAMHYLHHDPWYVEVNMNSGATVWPLFNSLQAFWPGLQLEMLILLFAHMLPSSASGKSMVLPLKVLILLHPLYRMDKGATRYDQS

SEQ ID NO: 194820 - protein, 230 aa, Zea Mays
MRIQSYDDQLLHLAADLAQRLLPAFDTPTGIPFGSVNLLYGVDENESKITSTAGGGTLTLEFGILSRLTNNTVFERVTKKSVRGIWSRRSKLNLVGAHINVFTGEWTQKDAGIGTSIDSFYEYLLKAYLLFGDEEYLYIFQEAYKAAMHYLHHDPWYVEVNMNSGATVWPLFNSLQAFWPGLQLEMLILLFAHMLPSSASGKSMVLPLKVLILLHPLYRMDKGATRYDQS

SEQ ID NO: 194821 - protein, 332 aa, Zea Mays
MQPIRRRHRGFALLCLSAALLAAATLLPGAAVAEGVTPSEARRLRDEVKDMFYHAFDGYMKYAFPLDELRPLSCQGEDSLGGYALTLIDSLDTLALLGDKEKFGAAVEWVGKNVHFDINKTVSVFETNIRILGGLLSAHLIASDYATGMRIQSYDDQLLHLAADLAQRLLPAFDTPTGIPFGSVNLLYGVDENESKITSTAGGGTLTLEFGILSRLTNNTVFERVTKKSVRGIWSRRSKLNLVGAHINVFTGEWTQKDAGIGTSIDSFYEYLLKAYLLFGDEEYLYIFQEAYKAAMHYLHHDPWYVEVNMNSGATVWPLFNSLQAFWPGLQI

SEQ ID NO: 194822 - protein, 381 aa, Zea Mays
MQPIRRRHRGFALLCLSAALLAAATLLPGAAVAEGVTPSEARRLRDEVKDMFYHAFDGYMKYAFPLDELRPLSCQGEDSLGGYALTLIDSLDTLALLGDKEKFGAAVEWVGKNVHFDINKTVSVFETNIRILGGLLSAHLIASDYATGMRIQSYDDQLLHLAADLAQRLLPAFDTPTGIPFGSVNLLYGVDENESKITSTAGGGTLTLEFGILSRLTNNTVFERVTKKSVRGIWSRRSKLNLVGAHINVFTGEWTQKDAGIGTSIDSFYEYLLKAYLLFGDEEYLYIFQEAYKAAMHYLHHDPWYVEVNMNSGATVWPLFNSLQAFWPGLQVLAGDVDPAIRTHAAFFSVWKKYGFTPEGFNLATSTVQVMKLLNYNSQEY

SEQ ID NO: 194823 - protein, 242 aa, Zea Mays
MRSLLSILWIPWLYWVIRRNLVLLWSGLNKTVSVFETNIRILGGLLSAHLIASDYATGMRIQSYDDQLLHLAADLAQRLLPAFDTPTGIPFGSVNLLYGVDENESKITSTAGGGTLTLEFGILSRLTNNTVFERVTKKSVRGIWSRRSKLNLVGAHINVFTGEWTQKDAGIGTSIDSFYEYLLKAYLLFGDEEYLYIFQEAYKAAMHYLHHDPWYVEVNMNSGATVWPLFNSLQAFWPGLQI

SEQ ID NO: 194824 - protein, 154 aa, Zea Mays
MQVVMPTVGSDVAFGLGKLKLPLDEVRLRVSKSLDAVGMLSYSQRPIQTLSGGQKQRVAIAGALAEASKVLLLDELTTFLDEHDQIGVINAVRDSVAADGEVAALWVTHRLEELKYADGAIYMEDGQIIIQGDVSTISKFIKKKQDGGSEMPFG

SEQ ID NO: 194825 - protein, 150 aa, Zea Mays
MPTVGSDVAFGLGKLKLPLDEVRLRVSKSLDAVGMLSYSQRPIQTLSGGQKQRVAIAGALAEASKVLLLDELTTFLDEHDQIGVINAVRDSVAADGEVAALWVTHRLEELKYADGAIYMEDGQIIIQGDVSTISKFIKKKQDGGSEMPFG

SEQ ID NO: 194826 - protein, 204 aa, Zea Mays
MLPPCPARAALDAPRPQRLRQVHAAQGFQNPTAGTVYINRPCSYVFQNPDHQVVMPTVGSDVAFGLGKLKLPLDEVRLRVSKSLDAVGMLSYSQRPIQTLSGGQKQRVAIAGALAEASKVLLLDELTTFLDEHDQIGVINAVRDSVAADGEVAALWVTHRLEELKYADGAIYMEDGQIIIQGDVSTISKFIKKKQARYFGHFEL

SEQ ID NO: 194827 - protein, 117 aa, Zea Mays
MASLLCPASSCPSASLRRTAASPAAPSFASSRHYGAPLTFRVASQPPQALAAAPYGYGSDLLRPIDTQTIIIAAAVVSAVSLSLVLGLKGDPVPCDRCAGNVCVLQRWQNEGGKWSR

SEQ ID NO: 194828 - protein, 218 aa, Zea Mays
MSIMAQKSPFGHLKDCTDIQHMAKTLTGFQLFNLQKDSPLRTLEPSTLQALYELISLVHDGAEAVSQMDKIEATSQNKSSNQRDDTDTSAAADDSSLLDKDPVAKIILPVEPLELRTMLLAMVHTFPRTLENLILNMLGVGAEILTRKFDEMDQQTTKEEQSEFYKIFYSVFDDQYAAMDALLNGKELFSFQIFQNVLDKYLGVHVDRPSRFVTRTNQ

SEQ ID NO: 194829 - protein, 353 aa, Zea Mays
MNKGHLRSSTHYDPHHNLLCVVSGRKKVTLWPPSASPFLYPLPVYGEASNHSSVSVEEPDYSIYTRARYMKEYSETVILNCSDVVFIPEGWYHQVDSDDLTIAVNFWWKSRIMTQMLEHMDAYYLRRIMSRLVDQEMSIMAQKSPFGHLKDCTDIQHMAKTLTGFQLFNLQKDSPLRTLEPSTLQALYELISLVHDGAEAVSQMDKIEATSQNKSSNQRDDTDTSAAADDSSLLDKDPVAKIILPVEPLELRTMLLAMHTFPRTLENLILNMLGVGAEILTRKFDEMDQQTTKEEQSEFYKIFYSVFDDQYAAMDALLNGKELFSFQIFQNVLDKYLGVHVDRPSRFVTRTNQ

SEQ ID NO: 194830 - protein, 322 aa, Zea Mays
MGEEREFVGARLDAGLRAARFSSPPSADEFAADVEPKNVPAVFRGVVKEWAASSRWDPLHGGLDYLLEKVGPDVAVEAMMSNTGHVFYGDLRSHERVSVSFSTFIQSCKSYLDHMNAASDSSKEQGMLGEPASSRETCSNSSENLEQVYLAQVSIMNAENKEGCSLQVLEGDIQEPIFLRGKSFSSINFWMNKGHLRSSTHYDPHHNLLCVVSGRKKVTLWPPSASPFLYPLPVYGEASNHSSVSVEEPDYSIYTRARYMKEYSETVILNCSDVVFIPEGWYHQVDSDDLTIAVNFWWKSRIMTQMLEHMDAYYLRRIMSRA

SEQ ID NO: 194831 - protein, 328 aa, Zea Mays
MGEEREFVGARLDAGLRAARFSSPPSADEFAADVEPKNVPAVFRGVVKEWAASSRWDPLHGGLDYLLEKVGPDVAVEAMMSNTGHVFYGDLRSHERVSVSFSTFIQSCKSYLDHMNAASDSSKEQGMLGEPASSRETCSNSSENLEQVYLAQVSIMNAENKEGCSLQVLEGDIQEPIFLRGKSFSSINFWMNKGHLRSSTHYDPHHNLLCVVSGRKKVTLWPPSASPFLYPLPVYGEASNHSSVSVEEPDYSIYTRARYMKEYSETVILNCSDVVFIPEGWYHQVDSDDLTIAVNFWWKSRIMTQMLEHMDAYYLRRIMSSEDWWTRR

SEQ ID NO: 194832 - protein, 196 aa, Zea Mays
MGEEREFVGARLDAGLRAARFSSPPSADEFAADVEPKNVPAVFRGVVKEWAASSRWDPLHGGLDYLLEKVGPDVAVEAMMSNTGHVFYGDLRSHERVSVSFSTFIQSCKSYLDHMNAASDSSKEQGMLGEPASSRETCSNSSENLEQVYLAQRTKKDAHYKFWKATSKRSKLVLPFSQIVYSPHDFQVAHRSSLFY

SEQ ID NO: 194833 - protein, 242 aa, Zea Mays
MTQMLEHMDAYYLRRIMSRLVDQEMSIMAQKSPFGHLKDCTDIQHMAKTLTGFQLFNLQKDSPLRTLEPSTLQALYELISLVHDGAEAVSQMDKIEATSQNKSSNQRDDTDTSAAADDSSLLDKDPVAKIILPVEPLELRTMLLAMVHTFPRTLENLILNMLGVGAEILTRKFDEMDQQTTKEEQSEFYKIFYSVFDDQYAAMDALLNGKELFSFQIFQNVLDKYLGVHVDRPSRFVTRTNQ

SEQ ID NO: 194834 - protein, 400 aa, Zea Mays
MFEQFRELGASLFGTENKEGCSLQVLEGDIQEPIFLRGKSFSSINFWMNKGHLRSSTHYDPHHNLLCVVSGRKKVTLWPPSASPFLYPLPVYGEASNHSSVSVEEPDYSIYTRARYMKEYSETVILNCSDVVFIPEGWYHQVDSDDLTIAVNFWWKSRIMTQMLEHMDAYYLRRIMSRLVDQEMSIMAQKSPFGHLKDCTDIQHMAKTLTGFQLFNLQKDSPLRTLEPSTLQALYELISLVHDGAEAVSQMDKIEATSQNKSSNQRDDTDTSAAADDSSLLDKDPVAKIILPVEPLELRTMLLAMHTFPRTLENLILNMLGVGAEILTRKFDEMDQQTTKEEQSEFYKIFYSVFDDQYAAMDALLNGKELFSFQIFQNVLDKYLGVHVDRPSRFVTRTNQ

SEQ ID NO: 194835 - protein, 496 aa, Zea Mays
MALLSAVKAGIFVVQAAGNTGPSPKSMSSYSPWIFTVGASAHDRVYNNYIVLGNNLTIQGVGLAPGTDDDCMYTLVAAPHALKNNTVSPTELSFGECQDSSRLDADLIRGKILVCSYSIRFVLGLSSVKQALDTANNVSAAGVIFYLDPFVLGFQLNPTPMRMPGLIIPSSDDSKVFLAYYNDSLVRDETSGQVVSFGGVAKILGGLNPDYGNSAPKVMFYSARGPDPEDNTLSNADILKPNLVAPGNSIWGAWSSLGLDSAEFSGESFAMLSGTSMAAPHVAGLAALIKQKFPSFSPAAIASALSTTTTLSDRQGKPIMAQRTYSNPDSTQSPATAFDMGNGFVNATAALDPGLVFDCSYDDFFSFLCGINGSSPVVTNYTGNSCVASAMTGADLNLPSITIAVLNQTRSITRTVTNVAADESYTVSYSAPYGTAISVVPMHFLIPSGQKQLVTFVVNATMNSSSASFGNVGFYGDKGHRAIIPFSVISKAVYSS

SEQ ID NO: 194836 - protein, 335 aa, Zea Mays
MNYGSYIVHLQNSLLKRTLRGERYIKLYSYRYLINGFAVVITPLQADKLSRRKEVANVMLDYSVRTATTHTPEFLGLPQGAWVQEGGPQFAGQGVVIGLIDTGIDPTHPSFADDLSTDSYPVPAHYSGICEVTNDFPSGSCNRKLVGARHFAASAITRGVFNASQDLASPSDSDGHGTHTASIAAGNHGIPVAVSGHQFGNASGMAPRAHIAVYKALYKSFGGFAADVVAAIDQAAEDNVDIISLSITPNRRPPGLATFFNPIDMALLSAVKAGIFVVQAAGNTGPSPKSMSSYSPWIFTVGASAHDRVYNNYIVLGNNLTIQGVGLARISRLLQ

SEQ ID NO: 194837 - protein, 760 aa, Zea Mays
MNYGSYIVHLQNSLLKRTLRGERYIKLYSYRYLINGFAVVITPLQADKLSRRKEVANVMLDYSVRTATTHTPEFLGLPQGAWVQEGGPQFAGQGVVIGLIDTGIDPTHPSFADDLSTDSYPVPAHYSGICEVTNDFPSGSCNRKLVGARHFAASAITRGVFNASQDLASPSDSDGHGTHTASIAAGNHGIPVAVSGHQFGNASGMAPRAHIAVYKALYKSFGGFAADVVAAIDQAAEDNVDIISLSITPNRRPPGLATFFNPIDMALLSAVKAGIFVVQAAGNTGPSPKSMSSYSPWIFTVGASAHDRVYNNYIVLGNNLTIQGVGLAPGTDDDCMYTLVAAPHALKNNTVSPTELSFGECQDSSRLDADLIRGKILVCSYSIRFVLGLSSVKQALDTANNVSAAGVIFYLDPFVLGFQLNPTPMRMPGLIIPSSDDSKVFLAYYNDSLVRDETSGQVVSFGGVAKILGGLNPDYGNSAPKVMFYSARGPDPEDNTLSNADILKPNLVAPGNSIWGAWSSLGLDSAEFSGESFAMLSGTSMAAPHVAGLAALIKQKFPSFSPAAIASALSTTTTLSDRQGKPIMAQRTYSNPDSTQSPATAFDMGNGFVNATAALDPGLVFDCSYDDFFSFLCGINGSSPVVTNYTGNSCVASAMTGADLNLPSITIAVLNQTRSITRTVTNVAADESYTVSYSAPYGTAISVVPMHFLIPSGQKQLVTFVVNATMNSSSASFGNVGFYGDKGHRAIIPFSVISKAVYSS

SEQ ID NO: 194838 - protein, 702 aa, Zea Mays
MLDYSVRTATTHTPEFLGLPQGAWVQEGGPQFAGQGVVIGLIDTGIDPTHPSFADDLSTDSYPVPAHYSGICEVTNDFPSGSCNRKLVGARHFAASAITRGVFNASQDLASPSDSDGHGTHTASIAAGNHGIPVAVSGHQFGNASGMAPRAHIAVYKALYKSFGGFAADVVAAIDQAAEDNVDIISLSITPNRRPPGLATFFNPIDMALLSAVKAGIFVVQAAGNTGPSPKSMSSYSPWIFTVGASAHDRVYNNYIVLGNNLTIQGVGLAPGTDDDCMYTLVAAPHALKNNTVSPTELSFGECQDSSRLDADLIRGKILVCSYSIRFVLGLSSVKQALDTANNVSAAGVIFYLDPFVLGFQLNPTPMRMPGLIIPSSDDSKVFLAYYNDSLVRDETSGQVVSFGGVAKILGGLNPDYGNSAPKVMFYSARGPDPEDNTLSNADILKPNLVAPGNSIWGAWSSLGLDSAEFSGESFAMLSGTSMAAPHVAGLAALIKQKFPSFSPAAIASALSTTTTLSDRQGKPIMAQRTYSNPDSTQSPATAFDMGNGFVNATAALDPGLVFDCSYDDFFSFLCGINGSSPVVTNYTGNSCVASAMTGADLNLPSITIAVLNQTRSITRTVTNVAADESYTVSYSAPYGTAISVVPMHFLIPSGQKQLVTFVVNATMNSSSASFGNVGFYGDKGHRAIIPFSVISKAVYSS

SEQ ID NO: 194839 - protein, 312 aa, Zea Mays
MRVTRRDEHRAAAAAFLYAVTVLGVLAGSAGVRAFDDGTAVYIVTMKQAPVFHRRLNLEKFGSSRVANAAGRGGGGGGGGGGGGGGGGAGDTPTTSVLRKPRQGSPKPMNYGSYIVHLQNSLLKRTLRGERYIKLYSYRYLINGFAVVITPLQADKLSRRKEVANVMLDYSVRTATTHTPEFLGLPQGAWVQEGGPQFAGQGVVIGLIDTGIDPTHPSFADDLSTDSYPVPAHYSGICEVTNDFPSGSCNRKLVGARHFAASAITRGVFNASQDLASPSDSDGHGTSAIAAYASTPLDAFLVLIKTKCVEKE

SEQ ID NO: 194840 - protein, 244 aa, Zea Mays
MVLGDTCTRGCRFCAVKTSNKPPPPDPLEPLNTALAVASWGVDYVVLTSVDRDDLPDGGSSHFAQTVKALKELKPGILVECLTSDFRGDLEAISSLANSGLDVYAHNIETVRSLQRIVRDPRAGYDQSLAVLKHAKACREGMVTKSSIMLGLGETDEEVKQAMMDLRAIGVDILTLGQYLQPTERHLTVREYVTPEKFQFWKEYGESVGFRYVASGPLVRSSYRAGELFVQNLVRNNKTGSSSS

SEQ ID NO: 194841 - protein, 166 aa, Zea Mays
MQSSLARPLRPPVLAGRGGRRGLVAVARCHAEAAPPVGTASRAPAGPYTGRDPEVKKPAWLRQRAAQGEKYARLRESIGELKLNTVCVEAQCPNIGECWNGGGGAGGEGDGIATATIMVLGDTCTRGCRFCAVKTSNKPPPPDPLEPLNTALAVASWGLCRANQCR

SEQ ID NO: 194842 - protein, 156 aa, Zea Mays
MMDLSTTSVLAAKAYKYKAESLVKEYLLADSYVSYTAVLGGILMCKMAYDITSIISSLYYKGYGSLTKTQKLEWNNRGMSTIHAIFITVVSVYLVFFSNLFSDELDGLVTYRSSNLSNFTLGVSVGYFITDLAMILWAYPSLGGMESFTICCRLFL

SEQ ID NO: 194843 - protein, 112 aa, Zea Mays
MSSVPDADLASDSVAGKKETQGHSGVKHEPVFFSILKEYNLPRHRAQKGWTKEAWNNKTQRMNEKSVSANFIVSQLKDREQRLKKDHNAVHLILSKSGFGWDPNLKMATTVS

SEQ ID NO: 194844 - protein, 51 aa, Zea Mays
MNEKSVSANFIVSQLKDREQRLKKDHNAVHLILSKSGFGWDPNLKMATTVS

SEQ ID NO: 194845 - protein, 267 aa, Zea Mays
MANLNLKNSRGYTALHLAAMRREPAIIMCLLNKGANVSQLTADGRSAIGICRRLTRAKDYNTKMEQGQESNKDRLCIDILEREMMRNPMAVEDAVTSPLLADDLHMKLLYLENRVAFARLFFPAEAKVAMQIAQADTTEEFGGIVAVAASTSGKLREVDLNETPVTQNKRLRSRVDALMKTVELGRRYFPNCSQVLDKFLEDDLPEGLDQFYLQRGTADEQKVKRMRFCELKEDVLKAFSKDKAEGSVFSGLSSSSSCSPPQKYAQR

SEQ ID NO: 194846 - protein, 1176 aa, Zea Mays
MVHLSGVPVRPNPLRYPLAVSTSSRFSFGAPEQRTIKRATAAQARHRRPPVQPNRARRIEGASRPPSVLLDDDNEHEELMGRKGRKGKGAAAGGSAGMKEATLVRVSKALEDFRASNAEVYTFEPDISKQERAAIHEMCRKMGMISKSSGNGERRRLSVYKRKQKRGPELEQGPSYLGFSEEARHVLQDLFMHYPPGDADLSGDVDQSSSDKAANIKWRTDNAFCRPAMSKLDITKKVEMLASKINGSEQLRKVMEDRTKLPISSFKDVITSTLENHQVVLISGQTGCGKTTQVPQYILDHMWGKGESCKIICTQPRRISAISVAERISAERGEAVGDTVGYKIRLESKGGKNSSVLFCTNGVLLRLLIGRGTNASKARNQKRSLDDAVLGITHIIVDEIHERDRFSDFMLTILRDLLPLYPHLRMVLMSATIDAERFSQYFNGCSVIQVPGFTYPVKTFYLEDVLSILQSAGDNHLTSHKTEGSVLTHDFKSSMDDSINLALVNDEFDPLLELISAEQNTEVYNYQHSETGITPLMVFAMKGQLGDVCMLLSFGVDCSAQDHDGKSALDWAQQENQQEVCEVIKKHMECSSEKSTEDNELLNKYLASINPEHIDTLLIERLLRKICVDSNEGAILVFLPGWEDISQTRERLFASPFFQDSSRFLVLSLHSMIPSSEQKKVFKRPPVGVRKIILSTNIAETAVTIDDVVFVIDSGRMKEKSYDPYNNVSTLHASWVSKASARQREGRAGRCQPGTCYHLYSRFRASSLPDYQIPEIKRMPIEELCLQVKLLDSNCRIADFLKKTLDPPIPETVRNAIAVLQDLGALTQDEQLTELGEKLGSLPVHPSTTKMLLFAILMNCLDPALTLACAADYRDPFVLPVAPDERKRAAAAKVELASLYGGFSDQLAVVAAFDFWRHAKDRGQDSQFCAKYFVSSNIMNMLSSMRKQLQNELSQRGFVPADASACSLNSKDPGIMRAVLMAGAYPMVGKMLPPRKNARKSVLETASGAKVRLHPHSCNFNLSFSKSSGNPLLIYDEITRGDGGMYIKNSSVVGSYPLLLIAAEMVVAPPDDDSDEDEEDSSEDEAEESTLVQHKEEIMSSPDSIVSVVVDRWLRFDATALDVAQIYCLRERLASAILFKFYSESNMIWRILFLFGKKCKRSTMHQRIFRGMKVKV

SEQ ID NO: 194847 - protein, 1259 aa, Zea Mays
MVHLSGVPVRPNPLRYPLAVSTSSRFSFGAPEQRTIKRATAAQARHRRPPVQPNRARRIEGASRPPSVLLDDDNEHEELMGRKGRKGKGAAAGGSAGMKEATLVRVSKALEDFRASNAEVYTFEPDISKQERAAIHEMCRKMGMISKSSGNGERRRLSVYKRKQKRGPELEQGPSYLGFSEEARHVLQDLFMHYPPGDADLSGDVDQSSSDKAANIKWRTDNAFCRPAMSKLDITKKVEMLASKINGSEQLRKVMEDRTKLPISSFKDVITSTLENHQVVLISGQTGCGKTTQVPQYILDHMWGKGESCKIICTQPRRISAISVAERISAERGEAVGDTVGYKIRLESKGGKNSSVLFCTNGVLLRLLIGRGTNASKARNQKRSLDDAVLGITHIIVDEIHERDRFSDFMLTILRDLLPLYPHLRMVLMSATIDAERFSQYFNGCSVIQVPGFTYPVKTFYLEDVLSILQSAGDNHLTSHKTEGSVLTHDFKSSMDDSINLALVNDEFDPLLELISAEQNTEVYNYQHSETGITPLMVFAMKGQLGDVCMLLSFGVDCSAQDHDGKSALDWAQQENQQEVCEVIKKHMECSSEKSTEDNELLNKYLASINPEHIDTLLIERLLRKICVDSNEGAILVFLPGWEDISQTRERLFASPFFQDSSRFLVLSLHSMIPSSEQKKVFKRPPVGVRKIILSTNIAETAVTIDDVVFVIDSGRMKEKSYDPYNNVSTLHASWVSKASARQREGRAGRCQPGTCYHLYSRFRASSLPDYQIPEIKRMPIEELCLQVKLLDSNCRIADFLKKTLDPPIPETVRNAIAVLQDLGALTQDEQLTELGEKLGSLPVHPSTTKMLLFAILMNCLDPALTLACAADYRDPFVLPVAPDERKRAAAAKVELASLYGGFSDQLAVVAAFDFWRHAKDRGQDSQFCAKYFVSSNIMNMLSSMRKQLQNELSQRGFVPADASACSLNSKDPGKMLPPRKNARKSVLETASGAKVRLHPHSCNFNLSFSKSSGNPLLIYDEITRGDGGMYIKNSSVVGSYPLLLIAAEMVVAPPDDDSDEDEEDSSEDEAEESTLVQHKEEIMSSPDSIVSVVVDRWLRFDATALDVAQIYCLRERLASAILFKVKHPQDVLPPALGASMYAITCILSFDGLPSMVPPNDLSANRGSGQDLAEASKFSQGRRAGYIPPSGFLMSLLADRTHNAPSFQNSSNHPGGGSAHTRPSRAPVGRFDRSRRPFRNSGPGTSAPRSFKRQRDAPR

SEQ ID NO: 194848 - protein, 1216 aa, Zea Mays
MVHLSGVPVRPNPLRYPLAVSTSSRFSFGAPEQRTIKRATAAQARHRRPPVQPNRARRIEGASRPPSVLLDDDNEHEELMGRKGRKGKGAAAGGSAGMKEATLVRVSKALEDFRASNAEVYTFEPDISKQERAAIHEMCRKMGMISKSSGNGERRRLSVYKRKQKRGPELEQGPSYLGFSEEARHVLQDLFMHYPPGDADLSGDVDQSSSDKAANIKWRTDNAFCRPAMSKLDITKKVEMLASKINGSEQLRKVMEDRTKLPISSFKDVITSTLENHQVVLISGQTGCGKTTQVPQYILDHMWGKGESCKIICTQPRRISAISVAERISAERGEAVGDTVGYKIRLESKGGKNSSVLFCTNGVLLRLLIGRGTNASKARNQKRSLDDAVLGITHIIVDEIHERDRFSDFMLTILRDLLPLYPHLRMVLMSATIDAERFSQYFNGCSVIQVPGFTYPVKTFYLEDVLSILQSAGDNHLTSHKTEGSVLTHDFKSSMDDSINLALVNDEFDPLLELISAEQNTEVYNYQHSETGITPLMVFAMKGQLGDVCMLLSFGVDCSAQDHDGKSALDWAQQENQQEVCEVIKKHMECSSEKSTEDNELLNKYLASINPEHIDTLLIERLLRKICVDSNEGAILVFLPGWEDISQTRERLFASPFFQDSSRFLVLSLHSMIPSSEQKKVFKRPPVGVRKIILSTNIAETAVTIDDVVFVIDSGRMKEKSYDPYNNVSTLHASWVSKASARQREGRAGRCQPGTCYHLYSRFRASSLPDYQIPEIKRMPIEELCLQVKLLDSNCRIADFLKKTLDPPIPETVRNAIAVLQDLGALTQDEQLTELGEKLGSLPVHPSTTKMLLFAILMNCLDPALTLACAADYRDPFVLPVAPDERKRAAAAKVELASLYGGFSDQLAVVAAFDFWRHAKDRGQDSQFCAKYFVSSNIMNMLSSMRKQLQNELSQRGFVPADASACSLNSKDPGIMRAVLMAGAYPMVGKMLPPRKNARKSVLETASGAKVRLHPHSCNFNLSFSKSSGNPLLIYDEITRGDGGMYIKNSSVVGSYPLLLIAAEMVVAPPDDDSDEDEEDSSEDEAEESTLVQHKEEIMSSPDSIVSVVVDRWLRFDATALDVAQIYCLREPSKFSQGRRAGYIPPSGFLMSLLADRTHNAPSFQNSSNHPGGGSAHTRPSRAPVGRFDRSRRPFRNSGPGTSAPRSFKRQRDAPR

SEQ ID NO: 194849 - protein, 1095 aa, Zea Mays
MVHLSGVPVRPNPLRYPLAVSTSSRFSFGAPEQRTIKRATAAQARHRRPPVQPNRARRIEGASRPPSVLLDDDNEHEELMGRKGRKGKGAAAGGSAGMKEATLVRVSKALEDFRASNAEVYTFEPDISKQERAAIHEMCRKMGMISKSSGNGERRRLSVYKRKQKRGPELEQGPSYLGFSEEARHVLQDLFMHYPPGDADLSGDVDQSSSDKAANIKWRTDNAFCRPAMSKLDITKKVEMLASKINGSEQLRKVMEDRTKLPISSFKDVITSTLENHQVVLISGQTGCGKTTQVPQYILDHMWGKGESCKIICTQPRRISAISVAERISAERGEAVGDTVGYKIRLESKGGKNSSVLFCTNGVLLRLLIGRGTNASKARNQKRSLDDAVLGITHIIVDEIHERDRFSDFMLTILRDLLPLYPHLRMVLMSATIDAERFSQYFNGCSVIQVPGFTYPVKTFYLEDVLSILQSAGDNHLTSHKTEGSVLTHDFKSSMDDSINLALVNDEFDPLLELISAEQNTEVYNYQHSETGITPLMVFAMKGQLGDVCMLLSFGVDCSAQDHDGKSALDWAQQENQQEVCEVIKKHMECSSEKSTEDNELLNKYLASINPEHIDTLLIERLLRKICVDSNEGAILVFLPGWEDISQTRERLFASPFFQDSSRFLVLSLHSMIPSSEQKKVFKRPPVGVRKIILSTNIAETAVTIDDVVFVIDSGRMKEKSYDPYNNVSTLHASWVSKASARQREGRAGRCQPGTCYHLYSRFRASSLPDYQIPEIKRMPIEELCLQVKLLDSNCRIADFLKKTLDPPIPETVRNAIAVLQDLGALTQDEQLTELGEKLGSLPVHPSTTKMLLFAILMNCLDPALTLACAADYRDPFVLPVAPDERKRAAAAKVELASLYGGFSDQLAVVAAFDFWRHAKDRGQDSQFCAKYFVSSNIMNMLSSMRKQLQNELSQRGFVPADASACSLNSKDPGIMRAVLMAGAYPMVGKMLPPRKNARKSVLETASGAKVRLHPHSCNFNLSFSKSSGNPLLIYDEITRVMKMRKILVRMKLRKAHWYSTKKRLCLHLTALFQLLLIGGSGLTLRLWMLLKYTA

SEQ ID NO: 194850 - protein, 557 aa, Zea Mays
MSATIDAERFSQYFNGCSVIQVPGFTYPVKTFYLEDVLSILQSAGDNHLTSHKTEGSVLTHDFKSSMDDSINLALVNDEFDPLLELISAEQNTEVYNYQHSETGITPLMVFAMKGQLGDVCMLLSFGVDCSAQDHDGKSALDWAQQENQQEVCEVIKKHMECSSEKSTEDNELLNKYLASINPEHIDTLLIERLLRKICVDSNEGAILVFLPGWEDISQTRERLFASPFFQDSSRFLVLSLHSMIPSSEQKKVFKRPPVGVRKIILSTNIAETAVTIDDVVFVIDSGRMKEKSYDPYNNVSTLHASWVSKASARQREGRAGRCQPGTCYHLYSRFRASSLPDYQIPEIKRMPIEELCLQVKLLDSNCRIADFLKKTLDPPIPETVRNAIAVLQDLGALTQDEQLTELGEKLGSLPVHPSTTKMLLFAILMNCLDPALTLACAADYRDPFVLPVAPDERKRAAAAKVELASLYGGFSDQLAVVAAFDFWRHAKDRGQDSQFCAKYFVSSNIMNMLSSMRKQLQNELSQRGFVPADASACSLNSKDPGTQVSMKMDFFL

SEQ ID NO: 194851 - protein, 794 aa, Zea Mays
MHYPPGDADLSGDVDQSSSDKAANIKWRTDNAFCRPAMSKLDITKKVEMLASKINGSEQLRKVMEDRTKLPISSFKDVITSTLENHQVVLISGQTGCGKTTQVPQYILDHMWGKGESCKIICTQPRRISAISVAERISAERGEAVGDTVGYKIRLESKGGKNSSVLFCTNGVLLRLLIGRGTNASKARNQKRSLDDAVLGITHIIVDEIHERDRFSDFMLTILRDLLPLYPHLRMVLMSATIDAERFSQYFNGCSVIQVPGFTYPVKTFYLEDVLSILQSAGDNHLTSHKTEGSVLTHDFKSSMDDSINLALVNDEFDPLLELISAEQNTEVYNYQHSETGITPLMVFAMKGQLGDVCMLLSFGVDCSAQDHDGKSALDWAQQENQQEVCEVIKKHMECSSEKSTEDNELLNKYLASINPEHIDTLLIERLLRKICVDSNEGAILVFLPGWEDISQTRERLFASPFFQDSSRFLVLSLHSMIPSSEQKKVFKRPPVGVRKIILSTNIAETAVTIDDVVFVIDSGRMKEKSYDPYNNVSTLHASWVSKASARQREGRAGRCQPGTCYHLYSRFRASSLPDYQIPEIKRMPIEELCLQVKLLDSNCRIADFLKKTLDPPIPETVRNAIAVLQDLGALTQDEQLTELGEKLGSLPVHPSTTKMLLFAILMNCLDPALTLACAADYRDPFVLPVAPDERKRAAAAKVELASLYGGFSDQLAVVAAFDFWRHAKDRGQDSQFCAKYFVSSNIMNMLSSMRKQLQNELSQRGFVPADASACSLNSKDPGTQVSMKMDFFL

SEQ ID NO: 194852 - protein, 355 aa, Zea Mays
MSWFARSIAATLSSAHSDDDESEPASGDNSPPRASDPTSAETGETEEEEEETAAAAEVPQSPRIDGIRSDLAEIGGRVKTGISMLSNAGAVAEISRFASSFLPFGPGDQGEEEEGEAVGVTEEVVVFVGNISKHPKTWLDFPLFVDDRHADDEQYGHAVAIERLVPSLSYLRTELCSTNMSEACFWKIYFVLLHSKLSKQDAEILSTPQILEAREGLLQSSPTKHKLLSESRNTTEPEESELSPASIQNKHGVSEAPSFQELTSDPVPNVEADKHPISSTEAEIVDKSVIQEELVMKTEAKSLPTEESNPDPADDDDEKEVDDWLQDVDSVPSKTGNNTAVGEEEDVSFSDLEDD

SEQ ID NO: 194853 - protein, 176 aa, Zea Mays
MSEACFWKIYFVLLHSKLSKQDAEILSTPQILEAREGLLQSSPTKHKLLSESRNTTEPEESELSPASIQNKHGVSEAPSFQELTSDPVPNVEADKHPISSTEAEIVDKSVIQEELVMKTEAKSLPTEESNPDPADDDDEKEVDDWLQDVDSVPSKTGNNTAVGEEEDVSFSDLEDD

SEQ ID NO: 194854 - protein, 634 aa, Zea Mays
MEGAASAPVQQPKLALSPPTPASRGAGPYDPKTNYTTPRPAFLRYDPERRREILLRVSRAAEVMDDDCSSTTSGTAASEEDGGSSLASDAAAGSLISSPPRSDSEAELDDSEEEEEVVPARRGRWARRLLLLLVCVSCSFCYMYCAKPSGFPTYSEDALDLDRGIGGMYDAYDHELDSLRLLGPVHMMGPEDVLEEITNQLVHEDSKSVDHLYGNRAPRNLVAVAMVGLADICLNVSSGEFTCQIGGEKGENVPDLKEDSEMDKLDTELTISFQNDKQSSEVDCLGGNAPLDSIGSTSTHTDNLEGSLESFHLEEWDDYSNQSELQLVSMERAIKSASYKLKDRTGLESEELDLWQYENTAEAAKTICSTVKFLWSAMEPHLLQVLACLSFAGLVAALYRYYQRSRECCNCIITYDSLAEQPLLVQHQVAQLSVTSVRDAQLPVHSSEQPIQLAIPNQGTAGSLEVPMELTLPKLDPLVSLEDPAQESLPMTDPLVTVKIPVIGRGIHDQKLKRGDSENIKASNGMFLNHSDVDSSKPPVVELLGEFVLASSSRERSTKKLYQNAGDATDKKLLKPLKKDEDVEKMQMHSSIIQSPSVGRAKKEQEKSINREKTDATPTPLRRSSRLRNKVTSP

SEQ ID NO: 194855 - protein, 102 aa, Zea Mays
MVPRGRGGIRVSSGLGAAGRRARRGRGGRGEEHREGSLRERDRGGEGEHGRRAQRVELLDGEEVVVVVRARRGRGGRRVQRRRGRAHGWQRDASPRRRANAA

SEQ ID NO: 194856 - protein, 68 aa, Zea Mays
MLLQIFLYPKGLVYIYFVIPVPAALMGAGLIGADLVRLKRHGDVSGSAPLGGALAAALVWARIRKGWI

SEQ ID NO: 194857 - protein, 137 aa, Zea Mays
MCKIKRQTASITNVFGPAFLLKLYVGGALTGSVFFLLEKAFLAYRKQDYVGWDTSRAAELGASAAVNATMLLQIFLYPKGLVYIYFVIPVPAALMGAGLIGADLVRLKRHGDVSGSAPLGGALAAALVWARIRKGWI

SEQ ID NO: 194858 - protein, 324 aa, Zea Mays
MRRKLLQFPSLVAQHALRGAPTPRFQPQPHHHRFLHSPSAPTSASPSSSPSAHLIWNRLSGSTGISPLPRTAADVAAAARTAASRWLATARGARSLDLFSLPRWRRASGRQFSPSPFLQGATWASWMESADGAVWMLIGANVAVFLLWRVADPGFMRKHFMISLDNFKSGRLHTLLTSAFSHAEFNHLFANMFGLFFFGSSITNVFGPAFLLKLYVGGALTGSVFFLLEKAFLAYRKQDYVGWDTSRAAELVCGFLFQQHILKIAAICTTAFANCTILLQPAHQMVHITWELVTFESTGLDNQITWLFCCCLNGLYVNHFTVLI

SEQ ID NO: 194859 - protein, 248 aa, Zea Mays
MRRKLLQFPSLVAQHALRGAPTPRFQPQPHHHRFLHSPSAPTSASPSSSPSAHLIWNRLSGSTGISPLPRTAADVAAAARTAASRWLATARGARSLDLFSLPRWRRASGRQFSPSPFLQGATWASWMESADGAVWMLIGANVAVFLLWRVADPGFMRKHFMISLDNFKSGRLHTLLTSAFSHAEFNHLFANMFGLFFFGSNYECVWSCLSIEVVCWWSTYWISILLAGEGFSSLSETGLCRMGYFKSC

SEQ ID NO: 194860 - protein, 213 aa, Zea Mays
MRRKLLQFPSLVAQHALRGAPTPRFQPQPHHHRFLHSPSAPTSASPSSSPSAHLIWNRLSGSTGISPLPRTAADVAAAARTAASRWLATARGARSLDLFSLPRWRRASGRQFSPSPFLQGATWASWMESADGAVWMLIGANVAVFLLWRVADPGFMRKHFMISLDNFKSGRLHTLLTSAFSHAEFNHLFANMFGLFFFGSSPRNSRVDTFEHL

SEQ ID NO: 194861 - protein, 200 aa, Zea Mays
MAMARLEEEFVYLLTHYKQEVLSFRSTEDGSVEDFSSRSSSFNEEQLEGKATPNNISGGPEYFVPDLIQPGALSAVKFIAKFMFLYGYDKECCQAYINSRQSATDEYFGSLGLENLSIEELMNTSWNRMNSLIKRWNWAIMVFLRVYLVSEKRFSKHVFGELSVSTADLCFSEISFNSVIQLLSFYVSVAIGPPKTEKAF

SEQ ID NO: 194862 - protein, 239 aa, Zea Mays
MFSIITFEEFISIALDADRTVGIYPEIKDPVFINKHVKWADGKKFEDKFVDTLLKYGYKGQYMSENWLKQPLFIQSFAPTSIVHVSDFIDSPKVFLIDDISVRTQDTNQSYWEITSDDYLAYISKYVVGLGPWKDTIVPASGNYLMPPSDLVARAHAHNLQVHPYTYRNENQFLHFNFFQDPYNEYDFWINTVGVDGLFTDFTGTLHRYQELTSPHRKDETANSLLVKISQMISAYEGL

SEQ ID NO: 194863 - protein, 327 aa, Zea Mays
MRAIEEGADFIESDILASKDGALICFHDVTLDDTTDVAKRKEFANRRRTYEVEWFNVTGWFVVDFTLEELKTLRVKQRYSFRDQQYNGMFSIITFEEFISIALDADRTVGIYPEIKDPVFINKHVKWADGKKFEDKFVDTLLKYGYKGQYMSENWLKQPLFIQSFAPTSIVHVSDFIDSPKVFLIDDISVRTQDTNQSYWEITSDDYLAYISKYVVGLGPWKDTIVPASGNYLMPPSDLVARAHAHNLQVHPYTYRNENQFLHFNFFQDPYNEYDFWINTVGVDGLFTDFTGTLHRYQELTSPHRKDETANSLLVKISQMISAYEGL

SEQ ID NO: 194864 - protein, 84 aa, Zea Mays
MLSLFSTAEDIFALAGIGFAAVAALWASVNLIEIIDKLPVLPLLFELVGILVAWLFIYNNLLFKPKRKEFLENIKSSGSRILGQ

SEQ ID NO: 194865 - protein, 267 aa, Zea Mays
MTPNTPAELSQHADAPEQNQLGTDMAVDITRAEIEDAQVEETTDISTNGENDDPLSRFLPPPVTTKCSAALKQKINKFLAYKRAGKSFNAEVRNRKDYRNPDFLQHAVRYQEIDQIGTCFSKDVFDPYGYDKGDYYDEIEAEMKRELERKEQEKKRNPKVEFITGGVQTPHSASIPKIPGLAGVCTLPVPTEGVQKETRPNKKSKWDKVDDDVKNHVVPSGHDNLSATASVALLTSANVGAGYAAFAQQKRKEAEEKRSDHKSDRRS

SEQ ID NO: 194866 - protein, 288 aa, Zea Mays
MASDTEGIAALFSMYNDDEEDEDADEPNPPSPAPLTTVTSSSPLSPQAGGEDPNPSLAPPSPPRPEESASLKTLVSPHPSPARALLPPLPSRRSSSPFAASPPSPLRGPSSAPPADLPRPPRRGALAIVDYAHDEMAMSPEQEDGEIMSHTYRFVSDAQAAEGNLEERTLSGTVHIMTPNTPAELSQHADAPEQNQLGTDMAVDITRAEIEDAQVEETTDISTNGENDDPLSRFLPPPVTTKCSAALKVILLSNDYDTCFFTINNLVMFPYRISAYGGTSSTLPYYCH

SEQ ID NO: 194867 - protein, 72 aa, Zea Mays
MFFHRLEIMGSETIKGLAKGSMTTEWVIWAVILIALLLWSHTHLIENGLVTGRTTDVLAVANTVAELLQNHC

SEQ ID NO: 194868 - protein, 64 aa, Zea Mays
MASPFSLSFPRQRWFQGGRDLMHKGTQQQFKIWMLLNQFRKLLMLMIAKFWKHLQALCFCWNLL

SEQ ID NO: 194869 - protein, 95 aa, Zea Mays
MASPFSLSFPRQRWFQGGRDLMHKGTQQVFSCTSSMVLFLANTTSVDESGKQHFLDASVAYKRVVLNDIEYLARFGYSKEQDLWNSRLSLCSVNS

SEQ ID NO: 194870 - protein, 54 aa, Zea Mays
METLKASQEFAATVANQPIEVKASQEFAATVANQPIEVEDFKKLLIENNTRSKI

SEQ ID NO: 194871 - protein, 136 aa, Zea Mays
MVVVLANPPVVDQIPLLRSPGPRDSFSCVPVVDLSGPGAARAIVDACERFGFFKVVNHGVPAATMDVAESEAVGFFAQAQADKDRAGPRASYPFGYGSKRIGLNGDMGWLEYLLLAVDSASLSDACPVPSGAAFRC

SEQ ID NO: 194872 - protein, 316 aa, Zea Mays
MILIVPQGDHAVRLGNDASVGQVVDVEKGSDYAVTFSAARTCAQLEALNVSVLGGVSQTVDLQTLYNIEGWDAYALAFQATEEQAHLQFMNPGMEDDPTCGPILDNVAVKKLFTPDKPKDNVVLNGDFEEGPWMFPNTSFGVLLPTNLDEQTSAIPGWMIESNRAVRYIDSDQYKVPQGKRAIELLSGKEGIISQMVETTPEKVYSLTAMLGAAGDSCQPPMAIMAFAGDQAQNFHYSPLGNATSQAVNVTFTARAERTRVAFYSVYYNTRSDDHSSLCGPVIDDVRVWGLNTAAGLKASAGLVLGIVGVVGMVLF

SEQ ID NO: 194873 - protein, 280 aa, Zea Mays
MAQQLPPRIPTEVHHWPEGGQHGAAAAWADDFAEFAAARRGAHRRSLSDSVAFVEVAPADGGAGEFDRLDDDQLLSMFPPDEAGGGGSSAAGSENGGSSDSDGDKRGARGGPAGGAPSTGSGGGEQNGVVDAQAPAATGGQAAVVASTELIRDPKRVKRILANRQSAQRSRVRKLQYISELERSVTTLQNEVSVLSPRVAFLDQQRTILSVGNSHLKQRIAALAQDKIFKDAHQEELKKEIQRLRRVYDQQNLRMSAGGAAASDHGPPPPVVRAEKELMS

SEQ ID NO: 194874 - protein, 171 aa, Zea Mays
MSTTTTKASDPGSAWFGSGARTRSAAGISHNARLVTTAVAAFVSVLGLALFLHLYVCHVRRRNRRRAAAVLPTTTAAAAAAAAPKRGLDPAAVAALPTVLYRDAGGADDGAECTICLGAVQEGELVRALPACGHVFHVPCVDTWRRRWCRTPSRRRPAAPRRRGGSVPARR

SEQ ID NO: 194875 - protein, 470 aa, Zea Mays
MGDCVVEDGHGHHYSEAVEGAVSLTVAVELDERAEESREEEEGGGQRKKMGGIPREPSFSRWCRDPSAASASNTAAAAATSDSDASEEFELPLLPSSSGGGGSPMDIEVGATARSDDLPISPRLLAKVIGLIACWYTLSTCLTLYNKEMLGKHMWKFPAPFLMNTVHFTMQAVASRAIVWFQQRGLEGGPSKMSWKDYCLRVVPTALATALDINLSNISLVFITVTFATMCKSASPIFILLFAFMFRLEKPSFSLLGIMLVVSFGVLLTVAKETEFNLWGFMFIMLAAVMAGFRWSMTQILLQKEEYALKNPFTLMSHVAPVMAIVTAIISIVMDPWHDFRASHFFDSSTHIIRSSVLLLLGGALAFFMVLTEYVLVSVTSAVTVTVAGIVKEAVTILVAVLFFNDPFTWLKALGLAIIIFGVSLFNIYKYKRFKKGHHSEDAGTNIQSYNGTSKYVILDDDTEDQDDSG

SEQ ID NO: 194876 - protein, 467 aa, Zea Mays
MGDCVVEDGHGHHYSEAVEGAVSLTVAVELDERAEESREEEEGGGQRKKMGGIPREPSFSRWCRDPSAASASNTAAAAATSDSDASEEFELPLLPSSSGGGGSPMDIEVGATARSDDLPISPRLLAKVIGLIACWYTLSTCLTLYNKEMLGKHMWKFPAPFLMNTVHFTMQAVASRAIVWFQQRGLEGGPSKMSWKDYCLRVVPTALATALDINLSNISLVFITVTFATMCKSASPIFILLFAFMFRLEKPSFSLLGIMLVVSFGVLLTVAKETEFNLWGFMFIMLAAVMAGFRWSMTQILLQKEEYALKNPFTLMSHVAPVMAIVTAIISIVMDPWHDFRASHFFDSSTHIIRSSVLLLLGGALAFFMVLTEYVLVSVTSAVTVTVAGIVKEAVTILVAVLFFNDPFTWLKALGLAIIIFGVSLFNIYKFKKGHHSEDAGTNIQSYNGTSKYVILDDDTEDQDDSG

SEQ ID NO: 194877 - protein, 279 aa, Zea Mays
MQELEDKLIFLEDRQKNLMAYVRDIVQAPGSFSSFVQQPDHHGKKRRLPVPISLYQDSNAEGNQVVHGGFITNPPACRESFDKTESSLNSLENFLREASEAFNISYGDGLPGPSSAVVITELHSSGESDPHVPSPVSRMHTSSAGAGDSLSSRDLTESTSCAESPRLAQIQPCTDSRTKVSEIDVNREPAVTETGPTRDQPAEEPPHVAAGVNDGFWQQFLTEQPGPDVHQEAQSERRDGDDDKGDQTRIGDRENFWWGKKNVEQMREKLGRLTSVEKT

SEQ ID NO: 194878 - protein, 358 aa, Zea Mays
MFGIHQHWQELEFKNYAREIGRERFADVENKSNASSINYSEKDMTVIFRRRGGCDLVQSFSDWRGTVASAPDVIGITFLSIVSLVDDIPGKKHLARAVELYLTYKPPIEELQYFLDFRVPLVWAPAPPGIAGHHRKEPVCPSLQFSLMGPKLFISTEQISVGRRPVVGLKLILEGAKQNRLAIHLQHLGSLPKIFLPHWDSYITIGPPKWQGPEEQDSRWFEPIKWKNFAHVSTAPIEYTETNITDLSGVYIVTGAQLGVWDFGAKSVLHLKLLFSRVPGCTIRRSVWDHSPSSSSVHRTDESSSSSSDNAKLLKIVDLTETFKGPQDAPGHWLITGAKLGVEKGRIVVRAKYSLLNY

SEQ ID NO: 194879 - protein, 534 aa, Zea Mays
MSLAGSALEAALLAVGRGLDAAGDHRLLYCKGDGRLVALEDRARDLPLPDGGVLPSVPHDVEVEQCRRDLERIRPFPSGSGPSSAAADGPFVCSFDKMAEYFNRKSCLSETVPLGSFNSLFSFTGSWKNDAATTKALAIDGYSLPLFRVKIRNSELTLLESVKRRIPNVWDPSALARSHSLSQLSELEFKNYAREIGRERFADVENKSNASSINYSEKDMTVIFRRRGGCDLVQSFSDWRGTVASAPDVIGITFLSIVSLVDDIPGKKHLARAVELYLTYKPPIEELQYFLDFRVPLVWAPAPPGIAGHHRKEPVCPSLQFSLMGPKLFISTEQISVGRRPVVGLKLILEGAKQNRLAIHLQHLGSLPKIFLPHWDSYITIGPPKWQGPEEQDSRWFEPIKWKNFAHVSTAPIEYTETNITDLSGVYIVTGAQLGVWDFGAKSVLHLKLLFSRVPGCTIRRSVWDHSPSSSSVHRTDESSSSSSDNAKLLKIVDLTETFKGPQDAPGHWLITGAKLGVEKGRIVVRAKYSLLNY

SEQ ID NO: 194880 - protein, 390 aa, Zea Mays
MQRQQQHPSFIENYGTHIIISVTVGGKDEVYIKQHSLSQLSELEFKNYAREIGRERFADVENKSNASSINYSEKDMTVIFRRRGGCDLVQSFSDWRGTVASAPDVIGITFLSIVSLVDDIPGKKHLARAVELYLTYKPPIEELQYFLDFRVPLVWAPAPPGIAGHHRKEPVCPSLQFSLMGPKLFISTEQISVGRRPVVGLKLILEGAKQNRLAIHLQHLGSLPKIFLPHWDSYITIGPPKWQGPEEQDSRWFEPIKWKNFAHVSTAPIEYTETNITDLSGVYIVTGAQLGVWDFGAKSVLHLKLLFSRVPGCTIRRSVWDHSPSSSSVHRTDESSSSSSDNAKLLKIVDLTETFKGPQDAPGHWLITGAKLGVEKGRIVVRAKYSLLNY

SEQ ID NO: 194881 - protein, 552 aa, Zea Mays
MPASLAPYATRLSSVGATVSAAAAGTLRCFPILPKVPAIAEIHRDPSPLDDQILRSTAAAPRRRQAACGLCGGMVVPQLLREYATPATASKMAEYFNRKSCLSETVPLGSFNSLFSFTGSWKNDAATTKALAIDGYSLPLFRVKIRNSELTLLESVKRRIPNVWDPSALASFIENYGTHIIISVTVGGKDEVYIKQHSLSQLSELEFKNYAREIGRERFADVENKSNASSINYSEKDMTVIFRRRGGCDLVQSFSDWRGTVASAPDVIGITFLSIVSLVDDIPGKKHLARAVELYLTYKPPIEELQYFLDFRVPLVWAPAPPGIAGHHRKEPVCPSLQFSLMGPKLFISTEQISVGRRPVVGLKLILEGAKQNRLAIHLQHLGSLPKIFLPHWDSYITIGPPKWQGPEEQDSRWFEPIKWKNFAHVSTAPIEYTETNITDLSGVYIVTGAQLGVWDFGAKSVLHLKLLFSRVPGCTIRRSVWDHSPSSSSVHRTDESSSSSSDNAKLLKIVDLTETFKGPQDAPGHWLITGAKLGVEKGRIVVRAKYSLLNY

SEQ ID NO: 194882 - protein, 95 aa, Zea Mays
MLPACSTSVGALQSSHARRWRAFASVRLSQPRAGRWQRGCTVAALRLSAAGACLPASLGFVIGDCGCLSEGETERREQQGAGEICYRRLEMRWRR

SEQ ID NO: 194883 - protein, 122 aa, Zea Mays
MKYLYILSEYALSAGHMLAPYTSPVNPFFIFSIKCLEHSLCSAQGNTCWTAASRPLQASVHTAKCGTNPMAFPSWSINQTQLSLVSESRTQRPMETSNCVHLSLRQLACDHSKGHSELWTLH

SEQ ID NO: 194884 - protein, 62 aa, Zea Mays
MAFIAVSIACGIRLSPPRSEERGAGRLRNVEVLDQQLLFSTWRLRHPPPRASTSGLGSSTLN

SEQ ID NO: 194885 - protein, 240 aa, Zea Mays
MDRRPAPKSRRSALNAAIGTISGGWHPSSQDNRRSPTNDSHATHAQPEALSAAASVQNPLDNSIDASWMLPDYKYILILCSILPSQDNYYRNLMNQDDTDNLGLEDCVQVDPLVANMNSQTKPKGRSKNFTDDEDILLLSVYLNVSKDPTAGRDQKDSRFWERIEKYYHVNLTFESDRNCSSLRHRWGIIQKEVSLFQSYYEAIQRKNESGKTMNDKTRAKVVINKGLHNGYQEAGSSQR

SEQ ID NO: 194886 - protein, 233 aa, Zea Mays
MDRRPAPKSRRSALNAAIGTISGGWHPSSQDNRRSPTNDSHATHAQPEALSAAASVQNPLDNSIDASWMLPDYNILPSQDNYYRNLMNQDDTDNLGLEDCVQVDPLVANMNSQTKPKGRSKNFTDDEDILLLSVYLNVSKDPTAGRDQKDSRFWERIEKYYHVNLTFESDRNCSSLRHRWGIIQKEVSLFQSYYEAIQRKNESGKTMNDKTRAKVVINKGLHNGYQEAGSSQR

SEQ ID NO: 194887 - protein, 125 aa, Zea Mays
MEIDQLLKNKAKSPGSSIDRNDSRQQIRRLSGTGSSEAECEDNMSDDGCSVAGTEYSVGGASEATAERMQKAPSRIARLFHTKNGQPANSKPKPRESALKPPGRTTSTGGSQATGGSLVKPPKRR

SEQ ID NO: 194888 - protein, 971 aa, Zea Mays
MGKVEDEYESHAANRRGEVIDWLAELLPEFDLPLDSSDEELREYLIDGTALCYIAEKLMPGIQEEMWGGNAWDQRSNVKKFLYFVAEMGLPGFSVKDLEEGSVSSVVECLLALKDNVTTGLGQNVTNNAAKTPLRRKLELESDGPIISVMTPGRRPGEERWKGHWDPKSQQRSILHSACSPYFAGQKVHDAFQLKRGSYTDLPAAKVSEMMHPRSLDNAPTQSLLRVVNGILDESIERKRGEIPHRAVYLLRNVVQEIEHRIAIQADHIRNQNSIIKTREDKYRSKIKALETLVNGTNEENEMTVDRLELVEVEKSKLDEKRKLGEQDMVRLMQEKENAENTIASLQQEIQVLSRMHEQYHERKETEARQMEEHLAMRLKEAEFLLMQSEKKVEEIESVSQLKSQLWTRKANIFQSFMDNQKLSIKDIRISSQSIKQEMFALQMKWIDEISSIGRELKGLVDAADNYHKVLAENQKLFNEVQELKGNIRVYCRVRPFLPGQDGKTTIIDYIGENGEILITNPFKQGKDVCRMFKFNKVFNTHASQAEVFSDIQPLIRSVLDGFNVCIFAYGQTGSGKTYTMSGPGTSKEDWGVNYRALNDLFDISLSRRNAFSYEVGVQMVEIYNEQVRDLLSNDIAQKRLGIWSTSQPNGLVVPDASLHPVKSTLDVLQLMEIGQTNRAVGSTALNERSSRSHSILTVHVRGVDLKNGSTSRGCLHLIDLAGSERVERSEAIGDRLKEAQYINKSLSALGDVIFSLAQKNAHVPYRNSKLTQVLQSSLGGQAKTLMFVQINPDTGSYSETISTLKFAERVSGVELGAARSNKEGKDIKELLEQVSSLKDTISRKDMEIDQLLKNKAKSPGSSIDRNDSRQQIRRLSGTGSSEAECEDNMSDDGCSVAGTEYSVGGASEATAERMQKAPSRIARLFHTKNGQPANSKPKPRESALKPPGRTTSTGGSQATGGSLVKPPKRR

SEQ ID NO: 194889 - protein, 937 aa, Zea Mays
MGKVEDEYESHAANRRGEVIDWLAELLPEFDLPLDSSDEELREYLIDGTALCYIAEKLMPGIQEEMWGGNAWDQRSNVKKFLYFVAEMGLPGFSVKDLEEGSVSSVVECLLALKDNVTTGLVMTPGRRPGEERWKGHWDPKSQQRSILHSGQKVHDAFQLKRGSYTDLPAAKVSEMMHPRSLDNAPTQSLLRVVNGILDESIERKRGEIPHRAVYLLRNVVQEIEHRIAIQADHIRNQNSIIKTREDKYRSKIKALETLVNGTNEENEMTVDRLELVEVEKSKLDEKRKLGEQDMVRLMQEKENAENTIASLQQEIQVLSRMHEQYHERKETEARQMEEHLAMRLKEAEFLLMQSEKKVEEIESVSQLKSQLWTRKANIFQSFMDNQKLSIKDIRISSQSIKQEMFALQMKWIDEISSIGRELKGLVDAADNYHKVLAENQKLFNEVQELKGNIRVYCRVRPFLPGQDGKTTIIDYIGENGEILITNPFKQGKDVCRMFKFNKVFNTHASQAEVFSDIQPLIRSVLDGFNVCIFAYGQTGSGKTYTMSGPGTSKEDWGVNYRALNDLFDISLSRRNAFSYEVGVQMVEIYNEQVRDLLSNDIAQKRLGIWSTSQPNGLVVPDASLHPVKSTLDVLQLMEIGQTNRAVGSTALNERSSRSHSILTVHVRGVDLKNGSTSRGCLHLIDLAGSERVERSEAIGDRLKEAQYINKSLSALGDVIFSLAQKNAHVPYRNSKLTQVLQSSLGGQAKTLMFVQINPDTGSYSETISTLKFAERVSGVELGAARSNKEGKDIKELLEQVSSLKDTISRKDMEIDQLLKNKAKSPGSSIDRNDSRQQIRRLSGTGSSEAECEDNMSDDGCSVAGTEYSVGGASEATAERMQKAPSRIARLFHTKNGQPANSKPKPRESALKPPGRTTSTGGSQATGGSLVKPPKRR

SEQ ID NO: 194890 - protein, 627 aa, Zea Mays
MASVSVVLLQRSSSRVRGYIRLQRIASSSVTLVLEGEGHWWWSNSRGRDERFGARTVHHMAGSVEGENGGVPVGGQVAMAPGVVTGGVEDAYGEDRATEDQTVTPWAVCIASGHSLLRDPRHNKGLSFTEKERDTHYLRGLLPPVVLSQDLQEKRMLQNVRQFQVPLQRYTALMDLQERNERLFYKLLIDNVEELLPVVYTPTVGEACQKYGSIFRRPQGLYISLKEKGRILEVLRNWTEKSIQVIVVTDGERILGLGDLGCQGMGIPVGKLALYTALGGVRPSACLPITIDVGTNNEDLLKDEFYIGLKQRRATGQEYSEFLDEFMAAVRQNYGQKVLVQFEDFANHNAFTLLEKYRTNHLVFNDDIQGTAAVVLAGIIAALKSVGGTLADHTFLFFGAGEAGTGIAELVALEISRQANVSVEEARKKIWLVDSKGLIVASREETLQPFKKRYAHEHEPVKDLLGAVKAIRPTALIGSAGVGQSFTKEVIEVMSSINERPIVLALSNPTSQSECTAEQAYTWSQANNAYIFPGFGLGVVISGAVRVSDDMVLAAAEALAEQVTPEHIEKGLIYPPFSIIRKISANIAAHVAAKAYDLGMATQLPRPKDLVKYAESCMYSPVYRSYR

SEQ ID NO: 194891 - protein, 552 aa, Zea Mays
MASVSVVLLQRSSSRVRGYIRLQRIASSSVTLVLEGEGHWWWSNSRGRDERFGARTVHHMAGSVEGENGGVPVGGQVAMAPGVVTGGVEDAYGEDRATEDQTVTPWAVCIASGHSLLRDPRHNKGLSFTEKERDTHYLRGLLPPVVLSQDLQEKRMLQNVRQFQVPLQRYTALMDLQERNERLFYKLLIDNVEELLPVVYTPTVGEACQKYGSIFRRPQGLYISLKEKGRILEVLRNWTEKSIQVIVVTDGERILGLGDLGCQGMGIPVGKLALYTALGGVRPSACLPITIDVGTNNEDLLKDEFYIGLKQRRATGQEYSEFLDEFMAAVRQNYGQKVLVQFEDFANHNAFTLLEKYRTNHLVFNDDIQGTAAVVLAGIIAALKSVGGTLADHTFLFFGAGEAGTGIAELVALEISRQANVSVEEARKKIWLVDSKGLIVASREETLQPFKKRYAHEHEPVKDLLGAVKAIRPTALIGSAGVGQSFTKEVIEVMSSINERPIVLALSNPTSQSECTAEQAYTWSQGRAIFGSGSPFDPVKYNDKLFVPAQGW

SEQ ID NO: 194892 - protein, 244 aa, Zea Mays
MRVLLTNVCIKIGRLGGGSSDYSAFVQHIGIPSVDMAIGSDYPVYHSLYDDFIWMEKFGDPLFQRHVAAASMWGLVALRLSDEEILPFNYSNYATELENGALGISERVQGMPVSLSPLHKSIKEFRKAVAKVDSELKALQTWKIWSPWRNNPLKVRDINDRLMMTERAFTDREGLSGRPWYKHLIYAPSLHNDYGAEVYPGIGDAIERVKKTNTSESLQSIQHEIYRVSRVINQAALVLSGGLT

SEQ ID NO: 194893 - protein, 416 aa, Zea Mays
MPPPQDGVDDSAARVPLLPPPAPRRAAVRLHPLPLLIAATLAASYRLLFLAPAPSYYQSLLLSLGSNDTAAAHLHALTIRPHLAGTGANALAAAHVAATLSSHSFRTRLTSYSVLLSYPAYRSLSLSAPDRDTVLFALKQETYAGDPYEAVSAEAVPTFLAYAASGSVSAEAVYANYGRAEDFAYLAARGIDVTGKVAVARYGEVFRGDIVRNARDAGAAAAVIYSDAKDYAAGKTFPDGPWMPPTGVQVGSTFKGVGDPTTPMWASSEGCERLTIAEAMSSDDMPGIPALPVSWKDGETILQLIGGDVAPENWQGGDGAAAYRFGPGPAVLNLTYTGNETMVTIQNVISVIEGGEEPERYVILGNHRDAWTFGAVDPNSGTASLLELNGCLSCKRRAGDLDGPSSCATGMPKSMD

SEQ ID NO: 194894 - protein, 381 aa, Zea Mays
MPPPQDGVDDSAARVPLLPPPAPRRAAVRLHPLPLLIAATLAASYRLLFLAPAPSYYQSLLLSLGSNDTAAAHLHALTIRPHLAGTGANALAAAHVAATLSSHSFRTRLTSYSVLLSYPAYRSLSLSAPDRDTVLFALKQETYAGDPYEAVSAEAVPTFLAYAASGSVSAEAVYANYGRAEDFAYLAARGIDVTGKVAVARYGEVFRGDIVRNARDAGAAAAVIYSDAKDYAAGKTFPDGPWMPPTGVQVGSTFKGVGDPTTPMWASSEGCERLTIAEAMSSDDMPGIPALPVSWKDGETILQLIGGDVAPENWQGGDGAAAYRFGPGPAVLNLTYTGNETMVTIQNVISVIEGGEEPERYDQNPQSPYPQYLLPNSNLGM

SEQ ID NO: 194895 - protein, 169 aa, Zea Mays
MGTFGYLAPEYALSGKLTAKSDVYSFGVVLLELITGRKPVDASQPLGDESLVEWARPLLMKAIELREFGDLPDPRMGNRFDENEMFHMIGAAAACIRHSAAMRPRMGQVVRALDSLADSNLNNGLQPGRSEVFLEPQTEEIRLFQLREFGSRDCSDELSQASWRSRRDL

SEQ ID NO: 194896 - protein, 168 aa, Zea Mays
MKIVIHVLFIEILNHPIFCWITTSKLRFLILDLQGRKPVDASQPLGDESLVEWARPLLMKAIELREFGDLPDPRMGNRFDENEMFHMIGAAAACIRHSAAMRPRMGQVVRALDSLADSNLNNGLQPGRSEVFLEPQTEEIRLFQLREFGSRDCSDELSQASWRSRRDL

SEQ ID NO: 194897 - protein, 178 aa, Zea Mays
MIGSLLYLCASRPDIMLSVCMCARFQADPKEVHLRVVKRILRYLVHTPKFGLWYPKGSTFDLIGYSDADWAGCKLDRKSTSGTCQFLGRSLVSWASKKQNLVALSTAKAEYIAAGHCCAQLLWMRQTLRDYGYKLTKVPLLCDNESAICMADNPVEHSRTKHIAIRYHLRDHQQRGIS

SEQ ID NO: 194898 - protein, 61 aa, Zea Mays
MFHRCQWFTTNQYKVIRKGSNERSNKNRRLPWSGALDCLVCHRTVFGALGWIKSNSLASGF

SEQ ID NO: 194899 - protein, 69 aa, Zea Mays
MRLDPSTHLIRVRVCPLNRTGQPLPTYLCYSDSFQTFLNLSRLLLLYSDYSYLLSSKDKSGFHTLKSCT

SEQ ID NO: 194900 - protein, 80 aa, Zea Mays
MAWKRSWYFTSVPVRWHSASSNSGSDHSGGPKSRWRRSTNRYQCQDGVPSSCWTWIYHIWVPSSRLYDAIQTFSSSKIRC

SEQ ID NO: 194901 - protein, 126 aa, Zea Mays
MRSHLFSLHPSIWEIVENEMHFDSTDNPVMINEQIHKNAQATTVLLASLCRDEYNKVSGLDNAKQIWDTLKISHEGNDATMITKMELVEGELGRFAMIRGEEPTQTYNRLKTLVNKIRSYGSTRWT

SEQ ID NO: 194902 - protein, 176 aa, Zea Mays
MMVKEARYVDDALNGPLPVYEPQHVALKATSSREALPSSVAQVEAAGLNEDEMALIIKRFKTALKGCKEHPNKNKTKGKRSCFKCGKTGHFIAQCPDNENDQAQERHDKNEKKKNYKKAKGEAHLGKEWDSDCSSSDSDDEGLVASAFDKSSLFPNEHLTCLMAKEKKVSVRNTSK

SEQ ID NO: 194903 - protein, 77 aa, Zea Mays
MDKILLSLVERLKSSEAKLFAQAEAHKAVVQELEKKVIEATENFDVELTKHEICEIERSRAQRNVDELRAAKEKCYD

SEQ ID NO: 194904 - protein, 53 aa, Zea Mays
MLQVLPVSRTFCFETSTCPSAGWVGAYTDAVVALGKLNARCRFILHTCVEHHI

SEQ ID NO: 194905 - protein, 109 aa, Zea Mays
MLVDIELSSPTITNTISFPRTTTIGSITLPCVNNTCKYHFNACIGMQCVGTLSSYLWGYKTTSSANITSMNAYECNAYVLCLHTSKGMKPHRTPSRATYMLSCTGTVGP

SEQ ID NO: 194906 - protein, 58 aa, Zea Mays
MKKTKSRLDFSCAEQVSHMASFMGLKWISSLIFFSFLFFFFFEMLELDCASWNCLIRL

SEQ ID NO: 194907 - protein, 57 aa, Zea Mays
MEYLLSLLAQLLAYIFSFLTHLLAFLLHLGMHISHSVRHLLHHRHLSCNKWINSAWW

SEQ ID NO: 194908 - protein, 61 aa, Zea Mays
MDRWRGGGKEHEGGAVLGELSSRKDSRGRDGSREALREGSYGWVVARGDDPGSWPAMHGAR

SEQ ID NO: 194909 - protein, 55 aa, Zea Mays
MHGRVHREKEACVRCKKKKKGKIMSLPNLQNKQYRTRDVKCAVLSTRASVAPWLT

SEQ ID NO: 194910 - protein, 56 aa, Zea Mays
MLDVAHEVVIANLNSCEAHSCTRAHLDNISPCANPGCSKESQLLDEHQAAGSKEKV

SEQ ID NO: 194911 - protein, 77 aa, Zea Mays
MQVGPACPCCFFFFFLSWTADRRTTACLMCCNFFLLFYKIHKITILYLDFRKSPLPELAVSERSVRELYVILLFFYK

SEQ ID NO: 194912 - protein, 95 aa, Zea Mays
MVAKVFLDNVVRLHGTPRSVVSDRDKIFTSHFWKSLFQALNTKLALTTAYHPQSDGQSERVNQCLEMYLRCAISNSPKQWRTWLPLAEFWYNSSY

SEQ ID NO: 194913 - protein, 63 aa, Zea Mays
MIWRCSIHGSRLHTRLSHPTLRNKARCISYMRQEDNIYNNRVYRDKCHKTSEYLLHSGRLITK

SEQ ID NO: 194914 - protein, 168 aa, Zea Mays
MVLCSHKNLMDDHIMLNIAHEVVIENLKSQQPHSCTCIQIETILPDNACCQSTSKSSFELEFAGTKEDTYQKLKEENERLKMNLTQLKGKCITQPSQDNRDHMVKKLETGTTVACAKSLEENVKDSRITKRKEQKKKSLKLEDRLCYICRKKGHQCKDCPIGNNPTSS

SEQ ID NO: 194915 - protein, 121 aa, Zea Mays
MLEAGTSPSSSTGKLLHLLLSSPPPRRGGGTSSILYSHVGINHPSSNQPTAPMLLVTSSPGDGTLQLLSRCTKLVHVHRPSSLSSRPRPNHHDSTLFQTTSRSRISPSTTRFQIPIARNPV

SEQ ID NO: 194916 - protein, 59 aa, Zea Mays
MLGLLDPLICDSHSCFICSGITFCIDVLTHINLIAFYVYTCVNSIIIRNRRSSRPLRPS

SEQ ID NO: 194917 - protein, 89 aa, Zea Mays
MTRWWWLNRVGEYHSGFLNSNVSRKILLVLENKNMWTERIEILLWQRNWWAFMQVFRCTDEMKRASDLRLSIEERPKERKKKVLKESEI

SEQ ID NO: 194918 - protein, 67 aa, Zea Mays
MELQTVRVMYCCTDHRFVTACTLSFRDSCGTCVRAICIILSYCILQYVCVPTMSRSLSYLETQMTTC

SEQ ID NO: 194919 - protein, 57 aa, Zea Mays
MTRRSRRRPRTCNGFLYAGNGTEVARAGSRHPVLSAATASWTSSTKSGARIRTKRKK

SEQ ID NO: 194920 - protein, 52 aa, Zea Mays
MQMRTRICFDSNLAYLDHSSPPLGLFLQIKLNFLSLSQILLLRHRERYSKRN

SEQ ID NO: 194921 - protein, 64 aa, Zea Mays
MMEKKGFGDKWGDWVMKTMRGGKVAIRTNDKIGPFFPTHIGVRQVSHPGFGTPRPGREHNHQVC

SEQ ID NO: 194922 - protein, 70 aa, Zea Mays
MWPYGQTQRLRAIPGSPARITHTHARRSMVTSPTTPISHWLMGSPRLPRFLSLNTFFSVLSGRCSQPKLL

SEQ ID NO: 194923 - protein, 67 aa, Zea Mays
MVEAFGRGIDFLLLFPPLGNPQVLNIFFKGFSACHGCSRLKLLHHVVTVILRRLSNALPFKLCQAHL

SEQ ID NO: 194924 - protein, 55 aa, Zea Mays
MDMHPPPSVLVACAGQGQVRSSTKDVAVPCRSFYSTMDQLWGMPATSSTLLGTGT

SEQ ID NO: 194925 - protein, 72 aa, Zea Mays
MSIGDVCPKESEEPPYAQDQSSSSTQASPPTQNEDKAQVDEGQNQDDEPPQDNGNDQGGDANDQEKEDEEEP

SEQ ID NO: 194926 - protein, 52 aa, Zea Mays
MFHLTLALLNAGACCSSRGVGSSSTSTFTLIIMLLRHSHELIRNFWSKDVCF

SEQ ID NO: 194927 - protein, 75 aa, Zea Mays
MCRAEYYWLLVGFIAPLVLWIFSLLWGAKNVRLHDYLFMMARIRFRKIRIFVSIELLVSWCFKVRCLIFLYIRRV

SEQ ID NO: 194928 - protein, 52 aa, Zea Mays
MFHLTLALLNAGACCSSRGVGSSSTSTFTLIIMLLRHSHDLIRNFWSKDVCF

SEQ ID NO: 194929 - protein, 78 aa, Zea Mays
MDVYGYTNMGVLRSVMNSYHNGLSVVKVWQRRLCVARRLMRSWPPYRNIWSINCDKMCELHHGIWAVMEFSTGTLTKL

SEQ ID NO: 194930 - protein, 54 aa, Zea Mays
MILYKSWSNSYSKWTARKDKTYQRRISKKSYVRVSPVLQNRPEETVISFDSQKL

SEQ ID NO: 194931 - protein, 76 aa, Zea Mays
MTFEEQFYLNNNNNHPFPISLTLRFTLGGLWPKSRDKIPLRGEGCDTSVSPRVSLKMPNQGPSFYVNQIKHEHQLT

SEQ ID NO: 194932 - protein, 75 aa, Zea Mays
MHVSYALHSLDCNLVDGEYVLIPEQGSIQEEDQEQASEAAIEDLPAAPAIEGKPRFICITVLLYATLLYLMLVGL

SEQ ID NO: 194933 - protein, 57 aa, Zea Mays
MEDSHPHDGHQAGRLHLREKEVGGGLGLRGGAAITWGRRRGIGAAARVEERGEGRPK

SEQ ID NO: 194934 - protein, 53 aa, Zea Mays
MLARCREVVGVEGWGWNEPDEDITPMDTNNTPQVNSSITHAHARQLNLQVISF

SEQ ID NO: 194935 - protein, 72 aa, Zea Mays
MEFVHRIRRPSPEQRINLSFDGEPEVRSMNQNHRDETNAAVLSDLANNARIESNFLPELLPELELPRISARN

SEQ ID NO: 194936 - protein, 57 aa, Zea Mays
MTSHGRLTRRRSAPPTARQGRLSWIPPPSSPSAPRLQGSEAAINAHQLPTTSHGRLS

SEQ ID NO: 194937 - protein, 86 aa, Zea Mays
MRLQGHPHPTAGYPVLLEQLHCVLGRRSITGSLQYLPQNAGKAFLCKPICVGMCVPSFRGYVRSHMCKGKCKRKKKRKRIPKIKGS

SEQ ID NO: 194938 - protein, 202 aa, Zea Mays
MLCDCSVTVVGGERLPSSSINNAFASPAFSHLLLFSDACFLLLSLFPPWARVTNASASRLLHRRTSVTRNTWRRSSPLSPRGLRLPSLPRRRPMTWTTLRGLPWRSGLTSGPSSAPGSRARMSRSTPRTRRTRPRRTAMVTTTTTTTEATAAMTVTAVAGAATATTRVATAAAAGAATAAAAARAATRPVARCHWSLDVSIV

SEQ ID NO: 194939 - protein, 74 aa, Zea Mays
MFILCCSLFYAILQRGCCRNYIYGCRKCSTVAYRVVCGTWSVTFLDIAFFLTYLIIISYIIFPSYITLLVILTH

SEQ ID NO: 194940 - protein, 60 aa, Zea Mays
MGKNISLILSSSSIQRAPPFLDPCCVGGDLGGRKQWMMAAIGGGGVQPRGRKGGGGQEGG

SEQ ID NO: 194941 - protein, 89 aa, Zea Mays
MAKFVMQTGFSRQVYIVLLSCFGSVVFISMNCYSHLHLTFSHSKFLLLSDIRMELCNVLMVFILLRHLSCASYTCFHSCALCISYRYDN

SEQ ID NO: 194942 - protein, 91 aa, Zea Mays
MMLMVDYLHHHHFLLLLLVHLRNLEWEPSSFLCSFHHMQKHMSLKKLPPLVDPFFATSQMPQFFQSQWQDHLTQVLHVVKNSDDAPILLLW

SEQ ID NO: 194943 - protein, 96 aa, Zea Mays
MWERVVGRWMQRQKSSGASVLFSHKTLGGHPFSLHPPSLGRHPPPFFPWLAVPSPPMAAAHHFFLLHRSSPPPMQQGSRRGGTRWIEEEERIKEMF

SEQ ID NO: 194944 - protein, 58 aa, Zea Mays
MFHLTLALLNAGACCSSRGVGCSSTSTFTLIIMLPRHSHDLIRNFLSKDVCFLISRAH

SEQ ID NO: 194945 - protein, 62 aa, Zea Mays
MTYNFKLNPLCSNFSTCFVYPVHATCLCLSMLPFPVFEDWKPSLVGGQNTLRCSQKDVKFSG

SEQ ID NO: 194946 - protein, 83 aa, Zea Mays
MHQPFSTQLLCNIPVFTPRLETLKLLNPPSYYLLRPSPYKTSHSSYAYTMVVSSTSHRIFFWHPRNIDKYMFKRKRRKKEKKK

SEQ ID NO: 194947 - protein, 54 aa, Zea Mays
MVSTSSCKNFRFFGHPSEKLCPFYGRYLKLCSKNDRDEATVSFLLRYLFFLFFF

SEQ ID NO: 194948 - protein, 53 aa, Zea Mays
MSIHDYICLYLENEEEIEVEEARTSPPPPEEPQAGNCFYFDICGTEPDSPITQ

SEQ ID NO: 194949 - protein, 50 aa, Zea Mays
MRQPLCILSPFFFVCSLVLFFLFLFLFFFFFLFFFLFFLRNRRRKTRKRR

SEQ ID NO: 194950 - protein, 91 aa, Zea Mays
MTNGFKVRKADPTLFTKTIANDLFVCQIYVDDIIFGSTNKYTCEEFSRIMIQKFEMSMMGELKYFLGFQVKQLQASSAKPNTFKIYLPSLD

SEQ ID NO: 194951 - protein, 82 aa, Zea Mays
MAARFIPLRVAPKLLPLPLSAPSSSARRRQVPARLPPHDARPAGVRPIRAPLCSSPSRAQPKSPARVPAPSSSQRRSQKFLE

SEQ ID NO: 194952 - protein, 57 aa, Zea Mays
MAELHRHILGLISIKHADLWESTVCGRLGEASKNSSPHSQCEFGRGLSFVGWEFRHR

SEQ ID NO: 194953 - protein, 53 aa, Zea Mays
MSGSETHMINLWNLNLICHFIALGLFYYYFYLLFLRFGIYLYLVIANKILTNL

SEQ ID NO: 194954 - protein, 75 aa, Zea Mays
MMEMAMNRACTQAQERLEETKVQAEQIIGLEHQVTELQTQHQADQNRIKELEHQLTNAHSKSKVLSQQQEEIRLY

SEQ ID NO: 194955 - protein, 70 aa, Zea Mays
MKPHCTPPQATYDAKLYRYGRTIGHDKSSDANESCNAYGMLHLSIYFTSFTYNTNLKQYFIFLQINTNLK

SEQ ID NO: 194956 - protein, 88 aa, Zea Mays
MTRRSSSTPPRVPASDVLTWRQSLSSRRSAWTTRRHRGDSRGVEKRKGRGEERKEVATIRPIWAQGRSRRGAMELRVFGRTRPSRRGC

SEQ ID NO: 194957 - protein, 647 aa, Zea Mays
MLGDHTVAALVPTAPPADAVAGSSRLQAFTPHEMTAAILELGQAVAGIRAFLAGPYTPPPQLPPPQQPPASATSYQYGMPPDWAGSASSSSPQASQGLPIHMVRFPPSPSPLPAWATVTSAPVFGSAAIQPHVPFQPAAGGVPSHGGSSAAGVLYGGVDGSLFHGSSVPPPGSRGQCSSPPAAAPTAPATSDPLPPRFYKLEFATYDGAAYPVNWLNQCEQFFRGQRTLASDRTWLASYHLRGTAQTWYYALEQDEGMPTWERFRELCHLRFGPPIQGSRLAELGRLPFQSTVQEFAERFQALACHVDSVSSVQRAELFVGGLPDHIRVQVQMHHPRDLQTAMYYARAFELCTAAAQPAPTSRPTRHAPRPPQQPPARAQVGGQPPTAAHTPPGGRPFRRLTPAEMQERRRQGLCYNCDEPYVPGHVCQRLFYLECGDYIVDEGALATTDDAGLQAASVQDPEAAIAFVVSLQALAGIRTESSMVLPVMVKGERLMALLDTGSTHNFLQSATMRRLGQVPAAGEHLRVTVANGDNLRCAGVARDVPISIENEHFSITCVGLDLGCFDFILGVDYLRTLGSITWDLKAMTMAFQRDDHRVLWRGIGGADPPDPRASVAAVVAASDQQPMLDRLLLQHASTFEEPRGLP

SEQ ID NO: 194958 - protein, 103 aa, Zea Mays
MAGDDEEARIPTDFDECVSRQDLEANNKLLKEQMEEMVHKSVHDAFIDMNLGKTYERLDQRLSQIVDRLAVLETQQQAPPPPPPPRPRLPDDAVFDEEGNYDE

SEQ ID NO: 194959 - protein, 75 aa, Zea Mays
MPFIIITFVFDTSIPYLDAYLIPALQNLLSFVSILNIEGYLFSLSCILFLVACEFLTPPFVICYYLYLRRLSILP

SEQ ID NO: 194960 - protein, 338 aa, Zea Mays
MKVRVIRVFRVPDCDTRITRNNFGFCKLLPEIPEQNSGFGYFGFGFGYSGFGFRVTGFLPSPTCEAIKKLAIGEVRPQEKDDEEGTFWMTNEVVDVGAKVVSDKVSTQANPSTSSHPSHEQNHQRMPTVVEDEHESIDGGVPLDQVNDEEEQIQRQPSVPHPRVHHTIQRDHPVDNILGSIRRGVTTRSRLANFCEFYSFVSSLEPLKVEEALGDPDWIIAMQEELNNFTRNEVWSLVQRPKQNVIGTKWVFRNKQDEHGVVTRNKARLVAQGYTQVEGLDFCETYASVARLESIRILIAYATNHDFKLYQMDVKSAFLNGPLQERVYVEQPPGFEDP

SEQ ID NO: 194961 - protein, 612 aa, Zea Mays
MERVLPCPRSRLAGDAKRLAPLVLVVARLPLGMLPAQEEDGAFDDFVDLPAPDALYVTGLHMHPANVTRDPHEPPVDFSLKGIDTLQRLRFTNPTLTPRHPGVQDPRFWNLFQADFYNSVILSKKHPVVGHRFIDWEGCENMGDADMTSALQNLERKGLRNIMTMEYPWNDEVVAQFYATLWIKKVDEEADGYDYPVMYFFIQGNWHKVSYRHFAHILGFSNADIQGSNMRVHNIRLPMREETKFIHVSNEREFWTTANMHRYYRYLNSLSRMTVLPKGRNQMNVLGESRVFLLLLAPNSLARINVFDMIWEENVRASWSPLRGCLHAPFIMKMIEVVTQTHFEKPVKHSRYVPYWVDSSNPAARTKRAPSGSGGPASSTEPPPQPPQHPSSSRPAAASRPSPGRGSPMPRARGRGRGRGRGMGARLVHGFATFFSMCRNISADVHEVARRQRETDDNLRRQASTMGMPFVPRSPDVPLHPPPPEINEWHQQAYGVPFMSADDEEEEAYVDDREEFALPPYHGDPGQSSSHPPPPYPGPGPIHGDPRPSGSGYHHHPPPPPDHRTSSASVFSTADEPPRDSTFEEDVMRTLFPNYTSYPPSYPPSYPPPGGY

SEQ ID NO: 194962 - protein, 88 aa, Zea Mays
MFCKGKLRQKREVVFYVLSRTKKQRFGKKRKRPFRLRCVRKEGKVFFRLRLKILISSTSKRLKQRVRIYYKVCTKFLEDSLVVFTRIS

SEQ ID NO: 194963 - protein, 69 aa, Zea Mays
MGTAHKQPTHLHTHNEIHPNAHGPSSAFSPSSISGRCSTSLVVRHDSCPFPRSCLSPSNSLRKTSLHHM

SEQ ID NO: 194964 - protein, 58 aa, Zea Mays
MHSSIFYILCFSYDSPFLLIISPLLKSLLTLSYIRLKVSFNAKFLPLCHKSPKRIQRI

SEQ ID NO: 194965 - protein, 86 aa, Zea Mays
MRLDPSHAAIRLASFTLEPSRGRHPLLSPFFHLPLPIRILHHRFPIATSTAPAPRRAMKRGQCSGNDISSRRRLGPTILIHMVEQV

SEQ ID NO: 194966 - protein, 146 aa, Zea Mays
MAITTTVSNERNRGKEKRKGSCSINTETNGRRFPGAWARCAGARARSVGLLDGAGTRKARLRAGTSGARCGWATQLAQTQVQGRARGLRTRRESRVLGVAWLGRLPGSVAARRRPRLVGREKQGRESNRRRLLREWRERTEGEGVW

SEQ ID NO: 194967 - protein, 69 aa, Zea Mays
MSETRRRHREFVNRSSLRPRLVVGNLHRCMSHGPGASSCGLGGRRQCNCLPEFSDASSPHGSMGSVFRC

SEQ ID NO: 194968 - protein, 53 aa, Zea Mays
MEVVGGIYSLQPLPSRWLTLLSTGTPDSPVVHQTWHCSVRCVSHQLPIRVWSS

SEQ ID NO: 194969 - protein, 89 aa, Zea Mays
MAELAQQPWRPSSLLPSPPWRSGRSSHGRHPLQLPLAGRPTAAHHPPLSLVFPWPSPPLPASALPKCRCPSPMHACSKELPPQSHPILL

SEQ ID NO: 194970 - protein, 151 aa, Zea Mays
MANYAVDSCLLTSCREPRPRPRGCPYARAPKGEASHAVVVVTMSGYGQRLLMAWVIVLALDDIEIPCCIHQDQSPCSVDAEVLSRLLLSRPSMRATNGRVAVCGIRVVVGGRGRARARRRILRVELNVGQDGEIAPEGWTRSQARRIDCAR

SEQ ID NO: 194971 - protein, 52 aa, Zea Mays
MNAYECNAYVLCLHTSKGMKLHRTPPRATYDAKLYRYGWTIGHGPTSYASES

SEQ ID NO: 194972 - protein, 164 aa, Zea Mays
MMIKEARYVDDALNSPIHEPQTVALKATRSKEVLPSKVAQVEAAGLNEEEMALIIKRFKTALRGRKEHPNKTKTKGKRSCFKCGKIGHFIANCPDNDSDQEQGNKREKKKAYKKAKGEAHLGKEWDSDCSSSDSDNEGLAATAFNKSALFPNEHHTCLMAREKK

SEQ ID NO: 194973 - protein, 54 aa, Zea Mays
MGSLFLPIIMCFWRLWIMWIEGLEVGLGVGLGFDFEFNFCRMADSTVSVHTSFP

SEQ ID NO: 194974 - protein, 74 aa, Zea Mays
MSSFSSLSKRLSPSFYFSRELTFSRRFRLLFSAADLSLMAYVFCVKRRSILSSDRFLSERNCKVATSTSAPDAT

SEQ ID NO: 194975 - protein, 188 aa, Zea Mays
MNHVFGEHIGRTVEAYVDDIIVKTRKASDLLSDLETTFKCLKAKGVKLNPEKCVFGVPRGMLLGFIVSERGIEANPEKIAAITNMGPIKDLKGIQRVMGCLAALSRFISRLGERGLPLYRLLRKTEHFTWTPEAEEAHGNLKALLTSAPILVPPAAGEALLIYVAATTQVVSAAIVVERREEGHALPV

SEQ ID NO: 194976 - protein, 59 aa, Zea Mays
MILQGLKPRIYNDLNKFGRQWMKELPTVVWSLRTTPSRATGFTPFFLVYGVEAILPTDL

SEQ ID NO: 194977 - protein, 99 aa, Zea Mays
MSFESVNQQHKCALCCSGVIQRFRKSPTTCIDVRPPAAKLLILSSTNWNSGARDGLALHCFRSSLGPSLDRARRSLASALAITQSSCQFSHLAPPREGI

SEQ ID NO: 194978 - protein, 72 aa, Zea Mays
MLKVIGGRWPMNVSIPHAAGEDIFTSRMARELKIFPYRWNIAAVVRQRWTRIIKMRRESAGQSQGSGTLCAK

SEQ ID NO: 194979 - protein, 140 aa, Zea Mays
MFGPTQATAAVDTDFVVASTVVPADDNLFGSVSECFEPDGESGSSISWMEESSDEGLDYFATLDVAAAETSPRVEASGGLPSASTRYRRRRAVAKHSESEFSRSGRCRRMGMERGRLRVDRTGKRELLSSAIGASIGEGE

SEQ ID NO: 194980 - protein, 68 aa, Zea Mays
MTSIFASNGPQPFTSSTHQRLTFGQHFFGILHSTPLKKNSTSNSATPSKTPKVPHIAPPFKTWVHYWS

SEQ ID NO: 194981 - protein, 138 aa, Zea Mays
MILDMATEETVATAEATVATVPGKGKKVFNKEKKITEKISEEGDFNFRNMIGQELSKAEKEELRDYVISCGYQPGALLFGGVDEESLGCLRDRSGAKVVSTLSKSVGFPKLEADLSRYRRQHIAGSLFYSNFKVKFLP

SEQ ID NO: 194982 - protein, 169 aa, Zea Mays
MHTSSGQFSSRSCYRALFMGAIMFEPWKRLWKSWAPPKCKFFLWLAIRNKCWTSDRLEKRGLDHPVSCLLCDQEQETIQHILCTCVFARQFWHSILFGLNVGNLSPFGDESSFADWWRKTSKKIHKSKRKGMNNIIILGAWCLWIHRNKVVFDGETPSLSSIRCVFLDE

SEQ ID NO: 194983 - protein, 115 aa, Zea Mays
MDWLSAKSPPVGPFASPFAECAGQHSAKVASLPSVLTTALGKEGFTGSQVSFFAECHGHNTRQSDQEVLFYLFLLFHPNKQKIYIIHITLYIIRITESTHLSSTPYISQISPHKS

SEQ ID NO: 194984 - protein, 60 aa, Zea Mays
MSDSPGMPPPHRQVACQHRSSSTSADGLTATAHRFASTFGVAPARMETVASCLTSFHQER

SEQ ID NO: 194985 - protein, 242 aa, Zea Mays
MTKITSSLDPSCSRGHFEGLCHACQLGRHTRLPFTTSSRAEQAFDLVHCDLWTSPVLSLSGYKYYLVILDDFSHFLWTFPLRLKSDTFTTLTHFFTWVSTQFRRPVRALQCDNGREFDNNASRSFFLTHGVQLRLSCPYTSAQNGRAERMIRTITNMLRCLLFQASLPASYWAEALHTATHLLNRLPSKAVSHPTPHFALYGTAPSYDHLRVFGCACYPNTSATAPNKLSPRSTRCLFLGYS

SEQ ID NO: 194986 - protein, 84 aa, Zea Mays
MLSRSHLWRRFFSPAKKTLVVVFSPFCPYLAATPFPPSHTWPPLSSFPLGWLSSPPMAAPLHGFLLPLDLPPRSKDREEEEHKY

SEQ ID NO: 194987 - protein, 123 aa, Zea Mays
MIIMKTIWHRTKVCHSINYCITFVYLGSYKLVYACICNILSHIIRLHLNLGLKYCITYLLVYLLIMSNSFNWYNFTFSYFICIKVQIVELNPLASQVQVHKVKQVFITCMHTFRGRMVYNLNL

SEQ ID NO: 194988 - protein, 51 aa, Zea Mays
MVKWHKSQARFVFASKGETKMFVILMKQHHGEITHETPITQGVYLIIFYLT

SEQ ID NO: 194989 - protein, 82 aa, Zea Mays
MYTHGCATWHALVSRLVVVIHYETMSICYLGTICFCYVRFIISASSVMVSRLTTYGAAAKLRAPCERTRKVMLLGACWYRGL

SEQ ID NO: 194990 - protein, 51 aa, Zea Mays
MIPGSGTTGIAFLPSVILHSANILSIKDSLPSIFFGYSTNTLSSVEKHSAN

SEQ ID NO: 194991 - protein, 113 aa, Zea Mays
MDCCWFDVTRGPEQWFIVGDEVEIGPVLSPSVLRPRVDGVVNVSSPPRKDKKKKKKKNEACAFGAESQDYGEKNDQRFSLQPGMQSKSYRYVHSCGLQRSRLVPATRNLVAPT

SEQ ID NO: 194992 - protein, 91 aa, Zea Mays
MEMRSGRRWGWARAGRAPLGRWAHCHGRAGGSSGRALGHEREQERAPAEEGDEGERGARVREPLGWARAGSSKTRGWGRSQVFGGGIFPGS

SEQ ID NO: 194993 - protein, 52 aa, Zea Mays
MSLISSNPLIPLLIQPYVRRPDQFPRGSWARTGPSSHTEPIYKQDRAVVRES

SEQ ID NO: 194994 - protein, 64 aa, Zea Mays
MHPNKPLEDEDATKKSPISSSITVICKRSLLDIRNFWLRCGLKLLKCTYFKCLQQSHNIITNEK

SEQ ID NO: 194995 - protein, 96 aa, Zea Mays
MPHNICKEGLRSDTSCDGTSQVTRPTYSCPCLTDIRHPIDVPKSLDKLGIFPYLTRNVSPVLQTLQNIGDKEMRKQLHNLTFISKASLSYFITDQN

SEQ ID NO: 194996 - protein, 57 aa, Zea Mays
MSSHSCITQCRYLIHVGNEGSSSTSTYTLTITLPRRSHDLIRNLLSKEVCFLYSRAH

SEQ ID NO: 194997 - protein, 90 aa, Zea Mays
MIYIRNLIWNLSNYSTIQKPYCRQFPSFSMAAFADALKPEKFNGMHFKRWQVKATLWLTAMNVFHVSKGRPEGPLTPEQEKEYDHANTMF

SEQ ID NO: 194998 - protein, 81 aa, Zea Mays
MWTHVTLAISPLPMRASCSGIGPAEAKLTHDEACGQLKGPRSAGQQSERSLIDTDRRPFLLNVWSHITLFLKTRYLSEVPY

SEQ ID NO: 194999 - protein, 70 aa, Zea Mays
MTKITSSLDLSCSRGHFEGLCHACQLGRHIRLPFTTSSSRAEQAFDLVHCDLWTSPVLSRSGYKYYLVIL

SEQ ID NO: 195000 - protein, 78 aa, Zea Mays
MALDLEHVFKIRFSISPMNQHTAYMYMSATLTSKHIQSCSLPVGCSIFNWPHNLGIQTLRVCLVECTRRDGMRRSRFL

SEQ ID NO: 195001 - protein, 79 aa, Zea Mays
MFLNVTGTLVRSTFGWISHRHGSMLRNITDKERGSQLSVRTNIFFYWSLALTVLKNDSTNVFTTTYIELLYTNINYPSA

SEQ ID NO: 195002 - protein, 84 aa, Zea Mays
MRSNASKRTRERGEEEPNRKAKINTMNTSDLFLEVWFRRTYSPLSPHRTGLFQPFSSLKRSLRPIECFFLITRVTWTLQGSPHT

SEQ ID NO: 195003 - protein, 202 aa, Zea Mays
MTFINERINGRGVTTPLKCLERRGNGRGCSASAVLAVVARSGWGARCVVQGLGRRLRVVDAGRGWPWALVARRVELGCSTAGQGAEQPVRRAAGRAVHGPGAGRRTVAGARLQGGSEWRGLARGLLGEQLGASAAGAPGVQRLGDVGRAWKKQGRGERIERRARVTCRGRRPGDGRWWGPLGRTGRKSLPWRRRLGDRAGGG

SEQ ID NO: 195004 - protein, 79 aa, Zea Mays
MSTSSSSSTDENPCPNFPRSSKSSTTSPISFLFKRYSSVLSCNHFKLSCSFIYNVESLSRAMSAGVGGLRLPKVLKNMI

SEQ ID NO: 195005 - protein, 102 aa, Zea Mays
MSPRRVRGGWWRGDCIAYGTPFSFFNSSRGVVARMEGRSRARGREWKGNIDGMRGPAFGTRVGGANFGGILWKARSAWWRGLKVARGQGWGRTDGEEVAIAI

SEQ ID NO: 195006 - protein, 73 aa, Zea Mays
MTCPLFTKFSFCFFKYAFFFSSGQLFPKILNFAFLGFSLSLRGSFVFLYFVHQCKQKFIFFQSFVSQLNNLCS

SEQ ID NO: 195007 - protein, 286 aa, Zea Mays
MPPERKVEFAIELLPGTAPIFKRAYRISGPELVELKKQIDELSEKGYIRPSTSPWVAVVLFVEKKDGTKRMCIDYRALNEVTIKNKYPLPRIEDLFDQLRGASVFSKIDLRSGYHQLRIRPSDIPKTAFITMYGLYEFTVMSFGLTNAPAFFMNLMNSVFMDYLDKFVVVFIDDILVYSQSEEEHADHLRMVLQRLREHQLYAKLSKCEFWINEVMFLGHIINKEGLAVDPKKVADILNWKAPTDARGIKSFIGMARYYRRFIEGFSKIAKPMTALLGNKVEFKWT

SEQ ID NO: 195008 - protein, 104 aa, Zea Mays
MDIATKFASGQEADEAIFRKDKQPQGRPSEEAPETSAPRGAKKKGKKKSQSKRDAADADLVATAEYKNPRKPPGGANLFDKMLKEPCPYHQGPVKHTLEECVML

SEQ ID NO: 195009 - protein, 106 aa, Zea Mays
MPRLEATQQRQTGTSVKATESGLAVITARTRVAAAPPTTRPVALTPRRDTRRFWQEERATLHLRLNNRVRKGTPRRLISYPFPFSSFSISRNRDRGRGIPREGSFS

SEQ ID NO: 195010 - protein, 58 aa, Zea Mays
MTTAAPSSLTAAGQRQQGLDRSNSCPSIRLRRTSDSHDITPAGCPDLSGCHIGMYLGH

SEQ ID NO: 195011 - protein, 72 aa, Zea Mays
MAMKAAAPHSSSLADSPLPLSIKGNSRASPFLPTRICLSLSSTPRSSLVCCRSSPECAVRRRSSPEPRTSCP

SEQ ID NO: 195012 - protein, 77 aa, Zea Mays
MPCHASCRPRRTDATRQVIHTYIGMAGYFNFNGAMIVQQWSHVRDLFLFFFFCFMVLAKTLIKSQKILSVIWSYPSI

SEQ ID NO: 195013 - protein, 60 aa, Zea Mays
MAPSGRGRPRRGHGPSSLGGTGVSLSAPAVRARGFSGGQRYHRLSVRLQHTCVQEQRHHR

SEQ ID NO: 195014 - protein, 84 aa, Zea Mays
MITMKNGVMSRLTWGKEEDIAKGRISKTPPSNWDRILEILENGHSVITKVRSRDEKSKDNTQPEYKDGVESSQATRKRIQPREN

SEQ ID NO: 195015 - protein, 53 aa, Zea Mays
MWERNMDCIGEDRKGAGRRAVGRGRETVADNVDWQVGPGAGAHPRGLQDVGVA

SEQ ID NO: 195016 - protein, 117 aa, Zea Mays
METVRVLLAVVAHHGWPIHHMDVKSVFLNGDLAEEVYVTQPPGFTAKGEEGKVLKLHKALYGLRQAPRAWNVKLDKSLGKLGFTRCKTDHALYTRKKGGQRVVVGVYVDDLLIIGES

SEQ ID NO: 195017 - protein, 51 aa, Zea Mays
MWSFICFIAERCFSPKSPFDSHAHNNDSKETAQRRRSLYYLSITCLTTISV

SEQ ID NO: 195018 - protein, 79 aa, Zea Mays
MFILCCSLFYAILQRGCCRNFIYGRRKCSTVAFRVVCGTMECYSTNRNAEGESTCHAQTCPAGCLRTYSVLLPHSQLLI

SEQ ID NO: 195019 - protein, 122 aa, Zea Mays
MAKFPGRFSETGRRTRLLWQRAPSLYYLPLSVARVGGVALDGGSYNTDLGGAVMGEGKGSPYMDRHRPNKRPWPSLAEIKRARSDSVALRSEKVNLIEGLHVTAAPGLEHEVRRQVGPAWRC

SEQ ID NO: 195020 - protein, 97 aa, Zea Mays
MSMADIPVLHSAEVAQLHPQVVLPICHGVVWTPYPSTEEARQGSTTRPLQSFTSFRKPDTISEESGIGIPRLKSHLSKINPRTSLHRHSPTALASYG

SEQ ID NO: 195021 - protein, 67 aa, Zea Mays
MAIEHGKLGWLIGRRPRCSLQLSGQRRSIVENKISMMKIIIPVIFIEEALLMKVFLLRPSVLLIVGK

SEQ ID NO: 195022 - protein, 67 aa, Zea Mays
MNIDWCCNGVCISKSRAIKKILYIFGLRQIKAFLSLLNINAQEIAKRSQIRHLKFLTKMLLDMRNMF

SEQ ID NO: 195023 - protein, 64 aa, Zea Mays
MPRWVRTGCLSSMEPCVTNNLTRDVVKLCVVVGLDMSVCAHVQILQLYPIRRYQKMVHCNLIYR

SEQ ID NO: 195024 - protein, 67 aa, Zea Mays
MAADRDSGTHWRSVLGSSTTGQQQHCNTAVVARDRIFGDGETDYFGGTNPHADLIHPKESGGPGPGR

SEQ ID NO: 195025 - protein, 56 aa, Zea Mays
MFSNYRCHFRFRSYRFRSRLREKNENKNDFSVYRSFPTVFTPTSNTFLITIFVQNP

SEQ ID NO: 195026 - protein, 100 aa, Zea Mays
MVIALGAIEKDKIMVARAYNKKVRAKSFQVGDLVWKTILPLRNKDRKFGKWSPSWEGPYKVKQVMSGNAYLLQTLQGKDLPKALNGCFLKQYHPSMWQDA

SEQ ID NO: 195027 - protein, 160 aa, Zea Mays
MAGSRDSSDISPSNIIEPTWETLPADEQLQFEEHKERMIQEAKAKFLANFKVDRNNKVVRHRATDPASLQPTPDIPNVSNTNDLQSLRNYVEDQREQMQNIIGGMQSDLKRLVRAFDKSSTANFPSHEVELGDNARNTSATGCHDQSQPLYGMPMETYPK

SEQ ID NO: 195028 - protein, 1037 aa, Zea Mays
MPGPSARERGPSGPTAVGPIFNELPRYVPEPPHMTQNPNYPVGRSAYNDGRSAYDHGRSGYISGQPAHESFEEDYYLNPRPSQQHFPSHYAMHQPINSGSRAQESFPAPPKRPERNDQTYEPYRANGNAPRSSNQWGERQHTNMQPTPPMFDQRAGGLAPAAIDIVREEIAGAFRDKLGVSMVPGGQSYRKPYDSRFDHHPFPQGTRIPEFAKFSGDQGKNTREHIGQFLAQLGELADIEAFRVRLFSLSLTGTAFAWYATLPPNSISSWGDLEQKFHDHFFSGDYELDLVDLVSLRQTKDESVNDYIRRFRDTRNRCFQIHLAEKQLVGLAFNGLRYYLKERLEGIQFFTLAQLHQRALACESRSKETAKTMRHNVHIVECDQSSSDDESTEVYAAEMVWPKQAKSSACSSLQPVQKKRQEEVKFTFNVGKCDKIFDELLKNGNIKINHTVPSADELKRRAYCKWHNSFSHATNDCNVFRRQIQSAINEGRLKFQEMQVDTEPFPMNMIDFEGKKVLVRPNTADKGKGKETIIGNAKKADGDCKISCRKVVSEKTPDGGETLKVTITASSTGGQAQTGRQMQEPVLRIPDGPTRRRGRSGTPPDGPESSSRRSGHAQDSQRPRTFKPRRPEIGTWKTNTFKAAGRLIKPGPTFDQLLSKYVKKKAGPSDRPPKRPRSPIHEQRQVRPIGPHHQSEEMKGPIVQLRPNMPTWTPPPPYPPMPYPYTYLPPPYVPNQMWGMPPYPFGMPQYPAWGAPQTSVFNRLTPPVQDRLSAAQSGHQAQTQQDCRTTRPSRPTNPAGGHMPAATQKTTKGDIIKIGTADVVIQGDNKGPMILGESANATEKDTATIKTADPKYSMPRWCPAGLTRSQKRKLQRLRAKESQEKEAEKTFNDTHPLYPPPQKKWRPKAVEKKQTVTEIESQSAPSTDRPAPTHGPSAVHQEVSGQPAPGADRSATARGPSAVHQEASNDTTTSMEEDDLLGEDLVDYEASPEHTGMDVNIITFSVDCTIIGDDEPVVAQFDFGPKEAAFTKPKESV

SEQ ID NO: 195029 - protein, 726 aa, Zea Mays
MPIADTLINNASGNRIISFLDGNAGYNQIFMAEEDASKTAFICPDFIGLFEWVVMTFGLKNAGATYQRAMNLIFHELLGNTVEVYIDDILVKSAEFSSHIADLRKAFDKMRRYGLKMNPRKCAFGVSAGKFLGFVIHEHGIEIDPDRIKSIRNVGPPTCKVEVQRFLGKVNYLRRFISNLAGKIDAFTPILRLKNDTEFTWGAEQQEAFDLIKKYLSSAPVLKAPQVGAPFRLYIAAEDKVIGAVLTQETEGKEHVVTYLSRRLVDAETRYTFIEKLCLCLFYACTKCRCYLLSSHCTVSGQADVIKYMLHNPIMSGRIGKWAYALIEYDLAYEPLKSMKGQVVADFIVEHRVNDIHELDMSYLTITPWTLYFDGSVCNEGQGIGIVLVSPSNVSFDFSSRLKTYCTNNQAEYEALLFGLELLNGMRVKHVKVFGDSQLVVQQVLEEYQCFDSTLNSYLEKCWSIIHSFDEFSIRHISRVENHRANDLAQDASGYRIKRGKFHKTEIPITSAEPNSQVADRPRDNAGPSGVSRNVLLIDSADNEADVSDWRTPILNYLRNPNIRTDKNIRRTAFKYVLMSDELYRRTVSDVLLKCLGPDDAILAMAEVHEGICGTHQSAPKMKWLLRRSGFYWPSMIADCFKYYKGCQVCQKFGDLQLVPAAELHPIIKPWPFRGWGLDFIGEIHPSSSKGHRFVLVATDYFTKWTEAVALKNMTHKEVIEFITEH

SEQ ID NO: 195030 - protein, 65 aa, Zea Mays
MCHGRDGTRHSATGGEMRGHDHEPLQKQMVSAPNFARYSLATRDGQMVFALVNPSMDRRRESGRG

SEQ ID NO: 195031 - protein, 80 aa, Zea Mays
MMRAISSSLSPAASICATLLGSASLLLDALRARGSWIGPFNASSTYLASLIIIRPLTNFPSTSSGVIIVYLEFSRILFTR

SEQ ID NO: 195032 - protein, 75 aa, Zea Mays
MNEKKERKKQKIKREKEMARWAEFCWPALHLGHPPLIPRGRLLRTLQNDRWARYRGPVDLPLPACYNGPAFLPQI

SEQ ID NO: 195033 - protein, 54 aa, Zea Mays
MQFKVAYHKDIVEPTPQYLKFINILVSLKIANKLQKLINILYEDNSSPRMKMIK

SEQ ID NO: 195034 - protein, 99 aa, Zea Mays
MYHSYATSSMLYDAIHTRSSAMVRCCWKYDSHLLMKSMARSCRRSGGSRSCGTWAGDRNHDGPQCGRRHLLRTRRSSPSCPPCLPSRPSSRRTCPGAFS

SEQ ID NO: 195035 - protein, 75 aa, Zea Mays
MHVEEIEPSRYLRVSIVLSIIIPILLHQYTCLVTSLLLLSYSSVPPSTKIQNLSHDEDLFNSQTLSCLTNVLKDQ

SEQ ID NO: 195036 - protein, 87 aa, Zea Mays
MVGVRASRRGRPAAAPAPAADGPYQWPTASKAGALSSSAARLNATTSSAAASSSRSAVAITEEFLAVAVSAGRGGVDGLRGPEHMLG

SEQ ID NO: 195037 - protein, 64 aa, Zea Mays
MSVFTARPTLLARPKNLLGQNHCFYLLILIHHTCIGLISLPSSPSASFSLPSSVSFFFLFFFFL

SEQ ID NO: 195038 - protein, 79 aa, Zea Mays
MDLPSSKLSWHKRSTSGRSGSGPSSGATGSGSTVPASSSNTVNKTIHQQWFTNCSVSFSNIIITCDFRNHFDNFWCIKY

SEQ ID NO: 195039 - protein, 70 aa, Zea Mays
MMSFHQNGPLLSIVMYQCVIAVAFPLAHGMSSLFKNLCRNFSNNGSSWVLKFRTSVLSSAFGFLTVHVYF

SEQ ID NO: 195040 - protein, 86 aa, Zea Mays
MRIILGRAIKTDQHQQTDRITPSRLQLLVSSLINSLISTSKDFTCVHYELAVFLQIWTPSFAIYIRASLDTLGLECFEGIGEGANP

SEQ ID NO: 195041 - protein, 104 aa, Zea Mays
MKVLFLTNLYMFSMLIRSHVHISDVTKLQFLSFFLIKRLPKMPNFTTDSHTVYQQYSSFVVDDNKMLARGEDGESKPILALTNTGCQRQSTTARPRASIFACLQ

SEQ ID NO: 195042 - protein, 59 aa, Zea Mays
MRNKKQKKKREKERELGLGLTSPTHDTPTRPAGATGADRRAPLCTSSLLARGHLASSRW

SEQ ID NO: 195043 - protein, 138 aa, Zea Mays
MSIGDVCPKESEEPPNAQDQPSSSTQASPPTQNEDEAQVDEGEDQANEPPQDDGNDQGGDANEQDKEDEEPRPPHPRVHQAIQRDHPVDTILGDIQKGVTTRSRVAYFCEHYSFVSSIEPHRVEEALQESDWVVAMQE

SEQ ID NO: 195044 - protein, 97 aa, Zea Mays
MRQTLRDYGYKLTKVPLLCDNESAIRMADNPVEYSRTKHIAIRYHFLRDHQQKGDIEISYINTKDQLADIFTKPLDEQTFNKLRHELNILDSRNFFC

SEQ ID NO: 195045 - protein, 94 aa, Zea Mays
MLCSVRGCAQTQNQQRSVHYSIFLLYITIHNLVIKISYSILQSFVHISLHIPFISTNTHSNLTIFSLYITQGFCCSRYGYMKILCALYIVLYFS

SEQ ID NO: 195046 - protein, 57 aa, Zea Mays
MRQPLNLCYLDVPVFDSYRLKFHNILFFQESRELKQEKICELIIDKCPEKCTSNHSC

SEQ ID NO: 195047 - protein, 109 aa, Zea Mays
MQDACNTPSILGPAVLTPGSSLGSYIVSIDKHGSFVCTLSSLMRTRENFSVGHPSQIASSQAHLTWRFFRDRLPKKKMRLIDMSTLLIILRLGPEYHHPLGPGYYDPPP

SEQ ID NO: 195048 - protein, 137 aa, Zea Mays
MDPKGKGIVINDKEKESFVNEPKDDKSNDSGSGHKRKDGKKKKTRRIKEARYVDDALNGPINEHQPLALKATRSKEALPSKVAQIEAAGLNDEEMALIIKRFKTVLKGHKGQPSKTKTKGKRSCFKCGKIGHFIANC

SEQ ID NO: 195049 - protein, 93 aa, Zea Mays
MQLPLHSAQPVFSIHGVRRMSERWWMTSHEFSTLVSGHLRHLRLRWGLLLLLLNGGQSLTDGLDCLSLHQKHLLDGHRGRGRQVLLLGHLILL

SEQ ID NO: 195050 - protein, 60 aa, Zea Mays
MRGVRSTLELKHSSKNSESPNDSEGGEGYRFLFFLGPTISSKRGRRVFLEYWERKKNSKQ

SEQ ID NO: 195051 - protein, 120 aa, Zea Mays
MSQKQKAVATSSCEAEYMASAAAAAQAVWLQKLLEEVVGIPAKPTIILMDNTAAIALAKNPVHHDRSKHIDVKYHFTRECVERGDIELVQVGTDEQLADTFTKALSRLRFQEIRRKIGVV

SEQ ID NO: 195052 - protein, 148 aa, Zea Mays
MSGDHAKREMETGDKPATSHGKAPSGESRNKGKEKESPSHKSRRRGDKHKKMRKVVYYETDISSPSTSGSDAPSVTSKRHERKKFSKIPLRYPRIPKHTPLLSVPLGKPPTFDGEDYARWNDLMRFHLTSLHKSIWDVVEFGVQVPSV

SEQ ID NO: 195053 - protein, 53 aa, Zea Mays
MRNFIDLKMVMKPYKTLINISRNIIRVKAFRNHTPDNLSNRASKEKVINSFIL

SEQ ID NO: 195054 - protein, 69 aa, Zea Mays
MAGASCWAAMAAELERRGHSTMPRRWEEKGSPCIHGGGSVQPPWEGVRLGGGGRGCWSSGVVAVELGGR

SEQ ID NO: 195055 - protein, 65 aa, Zea Mays
MICLNQFTSERNQQHEHIYTPCTTSRTKFQLNSSLHACVAKLTMMAASAQQMTYSIHNIYTNVSH

SEQ ID NO: 195056 - protein, 68 aa, Zea Mays
MMRPCRPSPPVDPLLPQPMADRAPAPIADPFFSLFSLRKNHKQGRRRKFCDVLTNRCYLSNTRGYNYP

SEQ ID NO: 195057 - protein, 53 aa, Zea Mays
MNLDKKRKKEKKGKTNLCWAQSSADLPTSLLLASLPLPVVLTVQWGPQVSSLN

SEQ ID NO: 195058 - protein, 121 aa, Zea Mays
MLIYRHQATLLCSVLWSSSVLGWPSSTTSTLPLVQATSMVVEHANHRGLPSLDSLLAGVAWVSLAVNLLQSSAHPGSGHRHQRPTHASWLYLYSSPVSSLISAPPFLAYAAVLFFSGVCAP

SEQ ID NO: 195059 - protein, 102 aa, Zea Mays
MTQKFEMSMMGELNYFLGFQVKQLKDDTFISQTKYAQDLLKRFGMKDAKPAKTPMGTDGHTDLNKGGKSVDQKAYWSMIGSLLYLCASRPDIMLSESRLEGG

SEQ ID NO: 195060 - protein, 102 aa, Zea Mays
MALTSIGCALAPRHIICVVRTWLRHVIAMLHSHLVGPLPLSRTIIAESRIFCMPCRHGSTAMISEPQLRLLRTLRGLILYPDYRATIAPVALVTEAYSLSWP

SEQ ID NO: 195061 - protein, 92 aa, Zea Mays
MPSLQVCKLPPLAKRLPIQLRFFPSRHVLPLRGGTLTRFCNLRARAVVMDVLVRRRPPSPHAPTLVDGTWHWGITNASFFCRGDAISICSDR

SEQ ID NO: 195062 - protein, 75 aa, Zea Mays
MHYFTQNIKRQTQLYDGQSSLINILPLIMSHVNDRLQRILNNQLGKNNLHLTLPNSKTNFAIKLWNIKFSRHNAI

SEQ ID NO: 195063 - protein, 59 aa, Zea Mays
MCRFCAVAAYRCRISPVNLWCGRSRLRGGGGARSLLAGDVTGGEAFFFFFFVTCRVGER

SEQ ID NO: 195064 - protein, 105 aa, Zea Mays
MPSYQTITNPFPMRMIFGLELKSSLMSPNIIVHLMPLLPLVFVILTLARKKEKMNDGDQTMNPPLQKVCLPISIPTCVVWLMKMIAEAQMRMRRKKEVLCISTLA

SEQ ID NO: 195065 - protein, 118 aa, Zea Mays
MRMMRGTIHHVTKEGNRFLPFSSGKVCLSSCWVMDLSRLDFRPGSLFEADVRRRFSSPVCSGSPNSPSAFWLVVSFGRCIFKLDPVSVGHLLQAAFGGFARGFKVLSLADRVFRFTVS

SEQ ID NO: 195066 - protein, 55 aa, Zea Mays
MQTASFGASLYYESTRSIGLFQFFFLRGVAAVLTVPTPHRIVLRPGFAWCGKFWK

SEQ ID NO: 195067 - protein, 61 aa, Zea Mays
MLARGSACVGTSGGDSSPARCRGGTCCLCGDMVVSVTMTSALAGGAATAGTVPGFPLSHSR

SEQ ID NO: 195068 - protein, 51 aa, Zea Mays
MASQPLERRAMREAGFTEQRIPSASNGGRITGHCTPGPPRLRRSFWQTTFF

SEQ ID NO: 195069 - protein, 196 aa, Zea Mays
MPARARVGRARSLEWSHARPARGTWSETGVLGVMVSCQGLGVGFVVSEILSNRLLLPRPLLLHGFFPARSSALCSGSSQPRPLPSRFLCARYSLQFSLLVSHFPVLYTHLPVSISLDLLLLVSHGRALRACSPWRLPPSSLVVGFLIPRRACSVSCAWPSEFASHHDIPNLSRHAPVVDRLTVVFPVPLVGQPHRD

SEQ ID NO: 195070 - protein, 73 aa, Zea Mays
MPPCRIGRPRRPSSSAILLGLCLVTGLSSAQSVLYWWRQPVKNRCLGCQGGVLWHPKWIWWHAPHLIWAIRRR

SEQ ID NO: 195071 - protein, 57 aa, Zea Mays
MSDDLVVPVHFEVGQEFCFRLLDHPLFVLLKLELLVSRQGFPSRLYDVAWRNIRALP

SEQ ID NO: 195072 - protein, 91 aa, Zea Mays
MAHPLRRPPWRRLMTQMTPRGCRRQSEPTSDPLSVWGSGGWMTQRGRTPRTLRRRVAAAATTTTAVATTTSTVMRAMETTVTPVARRHRRR

SEQ ID NO: 195073 - protein, 117 aa, Zea Mays
MNAVGEVRRCKGRTRSSAASVGRRRIGRRGLGGFAVGVGCPASVLGFWSGSACGTRLGRRGASVSLGVGRSLGLQRAVGHGARLPGASVGAGGSLDRGAGAVGRCSRVASGRGSAGR

SEQ ID NO: 195074 - protein, 71 aa, Zea Mays
MEETSKQLLSILDHPHSVFAHPFVILSDSSSVLVRNCEIVFELESWPCVCAFRCGFVCVAPLPYSVLLCES

SEQ ID NO: 195075 - protein, 57 aa, Zea Mays
MFLLGADLFFFFFGPAHGAYLILCHSYGRSSHQISLSDPARFQERKKERVMISGEKV

SEQ ID NO: 195076 - protein, 51 aa, Zea Mays
MHAWYHMLAWTMFFFKYLDPTGSDGATTPKATVYILQVQLLGSKLLKVCCP

SEQ ID NO: 195077 - protein, 57 aa, Zea Mays
MKSYSNREVICILITCSNTSYNINIYVLNESNILVGALCLSKAHHITFLGISIIILL

SEQ ID NO: 195078 - protein, 78 aa, Zea Mays
MNWRGLVWIGRDFDLLGIKIDSILFNPDGLGLSRTCPYLAHSHLHHQTQGANIISSSNYSNSSYSARLIGTWIGSKLL

SEQ ID NO: 195079 - protein, 75 aa, Zea Mays
MLALEWPSPPLDPVSLARAFSSTSRDAIRFSTDISCLLCFRAVAKFLHVEGNFAIMHPATNRSGRTILRWSSSLA

SEQ ID NO: 195080 - protein, 434 aa, Zea Mays
MARSREVAGWGTVAGGGGAAAVEKAVRCLGRGVDMTGDLRLKHCKDAGGCLVVRSAGRKAAEKAVVPGFGVVADLPADVRCGKGDRIRFRSDVLEFNKMSEAFNHRNSLAGKIPSGLFNSCFDLESGSWAEDAAATKCLAFDGYFISLLDLRLDCRPLALADHVVGDVPAAWDPAAIASFIERYGTHIVVGLGLGGQDVVYVKQDRSSPLSPSEIKEHLDRLGDQLFTGTCTLPPSNRKLREHKSKVPEAFNVFDAQVTQQGLQGIMATPVSCKEGVTVIHSKRGGNAAASDHSEWLLTVPATPDAISFKLVPITSLLKGVSGVGFLSHAINLYLRYKPPTGELRYFLDFQHHRLWAPVLGDLPLGPCSNRQAPSPALNFSLVGSKLYVSSSEVVVPRLPVTGMRLHLEGKKNNRHPPAASVQHPSVHRRNTGQ

SEQ ID NO: 195081 - protein, 117 aa, Zea Mays
MCNHVGRLEVCRCRAQGRWSTAEVKVMWARVDRLGAVKDVCWILANETEQRGDHSWWLTPGTPNRARIWWSGPYCRRGRGLAGQVSRTWRTRPRCDTHDGLAVWVSKPPNATHCGFC

SEQ ID NO: 195082 - protein, 215 aa, Zea Mays
MAMAGRQRAPEAASSYLPPVTAAALLLWVFISCAHVEASVDFANLTALQKHAEFFDRNKDGIITASELFEGYVAIGCDAEYARVTAASISAGADAPLPHTSIYVEYIHRAMHGSDTGAYDAEGRFVPAKFEEIFTKHAKVRPDALTFEEIEEMILANRDPLDPESWAAPEGEWGLTYKLASDKQGFLHKDSARGIYDGSVFYKLEEQRTSAASEM

SEQ ID NO: 195083 - protein, 212 aa, Zea Mays
MAMAGRQRAPEAASSYLPPVTAAALLLWVFISCAHVEASVDFANLTALQKHAEFFDRNKDGYVAIGCDAEYARVTAASISAGVGPITSPADAPLPHTSIYVEYIHRAMHGSDTGAYDAEGRFVPAKFEEIFTKHAKVRPDALTFEEIEEMILANRDPLDPESWAAPEGEWGLTYKLASDKQGFLHKDSARGIYDGSVFYKLEEQRTSAASEM

SEQ ID NO: 195084 - protein, 339 aa, Zea Mays
MSKPVAAAMVPVVALMMVLCACTMPARGGDDYTAFVYAGCSQGRYDPGSQYAADVDTALSSLANSAGFTAYANYTSPSPSGLEGVYQCRSDLPAAVCGVCVKSAVSKLASLCSAAAGAAVQLRACFARYGNDSFLGKQDTTVLFKKCGGGDGDDAGVAAMRDAALGALVAAGGGGGDGGSYRAGAAGYVQAMSQCVGDLGAKACTDCVSAAASQLKAGCGYASAAEVYLGKCYARFWSNAGGGGVPVGGGAGTGGGGVGGGAAGNGYAYGGFVPNTYGQHDESGKTLAIIIGLVAAVAIVIVFLSFLRRAGAVGGKMQKLSARGIGHHQRTGSVGAGSL

SEQ ID NO: 195085 - protein, 169 aa, Zea Mays
MDMSDVFLNNCANFPFIIFVVGGQEPGGVRAGAVHAGHAAGPLPGLLDGAMAESGDGRSAATRWTWRSSGRGAPCGMRWTCSSSMSLATARCCPYIFTDIFNNDLSGPYAFLEPPFVQRSLLYKIQARRKNRLIGLEASDTLSSHMSHEMDLTRNQTPLNRSHPRRQQE

SEQ ID NO: 195086 - protein, 185 aa, Zea Mays
MDMSDVFLNNCANFPFIIFVVGGQEPGGVRAGAVHAGHAAGPLPGLLDGAMAESGDGRSAATRWTWRSSGRGAPCGMRWTCSSSMSLATARCCPYIFTDIFNNDLSGPYAFLEPPFVQRSLLYKIQSPTSPTGVTSSPCSTPCRRRAGAAAATAAVLGRRMPPRSPTPSTRFARPASLSFIATPM

SEQ ID NO: 195087 - protein, 196 aa, Zea Mays
MVQLECSTHPLRTRPCPPGVGVRDSVTVLELIQWRRNRLRSLKVWLKADGQVDRLLHAQGKRKELEQTVNSFSDFSLSGPVAKSHKLEPGGVRAGAVHAGHAAGPLPGLLDGAMAESGDGRSAATRWTWRSSGRGAPCGMRWTCSSSMSLATARCCPYIFTDIFNNDLSGPYAFLEPPFVQRSLLYKIQINRSRSF

SEQ ID NO: 195088 - protein, 167 aa, Zea Mays
MIFILIISTSLVLHLIGIQTRISVNMSVNFCFAFFCIVQHTLFLAFGSCWSHVGHSGAKVPDCGGTGLCSRCKGECFVFKQLSKETATRSHKAAKNMATGYTSGLSTNGPTATSTPPPACLHKMAGVLPTINTHVKRSWDVHVCGSTTRASVGTLILVWFLHSNSSV

SEQ ID NO: 195089 - protein, 324 aa, Zea Mays
MDMSDVFLNNCANFPFIIFVVGGQEPGGVRAGAVHAGHAAGPLPGLLDGAMAESGDGRSAATRWTWRSSGRGAPCGMRWTCSSSMSLATARCCPYIFTDIFNNDLSGPYAFLEDSDNCITFCKYKYTNTEYLSLYVLLARPSSNISLEGSGSGGCDGRGAGEEDASALANSLDALCKACKPEVRVLTPSLVRNLFLLQRVPEHHSMPLSTYFIGSSFNWNSNKDFGKYECQLLLCILLYSTTHIVSCIWKLLVSCRTQWRQGSRLWRDWALQPLQRRVLRLQATLEGDGHQVTQGRQEHGHRIHFGAVHQWTYCNKYSSTRVPA

SEQ ID NO: 195090 - protein, 147 aa, Zea Mays
MDVAVFGARCTLRYEMDLQFFNVTGNSKMLSLFKARWHPSVDIGKSCVNGCAEMMENNREHRIALVAAGLAARITSDIFNNDLSGPYAFLEPPFVQRSLLYKIQARRKNRLIGLEASDTLSSHMSHEMDLTRNQTPLNRSHPRRQQE

SEQ ID NO: 195091 - protein, 111 aa, Zea Mays
MPREESGTARQSSVGGRGRMEQQPHMFCSNDTVAPRFQTVAGLGSAAAAKESASSSSNSRRRRPPGHTRPPRTWPPDTLRGCPPMDLLQQVLLHPRACIKWQGFYQQSTHM

SEQ ID NO: 195092 - protein, 124 aa, Zea Mays
MSEHQANSLCTCLLYAKEISFFACVSCLLTCCIFNFCVLCFVIWEHLHHCVIRARHLHHCVIDDLSWSEWSFCTYSHAREFMHCPPFLDTLSVKKCYTVAFYLPCDFDGALLLCFFDICRSFEH

SEQ ID NO: 195093 - protein, 104 aa, Zea Mays
MPREESGTARQSSVGGRGRMEQQPHMFCSNLLVSCRTQWRQGSRLWRDWALQPLQRRVLRLQATLEGDGHQVTQGRQEHGHRIHFGAVHQWTYCNKYSSTRVPA

SEQ ID NO: 195094 - protein, 601 aa, Zea Mays
MSFKFVCLYNLRLSVLSYRIVMSGMDCLQKGCGLVFLKMTMKHSTSGTMRLVCQRSGYRGWVQKITFGLVAQLDLVDLALKFIMISILREDHQMCCLQDLGDDSRFIEFYNLVFMQYNKKDDGSLEPLKQMNIDTGMGLERMARILQKVPNNYETDLIFPIIEKAASMAMVSYAKADDATKTNLKIIGDHMRAVVYLISDGVIPSNIGRGYVVRRLIRRVVRMGRLIGIRGDGHGNSEGAFLPSLAEVVISLSTEIDSDVESRRRSILGELQREEMRFVQTLERGEKLLAELLDEALLNAGNNGNKPSLSGKNVFLLYDTYGFPVEITAEIASEQGVTVDIEGFDIEMENQRKQSQAAHNVVRLSVGNETEIVKNIPDTEFLGYDSLSASAVIKGLLVNGNPVNEVSQGSEVEILLDRTPFYAESGGQVGDNGFLYVNGGEDRRQTTVIEINDVQKSLGNIFVHKGMIKQGSVEVGKEVDASVDAKLRQGAKAHHTATHLLQSALKSVVGSETSQAGSLVAFDHLRFDFNFHRPLSEEELTTIEALINQWIGNAAHVETKVMALQDAKNAGAIAMFGEKYGEQSRRGSRDLIGTLWWDSRQ

SEQ ID NO: 195095 - protein, 959 aa, Zea Mays
MEVVDLSPTSRPLSPLLSTAPARRLRLLPPRCVVGLRASPRTRASVEPATQELGTADAVEWSGDAIRRRFLEFYAARGHKILPSSSLVPGDPTVFLTIAGMLQFKPIFLGKEPRRVPRATTSQKCIRTNDIENVGRTARHQTFFEMLGNFSFGDYFKKEATTWAWELATKEYGLPAERLWISVFEDDNEAFNIWHNEVGVPKERIQRMGAEDNFWTSGATGPCGPCSEIYYDFYPERGSSDVDLGDDSRFIEFYNLVFMQYNKKDDGSLEPLKQMNIDTGMGLERMARILQKVPNNYETDLIFPIIEKAASMAMVSYAKADDATKTNLKIIGDHMRAVVYLISDGVIPSNIGRGYVVRRLIRRVVRMGRLIGIRGDGHGNSEGAFLPSLAEVVISLSTEIDSDVESRRRSILGELQREEMRFVQTLERGEKLLAELLDEALLNAGNNGNKPSLSGKNVFLLYDTYGFPVEITAEIASEQGVTVDIEGFDIEMENQRKQSQAAHNVVRLSVGNETEIVKNIPDTEFLGYDSLSASAVIKGLLVNGNPVNEVSQGSEVEILLDRTPFYAESGGQVGDNGFLYVNGGEDRRQTTVIEINDVQKSLGNIFVHKGMIKQGSVEVGKEVDASVDAKLRQGAKAHHTATHLLQSALKSVVGSETSQAGSLVAFDHLRFDFNFHRPLSEEELTTIEALINQWIGNAAHVETKVMALQDAKNAGAIAMFGEKYGEQVRVVEVPGISLELCGGTHVSNTAEIRGFKIISEQGIASGIRRIEAVAGDAFVDYVCARDNYMRRLCLSLKVKAEDVNSRVETILEELRATRNVASSLRSKIAVLKAASLASRATTVEPQNVRIVVENMGDVDADGLKSAAEYLIDTLKDPAAVILGSSPGDGKVSLVAAFSPAIVEMGLQAGKFVSGIAKLCGGGGGGKPNFAQAGGRKPENLPDALEKARAEIVARVSGSS

SEQ ID NO: 195096 - protein, 960 aa, Zea Mays
MEVVDLSPTSRPLSPLLSTAPARRLRLLPPRCVVGLRASPRTRASVEPATQELGTADAVEWSGDAIRRRFLEFYAARGHKILPSSSLVPGDPTVFLTIAGMLQFKPIFLGKEPRRVPRATTSQKCIRTNDIENVGRTARHQTFFEMLGNFSFGDYFKKEATTWAWELATKEYGLPAERLWISVFEDDNEAFNIWHNEVGVPKERIQRMGAEDNFWTSGATGPCGPCSEIYYDFYPERGSSDVVDLGDDSRFIEFYNLVFMQYNKKDDGSLEPLKQMNIDTGMGLERMARILQKVPNNYETDLIFPIIEKAASMAMVSYAKADDATKTNLKIIGDHMRAVVYLISDGVIPSNIGRGYVVRRLIRRVVRMGRLIGIRGDGHGNSEGAFLPSLAEVVISLSTEIDSDVESRRRSILGELQREEMRFVQTLERGEKLLAELLDEALLNAGNNGNKPSLSGKNVFLLYDTYGFPVEITAEIASEQGVTVDIEGFDIEMENQRKQSQAAHNVVRLSVGNETEIVKNIPDTEFLGYDSLSASAVIKGLLVNGNPVNEVSQGSEVEILLDRTPFYAESGGQVGDNGFLYVNGGEDRRQTTVIEINDVQKSLGNIFVHKGMIKQGSVEVGKEVDASVDAKLRQGAKAHHTATHLLQSALKSVVGSETSQAGSLVAFDHLRFDFNFHRPLSEEELTTIEALINQWIGNAAHVETKVMALQDAKNAGAIAMFGEKYGEQVRVVEVPGISLELCGGTHVSNTAEIRGFKIISEQGIASGIRRIEAVAGDAFVDYVCARDNYMRRLCLSLKVKAEDVNSRVETILEELRATRNVASSLRSKIAVLKAASLASRATTVEPQNVRIVVENMGDVDADGLKSAAEYLIDTLKDPAAVILGSSPGDGKVSLVAAFSPAIVEMGLQAGKFVSGIAKLCGGGGGGKPNFAQAGGRKPENLPDALEKARAEIVARVSGSS

SEQ ID NO: 195097 - protein, 789 aa, Zea Mays
MDCLQKGCGLVFLKMTMKHSTSGTMRLVCQRSGYRGWVQKITFGLVAQLDLVDLALKFIMISILREDHQMCCLQDLGDDSRFIEFYNLVFMQYNKKDDGSLEPLKQMNIDTGMGLERMARILQKVPNNYETDLIFPIIEKAASMAMVSYAKADDATKTNLKIIGDHMRAVVYLISDGVIPSNIGRGYVVRRLIRRVVRMGRLIGIRGDGHGNSEGAFLPSLAEVVISLSTEIDSDVESRRRSILGELQREEMRFVQTLERGEKLLAELLDEALLNAGNNGNKPSLSGKNVFLLYDTYGFPVEITAEIASEQGVTVDIEGFDIEMENQRKQSQAAHNVVRLSVGNETEIVKNIPDTEFLGYDSLSASAVIKGLLVNGNPVNEVSQGSEVEILLDRTPFYAESGGQVGDNGFLYVNGGEDRRQTTVIEINDVQKSLGNIFVHKGMIKQGSVEVGKEVDASVDAKLRQGAKAHHTATHLLQSALKSVVGSETSQAGSLVAFDHLRFDFNFHRPLSEEELTTIEALINQWIGNAAHVETKVMALQDAKNAGAIAMFGEKYGEQVRVVEVPGISLELCGGTHVSNTAEIRGFKIISEQGIASGIRRIEAVAGDAFVDYVCARDNYMRRLCLSLKAEDVNSRVETILEELRATRNVASSLRSKIAVLKAASLASRATTVEPQNVRIVVENMGDVDADGLKSAAEYLIDTLKDPAAVILGSSPGDGKVSLVAAFSPAIVEMGLQAGKFVSGIAKLCGGGGGGKPNFAQAGGRKPENLPDALEKARAEIVARVSGSS

SEQ ID NO: 195098 - protein, 625 aa, Zea Mays
MRAVVYLISDGVIPSNIGRGYVVRRLIRRVVRMGRLIGIRGDGHGNSEGAFLPSLAEVVISLSTEIDSDVESRRRSILGELQREEMRFVQTLERGEKLLAELLDEALLNAGNNGNKPSLSGKNVFLLYDTYGFPVEITAEIASEQGVTVDIEGFDIEMENQRKQSQAAHNVVRLSVGNETEIVKNIPDTEFLGYDSLSASAVIKGLLVNGNPVNEVSQGSEVEILLDRTPFYAESGGQVGDNGFLYVNGGEDRRQTTVIEINDVQKSLGNIFVHKGMIKQGSVEVGKEVDASVDAKLRQGAKAHHTATHLLQSALKSVVGSETSQAGSLVAFDHLRFDFNFHRPLSEEELTTIEALINQWIGNAAHVETKVMALQDAKNAGAIAMFGEKYGEQVRVVEVPGISLELCGGTHVSNTAEIRGFKIISEQGIASGIRRIEAVAGDAFVDYVCARDNYMRRLCLSLKVKAEDVNSRVETILEELRATRNVASSLRSKIAVLKAASLASRATTVEPQNVRIVVENMGDVDADGLKSAAEYLIDTLKDPAAVILGSSPGDGKVSLVAAFSPAIVEMGLQAGKFVSGIAKLCGGGGGGKPNFAQAGGRKPENLPDALEKARAEIVARVSGSS

SEQ ID NO: 195099 - protein, 967 aa, Zea Mays
MEVVDLSPTSRPLSPLLSTAPARRLRLLPPRCVVGLRASPRTRGLGCVGGSLSRRHSFCKNGFFATSSSSASVEPATQELGTADAVEWSGDAIRRRFLEFYAARGHKILPSSSLVPGDPTVFLTIAGMLQFKPIFLGKEPRRVPRATTSQKCIRTNDIENVGRTARHQTFFEMLGNFSFGDYFKKEATTWAWELATKEYGLPAERLWISVFEDDNEAFNIWHNEVGVPKERIQRMGAEDNFWTSGATGPCGPCSEIYYDFYPERGSSDVDLGDDSRFIEFYNLVFMQYNKKDDGSLEPLKQMNIDTGMGLERMARILQKLVSRGPVLLRWLAEVQRGRRVRQLGDGRGADALGRRRRREELHDLDVPEHPVLCGGAVGHVVGDGVPLGREPPVGAEEVARLGAEARLEAVPQGLPVHRCVGQARRSGRRLRHLPPRHPQQERLPRGGEVPNNYETDLIFPIIEKAASMAMVSYAKADDATKTNLKIIGDHMRAVVYLISDGVIPSNIGRGYVVRRLIRRVVRMGRLIGIRGDGHGNSEGAFLPSLAEVVISLSTEIDSDVESRRRSILGELQREEMRFVQTLERGEKLLAELLDEALLNAGNNGNKPSLSGKNVFLLYDTYGFPVEITAEIASEQGVTVDIEGFDIEMENQRKQSQAAHNVVRLSVGNETEIVKNIPDTEFLGYDSLSASAVIKGLLVNGNPVNEVSQGSEVEILLDRTPFYAESGGQVGDNGFLYVNGGEDRRQTTVIEINDVQKSLGNIFVHKGMIKQGSVEVGKEVDASVDAKLRQGAKAHHTATHLLQSALKSVVGSETSQAGSLVAFDHLRFDFNFHRPLSEEELTTIEALINQWIGNAAHVETKVMALQDAKNAGAIAMFGEKYGEQVRVVEVPGISLELCGGTHVSNTAEIRGFKIISEQGIASGIRRIEAVAGDAFVDYVCARDNYMRRLCLSLKVCGMHAVKSLYVTL

SEQ ID NO: 195100 - protein, 585 aa, Zea Mays
MEHDLHIGMDCLQKGCGLVFLKMTMKHSTSGTMRLVCQRSGYRGWVQKITFGLVAQLDLVDLALKFIMISILREDHQMCCLQDLGDDSRFIEFYNLVFMQYNKKDDGSLEPLKQMNIDTGMGLERMARILQKVPNNYETDLIFPIIEKAASMAMVSYAKADDATKTNLKIIGDHMRAVVYLISDGVIPSNIGRGYVVRRLIRRVVRMGRLIGIRGDGHGNSEGAFLPSLAEVVISLSTEIDSDVESRRRSILGELQREEMRFVQTLERGEKLLAELLDEALLNAGNNGNKPSLSGKNVFLLYDTYGFPVEITAEIASEQGVTVDIEGFDIEMENQRKQSQAAHNVVRLSVGNETEIVKNIPDTEFLGYDSLSASAVIKGLLVNGNPVNEVSQGSEVEILLDRTPFYAESGGQVGDNGFLYVNGGEDRRQTTVIEINDVQKSLGNIFVHKGMIKQGSVEVGKEVDASVDAKLRQGAKAHHTATHLLQSALKSVVGSETSQAGSLVAFDHLRFDFNFHRPLSEEELTTIEALINQWIGNAAHVETKVMALQDAKNAGAIAMFGEKYGEQSRRGSRDLIGTLWWDSRQ

SEQ ID NO: 195101 - protein, 794 aa, Zea Mays
MSGMDCLQKGCGLVFLKMTMKHSTSGTMRLVCQRSGYRGWVQKITFGLVAQLDLVDLALKFIMISILREDHQMCCLQDLGDDSRFIEFYNLVFMQYNKKDDGSLEPLKQMNIDTGMGLERMARILQKVPNNYETDLIFPIIEKAASMAMVSYAKADDATKTNLKIIGDHMRAVVYLISDGVIPSNIGRGYVVRRLIRRVVRMGRLIGIRGDGHGNSEGAFLPSLAEVVISLSTEIDSDVESRRRSILGELQREEMRFVQTLERGEKLLAELLDEALLNAGNNGNKPSLSGKNVFLLYDTYGFPVEITAEIASEQGVTVDIEGFDIEMENQRKQSQAAHNVVRLSVGNETEIVKNIPDTEFLGYDSLSASAVIKGLLVNGNPVNEVSQGSEVEILLDRTPFYAESGGQVGDNGFLYVNGGEDRRQTTVIEINDVQKSLGNIFVHKGMIKQGSVEVGKEVDASVDAKLRQGAKAHHTATHLLQSALKSVVGSETSQAGSLVAFDHLRFDFNFHRPLSEEELTTIEALINQWIGNAAHVETKVMALQDAKNAGAIAMFGEKYGEQVRVVEVPGISLELCGGTHVSNTAEIRGFKIISEQGIASGIRRIEAVAGDAFVDYVCARDNYMRRLCLSLKVKAEDVNSRVETILEELRATRNVASSLRSKIAVLKAASLASRATTVEPQNVRIVVENMGDVDADGLKSAAEYLIDTLKDPAAVILGSSPGDGKVSLVAAFSPAIVEMGLQAGKFVSGIAKLCGGGGGGKPNFAQAGGRKPENLPDALEKARAEIVARVSGSS

SEQ ID NO: 195102 - protein, 792 aa, Zea Mays
MSGMDCLQKGCGLVFLKMTMKHSTSGTMRLVCQRSGYRGWVQKITFGLVAQLDLVDLALKFIMISILREDHQMCCLQDLGDDSRFIEFYNLVFMQYNKKDDGSLEPLKQMNIDTGMGLERMARILQKVPNNYETDLIFPIIEKAASMAMVSYAKADDATKTNLKIIGDHMRAVVYLISDGVIPSNIGRGYVVRRLIRRVVRMGRLIGIRGDGHGNSEGAFLPSLAEVVISLSTEIDSDVESRRRSILGELQREEMRFVQTLERGEKLLAELLDEALLNAGNNGNKPSLSGKNVFLLYDTYGFPVEITAEIASEQGVTVDIEGFDIEMENQRKQSQAAHNVVRLSVGNETEIVKNIPDTEFLGYDSLSASAVIKGLLVNGNPVNEVSQGSEVEILLDRTPFYAESGGQVGDNGFLYVNGGEDRRQTTVIEINDVQKSLGNIFVHKGMIKQGSVEVGKEVDASVDAKLRQGAKAHHTATHLLQSALKSVVGSETSQAGSLVAFDHLRFDFNFHRPLSEEELTTIEALINQWIGNAAHVETKVMALQDAKNAGAIAMFGEKYGEQVRVVEVPGISLELCGGTHVSNTAEIRGFKIISEQGIASGIRRIEAVAGDAFVDYVCARDNYMRRLCLSLKAEDVNSRVETILEELRATRNVASSLRSKIAVLKAASLASRATTVEPQNVRIVVENMGDVDADGLKSAAEYLIDTLKDPAAVILGSSPGDGKVSLVAAFSPAIVEMGLQAGKFVSGIAKLCGGGGGGKPNFAQAGGRKPENLPDALEKARAEIVARVSGSS

SEQ ID NO: 195103 - protein, 237 aa, Zea Mays
MAAAILRRLVPTAASQLVAPLPLLARGVSDSADAGTVTFDLYGDGAANQGQLFEALNMAALWKLPVILVCENNHYGMGTAEWRASKSPAYYKRGDYVPGLKVDGMDVLAVKQACKFAKEHALENGPIILEMDTYRYHGHSMSDPGSTYRTRDEIAGIRQERDPIERVRKLMLVHEFATAQELKDMEKEIRKQVDAAIAKAKECPLPDPSELFTNVYVNDCGLESFGVDRKEVRTVLP

SEQ ID NO: 195104 - protein, 52 aa, Zea Mays
MVLWTPGYNFLCSSSYHNVQPRFCQVLMSCRCFVFCSTATLPQIPFLSSAPT

SEQ ID NO: 195105 - protein, 520 aa, Zea Mays
MLFTPIAELDPRSTNAAIRVRIIRKWEFRGATNDGPLRHVNLILADEQGTTIHAEIQAALVADKDSLIQIDKVYELKRFRVAPSRNYYKPVDNSMMIQFTLYTQAKVVKDPPPNFPRYAYKLTSFEDISDNVDNKTYLIDVLGILTEIGSLHHVGYNNSNIIRDIFLKDINNASTKVTLWGHQASSFSVDNICDENDNKPVVILFVGCLAKRFKGEAYLSATAACTWYFNPDIPEAQMYYNKLLNTKLHMIRPQATAEELQASQTPNIEDKTIEELLQLDPDMFPEQGFRCTVTISRLVQNGRWWFPSCIKCNKSSSQTSTGYQCTSCNGTETEFRYKLSFIATDGTSEAEFFCFDTIARRIVGKSCQTLFSTSDVSRGPPPDLAAIVSLKFTLAVTINMSAFCVTNQIFSILSVLASHGRQASIPCATQNLSQQQMFTQESTVDVITTQESPATSFAKLSTSTKQENVARRKLAYSETLHDTNVDEQIPDEVNKDSLASPPKKIKTTQLGSTHPDNLNH

SEQ ID NO: 195106 - protein, 91 aa, Zea Mays
MAPREHHQPQEEEEEDTAGVVKLISAEGFEFVVDKKAAMVSNTLRNMLTSPGGFSETRQGEVRFPEIPTNILEKICQYFYWSLHYSRVLSI

SEQ ID NO: 195107 - protein, 733 aa, Zea Mays
MEAMEELSELAESMRQAASLLADDDPSDAAAPRRPTTFLNAVALGNVSSGKSAVLNSLIGHPVLPTGENGATRAPIVVDLQRDPGLSSKSIVLQIDSKSQQVSASALRHSLQDRLSKGTSGGSGRGRADEIYLKLRTSTAPSLKLIDLPGIDQRAVDDSMINEYAGHNDAILLVVIPAMQAADVASSRALRLAKDIDSDGTRTVGVISKVDQADGDAKVIACVQALLSNKGPKNLPEIDWVALIGQSVAIASAQSAGSENSLETAWRAEAESLKNILTGAPQNKLGRIALVDTIAKQIRKRMKVRVPNLLSGLQGKSQMVQDELARLGESMVQSPEGTRAVALELCREFEDKFLAHITSGEGSGWKIVASFEGKFPDRIKQLPLDRHFDLNNVKRIVLEADGYQPYLISPEKGLKSLIKLVLEMAKEPSRLCVEEVHRVLLDIVNASANATPGLGRYPPFKREVVAIASNALDTFKNDAKKMVVALVDMERAFVPPQHFIRLVQRRMERQRREDELRNRSSKKTQEAEQSTSKRAFSPQTDAEQGGGSLKSMKDKSGQQDKDAKEGSNLQVAGPAGEITAGYLLKKSAKTNGWSKRWFVLNEKSGKLGYTEKQEERHFRGVITLEECNLEEVEEEEPSKSSKDSKKANGSEKPPSLVFKITNRVAYKTVLKAHSAVLLKAESMPDKVEWVNKIKAVIQSKGGSFKGPSTEGGSMKQSNSDGALVPLYVLDVPI

SEQ ID NO: 195108 - protein, 490 aa, Zea Mays
MAKEPSRLCVEEVHRVLLDIVNASANATPGLGRYPPFKREVVAIASNALDTFKNDAKKMVVALVDMERAFVPPQHFIRLVQRRMERQRREDELRNRSSKKTQEAEQSTSKRAFSPQTDAEQGGGSLKSMKDKSGQQDKDAKEGSNLQVAGPAGEITAGYLLKKSAKTNGWSKRWFVLNEKSGKLGYTEKQEERHFRGVITLEECNLEEVEEEEPSKSSKDSKKANGSEKPPSLVFKITNRVAYKTVLKAHSAVLLKAESMPDKVEWVNKIKAVIQSKGGSFKGPSTEGGSMKQSNSDGALDAMARRPADPEEELRWMSQEVRGYVEAVLNSLAANVPKAIVLCQVEKAKEDMLNQLYSSISGQSNAKIEELLQEDHNAKRRREKYQKQSSLLSKLTRQLSIHDNRASVSSYSNDSTEVESPRTPSRSGEDWRSAFDSSSNGPVATSTNSESRSRSADGRSRRYENGDVSSGANSGSRRTPNRLPPAPPKY

SEQ ID NO: 195109 - protein, 319 aa, Zea Mays
MEAMEELSELAESMRQAASLLADDDPSDAAAPRRPTTFLNAVALGNVSSGKSAVLNSLIGHPVLPTGENGATRAPIVVDLQRDPGLSSKSIVLQIDSKSQQVSASALRHSLQDRLSKGTSGGSGRGRADEIYLKLRTSTAPSLKLIDLPGIDQRAVDDSMINEYAGHNDAILLVVIPAMQAADVASSRALRLAKDIDSDGTRTVGVISKVDQADGDAKVIACVQALLSNKGPKNLPEIDWVALIGQSVAIASAQSAGSENSLETAWRAEAESLKNILTGAPQNKLGRIALVDTIAKQIRKRMKVRVPNLLSGYKCYIVP

SEQ ID NO: 195110 - protein, 612 aa, Zea Mays
MKVRVPNLLSGLQGKSQMVQDELARLGESMVQSPEGTRAVALELCREFEDKFLAHITSGEGSGWKIVASFEGKFPDRIKQLPLDRHFDLNNVKRIVLEADGYQPYLISPEKGLKSLIKLVLEMAKEPSRLCVEEVHRVLLDIVNASANATPGLGRYPPFKREVVAIASNALDTFKNDAKKMVVALVDMERAFVPPQHFIRLVQRRMERQRREDELRNRSSKKTQEAEQSTSKRAFSPQTDAEQGGGSLKSMKDKSGQQDKDAKEGSNLQVAGPAGEITAGYLLKKSAKTNGWSKRWFVLNEKSGKLGYTEKQEERHFRGVITLEECNLEEVEEEEPSKSSKDSKKANGSEKPPSLVFKITNRVAYKTVLKAHSAVLLKAESMPDKVEWVNKIKAVIQSKGGSFKGPSTEGGSMKQSNSDGALDAMARRPADPEEELRWMSQEVRGYVEAVLNSLAANVPKAIVLCQVEKAKEDMLNQLYSSISGQSNAKIEELLQEDHNAKRRREKYQKQSSLLSKLTRQLSIHDNRASVSSYSNDSTEVESPRTPSRSGEDWRSAFDSSSNGPVATSTNSESRSRSADGRSRRYENGDVSSGANSGSRRTPNRLPPAPPKY

SEQ ID NO: 195111 - protein, 754 aa, Zea Mays
MINEYAGHNDAILLVVIPAMQAADVASSRALRLAKDIDSDGTRTVGVISKVDQADGDAKVIACVQALLSNKGPKNLPEIDWVALIGQSVAIASAQSAGSENSLETAWRAEAESLKNILTGAPQNKLGRIALVDTIAKQIRKRMKVRVPNLLSGLQGKSQMVQDELARLGESMVQSPEGTRAVALELCREFEDKFLAHITSGEGSGWKIVASFEGKFPDRIKQLPLDRHFDLNNVKRIVLEADGYQPYLISPEKGLKSLIKLVLEMAKEPSRLCVEEVHRVLLDIVNASANATPGLGRYPPFKREVVAIASNALDTFKNDAKKMVVALVDMERAFVPPQHFIRLVQRRMERQRREDELRNRSSKKTQEAEQSTSKRAFSPQTDAEQGGGSLKSMKDKSGQQDKDAKEGSNLQVAGPAGEITAGYLLKKSAKTNGWSKRWFVLNEKSGKLGYTEKQEERHFRGVITLEECNLEEVEEEEPSKSSKDSKKANGSEKPPSLVFKITNRVAYKTVLKAHSAVLLKAESMPDKVEWVNKIKAVIQSKGGSFKGPSTEGGSMKQSNSDGALDAMARRPADPEEELRWMSQEVRGYVEAVLNSLAANVPKAIVLCQVEKAKEDMLNQLYSSISGQSNAKIEELLQEDHNAKRRREKYQKQSSLLSKLTRQLSIHDNRASVSSYSNDSTEVESPRTPSRSGEDWRSAFDSSSNGPVATSTNSESRSRSADGRSRRYENGDVSSGANSGSRRTPNRLPPAPPKY

SEQ ID NO: 195112 - protein, 751 aa, Zea Mays
MDEAEVQFRNYEKLFDYINSNPHLNAEVKFGTLEDYFSTLRDEAEKINYSRSGQLGSAELQGFPTLSGDFFTYADRNQDYWSGYYVSRPFFKAVDRVLEQTLRASEILGSFVLGYCQKFQCAKLPISFSHKLTAARRNLALFQHHDGVTGTAKDHVVVDYGTRMHTSLQDLQLFMSRAIEVLLGDFHDRSDPTLLSHFEPVQERSKYDVQPVHKVLLPHEGKAQSVVFFNPLEQTRDEIVMVVVSSPDVSVINSNGSCLPSQLSPEWQFVSDEKISTGRHRLYWRASVPPLGLETYYVVTGQDCEKAIPAVVKTYTAAQEFPCPEPYECSKLEGKTVEMKNSNYTLSFDTCHGLLQTVTRHKYGEQTVVGEEIGMYRSHGSGAYLFKPLGEARSIVEEGGYFILTEGPLVQEAHSLPKTEWPKSPLSHSTRMYNCGDSIQDMLIEKEYHVDLVGHAFNDRELIVRYKTDIDNQRIFYSDLNGFQTSRRQTYDKIPLQGNYYPMPSLAFLQDSHGNRFSVHSKQSLGAASLKNGWLEIMLDRRLVQDDGRGLGQGVMDNKPMNVIFHLLMESNVSALPQTHSLLTLQPSLLSHRVGAHLNYPMHAFMSKKPHEKSFKLVQQSFAPLTASLPCDVHIVNLKVPQPLRFSHTEAAEPRFAVLLHRRGWDASYCKRGGLECTTVGEEPVNLFYMFKDLSAVNVKATSLNLLYDDPEMLGYLQQIGDVGQEGNVLISPMEIQAYKLDLQPPSSQEE

SEQ ID NO: 195113 - protein, 266 aa, Zea Mays
MHFFSGSGGARSGALLPTTSKPKAHHHLRSKSSLSAPASSRRRGSLHSASTPYSRRALCLATTAFAVLFILAFLRLGFPSSRSAALSAPVRSRARLSRRPAFRLRDSAAAEAAAAAVANRIGREAPVDITTRDLYDRIEFSDVDGGAWKQGWEVKYRGDEWDTEKLKVFVAPHSHNDPGWIRTVEEYYQRQSRHILDTIVESLSKDSRRKFIWEEMSYLERWWRDAPPKKQEALAKLVRDRQLEIVSGGWVMNDEANSHYFAIIEQ

SEQ ID NO: 195114 - protein, 880 aa, Zea Mays
MGFRNMLIQRTHYEVKKELAMKKNLEYLWRQNWDIEETTDIFVHMMPFYSYDIPHTCGPEPAICCQFDFARMRGFSYESCPWRVDPVETNPDNVKERATKLLDQYRKKSTLYRTNTLLIPLGDDFRYVSMDEAEVQFRNYEKLFDYINSNPHLNAEVKFGTLEDYFSTLRDEAEKINYSRSGQLGSAELQGFPTLSGDFFTYADRNQDYWSGYYVSRPFFKAVDRVLEQTLRASEILGSFVLGYCQKFQCAKLPISFSHKLTAARRNLALFQHHDGVTGTAKDHVVVDYGTRMHTSLQDLQLFMSRAIEVLLGDFHDRSDPTLLSHFEPVQERSKYDVQPVHKVLLPHEGKAQSVVFFNPLEQTRDEIVMVVVSSPDVSVINSNGSCLPSQLSPEWQFVSDEKISTGRHRLYWRASVPPLGLETYYVVTGQDCEKAIPAVVKTYTAAQEFPCPEPYECSKLEGKTVEMKNSNYTLSFDTCHGLLQTVTRHKYGEQTVVGEEIGMYRSHGSGAYLFKPLGEARSIVEEGGYFILTEGPLVQEAHSLPKTEWPKSPLSHSTRMYNCGDSIQDMLIEKEYHVDLVGHAFNDRELIVRYKTDIDNQRIFYSDLNGFQTSRRQTYDKIPLQGNYYPMPSLAFLQDSHGNRFSVHSKQSLGAASLKNGWLEIMLDRRLVQDDGRGLGQGVMDNKPMNVIFHLLMESNVSALPQTHSLLTLQPSLLSHRVGAHLNYPMHAFMSKKPHEKSFKLVQQSFAPLTASLPCDVHIVNLKVPQPLRFSHTEAAEPRFAVLLHRRGWDASYCKRGGLECTTVGEEPVNLFYMFKDLSAVNVKATSLNLLYDDPEMLGYLQQIGDVGQEGNVLISPMEIQAYKLDLQPPSSQEE

SEQ ID NO: 195115 - protein, 447 aa, Zea Mays
MVALTTWALLGTRMPRSTLFFPLYLMSIGQGGYQPSLQAFGADQLSIGDDDDDGDGDTEPGASSTPEEKAKVKSMFFRWWYFGMCSGSLLGNSTMSYVQDNLGWGLGFAIPCAVMALSVAAFFCCTPLYKRHRQVQQPKGTGIRPSPSSVFNFKSVLGASRKISLPPSRSSDDNGDAISELELQEKPLKTDEASESSPDEAAAAPGVAKVILGLLPIWAILLVFAVIFQQPMTFFTKQGMLMNHTIGVGVGSGSLVIPPAMLQSSITVSIILLVPMYDRMIVPLTNAVTGGSDGITVLQRIGVGMVLSVVAMVAAALVESRRLRAEPALLSIFWLLPQYVLLGVSDVFTVVGMQEFFYSQVPASMRTTGIGLYLSVFGVGGFLGASLITLLEMATARPGNARGWFSDDPREARIDNFYWFLALLCFVSFVVFTHLCKYYNDRSASGR

SEQ ID NO: 195116 - protein, 329 aa, Zea Mays
MLKKNKSIRILQFSNNAIEYSGFASIAEALLENNTIRSLYLNGNYGGPLGACSLAQGILGNKSLREIHLHGNGIGNEGIRELMSALSAHKGKITVVDIGNNNISPEGLHPVAEFLKRTKSLQWFSLYMNDISDEGAEKVAEALKDNKTISTIDLGGNNIHSKAVSAVAETLKDNAVLTTLDLSYNPIGSDGVKALCDVLKFHGKIQTLKLGWCQIGMEGAECIADCLKYNTTLSTLDLRANGLGNDGAICLARSFKIINESLTSLDLGFNEIRDDGAFALAQALKANEDLAVTSLNLANNFFTKFGQVALSEARDHVYEMTEREIDIYF

SEQ ID NO: 195117 - protein, 291 aa, Zea Mays
MLPLSKPASGFRPPSSSAPQPPHPMESSLLLSTPRPLKPFHPHHFPTARRRDASFRGKPPPPPPLPPLGRGSRRLGRAVPRASSEAFGDGFRSQDRPPGVSSGGVRRRTYREAQGEAAVPPVAAAARAVAPYVAPVGAVLMLSFVIWKVVQNMIPGKKKDHGSGKHAPSGIMWSFAAGSNLATSTLSAEKESRKNLNKFYKELRTLKTVNMAGRQFGDEGLFFLAESLAYDKSAEEVDFSGNGITAVGIEAFDGVLQINTTLKTLNLSGNDIGDEGAKIYWLKMWVSRNSS

SEQ ID NO: 195118 - protein, 395 aa, Zea Mays
MLPLSKPASGFRPPSSSAPQPPHPMESSLLLSTPRPLKPFHPHHFPTARRRDASFRGKPPPPPPLPPLGRGSRRLGRAVPRASSEAFGDGFRSQDRPPGVSSGGVRRRTYREAQGEAAVPPVAAAARAVAPYVAPVGAVLMLSFVIWKVVQNMIPGKKKDHGSGKHAPSGIMWSFAAGSNLATSTLSAEKESRKNLNKFYKELRTLKTVNMAGRQFGDEGLFFLAESLAYDKSAEEVDFSGNGITAVGIEAFDGVLQINTTLKTLNLSGNDIGDEGAKCLSDILVENVGIQKLLLNSINIGDEGAKALSNMLKKNKSIRILQFSNNAIEYSGFASIAEALLENNTIRSLYLNGNYGGPLGACSLAQGILGNKSLRGRSQLWILATTTLARKVYIL

SEQ ID NO: 195119 - protein, 487 aa, Zea Mays
MIPGKKKDHGSGKHAPSGIMWSFAAGSNLATSTLSAEKESRKNLNKFYKELRTLKTVNMAGRQFGDEGLFFLAESLAYDKSAEEVDFSGNGITAVGIEAFDGVLQINTTLKTLNLSGNDIGDEGAKCLSDILVENVGIQKLLLNSINIGDEGAKALSNMLKKNKSIRILQFSNNAIEYSGFASIAEALLENNTIRSLYLNGNYGGPLGACSLAQGILGNKSLREIHLHGNGIGNEGIRELMSALSAHKGKITVVDIGNNNISPEGLHPVAEFLKRTKSLQWFSLYMNDISDEGAEKVAEALKDNKTISTIDLGGNNIHSKAVSAVAETLKDNAVLTTLDLSYNPIGSDGVKALCDVLKFHGKIQTLKLGWCQIGMEGAECIADCLKYNTTLSTLDLRANGLGNDGAICLARSFKIINESLTSLDLGFNEIRDDGAFALAQALKANEDLAVTSLNLANNFFTKFGQVALSEARDHVYEMTEREIDIYF

SEQ ID NO: 195120 - protein, 373 aa, Zea Mays
MESSLLLSTPRPLKPFHPHHFPTARRRDASFRGKPPPPPPLPPLGRGSRRLGRAVPRASSEAFGDGFRSQDRPPGVSSGGVRRRTYREAQGEAAVPPVAAAARAVAPYVAPVGAVLMLSFVIWKVVQNMIPGKKKDHGSGKHAPSGIMWSFAAGSNLATSTLSAEKESRKNLNKFYKELRTLKTVNMAGRQFGDEGLFFLAESLAYDKSAEEVDFSGNGITAVGIEAFDGVLQINTTLKTLNLSGNDIGDEGAKCLSDILVENVGIQKLLLNSINIGDEGAKALSNMLKKNKSIRILQFSNNAIEYSGFASIAEALLENNTIRSLYLNGNYGGPLGACSLAQGILGNKSLRVLLKTLGYILPVFHIVLMFFFL

SEQ ID NO: 195121 - protein, 348 aa, Zea Mays
MTGKRLHIRTTNVHTTATLRPCSCRLHNLCKCMHAWIWIHAWPQPTAHRGGEGEAAPRGTASTLSSMLACKASPSRPCVVPLVCLLVVAAAVVVVAASAPPAEAAFDDNYVAQWGRDGYHLVVRGTEANVTMDQSSGAGFRSKSTYGSGFFHMRMKLPSGYTAGVVTTFYLISQPEDGSRDEVDLEFLGDKAGVPITLQTNVFVDGRGDREQRTRLWMFVDDTPVRVLRNLTGAVPGYPFPGKQTMLIRASVWDGSDWATDGGRTKVDWSRGPFTAGYRGFDVDGCANNGSDACQSPDLWWNAAEYRNITAEQRAAYEDVKRSYMNYDYCADKARFNSTTVPIECNYA

SEQ ID NO: 195122 - protein, 490 aa, Zea Mays
MQVWKQRLVQMGGRVVEKPTKGELAGVNHVLAMDAKALLRELDAAWLHRFRGSVVSFEWIEECLKSGERLPIHNFAINYEKEFKPKNAVCTGNLVASRPSKRTKMSSEYPGDHQIISGGDREKELAAGGPPGASAHVVEGSSAGKQPNQYASSQSSSADSKDTIGSHGTFGIEEASSGGPSIYAPADLNKNITKIFGRLIDIYRALGDDRRSFSYYKAIPVIEKLPFKIESADQVKGLPTIGKSLKDHINEIVTTGKLSKLEHFENDEKVRTISLFGEVWGVGPATALKLYEKGHRTLDDLQRDESLTNAQRIGLKFFDDIKQRIPRHDVSEMEKLLQDVGTDILPGVTIVCGGSYRRGKASCGDMDIIITHPDGESHVGFLSKFVQRLKEINFLREDLIFSIHSVDGTDSGVDTYFGLCTYPGRELRHRIDLKVYPRNRYACGLLAWTGNDVLNRRFRLLAESKGYVLDDTGLYLATRGSGGKHIRRHS

SEQ ID NO: 195123 - protein, 175 aa, Zea Mays
MQVWKQRLVQMGGRVVEKPTKGELAGVNHVLAMDAKALLRELDAAWLHRFRGSVVSFEWIEECLKSGERLPIHNFAINYEKEFKPKNAVCTGNLVASRPSKRTKMSSEYPGDHQIISGGDREKELAAGGPPGASAHVVEGSSAGKQPNQYASSQSSSADSKDTIGSHGTFGIEIM

SEQ ID NO: 195124 - protein, 340 aa, Zea Mays
MAPKRKPAAAAKSDPDGIFRGVSAFIVPNGVQARRLVVWKQRLVQMGGRVVEKPTKGELAGVNHVLAMDAKALLRELDAAWLHRFRGSVVSFEWIEECLKSGERLPIHNFAINYEKEFKPKNAVCTGNLVASRPSKRTKMSSEYPGDHQIISGGDREKELAAGGPPGASAHVVEGSSAGKQPNQYASSQSSSADSKDTIGSHGTFGIEEASSGGPSIYAPADLNKNITKIFGRLIDIYRALGDDRRSFSYYKAIPVIEKLPFKIESADQVKGLPTIGKSLKDHINEIVTTGKLSKLEHFENDEKFGELVLQLRSSYMRRDTVLLMIYREMSHLQMHRGLD

SEQ ID NO: 195125 - protein, 307 aa, Zea Mays
MAPKRKPAAAAKSDPDGIFRGVSAFIVPNGVQARRLVVWKQRLVQMGGRVVEKPTKGELAGVNHVLAMDAKALLRELDAAWLHRFRGSVVSFEWIEECLKSGERLPIHNFAINYEKEFKPKNAVCTGNLVASRPSKRTKMSSEYPGDHQIISGGDREKELAAGGPPGASAHVVEGSSAGKQPNQYASSQSSSADSKDTIGSHGTFGIEEASSGGPSIYAPADLNKNITKIFGRLIDIYRALGDDRRSFSYYKAIPVIEKLPFKIESADQVKGLPTIGKSLKDHINEIVTTGKLSKLEHFENDEKFIR

SEQ ID NO: 195126 - protein, 437 aa, Zea Mays
MAPKRKPAAAAKSDPDGIFRGVSAFIVPNGVQARRLVVWKQRLVQMGGRVVEKPTKGELAGVNHVLAMDAKALLRELDAAWLHRFRGSVVSFEWIEECLKSGERLPIHNFAINYEKEFKPKNAVCTGNLVASRPSKRTKMSSEYPGDHQIISGGDREKELAAGGPPGASAHVVEGSSAGKQPNQYASSQSSSADSKDTIGSHGTFGIEEASSGGPSIYAPADLNKNITKIFGRLIDIYRALGDDRRSFSYYKAIPVIEKLPFKIESADQVKGLPTIGKSLKDHINEIVTTGKLSKLEHFENDEKVRTISLFGEVWGVGPATALKLYEKGHRTLDDLQRDESLTNAQRIGLKFFDDIKQRIPRHDVSEMEKLLQDVGTDILPGVTIVCGGSYRRGKASCGDMDIIITHPDGERGLIAGLTHTLVFAHTLGVSCGTAST

SEQ ID NO: 195127 - protein, 424 aa, Zea Mays
MAPKRKPAAAAKSDPDGIFRGVSAFIVPNGVQARRLVVWKQRLVQMGGRVVEKPTKGELAGVNHVLAMDAKALLRELDAAWLHRFRGSVVSFEWIEECLKSGERLPIHNFAINYEKEFKPKNAVCTGNLVASRPSKRTKMSSEYPGDHQIISGGDREKELAAGGPPGASAHVVEGSSAGKQPNQYASSQSSSADSKDTIGSHGTFGIEEASSGGPSIYAPADLNKNITKIFGRLIDIYRALGDDRRSFSYYKAIPVIEKLPFKIESADQVKGLPTIGKSLKDHINEIVTTGKLSKLEHFENDEKVRTISLFGEVWGVGPATALKLYEKGHRTLDDLQRDESLTNAQRIGLKFFDDIKQRIPRHDVSEMEKLLQDVGTDILPGVTIVCGGSYRRGKASCGDMDIIITHPDGERIFIQVCSTAEGN

SEQ ID NO: 195128 - protein, 410 aa, Zea Mays
MQVWKQRLVQMGGRVVEKPTKGELAGVNHVLAMDAKALLRELDAAWLHRFRGSVVSFEWIEECLKSGERLPIHNFAINYEKEFKPKNAVCTGNLVASRPSKRTKMSSEYPGDHQIISGGDREKELAAGGPPGASAHVVEGSSAGKQPNQYASSQSSSADSKDTIGSHGTFGIEEASSGGPSIYAPADLNKNITKIFGRLIDIYRALGDDRRSFSYYKAIPVIEKLPFKIESADQVKGLPTIGKSLKDHINEIVTTGKLSKLEHFENDEKVRTISLFGEVWGVGPATALKLYEKGHRTLDDLQRDESLTNAQRIGLKFFDDIKQRIPRHDVSEMEKLLQDVGTDILPGVTIVCGGSYRRGKASCGDMDIIITHPDGESHVGFLSKFVQRLKEINFLREDLIFSIHSVDVSC

SEQ ID NO: 195129 - protein, 200 aa, Zea Mays
MEMEKMMGCQIPAFGMWNYCSDLSITQYFDSAMQARLMKRWNCRGSAAAAAVVVGEKGGVAGGEQLVLFRTPSFQRKPAAQIKVIRREVEKHCDGANELQDGGVRAAEAAVAYPVMKRKVIVSQAVDEDLYKVPQPPMYEKPRKVYIYTTYKETPRIGKAIYIFARPNARINSFGGHIINCLHSSFLHCLISHDFSHELK

SEQ ID NO: 195130 - protein, 518 aa, Zea Mays
MQARLLLDMLGKGIESALTNPSTLLPEPWQASSDMLSSIDADKMTVEPALLPNIQGYVDAVLDLASHFITRLRRYASFCRTLASHVGPSSTTGTSRNMVTSPTNSSPSPSNNQGNQGGSTSATGNSQMQEWVQGAIAKISNNSDGAATATQNPMSTRTSFMPISINTGTFPGTPAVRLIGDCHFLHRLCQLLLFCLLFRRRQSPRLLASSQKNQDSAMQKIQHMMNAKTEDNSSTVRSGLGAAKVEEGHSARGGQFVLGGAKGPEENPIGKSVRIGSGNAGQGYTSDEVLFLILVDLCRRTSTLPHPLPASQVGSSSIIIRLHYIDGNYTVLPEVVEASLGPHMQNMPRPRGADAAGLLLRELELQPPAEEWHRRNMFGGPWSEPDDFGPLDNMPRLKISGSINSHLSDMEVDAVSSIGIDLWPRKRRLSERDAAFGLKTSVGLGGYLGVMGSRRDVVTAVWRTGLDGDWYKCIRCLRQTCAFAHPGAPNQTNEREAWWISRWSHACPMCGGSWVKVV

SEQ ID NO: 195131 - protein, 403 aa, Zea Mays
MEEQLGPVAVTHLLQHTLRSLCTGDAPQWVYAVFWRILPRNYPPPKWDLPGAAYDRTRGNRRNWILAWEDGFCNFAAASSSAAASACGQEGAAAAAAVAYAGDCEAAVQDAVKHQHQQAQGLQPELFFKMSHDIYNYGEGLIGKVAADHSHKWVFKEPQEHETSNLISSWSNPADSPCTYGLCSFAASEDVGGAVPVRHPDHRPDRCQGGRRAARLHEKGNGGPELRGDAPPQVRVPREHPGGAAPAPVVGGRVRGRWVRGAPAGHRRGVVVGPDATAGRRRRAAAGALRPLRRRRDGRRARRRRRRRRRCVHAHHAVDEQPGGAALQAAVGRAAGAAASRVRARSSAAVQGRRLRRRAGAAVPWHGRRGGEQRRSSGREREPERRCLRAHVVVVVLLCQRGQ

SEQ ID NO: 195132 - protein, 247 aa, Zea Mays
MPRHGQLADSAMPWPIGLPACVGFSFSFFSPHSLTFSALLCTCADHRPDRCQGGRRAARLHEKGNGGPELRGDAPPQVRVPREHPGGAAPAPVVGGRVRGRWVRGAPAGHRRGVVVGPDATAGRRRRAAAGALRPLRRRRDGRRARRRRRRRRRCVHAHHAVDEQPGGAALQAAVGRAAGAAASRVRARSSAAVQGRRLRRRAGAAVPWHGRRGGEQRRSSGREREPERRCLRAHVVVVVLLCQRGQ

SEQ ID NO: 195133 - protein, 440 aa, Zea Mays
MAEAATSSSSSGSFAPRRLHDAGVVRESLPYSVLAAPPPPPLPPVQVQVAGSGGGGGGKINPAVLFIIVILALVFFISGLLHLLVRVLSKKQHRRGGPRDTASAAAPRTGVEAGGVDVALQRQLQQLFHLHDSGLDQAFIDALPVFAYRDIVVGGGGDGDKEPFDCAVCLCEFDAEDRLRLLPLCGHAFHLNCIDTWLLSNSTCPLCRGVLFIPGLMGEGNPMFDFEERLEEGRLSEDCDDGFGLPGLKASGLAQTPVAEKKVFPVRLGKFKNVGTQGAVEGGNANASVLSRDQVESSSSSSLDGRRCFSMGTYQYVLGTSELRVALQPGRIRNGTGGAMMGRPPGLSSINADIMEGKKICTRNKGESFSVSKIWQWSHIKGKLPAGSDECSDAGSLPWMKRGGIIAKIEEGKYELRRNNNSNFFLLEDVTICMAIFLYL

SEQ ID NO: 195134 - protein, 123 aa, Zea Mays
MVTPTRCGVPARRARLHDMHTCPTTGNLPATTPTNTDRTPYTCMPDPIHPWCSSPASHVCQTLGTHTIHARHTHNTPTLTIVELNPSNHPSKLDTTTPRSSQQRSLHFVGEERRLLPLAIVAS

SEQ ID NO: 195135 - protein, 1011 aa, Zea Mays
MKNFLRKLHIGDSAAGDGASSPSAPTPPPTKKGGGIEHRHASGLSGWLSSVTSRPHPPTPLSASAAPAAAAPEVEESALTTALASSVEEKRVAEEDEERARRESRKEAEMEKKEKQQAELENYHMQLALEMSVREDPEAMQIEVAKQISLGSCPIQSSPAEVIAFRYWSFNALSYDDKILDGFYDICATGDELAMSTIPSLMDLQALPFSHGGKTDAVLVDRALDSELVALEQKAVIMAVEFRSKKSEFVDRSLVQTLANLVSNYMGGPVIDPESMLLKYRNMSSALKADIRSAVVPLGQLTVGLARHRALLFKVLADSLAVPCRLVKGRQYTGSDDGALNIVKFNDGRECIVDLMIDPGTLISSDGADLGRELEDSLVVDNQHVNKDDTSTQLLSSFSEASSSMHSSFENGSLEKGFICNAGHFGPYEATTAHSDNDVLGSGVSSSFDELSVSTYACENIPIIHESNTDHTMTEKSKDKSITSNNSSSCSPPSSEIGSTPAVRRKKVKDVSEYMISAAKENPQIAERIHAVLLESGVVPPPDLFSEESKEQPKDLIVYDTSLFQTTDEMIRTMNELESTAHDGCAGLGPSLPPDPGHELQTKIVPYRMPPDLKPVQGLGVYHKFDFRDNINPSIPLYEPSPAPQENPLQLIKQMPVTAAAVATAAVVASSMVVAAAKSNSDIKLDVPVAAAATAAAVVATTAAVNQQYEYLDPGCQLLCLPSSSNKLIQKGRHDLLDDDQLETNHGQDNALEREKDLVQAPQEAERISDRSTGTESARSEISLDKIAEFEIQWEELTLGERVGLGSFGEVYRGEWHETEVAVKKFLQQDISSDALEEFRTEVGIMRRLRHPNVVLFMGAVTRVPHLSIVTEFLPRGSLFRLIHRPNNQLDQKRRLRMALDVARGMNYLHNCTPVIVHRDLKSPNLLVDKNWVVKVCDFGLSRLKHSTFLSSRSAAGTAEWMAPEILRNEPSDEKCDVFSYGVILWELCTLLQPWEVIQGCGHHFQRSWLL

SEQ ID NO: 195136 - protein, 121 aa, Zea Mays
MELAEPSRAEAPAPSVAIPSSSAHSAARAVALLLARLRGTSSMAAVRRRVPVHAPLVRHCSLRARSARRRHLLHLLLCSSSLSGRFFPCPAMLQSSARRYSLPSTSQPRPLSPMADRRVRR

SEQ ID NO: 195137 - protein, 85 aa, Zea Mays
MLTKSQADHGALQYSIIGTAFQIVIKNSLNKLKMNLGTAIQSGIAFITLASTYASPGACSASQWWKKGEDIYIYIDRQIDACMCV

SEQ ID NO: 195138 - protein, 113 aa, Zea Mays
MSPKKAVVLVLAVAAGHQPERPSRLQWEKYTRISILDAKNIIIIRLVYQNSCPHNKTKRLLVLASRNQNFFQGLLHFWKRNNERLFFLKAQCNIIIFVIEVYDLSQQPSNKQV

SEQ ID NO: 195139 - protein, 53 aa, Zea Mays
MASGPRHGPTERERANRRRAGVAGPDSLGQSLFFSLPWRRREESRSGCDVRGW

SEQ ID NO: 195140 - protein, 149 aa, Zea Mays
MPLTTYLRDLGGGGDVPAGVRDLRGGVHLRRGQRAHLAAGAVGGGRPHRHRHDLRHRPHLRRAHEPRRHALLRVLPPFPLDPGALLLGGAVHGGHVRGVRAEGGAPAHRRDRHHHAVGAALARARHRDRRHLQHDVRHLRRRHRLQGGG

SEQ ID NO: 195141 - protein, 419 aa, Zea Mays
MAGGRAFRPSAPRRAAFAALLTLLLLAGLSFLLSSTPTSSARSSSPPSARLAAVRRHAADHAAVLAAYAAHARKLKEDSAAQSLSFSSLSSDLSALSARLASHLSSSLPEDALRPLEKEARERIKFARGLAADAKEGFDTQSKIHKLSDTVFAVGEQLSRARRAGRMSSRIAADSTPKSLHCLAMRLLEARLANPTAFADDPDPSPEFDDPALYHYAIFSDNVLAISVVVASAARAAADPSRHVFHVVTAPMYLPAFRVWFARRPPPLGVHVQLLAHSDFPFLNATNSPVVRQIDAGNRDVELLDYLRFYLPDMFPSLRRVVLLEDDVVVQKDLAALWQVDLDGKVNGAVETCFGGFRRYRKYLNFTQPIVRDRFKPNACAWAYGVNVFDLETWRRDGCTELFHQYMEMVTSNCWGSDV

SEQ ID NO: 195142 - protein, 147 aa, Zea Mays
MKISSHIFSAASILSAVAALSPDFFTRMSRGLILWPRFLFPRTARHRSALWCPAELPMVRPPCIHGHCTAPCSSLLQPCASRFSSTHPYFHAGELSLSPASRPSPSPLLARARPELPGSPVFLPVRRGFPFPELPQPWRAPLPEFLP

SEQ ID NO: 195143 - protein, 301 aa, Zea Mays
MVKKPNDVAKAAATSADAAARPSKANPSTPQSVKTSKFKKRKVKANRQKPAVAAAAVDDVAPVGAGTGDGDASASAVLPQPSNVAEASPVVQTPKSTTFVEASPVVQTQKTATDAEVPVHSPMPATAEASALSPKPKPKPAHANADAAAAISVSKGKGVGADNSGGDGRMKSRKERARSGKGKEVLGDGGSKGKGKGKGKKAVGKKEERGDHKVAGFIFMCNAKTKKECYQNRLFGMPGGKIGMVKKIRPGVKLFLYDFDLKLLYGVYKAASHGGLNLVQGAFSGKFPAQVCRQNCGKHNR

SEQ ID NO: 195144 - protein, 328 aa, Zea Mays
MSAPPHVSYTALPPPPPAPTATSFSQLPPLPDVVGGCRVKAGAKPPGPGANPPDPFAALIVPTLVRVARTSFPPLEIRCLIHFSSFTMDMNTRDRIRKRRDDDDDDLMLLILPTLHLLGYIIGDSEKNLRHTSMLTGEEKVRELLEGHIKNCRTSFRMEPYIFKALVNYLRSEGLVKDTRIKVEEKLGFFLYMISHNASFEYLQVFFGHSNDTFHRVIKHFFDIVIPALSMRFLKPPSNQVHAKVREDNRFYPYFKNCLGSIYGTHVPISMSPNQAAPFRNRKGTLSQNVMFVCDFDLRVTYLSAGWEGSATDSMVLRSAMTNSIGKF

SEQ ID NO: 195145 - protein, 320 aa, Zea Mays
MSAPPHVSYTALPPPPPAPTATSFSQLPPLPDVVGGCRVKAGAKPPGPGANPPDPFAALIVPTLVRVARTSFPPLEIRCLIHFSRDRIRKRRDDDDDDLMLLILPTLHLLGYIIGDSEKNLRHTSMLTGEEKVRELLEGHIKNCRTSFRMEPYIFKALVNYLRSEGLVKDTRIKVEEKLGFFLYMISHNASFEYLQVFFGHSNDTFHRVIKHFFDIVIPALSMRFLKPPSNQVHAKVREDNRFYPYFKNCLGSIYGTHVPISMSPNQAAPFRNRKGTLSQNVMFVCDFDLRVTYLSAGWEGSATDSMVLRSAMTNSIGKF

SEQ ID NO: 195146 - protein, 1003 aa, Zea Mays
MLAATVLGSLCKEEELRVKVLLGGCIPPLLALLRSKSAESQTAAAKTIYAVSQGGIRDHVGSKIFFTENVVPVLWEQLKISLKNESLVDGLLTGALKNLSKNTEGFWSATVQCGGVDILIKLVSSGQTNTLANACYLLGSLMMEDSSVCSKVLSGETTKQLLKLLGPGNETSIRAEAAGALKFLSAQSKEARRQIANSNGIPALINATIAPSKEFMQGESAQSLQENAMCALANISGGLSYVISSLGESLESCSSPAQIADTLGALASALMIYDTNAESISASDPVDIEKTLLKQFKPKVPFLVQERIIEALASLYSNPVLCKTLADSDAKRLLVGLITMAATEVQDDLTKSLFALCKKDCDLWQALQGREGVQLLISLLGLSSEQQQECAVALLALLSKENDESKWAITAAGGIPPLVQILETGSPKAKEDSATILGNLCNHSEDIRACVESADAVPALLWLLKNGSDNGKEIASKTLNHLIHKSDTGTISQLSALLTSEQPESKVYVLDALKSLLSVAPLDDILHEGSAANDAVETMIKILSSPKEETQATSATALAGLFHCRKDLRETHIAVKTLWSLMKLLHMQSNKILMGASCCLAAIFLSIKQNKEVAAIARDALTPLVSLANSSVIEVAEQATRALANLFLDQELSLQVSFEENLFRVTRVLREGTIDGRTHAAAAIARLLQCRTVNQPLSDTINRSGSVLALAELLEVANGEAAATSEVLDALVLLSRSKASSGHTKAPWAILAENPHTILPLVSCIADAAASLQDKAIEVVSRLCSDQHDVIGGLVSETPGCISSIAWRIIGSNTLKVKVGGCALLVCAAKEHCQKQIEVLNDASLYIQLIHSLIDMIHMANTPAENVSSESISDIRISRHSKENYSDGETVCRTAVISGNMIPLWLLAVFSRHDSKTRAELLEAGAVEMLTEKISQNAFQYVGEEDSTSWVCSLLLALLFQEREIIRSNSASHSIPVLSNLLRSDEPAYSRSFGIIRGIHVGA

SEQ ID NO: 195147 - protein, 66 aa, Zea Mays
MRSVHGHVHRGEVAFCSQECRQQQMNLDELMEKKCSTPAGGGGGGVGGGGGGGSDQPGKSSTVAAA

SEQ ID NO: 195148 - protein, 208 aa, Zea Mays
MSFVPSSTASKNSMETIPEHNLDVEYPTLTPVGKACSGRKGLFSRGKHSLGRIISKAGLGNLRQKQTHSIDGEIIGQTESVAPRFEVKGSKESTLHDKLPAMSEPSLLLTEMMRAVLYTSLPVLVQGRNWMLVYSTWRHGISLSTLYRRSRLCAGYSLLIVGDRRGAVFGGLVEAPLQPIVKRKYQGTNDCFVFTNVDGCPVICHPTV

SEQ ID NO: 195149 - protein, 308 aa, Zea Mays
MGYLPALGGKAAHLVNDLATVILNPVSERERQPHHPTHLPEATEGEDTLFVDDDSDQNSDGPDTSSFRAFLMSFVPSSTASKNSMETIPEHNLDVEYPTLTPVGKACSGRKGLFSRGKHSLGRIISKAGLGNLRQKQTHSIDGEIIGQTESVAPRFEVKGSKESTLHDKLPAMSEPSLLLTEMMRAVLYTSLPVLVQGRNWMLVYSTWRHGISLSTLYRRSRLCAGYSLLIVGDRRGAVFGGLVEAPLQPIVKRKYQGTNDCFVFTNVDGCPVICHPTGANNYFTFCSTDYMAMGGGGHFALYLDGDL

SEQ ID NO: 195150 - protein, 359 aa, Zea Mays
MGYLPALGGKAAHLVNDLATVILNPVSERERQPHHPTHLPEATEGEDTLFVDDDSDQNSDGPDTSSFRAFLMSFVPSSTASKNSMETIPEHNLDVEYPTLTPVGKACSGRKGLFSRGKHSLGRIISKAGLGNLRQKQTHSIDGEIIGQTESVAPRFEVKGSKESTLHDKLPAMSEPSLLLTEMMRAVLYTSLPVLVQGRNWMLVYSTWRHGISLSTLYRRSRLCAGYSLLIVGDRRGAVFGGLVEAPLQPIVKRKYQGTNDCFVFTNVDGCPVICHPTGANNYFTFCSTDYMAMGGGGHFALYLDGDLMTGSSSTSETFNNPCLSHTQEFKIKDVEVHNLLYSKICGVSSMLPSLKRCS

SEQ ID NO: 195151 - protein, 256 aa, Zea Mays
MGYLPALGGKAAHLVNDLATVILNPVSERERQPHHPTHLPEATEGEDTLFVDDDSDQNSDGPDTSSFRAFLMSFVPSSTASKNSMETIPEHNLDVEYPTLTPVGKACSGRKGLFSRGKHSLGRIISKAGLGNLRQKQTHSIDGEIIGQTESVAPRFEVKGSKESTLHDKLPAMSEPSLLLTEMMRAVLYTSLPVLVQGRNWMLVYSTWRHGISLSTLYRRSRLCAGYSLLVFLCIVHILPLCYTKHDTLFFPLTLA

SEQ ID NO: 195152 - protein, 276 aa, Zea Mays
MAITLKEKEATEGEDTLFVDDDSDQNSDGPDTSSFRAFLMSFVPSSTASKNSMETIPEHNLDVEYPTLTPVGKACSGRKGLFSRGKHSLGRIISKAGLGNLRQKQTHSIDGEIIGQTESVAPRFEVKGSKESTLHDKLPAMSEPSLLLTEMMRAVLYTSLPVLVQGRNWMLVYSTWRHGISLSTLYRRSRLCAGYSLLIVGDRRGAVFGGLVEAPLQPIVKRKYQGTNDCFVFTNVDGCPVICHPTGANNYFTFCSTDYMAMGGGGHFALYLDGDL

SEQ ID NO: 195153 - protein, 526 aa, Zea Mays
MGGLAVSAFVLFSWVLFLSCIFSVDGLSKVRGVNLGGWLVIEGWIKPSLFDGIPNGDMLDGTQVQIRSVVLNKYVSAANGGGSNVTVDRDVASTWETFWLWRVSDNEFQLRCLGGQFLTSNSEDGLILATSKHPLSTETFSIERNARRVHIRLLNGGYVQATNDHLLISTYQFQPGWDNNLATFELVIVANNLHGDYQLANGYGPDKAKMVLEEHRRSFITAKDFDFLSRHGINTVRIPVGWWITQDPYPPSPFVGGSLAALDLAFSWAQSYGLKCIIDLHAAPGSQNGMEHSASRDGSVAWPSPEYISQTLEVIDFLATRYGGHPSLLGIELLNEPSAATVTLDVLVSYYMRGYQIVRNHSSTAYVILCQRIGNADPIELFQAGIGLSNVVVDLHYYNLFNPYFATMNSSQNIDFIYKMRAPQLQDLKGMNGPLVFIGEWVNEWDVQNASQYEYQKFGSAQLDVYANATFGWSYWTLKNDMIHWDFEWNIKNKYLLFSGSSMLKTPSFLLLLALGWGIHLIIMPR

SEQ ID NO: 195154 - protein, 257 aa, Zea Mays
MGGLAVSAFVLFSWVLFLSCIFSVDGLSKVRGVNLGGWLVIEGWIKPSLFDGIPNGDMLDGTQVQIRSVVLNKYVSAANGGGSNVTVDRDVASTWETFWLWRVSDNEFQLRCLGGQFLTSNSEDGLILATSKHPLSTETFSIERNARRVHIRLLNGGYVQATNDHLLISTYQFQPGWDNNLATFELVIVANNLHGDYQLANGYGPDKAKMVLEEHRRSFITAKDFDFLSRHGINTILWFEMYNRSSCCSWFSKWNGT

SEQ ID NO: 195155 - protein, 51 aa, Zea Mays
MRRPPAISSSPLRARAPSLLLSLFCSDPCLWSFIPLPASSAGAQACSSSIR

SEQ ID NO: 195156 - protein, 65 aa, Zea Mays
MRDKKLEHPARLKFDSSELFSRGKDLQQLITEEKKTSGWHQPELSSCLRLSRQISQGKLIRIPVN

SEQ ID NO: 195157 - protein, 97 aa, Zea Mays
MFFSEIIMRTAKKLEPTYTRSSEILVVLMHATNNTSCIQSVPSSCPWKRCVRYAETKTQRKHASNLHIMQQEYIQNRHEFGCFLLKTYVFLNGKHES

SEQ ID NO: 195158 - protein, 422 aa, Zea Mays
MFMVLISGNDFYAFPRIDQNKKRIAWIEWSHPNMPWDKSELWVGYFAESGDLTKRVCIAGGNRLLIESPSEPKWSPKGELFFVTDRGSGFWNIYKWVAADDYFYIEGASASIPRSIAKVTLNESKTKVVNFSIAWSSSPDLVQYRPFFSTPELVEFPTSKSGQKAYAYFYPPSNPNFQGLPDEKPPLLVKTHGGPTAETRAILDLSVQYWTSRGWAYVDVNYGGSTGYGREYRERLLNKWGIVDVDDCCGCARFLVESGKVDGQRLCITGRSAGGYTTLASLAFRDTFKAGASLYGVGDLTLLRAETHKFESHYMDNLVGNERAYYERSPINFVNQFTCPVILFQGLEDKVVPPDQARKIYSALKEKGLPVALVEYEGEQHGFRKAENIKFTLEQQMLFFARLVGKFEVADDITPIKIENFD

SEQ ID NO: 195159 - protein, 655 aa, Zea Mays
MATRLASIFSAVRSPTSAPPHTLRRALPSFSYRRAHPSQPRMSSSSAASSAPPAAEKPTVAPFGSWRSPITADVVSGADRRLGGIALAGDGRLLWIEGRPEEKGRMVIVKEEDNPVDVIPQEFAARTLAQEYGGGAFAVDKSVVVFSNYKDQRLYKQTIGTGGPPVPLTPDYGAPNVSYADGVFDPHFDRYVTVMEDRRKDSLNPTTTIAAINLSGSDVHEPKVLISGNDFYAFPRIDQNKKRIAWIEWSHPNMPWDKSELWVGYFAESGDLTKRVCIAGGNRLLIESPSEPKWSPKGELFFVTDRGSGFWNIYKWVEQTNEIVPVYSLDAEFTRPLWVFGISSYDFLGNSDHIVFSYRQQGKSHLGVLDCDSGSISLLDIPFSDLSDVVAADDYFYIEGASASIPRSIAKVTLNESKTKVVNFSIAWSSSPDLVQYRPFFSTPELVEFPTSKSGQKAYAYFYPPSNPNFQGLPDEKPPLLVKTHGGPTAETRAILDLSVQYWTSRGWAYVDVNYGGSTGYGREYRERLLNKWGIVDVDDCCGCARFLVESGKVDGQRLCITGRSAGGYTTLASLAFRDTFKAGASLYGVGDLTLLRAETHKFESHYMDNLEMKELTTRDHQSTLSTSLLVQSFCFKGWRIRLCHQIRHAKYTVP

SEQ ID NO: 195160 - protein, 363 aa, Zea Mays
MITMPCRQQGKSHLGVLDCDSGSISLLDIPFSDLSDVVAADDYFYIEGASASIPRSIAKVTLNESKTKVVNFSIAWSSSPDLVQYRPFFSTPELVEFPTSKSGQKAYAYFYPPSNPNFQGLPDEKPPLLVKTHGGPTAETRAILDLSVQYWTSRGWAYVDVNYGGSTGYGREYRERLLNKWGIVDVDDCCGCARFLVESGKVDGQRLCITGRSAGGYTTLASLAFRDTFKAGASLYGVGDLTLLRAETHKFESHYMDNLVGNERAYYERSPINFVNQFTCPVILFQGLEDKVVPPDQARKIYSALKEKGLPVALVEYEGEQHGFRKAENIKFTLEQQMLFFARLVGKFEVADDITPIKIENFD

SEQ ID NO: 195161 - protein, 467 aa, Zea Mays
MTSKRAARCHHPSSKLPRWWQIDLTKRVCIAGGNRLLIESPSEPKWSPKGELFFVTDRGSGFWNIYKWVEQTNEIVPVYSLDAEFTRPLWVFGISSYDFLGNSDHIVFSYRQQGKSHLGVLDCDSGSISLLDIPFSDLSDVVAADDYFYIEGASASIPRSIAKVTLNESKTKVVNFSIAWSSSPDLVQYRPFFSTPELVEFPTSKSGQKAYAYFYPPSNPNFQGLPDEKPPLLVKTHGGPTAETRAILDLSVQYWTSRGWAYVDVNYGGSTGYGREYRERLLNKWGIVDVDDCCGCARFLVESGKVDGQRLCITGRSAGGYTTLASLAFRDTFKAGASLYGVGDLTLLRAETHKFESHYMDNLVGNERAYYERSPINFVNQFTCPVILFQGLEDKVVPPDQARKIYSALKEKGLPVALVEYEGEQHGFRKAENIKFTLEQQMLFFARLVGKFEVADDITPIKIENFD

SEQ ID NO: 195162 - protein, 404 aa, Zea Mays
MTSKRAARCHHPSSKLPRWWQIDLTKRVCIAGGNRLLIESPSEPKWSPKGELFFVTDRGSGFWNIYKWVEQTNEIVPVYSLDAEFTRPLWVFGISSYDFLGNSDHIVFSYRQQGKSHLGVLDCDSGSISLLDIPFSDLSDVVAADDYFYIEGASASIPRSIAKVTLNESKTKVVNFSIAWSSSPDLVQYRPFFSTPELVEFPTSKSGQKAYAYFYPPSNPNFQGLPDEKPPLLVKTHGGPTAETRAILDLSVQYWTSRGWAYVDVNYGGSTGYGREYRERLLNKWGIVDVDDCCGCARFLVESGKVDGQRLCITGRSAGGYTTLASLAFRDTFKAGASLYGVGDLTLLRAETHKFESHYMDNLVGNERAYYERSPINFVNQFTCPVILFQGLEDKIRHAKYTVP

SEQ ID NO: 195163 - protein, 258 aa, Zea Mays
MWPGCGGRFYWAPESAPPGQARGVAVLFAWVWSDEAQLRPFVELYSSLGWRCLVCHPDLVALYLSEKATSLATGVISELVKELRVKPVPTVLASFSGGSKGCMYKVIQLLAGICEGDATMKDYRLVRNCICGQIYDSSPVDFVSDVGTQFLQKPAVGNLSQSTILRSWMAKVLASGMDTLFPSRIEAQRAEYWHTLYSAAGLGPVLIFCSEDDNLAPCHIICGFARRLIELGTDVKLMKWSDSQHAITIHMKLNTGKL

SEQ ID NO: 195164 - protein, 403 aa, Zea Mays
MWPGCGGRFYWAPESAPPGQARGVAVLFAWVWSDEAQLRPFVELYSSLGWRCLVCHPDLVALYLSEKATSLATGVISELVKELRVKPVPTVLASFSGGSKGCMYKLLAGICEGDATMKDYRLVRNCICGQIYDSSPVDFVSDVGTQFLQKPAVGNLSQSTILRSWMAKVLASGMDTLFPSRIEAQRAEYWHTLYSAAGLGPVLIFCSEDDNLAPCHIICGFARRLIELGTDVKLMKWSDSQHVGHYNSHEIEYRKAVDDTLKKALVTFCHRSQLYDSNMAGDQEYKIAHSVCSLHNAAANSNESLRRVANSPSDHFFLPSSKDHDESREPSSLIEDQRRHISHPPCMEPKGVLGQILFDVCVPNNVEGWDIKPTVSPNGRPTFASARQLGPFNPIRYFRRSRL

SEQ ID NO: 195165 - protein, 287 aa, Zea Mays
MKDYRLVRNCICGQIYDSSPVDFVSDVGTQFLQKPAVGNLSQSTILRSWMAKVLASGMDTLFPSRIEAQRAEYWHTLYSAAGLGPVLIFCSEDDNLAPCHIICGFARRLIELGTDVKLMKWSDSQHVGHYNSHEIEYRKAVDDTLKKALVTFCHRSQLYDSNMAGDQEYKIAHSVCSLHNAAANSNESLRRVANSPSDHFFLPSSKDHDESREPSSLIEDQRRHISHPPCMEPKGVLGQILFDVCVPNNVEGWDIKPTVSPNGRPTFASARQLGPFNPIRYFRRSRL

SEQ ID NO: 195166 - protein, 166 aa, Zea Mays
MERLPTCHYNSHEIEYRKAVDDTLKKALVTFCHRSQLYDSNMAGDQEYKIAHSVCSLHNAAANSNESLRRVANSPSDHFFLPSSKDHDESREPSSLIEDQRRHISHPPCMEPKGVLGQILFDVCVPNNVEGWDIKPTVSPNGRPTFASARQLGPFNPIRYFRRSRL

SEQ ID NO: 195167 - protein, 238 aa, Zea Mays
MAPPDSISTCSSLPLAAAPMSEPTPFPFAASPLPNPLVATASFLQHHLSRLASHLNVPRPALAAAAARTPGPQGASLSLSLAPDEVARALTGTPVFTVCNSSNEFVLVSDPATGLRSLGLLCFRSEDADALLSHVRTRQPVLGKGAKVVPITLDQVYMLKAEGIAFRFLPDPLQIKNALEMKSGLTAFDGVPVFQSDLLVVKKQKKRYCPVYFQKEDIERELTRASKGSRGLEVWRMS

SEQ ID NO: 195168 - protein, 291 aa, Zea Mays
MAPPDSISTCSSLPLAAAPMSEPTPFPFAASPLPNPLVATASFLQHHLSRLASHLNVPRPALAAAAARTPGPQGASLSLSLAPDEVARALTGTPVFTVCNSSNEFVLVSDPATGLRSLGLLCFRSEDADALLSHVRTRQPVLGKGAKVVPITLDQVYMLKAEGIAFRFLPDPLQIKNALEMKSGLTAFDGVPVFQSDLLVVKKQKKRYCPVYFQKEDIERELTRASKGSRGSALSKKIMVGSLEDVLKKMEINERDSGWDDLIFIPPGKSLNQHINEVTQEDLMKSKLRHW

SEQ ID NO: 195169 - protein, 526 aa, Zea Mays
MSPTKRRGLGRRGHGRGRGATAEKDMDHLDISVPSSPSTTSDREDQPLLIPRQSPACYVGPSEVSTMLLNPKINHRSDAIFGDQAVEQLKLRHHKPLKFHERYRPYLRDAGLLGLSQICQKMPQLDKALITALVERWRPETHSFHLASGEITVTLQDVAMLFALPIDGRPVCSTTDHDYAQVVLDCLGLDARGPAMPGKSFLHYKWLKKHFYELPEEVDDMTVERHVRAYILSLLCGVLFPDGTGRMSLIYLPLIADLSRVSTYSWASAVLAFLYRSLCSVASSHNIKNIGGSLLLLQLWSWERFHVGRPLVRSPLCTEMGIEHDLPPIGFRWVGSRTQSESANRCLKQYRDELNVQRVDQVKWEPYLQVESSTLPPLCTRDADLWLTQAPLINFPIVEMYLPERVMRQFGLRQCIPPPFRPTLQSLHRISRRGKERENWEETHHEYIQEWEARRQRIFRDTEQYDPSSYEEYLRWYSGATRRYLVPATSDDGEAGPSAPTDDFSDLQYQAKSPIIRKAVKHESLI

SEQ ID NO: 195170 - protein, 899 aa, Zea Mays
MARRGHDDDDDEVDEEEEEDAYDLDDDEDEDEEDDYEEETRRGKASRGGGGAKSGGGRKRSREDNFIDDSAIEDEDDEDDDGGGRPRKKGGGGVRGFFDEEAQVDEDEEEEDEGEGEDDFINDAGADLPDEDVVRGSRRHSIPMRDEEEDIDEMERQVRERYARSTHIEYGEEAAEVEQQALLPSVKDPKLWMVKCAIGHERETAICLMQKFIDRSDLQIKSVVALDHLKNYIYVEAEKEAHVKEACKGLRNIYASAKITLVPIKEMADVLSVESKSVDLSRDSWVRMKLGIYKGDLAKVVDVDNVRQRVDVKLIPRIDLQALASKLEGRDIVKKKAFVPPPRFFNIDEAREMHIRVERRRDKESGEYFEWVDNLKFKDGFLYKSVSTKSIHKSNIQPTFDELEKFKKPGDDMNGDMASLSTLFANRKKGHFMKGDAVIVIKGDLKNLEGWVEKVEDETVHIRPKISDLPKTLAFNEKELCKYFKPGDHVKVISGVQEGATGMVVKVEGHVLIILSDTTKEHIRVFADHVVESSEITTGITRIGDYELHDLVLLDNLSFGVIIRVEAEAFQVLKGVPDRPEVVLVKLREIKSKIERRSSAKDRSNNIISAKDVVRVVEGACKGKQGPVEHIHKGMLFIYDRHHLEHAGFICAKAQSCLLVGGSTGGRRGNGMDTADARLDALRSSASILQSPGRLPPRGPNMNYGGRFGGGRGGRGYDALVGKCIKIKSGPYKGYRGRVKEVTGALVRVELDSLMKIVTVKRDDIADTPTVATPFREPRYSLGGETPMHPSRTPHHAYQTPMRDPGATPIHDGMRTPMRSRAWAPMSPPRDNWEDGNPATWGSSPAYQEPHKLGHMKPPHLDRGGQILQELVSMTLLLPGITMQMPQVHTCLPHLLVNQ

SEQ ID NO: 195171 - protein, 835 aa, Zea Mays
MDGQMCDLQIKSVVALDHLKNYIYVEAEKEAHVKEACKGLRNIYASAKITLVPIKEMADVLSVESKSVDLSRDSWVRMKLGIYKGDLAKVVDVDNVRQRVDVKLIPRIDLQALASKLEGRDIVKKKAFVPPPRFFNIDEAREMHIRVERRRDKESGEYFEWVDNLKFKDGFLYKSVSTKSIHKSNIQPTFDELEKFKKPGDDMNGDMASLSTLFANRKKGHFMKGDAVIVIKGDLKNLEGWVEKVEDETVHIRPKISDLPKTLAFNEKELCKYFKPGDHVKVISGVQEGATGMVVKVEGHVLIILSDTTKEHIRVFADHVVESSEITTGITRIGDYELHDLVLLDNLSFGVIIRVEAEAFQVLKGVPDRPEVVLVKLREIKSKIERRSSAKDRSNNIISAKDVVRVVEGACKGKQGPVEHIHKGMLFIYDRHHLEHAGFICAKAQSCLLVGGSTGGRRGNGMDTADARLDALRSSASILQSPGRLPPRGPNMNYGGRFGGGRGGRGYDALVGKCIKIKSGPYKGYRGRVKEVTGALVRVELDSLMKIVTVKRDDIADTPTVATPFREPRYSLGGETPMHPSRTPHHAYQTPMRDPGATPIHDGMRTPMRSRAWAPMSPPRDNWEDGNPATWGSSPAYQPGTPQARPYEAPTPGSGWANTPGVSFNDAPTPRDNYANAPSPYVPSTPVGQPMTPNSASYLPGTPGGQPMTPGNAGMDMLSPIIGGDGEVAWLLPDVLVNVLRGGDDGPGVVREVLGDGSCRVALGSSGNGDVVTVLANEVEVIRPKKSDRIKILNGNFRGYTGKLIGIDGSDGIVRLDETYEVKILDMVILAKLAT

SEQ ID NO: 195172 - protein, 696 aa, Zea Mays
MREMHIRVERRRDKESGEYFEWVDNLKFKDGFLYKSVSTKSIHKSNIQPTFDELEKFKKPGDDMNGDMASLSTLFANRKKGHFMKGDAVIVIKGDLKNLEGWVEKVEDETVHIRPKISDLPKTLAFNEKELCKYFKPGDHVKVISGVQEGATGMVVKVEGHVLIILSDTTKEHIRVFADHVVESSEITTGITRIGDYELHDLVLLDNLSFGVIIRVEAEAFQVLKGVPDRPEVVLVKLREIKSKIERRSSAKDRSNNIISAKDVVRVVEGACKGKQGPVEHIHKGMLFIYDRHHLEHAGFICAKAQSCLLVGGSTGGRRGNGMDTADARLDALRSSASILQSPGRLPPRGPNMNYGGRFGGGRGGRGYDALVGKCIKIKSGPYKGYRGRVKEVTGALVRVELDSLMKIVTVKRDDIADTPTVATPFREPRYSLGGETPMHPSRTPHHAYQTPMRDPGATPIHDGMRTPMRSRAWAPMSPPRDNWEDGNPATWGSSPAYQPGTPQARPYEAPTPGSGWANTPGVSFNDAPTPRDNYANAPSPYVPSTPVGQPMTPNSASYLPGTPGGQPMTPGNAGMDMLSPIIGGDGEVAWLLPDVLVNVLRGGDDGPGVVREVLGDGSCRVALGSSGNGDVVTVLANEVEVIRPKKSDRIKILNGNFRGYTGKLIGIDGSDGIVRLDETYEVKILDMVILAKLAT

SEQ ID NO: 195173 - protein, 877 aa, Zea Mays
MARRGHDDDDDEVDEEEEEDAYDLDDDEDEDEEDDYEEETRRGKASRGGGGAKSGGGRKRSREDNFIDDSAIEDEDDEDDDGGGRPRKKGGGGVRGFFDEEAQVDEDEEEEDEGEGEDDFINDAGADLPDEDVVRGSRRHSIPMRDEEEDIDEMERQVRERYARSTHIEYGEEAAEVEQQALLPSVKDPKLWMVKCAIGHERETAICLMQKFIDRSDLQIKSVVALDHLKNYIYVEAEKEAHVKEACKGLRNIYASAKITLVPIKEMADVLSVESKSVDLSRDSWVRMKLGIYKGDLAKVVDVDNVRQRVDVKLIPRIDLQALASKLEGRDIVKKKAFVPPPRFFNIDEAREMHIRVERRRDKESGEYFEWVDNLKFKDGFLYKSVSTKSIHKSNIQPTFDELEKFKKPGDDMNGDMASLSTLFANRKKGHFMKGDAVIVIKGDLKNLEGWVEKVEDETVHIRPKISDLPKTLAFNEKELCKYFKPGDHVKVISGVQEGATGMVVKVEGHVLIILSDTTKEHIRVFADHVVESSEITTGITRIGDYELHDLVLLDNLSFGVIIRVEAEAFQVLKGVPDRPEVVLVKLREIKSKIERRSSAKDRSNNIISAKDVVRVVEGACKGKQGPVEHIHKGMLFIYDRHHLEHAGFICAKAQSCLLVGGSTGGRRGNGMDTADARLDALRSSASILQSPGRLPPRGPNMNYGGRFGGGRGGRGYDALVGKCIKIKSGPYKGYRGRVKEVTGALVRVELDSLMKIVTVKRDDIADTPTVATPFREPRYSLGGETPMHPSRTPHHAYQTPMRDPGGTIGKMEILLLGVAVQLTSQEPHKLGHMKPPHLDRGGQILQELVSMTLLLPGITMQMPQVHTCLPHLLVNQ

SEQ ID NO: 195174 - protein, 832 aa, Zea Mays
MARRGHDDDDDEVDEEEEEDAYDLDDDEDEDEEDDYEEETRRGKASRGGGGAKSGGGRKRSREDNFIDDSAIEDEDDEDDDGGGRPRKKGGGGVRGFFDEEAQVDEDEEEEDEGEGEDDFINDAGADLPDEDVVRGSRRHSIPMRDEEEDIDEMERQVRERYARSTHIEYGEEAAEVEQQALLPSVKDPKLWMVKCAIGHERETAICLMQKFIDRSDLQIKSVVALDHLKNYIYVEAEKEAHVKEACKGLRNIYASAKITLVPIKEMADVLSVESKSVDLSRDSWVRMKLGIYKGDLAKVVDVDNVRQRVDVKLIPRIDLQALASKLEGRDIVKKKAFVPPPRFFNIDEAREMHIRVERRRDKESGEYFEWVDNLKFKDGFLYKSVSTKSIHKSNIQPTFDELEKFKKPGDDMNGDMASLSTLFANRKKGHFMKGDAVIVIKGDLKNLEGWVEKVEDETVHIRPKISDLPKTLAFNEKELCKYFKPGDHVKVISGVQEGATGMVVKVEGHVLIILSDTTKEHIRVFADHVVESSEITTGITRIGDYELHDLVLLDNLSFGVIIRVEAEAFQVLKGVPDRPEVVLVKLREIKSKIERRSSAKDRSNNIISAKDVVRVVEGACKGKQGPVEHIHKGMLFIYDRHHLEHAGFICAKAQSCLLVGGSTGGRRGNGMDTADARLDALRSSASILQSPGRLPPRGPNMNYGGRFGGGRGGRGYDALVGKCIKIKSGPYKGYRGRVKEVTGALVRVELDSLMKIVTVKRDDIADTPTVATPFREPRYSLGGETPMHPSRTPHHAYQTPMRDPGGTIGKMEILLLGVAVQLTRNPTSSAI

SEQ ID NO: 195175 - protein, 543 aa, Zea Mays
MVVKVEGHVLIILSDTTKEHIRVFADHVVESSEITTGITRIGDYELHDLVLLDNLSFGVIIRVEAEAFQVLKGVPDRPEVVLVKLREIKSKIERRSSAKDRSNNIISAKDVVRVVEGACKGKQGPVEHIHKGMLFIYDRHHLEHAGFICAKAQSCLLVGGSTGGRRGNGMDTADARLDALRSSASILQSPGRLPPRGPNMNYGGRFGGGRGGRGYDALVGKCIKIKSGPYKGYRGRVKEVTGALVRVELDSLMKIVTVKRDDIADTPTVATPFREPRYSLGGETPMHPSRTPHHAYQTPMRDPGATPIHDGMRTPMRSRAWAPMSPPRDNWEDGNPATWGSSPAYQPGTPQARPYEAPTPGSGWANTPGVSFNDAPTPRDNYANAPSPYVPSTPVGQPMTPNSASYLPGTPGGQPMTPGNAGMDMLSPIIGGDGEVAWLLPDVLVNVLRGGDDGPGVVREVLGDGSCRVALGSSGNGDVVTVLANEVEVIRPKKSDRIKILNGNFRGYTGKLIGIDGSDGIVRLDETYEVKILDMVILAKLAT

SEQ ID NO: 195176 - protein, 613 aa, Zea Mays
MKGDAVIVIKGDLKNLEGWVEKVEDETVHIRPKISDLPKTLAFNEKELCKYFKPGDHVKVISGVQEGATGMVVKVEGHVLIILSDTTKEHIRVFADHVVESSEITTGITRIGDYELHDLVLLDNLSFGVIIRVEAEAFQVLKGVPDRPEVVLVKLREIKSKIERRSSAKDRSNNIISAKDVVRVVEGACKGKQGPVEHIHKGMLFIYDRHHLEHAGFICAKAQSCLLVGGSTGGRRGNGMDTADARLDALRSSASILQSPGRLPPRGPNMNYGGRFGGGRGGRGYDALVGKCIKIKSGPYKGYRGRVKEVTGALVRVELDSLMKIVTVKRDDIADTPTVATPFREPRYSLGGETPMHPSRTPHHAYQTPMRDPGATPIHDGMRTPMRSRAWAPMSPPRDNWEDGNPATWGSSPAYQPGTPQARPYEAPTPGSGWANTPGVSFNDAPTPRDNYANAPSPYVPSTPVGQPMTPNSASYLPGTPGGQPMTPGNAGMDMLSPIIGGDGEVAWLLPDVLVNVLRGGDDGPGVVREVLGDGSCRVALGSSGNGDVVTVLANEVEVIRPKKSDRIKILNGNFRGYTGKLIGIDGSDGIVRLDETYEVKILDMVILAKLAT

SEQ ID NO: 195177 - protein, 693 aa, Zea Mays
MHIRVERRRDKESGEYFEWVDNLKFKDGFLYKSVSTKSIHKSNIQPTFDELEKFKKPGDDMNGDMASLSTLFANRKKGHFMKGDAVIVIKGDLKNLEGWVEKVEDETVHIRPKISDLPKTLAFNEKELCKYFKPGDHVKVISGVQEGATGMVVKVEGHVLIILSDTTKEHIRVFADHVVESSEITTGITRIGDYELHDLVLLDNLSFGVIIRVEAEAFQVLKGVPDRPEVVLVKLREIKSKIERRSSAKDRSNNIISAKDVVRVVEGACKGKQGPVEHIHKGMLFIYDRHHLEHAGFICAKAQSCLLVGGSTGGRRGNGMDTADARLDALRSSASILQSPGRLPPRGPNMNYGGRFGGGRGGRGYDALVGKCIKIKSGPYKGYRGRVKEVTGALVRVELDSLMKIVTVKRDDIADTPTVATPFREPRYSLGGETPMHPSRTPHHAYQTPMRDPGATPIHDGMRTPMRSRAWAPMSPPRDNWEDGNPATWGSSPAYQPGTPQARPYEAPTPGSGWANTPGVSFNDAPTPRDNYANAPSPYVPSTPVGQPMTPNSASYLPGTPGGQPMTPGNAGMDMLSPIIGGDGEVAWLLPDVLVNVLRGGDDGPGVVREVLGDGSCRVALGSSGNGDVVTVLANEVEVIRPKKSDRIKILNGNFRGYTGKLIGIDGSDGIVRLDETYEVKILDMVILAKLAT

SEQ ID NO: 195178 - protein, 699 aa, Zea Mays
MDFGDEPEGSDSQRQRKRYHRHTPRQIQQLEAMFKECPHPDENQRAALSRELGLEPRQIKFWFQNRRTQMKAQHERADNCFLRAENDKIRCENITMREALKNVICPSCGGPPVAEDFFDEQKLRMENARLKEELDRVSSITSKYLGRPFTQMPPVPTMSVSSLDLSVGGMPGQGLGGPSLDLDLLSGCSSGLPYHMPAPVTEMERPMMVDMATRAMDELIRLAQAGEQIWVQGMPGDAREVLDVATYDSLFAKPGGAFRPPEINVEGSRDSGLVFMSAVALVDVFMDTNKWMEFFPGIVSKAQTVDVLVNGLCGRSESLIMMYEELHIMTPVVPTRELSFLRYCKQIEQGLWAVADVSLDGQRDAHYGVPSRSRRMPSGCLIADMSNGYSKVTWVEHLEIEHMLPINVLYRNLVLSGAAFGAHRWLAALQRACERFASLATLGVPHHDVAGVTPEGKRSMMRLSQRMVSSFCASLSSSPLQRWTLLSGTTDVSVCVSTHRSTDSGQPNGVVLSAATSIWLPVPGDHVFAFVRDENARSQWDVLSHGNQVQEVSRIPNGSNPGNCISLLRGLNANQNSMLILQESCADASGALVVYSPIDIPAANVVMSGEDPSGIPLLPSGFAILPDGRPGSSGAGASSSAVPLAAAPPPPGCVVTVAFQILVSNLPSSRLNAESVATVNSLIGTTVQQIKAALNCAGP

SEQ ID NO: 195179 - protein, 103 aa, Zea Mays
MDKGKKYGYAPPTMVDLFKECHCSSKTSFHEPIKEAIDTMKKALVAEPGVEGKESKTPIEVVAQVLASSKFLQNIGLYLPQIKAAMVVILHVWQSLNQRSKTH

SEQ ID NO: 195180 - protein, 960 aa, Zea Mays
MASRHRNASPVTAGKDSPQPASAATSLRLVAEFPLDAPEAKESVTVTVRFRPLSSQEVRLGEEIAWYADGDTIVRSEQNHSIAYAYDRVFGPTTTTRHVYDAAALHVISGAMEGINGTIFAYGVTSSGKTHTMHGDQRSPGIIPLAVKDAFSIIQETPKREFLLRVSYLEIYNEVVNDLLNPSGQNLRIREDLQGTFVEGIKEEVVLSPAHALSLIAAGEEHRHVGSTNFNLLSSRSHTIFTLTIESSGPCSESSEEEAVTFSQLNLIDLAGSESSRAETTGVRRKEGSYINKSLLTLGTVISKLTDGKATHVPFRDSKLTRLLQSSLSGQGRVSLICTVTPASSNSEETRNTLKFAHRAKHIEIQVSQNKIMDEKSLIKKYQNEICQLKEELDQLKRGILSGTPSKDATEDNVILWKQKLEDGNVKLQSRLEQEEAAKAALLARIQRLTKLILVSTKATQTPRLSQCPRPRRRHSFGEEELACLPHRRRDIVLDGESNDLFVAMEGFDETFEVSSKGENKNRKGLLNWFKLRKHDGGSNAPSLGGDQSSLRKALAAPWTPVEIGLNSQTEQEMSNSPENLSANLLSIDHEEFHSDGLYGEEASLVTRKTSDHVDLLREQLKILSEEVALHKSVLKRLVEGAGRSTMNGHVEIEMKKVSDEIKDKQQQIAHLERQIKGELDQLEHTPSHATLLEQVNEKAFELEVKTADNRILQDQLQQKTRECQALEETVAHLHEQLSQALEANDLLSESIIFQQYTDNNLQTGSQIHIENPESIDISDELHQKAEQSEIDELKQRLCELTEAKTQLETHNQKLQEESMYAKGLASAAGVELKALSGEVTKLMNHNERLANDLALARNSTRVRSGHRVGRRDSYTKRLEPASRRDVHASSERESALEVMLMAKDQREAELQKKIEESKQKEAFLEGELANMWVLVAKLKKGQVIDQDDVSMPYPMDRDS

SEQ ID NO: 195181 - protein, 540 aa, Zea Mays
MASRHRNASPVTAGKDSPQPASAATSLRLVAEFPLDAPEAKESVTVTVRFRPLSSQEVRLGEEIAWYADGDTIVRSEQNHSIAYAYDRVFGPTTTTRHVYDAAALHVISGAMEGINGTIFAYGVTSSGKTHTMHGDQRSPGIIPLAVKDAFSIIQETPKREFLLRVSYLEIYNEVVNDLLNPSGQNLRIREDLQGTFVEGIKEEVVLSPAHALSLIAAGEEHRHVGSTNFNLLSSRSHTIFTLTIESSGPCSESSEEEAVTFSQLNLIDLAGSESSRAETTGVRRKEGSYINKSLLTLGTVISKLTDGKATHVPFRDSKLTRLLQSSLSGQGRVSLICTVTPASSNSEETRNTLKFAHRAKHIEIQVSQNKIMDEKSLIKKYQNEICQLKEELDQLKRGILSGTPSKDATEDNVILWKQKLEDGNVKLQSRLEQEEAAKAALLARIQRLTKLILVSTKATQTPRLSQCPRPRRRHSFGEEELACLPHRRRDIVLDGESNDLFVAMEGFDETFEVSSKGENKNRKGLLNWFKLRVYKSDTV

SEQ ID NO: 195182 - protein, 190 aa, Zea Mays
MASRHRNASPVTAGKDSPQPASAATSLRLVAEFPLDAPEAKESVTVTVRFRPLSSQEVRLGEEIAWYADGDTIVRSEQNHSIAYAYDRVFGPTTTTRHVYDAAALHVISGAMEGINGTIFAYGVTSSGKTHTMHGDQRSPGIIPLAVKDAFSIIQETPKREFLLRVSYLEIYNELLAPDGIFSTSSTYRA

SEQ ID NO: 195183 - protein, 518 aa, Zea Mays
MASRHRNASPVTAGKDSPQPASAATSLRLVAEFPLDAPEAKESVTVTVRFRPLSSQEVRLGEEIAWYADGDTIVRSEQNHSIAYAYDRVFGPTTTTRHVYDAAALHVISGAMEGINGTIFAYGVTSSGKTHTMHGDQRSPGIIPLAVKDAFSIIQETPKREFLLRVSYLEIYNEVVNDLLNPSGQNLRIREDLQGTFVEGIKEEVVLSPAHALSLIAAGEEHRHVGSTNFNLLSSRSHTIFTLNLIDLAGSESSRAETTGVRRKEGSYINKSLLTLGTVISKLTDGKATHVPFRDSKLTRLLQSSLSGQGRVSLICTVTPASSNSEETRNTLKFAHRAKHIEIQVSQNKIMDEKSLIKKYQNEICQLKEELDQLKRGILSGTPSKDATEDNVILWKQKLEDGNVKLQSRLEQEEAAKAALLARIQRLTKLILVSTKATQTPRLSQCPRPRRRHSFGEEELACLPHRRRDIVLDGESNDLFVAMEGFDETFEVSSKGENKNRKGLLNWFKLRVYKSDTV

SEQ ID NO: 195184 - protein, 575 aa, Zea Mays
MPQKTMSFFGNRREDGNVKLQSRLEQEEAAKAALLARIQRLTKLILVSTKATQTPRLSQCPRPRRRHSFGEEELACLPHRRRDIVLDGESNDLFVAMEGFDETFEVSSKGENKNRKGLLNWFKLRKHDGGSNAPSLGGDQSSLRKALAAPWTPVEIGLNSQTEQEMSNSPENLSANLLSIDHEEFHSDGLYGEEASLVQYMSTSFFVYSTTHLIRTNAGYVTRKTSDHVDLLREQLKILSEEVALHKSVLKRLVEGAGRSTMNGHVEIEMKKVSDEIKDKQQQIAHLERQIKGELDQLEHTPSHATLLEQVNEKAFELEVKTADNRILQDQLQQKTRECQALEETVAHLHEQLSQALEANDLLSESIIFQQYTDNNLQTGSQIHIENPESIDISDELHQKAEQSEIDELKQRLCELTEAKTQLETHNQKLQEESMYAKGLASAAGVELKALSGEVTKLMNHNERLANDLALARNSTRVRSGHRVGRRDSYTKRLEPASRRDVHASSERESALEVMLMAKDQREAELQKKIEESKQKEAFLEGELANMWVLVAKLKKGQVIDQDDVSMPYPMDRDS

SEQ ID NO: 195185 - protein, 590 aa, Zea Mays
MDEKSLIKKYQNEICQLKEELDQLKRGILSGTPSKDATEDNVILWKQKLEDGNVKLQSRLEQEEAAKAALLARIQRLTKLILVSTKATQTPRLSQCPRPRRRHSFGEEELACLPHRRRDIVLDGESNDLFVAMEGFDETFEVSSKGENKNRKGLLNWFKLRKHDGGSNAPSLGGDQSSLRKALAAPWTPVEIGLNSQTEQEMSNSPENLSANLLSIDHEEFHSDGLYGEEASLVQVTRKTSDHVDLLREQLKILSEEVALHKSVLKRLVEGAGRSTMNGHVEIEMKKVSDEIKDKQQQIAHLERQIKGELDQLEHTPSHATLLEQVNEKAFELEVKTADNRILQDQLQQKTRECQALEETVAHLHEQLSQALEANDLLSESIIFQQYTDNNLQTGSQIHIENPESIDISDELHQKAEQSEIDELKQRLCELTEAKTQLETHNQKLQEESMYAKGLASAAGVELKALSGEVTKLMNHNERLANDLALARNSTRVRSGHRVGRRDSYTKRLEPASRRDVHASSERESALEVMLMAKDQREAELQKKIEESKQKEAFLEGELANMWVLVAKLKKGQVIDQDDVSMPYPMDRDS

SEQ ID NO: 195186 - protein, 387 aa, Zea Mays
MSNSPENLSANLLSIDHEEFHSDGLYGEEASLVTRKTSDHVDLLREQLKILSEEVALHKSVLKRLVEGAGRSTMNGHVEIEMKKVSDEIKDKQQQIAHLERQIKGELDQLEHTPSHATLLEQVNEKAFELEVKTADNRILQDQLQQKTRECQALEETVAHLHEQLSQALEANDLLSESIIFQQYTDNNLQTGSQIHIENPESIDISDELHQKAEQSEIDELKQRLCELTEAKTQLETHNQKLQEESMYAKGLASAAGVELKALSGEVTKLMNHNERLANDLALARNSTRVRSGHRVGRRDSYTKRLEPASRRDVHASSERESALEVMLMAKDQREAELQKKIEESKQKEAFLEGELANMWVLVAKLKKGQVIDQDDVSMPYPMDRDS

SEQ ID NO: 195187 - protein, 235 aa, Zea Mays
MAPAQQLQLPPPPVVWHAASSPRSVRGPPLRPRPAPKLPPARGHAISPWGPCPRPSSRLASTSSSVTSGAAAGVGYFDLPPAVDSSSSTYALNPIPSPVATASADPSPNSAREPKRKRTGPCVPRINSNRRDDQAESRLKSNRDLPDLSPTHASSPSSSAALQRWPPPTCSSICGTSSTWAPTRQPLTTSTSWASTPPPPLSATPSSSAPTSPSAPTRCEHIWRQAPQPLPRCRP

SEQ ID NO: 195188 - protein, 96 aa, Zea Mays
MEQCVARLDVAMFNAILRESASEIPTDPISDPIVDPKVLPIPAGDLSFGSGAQLKNSLQPTMTGALARTAIRLTIVDKVQSEVNASEVHERVMQRC

SEQ ID NO: 195189 - protein, 76 aa, Zea Mays
MRSTISSNFGLDRGHVQHTTHDGDPTHTGGHAVSSTASSTRKSKPPKQKLRQTVSTRLHIIEDSKLTNHPHNLVGL

SEQ ID NO: 195190 - protein, 69 aa, Zea Mays
MVCQKSGPPPCRGTASFFLFLFLVAWLLSLESLSVHNQIVMCVLIGSRIDDDTSPYRFVRHGGDSIYCA

SEQ ID NO: 195191 - protein, 65 aa, Zea Mays
MTPGMGAVIRARCLAPANFQIIISSSALLIAPSRLGVTLSKTHPFLWFQRVQSPRVIKELSPFLA

SEQ ID NO: 195192 - protein, 146 aa, Zea Mays
MTPTGSDSVAVSTRTGAESQRRGARAERSEIEGVSLGQREQRIGEGRKRENPHRGEGSGEGRRRGCAPPPCRSRRAAVAPVASCLGFDPVGTTQGLVPGRGVKGNFNPGQFRFQFGPKRTISMSYTKFQTRFIRSTRNKVWNRLIR

SEQ ID NO: 195193 - protein, 56 aa, Zea Mays
MKASSSGGWIMGSNTSQHSDQTECGCVFNLFGLATNCMRTCGRLHIIHVVDYWCSS

SEQ ID NO: 195194 - protein, 158 aa, Zea Mays
MPFCQLQQVVIRMKVVRQKIRAAPSTSRGIDGTKCISFTELISVTFVNKDGSEKTICVPVGMSMLEAAHENDIELEGACEGSLACSTCHVIVMDVKYYNKLEDPADEENDMLDLAFGLTETSRLGCQVIAKPELDGMRLALPVATRNFAVDGYVPKPH

SEQ ID NO: 195195 - protein, 153 aa, Zea Mays
MTAGQCGNIQDQEAAPGADLYAVLGLNRECTDAELRVAYRRLAMIWHPDRCSASGSSARVEEAKERFQEIQGAYSVLSDSNKRLLYDVGVYDSEDDDADVSKSKERPAAWACDGGDERSGSKQRLSTSRDVSGSGGGMSRSRGRAKAVETCGQ

SEQ ID NO: 195196 - protein, 169 aa, Zea Mays
MGDFLGEMADMMSQATPTESFEELQQLFVDMFQDDLDGAGFFGGLPTSRSAQGPSSTSLPPSTSPLRPTPPARSKGAQTPSSFNGAGRRGSTAKRPRTGWAGLEPDLGLSGFCFMVSKSKERPAAWACDGGDERSGSKQRLSTSRDVSGSGGGMSRSRGRAKAVETCGQ

SEQ ID NO: 195197 - protein, 171 aa, Zea Mays
MTAGQCGNIQDQEAAPGADLYAVLGLNRECTDAELRVAYRRLAMIWHPDRCSASGSSARVEEAKERFQEIQGAYSVLSDSNKRLLYDVGVYDSEDDDADVTTRPNSIACMCPQYPVGDGRLPRRDGRHDEPGHANGELRGAAAAVRGHVPGRPGRRRVLRRASDEPQCPGS

SEQ ID NO: 195198 - protein, 581 aa, Zea Mays
MLTLIARRSRHYAGTRYLKRGVNEEGRVANDVETEQIVYENMLGPWQISSVVQNRGSIPLFWSQETSKLNLKPDIICKHLSSCSMRKILFKHLFFLAVHEKDKNYEATRLHFENLRKRYGNPIIILNLIKTLEKRPREIILRWEFDRAIKIINSGLPGEDHLRFLHWDLHKNSQSKSTNALQVLLKVAFEALNMTEFFYCQVSPDQRAKGSPNLSPTLKIGFGHHACDDKNCGNADYVDDLDDISQEDTCGSSDPGNGIAEDKFEVNGSAQIKRPKFQKGVLRTNCIDCLDRTNVAQYAYGLAALGHQLHALGSVESPEVHLDSPLSRHLMHFYERMGDTLALQYGGSAAHNKIFSAKRGHLKFAIQSQEFFRTLQRYYSNAYMDAYKQAAINLFLGYFQPQVGKPALWEPESGDEHVLDDETCKLMKRARSDGSILNKSKLSISSNGPNGILKLAFTGSKNEGQRPNRSSDTACDNGMSKSRYTPTLSHIKHISCELDYYNGSGDSNFLDLDWLTASDNERLFILCFPFFGLSGVVSFCAWYGIHRNNSQNHFFINSLTSFLRCLSRLSGDLSIIALTRK

SEQ ID NO: 195199 - protein, 763 aa, Zea Mays
MLQRHQLLAEFDALFDSDKEKYAPFEDILRAAQEAIVLPPWVALAIRPRPGVWDYIRVNVSELAVEELSVSEYLAFKEQLVDGQSNSNFVLELDFEPFNASFPRPSMSKSIGNGVQFLNRHLSSKLFQDKESLYPLLNFLKAHNYKGTTMMLNDRIQSLRGLQSSLRKAEEYLLSVPQDTPYSEFNHRFQELGLEKGWGDTAKRVLDTLHLLLDLLEAPDPANLEKFLGTIPMMFNVVILSPHGYFAQSNVLGYPDTGGQVVYILDQVRALENEMLLRIKQQGLDITPKILIVTRLLPDAAGTTCGQRLEKVIGTEHTDIIRVPFRNENGILRKWISRFDVWPYLETYTEDVSSEIMKEMQAKPDLIIGNYSDGNLVATLLAHKLGVTQCTIAHALEKTKYPNSDIYLDKFDSQYHFSCQFTADLIAMNHTDFIITSTFQEIAGSKDTVGQYESHIAFTLPGLYRVVHGIDVFDPKFNIVSPGADMSVYYPYTETDKRLTAFHPEIEELIYSDVENSEHKFVLKDKKKPIIFSMARLDRVKNMTGLVEMYGKNARLRELANLVIVAGDHGKESKDREEQAEFKKMYSLIDEYKLKGHIRWISAQMNRVRNGELYRYICDTKGAFVQPAFYEAFGLTVIESMTCGLPTIATCHGGPAEIIVDGVSGLHIDPYHSDKAADILVNFFDKCKADPSYWDKISQGGLQRIYEKYTWKLYSERLMTLTGVYGFWKYVSNLERRETRRYIEMFYALKYRSLASQVPLSFD

SEQ ID NO: 195200 - protein, 450 aa, Zea Mays
MDFSAGSYFTSWPVNSASESYSLADGSVESYGGEGIMPPSSYFMTARSDHNLKFSVHEQDSTMLPNDQLTYAGARQTDLLPGETPSRDKLCENLLELQRLQNNSSLPSNLVPPGVLQHNSTPGAFHPQLNTPGLSELPHALSSSIDSNGSEVSAFLADLNAVSSASALCSTFQNASSFMEPVNLEAFSFQGAQSDSVLNKTTHPNGNISVFDSAALASLHEQNAVCNVPIPTFTARNQIAVAAMPGSLIPQKIPSWINENKSEGPVSHPSDVQIQPNSVGNGVGVKPRVRARRGQATDPHSIAERLRREKISDRMKNLQDLVPNSNKADKASMLDEIIDHVKFLQLQVKVLSMSRLGAPGAVLPLLAESQTEGYRGQLLSAPTNAQGLLDTEESEDTFAFEEEVVKLMETSITSAMQYLQNKGLCLMPVALASAISTQKGVSAASIPPEQ

SEQ ID NO: 195201 - protein, 479 aa, Zea Mays
MDFSAGSYFTSWPVNSASESYSLADGSVESYGGEGIMPPSSYFMTARSDHNLKFSVHEQDSTMLPNDQLTYAGARQTDLLPGETPSRDKLCENLLELQRLQNNSSLPSNLVPPGVLQHNSTPGAFHPQLNTPGLSELPHALSSSIDSNGSEVSAFLADLNAVSSASALCSTFQNASSFMEPVNLEAFSFQGAQSDSVLNKTTHPNGNISVFDSAALASLHDSKEFISGRLPSFASVQETNVAASGFKTQKQEQNAVCNVPIPTFTARNQIAVAAMPGSLIPQKIPSWINENKSEGPVSHPSDVQIQPNSVGNGVGVKPRVRARRGQATDPHSIAERLRREKISDRMKNLQDLVPNSNKADKASMLDEIIDHVKFLQLQVLSMSRLGAPGAVLPLLAESQTEGYRGQLLSAPTNAQGLLDTEESEDTFAFEEEVVKLMETSITSAMQYLQNKGLCLMPVALASAISTQKGVSAASIPPEQ

SEQ ID NO: 195202 - protein, 384 aa, Zea Mays
MDFSAGSYFTSWPVNSASESYSLADGSVESYGGEGIMPPSSYFMTARSDHNLKFSVHEQDSTMLPNDQLTYAGARQTDLLPGETPSRDKLCENLLELQRLQNNSSLPSNLVPPGVLQHNSTPGAFHPQLNTPGLSELPHALSSSIDSNGSEVSAFLADLNAVSSASALCSTFQNASSFMEPVNLEAFSFQGAQSDSVLNKTTHPNGNISVFDSAALASLHDSKEFISGRLPSFASVQETNVAASGFKTQKQEQNAVCNVPIPTFTARNQIAVAAMPGSLIPQKIPSWINENKSEGPVSHPSDVQIQPNSVGNGVGVKPRVRARRGQATDPHSIAERLRREKISDRMKNLQDLVPNSNKADKASMLDEIIDHVKFLQLQVKVKHE

SEQ ID NO: 195203 - protein, 91 aa, Zea Mays
MGQWPSLPIREPAVALDSVNPSGRTLFCSLNTCWLRISTARTCTTGFAYAEGRGRGGERRLDLERDGLVELELERRGRRRGHGRLFDLLLH

SEQ ID NO: 195204 - protein, 124 aa, Zea Mays
MDDALTTGSIKTSDAEKRRLAKASLAYNCESKNCPHFRKLFPEYVEKYNQQQQLENTAAEPVPQENPAPVPSLAVQQAPVVANRAQPLAEVRRDKNQKKAVPFWMVLVMFSVFGAVMALPLMQL

SEQ ID NO: 195205 - protein, 798 aa, Zea Mays
MVKGRTGQRVRLYVRGTILGYKRSKSNQYETTSLVQIEGVNTKEDVAWYAGKRMAYIYKAKTKSSETRYRCIWGKVTRPHGNSGVVRAKFKSNLPPESMISVFFPNESVQKSEAHPSSHQCFGLRIDHLFNSTQIYDPDAMHSFGLLVPLRLRRQMVAAASTTQAHWQMTGSSYACTCTAFRSISTKLAARSSAGRRSRGRRSAVDPSAGGPPLPPPPVVIAGAVASPGKRMPPSPIGCTSRAATASSSRQAKEDDGASRNVSGFEPSIWGDFFLTYSSPLATSSLHKAWMVHRAEQLKEEVAAKLVAASSACSLHRRIHLIHVLERLCLDHLFEDEISDMLARMNDVDVSGCDLQTVAMWFYLLRKHGYSVSSDVFAEFRDEQGGGFTANSARDLLSLHCAACLATRGETILDEAISFTAKSLKSTAPYTGAASLACEIKRALEIPLPRRVRIYEAKSRIAEYGREAEADELVMELAKLNYNLVQLQYQQELKIITRWWNGLELQSRLSFARDRVVECYFWIVGVYFEPSYSRARIILTKVIAIVSLLDDTYDVYGTPQECELFTECIESWDPAVAGGLPENMKFIFGKILDTYQSIEEELAPEEKYRMPYIKNFIIDLVRAYNKEVRWREQGYVPATVEEHLQVSARSGACHLLSCASFVGMGDVAGEEAFEWVCSVPKLVQALCIILRLSDDLKSYEREKMAPHVASTIESCMREHEVPLEVARVKIQEMIDETWKDFNEEWLNMNKHQPAELLERIFNLTRTMVYMYKNDDAYTNCHVIKDTINSLFVEPVSIA

SEQ ID NO: 195206 - protein, 107 aa, Zea Mays
MDRDTTIRAAASSLVPRIADAASHLTQSSAISISWPASLRPRSPPAPRHCVRNLLLLPRRCSRAEHGLRRCSRAEHVRQVSSQIGPALNMDCAQIGSAIINVQRGMP

SEQ ID NO: 195207 - protein, 197 aa, Zea Mays
MLHELCHNERGPHDAQFYKLWDELRKECEELVSKGITGTGQGFDGTGRRVGGFTVHPPPPSLRQATLAAAQKRARNGALLPSGPRKLGGNSEIMSALSPVQAAAMAAERRMYDDLWCGSHDQSAIDDSDDVIILQESPNLTRDEKDKGSCSNTSAQPSTSSRIHIAARDDRTTSDALDSSKWECGACTLLNQVSSRS

SEQ ID NO: 195208 - protein, 326 aa, Zea Mays
MEVGDLHKVWEVRALKIKPDATAARATLDRVARPRNPRLLGLNVGAGVEVKLRLRRAGRDHDFIPYEEVLDTMLHELCHNERGPHDAQFYKLWDELRKECEELVSKGITGTGQGFDGTGRRVGGFTVHPPPPSLRQATLAAAQKRARNGALLPSGPRKLGGNSEIMSALSPVQAAAMAAERRMYDDLWCGSHDQSAIDDSDDVIILQESPNLTRDEKDKGSCSNTSAQPSTSSRIHIAARDDRTTSDALDSSKWECGACTLLNQPLAPICEVCGTTKPKIAKAKYTTWSCKFCTLENSTKLDKCSACDQWRYSYGPPVATYGPSYD

SEQ ID NO: 195209 - protein, 113 aa, Zea Mays
MRRMRVLRRLLRKYREAKKIDKHMYHDMYMKVKGNMFKNKRVLMESIHKSKAEKAREKTLSDQFEAKRAKSKASRERKIARREERLAQGPREPAAAPVSATAPFAAAPKKAKK

SEQ ID NO: 195210 - protein, 131 aa, Zea Mays
METLILAVYNLPRGRHSSLTCAPSHTRHNPTHPAGRPSSSAEAMVSLKPQKRLAAGVLKCGKGKVWLDPNEVYEISMANSRKTTTACSPPPPPAHFVFAGRRIRSSMSNGVRVVRPRTPFSPLDRSVRLTS

SEQ ID NO: 195211 - protein, 247 aa, Zea Mays
METLILAVYNLPRGRHSSLTCAPSHTRHNPTHPAGRPSSSAEAMVSLKPQKRLAAGVLKCGKGKVWLDPNEVYEISMANSRQNIRKLVKDGFIIKKPQKIHSRSRARRAHEAKQKGRHSGYGKRRGTREARLPTKILWMRRMRVLRRLLRKYREAKKIDKHMYHDMYMKVKGNMFKNKRVLMESIHKSKAEKAREKTLSDQFEAKRAKSKASRERKIARREERLAQVRQCLNAMKLYIFIVIEPAVL

SEQ ID NO: 195212 - protein, 241 aa, Zea Mays
MGAEAGEPSSILSLASAFSYGVASMAMVFVNKAVLMQYVHSMTLLTLQVILSVICTATGVLIAALGDFSFDLYGYCMALTSVFFQTMYLILVEKSGAEDGLSSVDLMFYNSILSLPFLFFLIIATGEFPHSLTVLSAKAASLTFGVILVISLVMGIVLNFTMFWCTIVNSALTTTIVGVLKGVGSTTLGFVLLGGVEVHALNVTGLVINTFGGVWYSYAKYKQKRKTPRKIQHDVESHAHK

SEQ ID NO: 195213 - protein, 88 aa, Zea Mays
MGIVLNFTMFWCTIVNSALTTTIVGVLKGVGSTTLGFVLLGGVEVHALNVTGLVINTFGGVWYSYAKYKQKRKTPRKIQHDVESHAHK

SEQ ID NO: 195214 - protein, 227 aa, Zea Mays
MGAEAGEPSSILSLASAFSYGVASMAMVFVNKAVLMQYVHSMTLLTLQQIATALLIHFGQVLGMSKRKDFSWITAKKLLPVSIFYNANVGFALASLKGVNIPMYIAIKRITPLAVLVAGCMRGKGKPPTQVILSVICTATGVLIAALGDFSFDLYGYCMALTSVFFQTMYLILVEKSGAEDGLSSVDLMFYNSILSLPFLFFLIIATGEFPHSLTVLSAKVSDTNAV

SEQ ID NO: 195215 - protein, 50 aa, Zea Mays
MALDHGVGCTKGWAANCIMVSFSCFFILFFLSFSNIYLFIFFSTQTQFQV

SEQ ID NO: 195216 - protein, 955 aa, Zea Mays
MSLSLVRVSGAWFEILYNPIMCFFWILKVILEIPHLQYKLILLKAASSFIEIISFCTATIFGLFVTVAAVIGQSGIKREANSIEAPLIPNNEKAEGETTDMIKDYSLWELLTFKFVNPVMDIGITRQLDFTDLLELPNELRATSCYDKLLSSWTAEYQNHHDNSSLLRAMSNSYGWTYLRLGLLKVLNDSIGFVSPLLLNKFIRLLQQGSDGMDGYILAISLGLTSIIKSFLDSQYSFRLAKLKLMLRSSIMGIIYWKCLCLSLAERSRFSEGEIQTFMSVDADRTINLCNSLHDAWSLPLQIGVALYLLYTQVNYAFLSGLAITIILIPVNKWISTRIAGATEKMMKQKDRRISCAGELLAHIRTVKMYSWEKLFTERLVERRESEVKHLATRKYLDAWCVYFWATTPTLFSLSTFSIFAITGHALDAATVFTCVALFNTLISPLNSFPWVINGMIDAVISSRRLSNYLSTPEHHSSELNASADLLNHHFKRYTKVTHNPMAIVFQNVSCSWSSSSVAELNIVLRDISLQLQKGFFIAIVGEVGSGKSSLLNTVIGETRVISGSISSCGSIAYVPQVPWILSGSLRDNILLGKEFDPRRYEEVIEACALHVDISAMTRGDMSHIGEKGTNLSGGQRARLALARALYHNSDVYLFDDILSAVDSQVASCILEKAIMGHQLMQKTRLLSTHNLQAIFAADMIVVMANGLIKWFGTPKSFLATPYSRTSKPDNSSPTSFAASVKDKTPMVTCELKPDAVLEDSVVCYEETKDRVEEEARKQGKVELGVYKKYAAFVGWSTVVLIFLSAFLMQTSRNGNDIWLTYWVDTSTGTNNTRFYLIILAMFGIINSLFTLGRAFSFAFGGLRAAIHIHASLLENIISAPICFFDQNPSGRILNRLSSDLYAVDDSLPFILNIFVANFFSLFGTLVVLSYSQVSFLLVLLPLWLIYRKLQVYIT

SEQ ID NO: 195217 - protein, 1316 aa, Zea Mays
MSLSLVRVSGAWFEILYNPIMCFFWILKVILEIPHLQYKLILLKAASSFIEIISFCTATIFGLFVTVAAVIGQSGIKREANSIEAPLIPNNEKAEGETTDMIKDYSLWELLTFKFVNPVMDIGITRQLDFTDLLELPNELRATSCYDKLLSSWTAEYQNHHDNSSLLRAMSNSYGWTYLRLGLLKVLNDSIGFVSPLLLNKFIRLLQQGSDGMDGYILAISLGLTSIIKSFLDSQYSFRLAKLKLMLRSSIMGIIYWKCLCLSLAERSRFSEGEIQTFMSVDADRTINLCNSLHDAWSLPLQIGVALYLLYTQVNYAFLSGLAITIILIPVNKWISTRIAGATEKMMKQKDRRISCAGELLAHIRTVKMYSWEKLFTERLVERRESEVKHLAVFTCVALFNTLISPLNSFPWVINGMIDAVISSRRLSNYLSTPEHHSSELNASADLLNHHFKRYTKVTHNPMAIVFQNVSCSWSSSSVAELNIVLRDISLQLQKGFFIAIVGEVGSGKSSLLNTVIGETRVISGSISSCGSIAYVPQVPWILSGSLRDNILLGKEFDPRRYEEVIEACALHVDISAMTRGDMSHIGEKGTNLSGGQRARLALARALYHNSDVYLFDDILSAVDSQVASCILEKAIMGHQLMQKTRLLSTHNLQAIFAADMIVVMANGLIKWFGTPKSFLATPYSRTSKPDNSSPTSFAASVKDKTPMVTCELKPDAVLEDSVVCYEETKDRVEEEARKQGKVELGVYKKYAAFVGWSTVVLIFLSAFLMQTSRNGNDIWLTYWVDTSTGTNNTRFYLIILAMFGIINSLFTLGRAFSFAFGGLRAAIHIHASLLENIISAPICFFDQNPSGRILNRLSSDLYAVDDSLPFILNIFVANFFSLFGTLVVLSYSQVSFLLVLLPLWLIYRKLQFYYRSTSREVRRLDSVARSPIYSSFTETLDGSSTIRAFQNEGFFFERFIQHVTLYQKTSYTELVASLWLSLRLQLLAGFIILFIAMMATISFHSSSLVNFATPGLVGLALSYAAPVVSLLNGFLTTFTETEKEMISVERVDEYIGIPQEELQGSEPPPRSWPTEGKIEFEHVTLKYKPELPPALSDVSFLIASGMQVGIIGRTGAGKSSILNALFRLVPIWNGRILVDGIDLAKVAVRELRGHFAVVPQSPFLFDGSLRENLDPFNTKTDLRIWEVLENCHMKGQVESIGGLDIHVKESGASFSVGQRQLLCLARAILKSSKVLCLDECTANVDNQTASLLQNTISAECKGMTVLTIAHRISTVMKMDNILVLDQGKLVEEGNPEALMNHRHSRFAQHVKASQM

SEQ ID NO: 195218 - protein, 824 aa, Zea Mays
MIKDYSLWELLTFKFVNPVMDIGITRQLDFTDLLELPNELRATSCYDKLLSSWTAEYQNHHDNSSLLRAMSNSYGWTYLRLGLLKVLNDSIGFVSPLLLNKFIRLLQQGSDGMDGYILAISLGLTSIIKSFLDSQYSFRLAKLKLMLRSSIMGIIYWKCLCLSLAERSRFSEGEIQTFMSVDADRTINLCNSLHDAWSLPLQIGVALYLLYTQVNYAFLSGLAITIILIPVNKWISTRIAGATEKMMKQKDRRISCAGELLAHIRTVKMYSWEKLFTERLVERRESEVKHLATRKYLDAWCVYFWATTPTLFSLSTFSIFAITGHALDAATVFTCVALFNTLISPLNSFPWVINGMIDAVISSRRLSNYLSTPEHHSSELNASADLLNHHFKRYTKVTHNPMAIVFQNVSCSWSSSSVAELNIVLRDISLQLQKGFFIAIVGEVGSGKSSLLNTVIGETRVISGSISSCGSIAYVPQVPWILSGSLRDNILLGKEFDPRRYEEVIEACALHVDISAMTRGDMSHIGEKGTNLSGGQRARLALARALYHNSDVYLFDDILSAVDSQVASCILEKAIMGHQLMQKTRLLSTHNLQAIFAADMIVVMANGLIKWFGTPKSFLATPYSRTSKPDNSSPTSFAASVKDKTPMVTCELKPDAVLEDSVVCYEETKDRVEEEARKQGKVELGVYKKYAAFVGWSTVVLIFLSAFLMQTSRNGNDIWLTYWVDTSTGTNNTRFYLIILAMFGIINSLFTLGRAFSFAFGGLRAAIHIHASLLENIISAPICFFDQNPSGRILNRFGILFIRSPLVFSKHRKIEMSLGLGNAL

SEQ ID NO: 195219 - protein, 450 aa, Zea Mays
MIDAVISSRRLSNYLSTPEHHSSELNASADLLNHHFKRYTKVTHNPMAIVFQNVSCSWSSSSVAELNIVLRDISLQLQKGFFIAIVGEVGSGKSSLLNTVIGETRVISGSISSCGSIAYVPQVPWILSGSLRDNILLGKEFDPRRGDMSHIGEKGTNLSGGQRARLALARALYHNSDVYLFDDILSAVDSQVASCILEKAIMGHQLMQKTRLLSTHNLQAIFAADMIVVMANGLIKWFGTPKSFLATPYSRTSKPDNSSPTSFAASVKDKTPMVTCELKPDAVLEDSVVCYEETKDRVEEEARKQGKVELGVYKKYAAFVGWSTVVLIFLSAFLMQTSRNGNDIWLTYWVDTSTGTNNTRFYLIILAMFGIINSLFTLGRAFSFAFGGLRAAIHIHASLLENIISAPICFFDQNPSGRILNRFGILFIRSPLVFSKHRKIEMSLGLGNAL

SEQ ID NO: 195220 - protein, 308 aa, Zea Mays
MEPFVAAQGLVIVLQRSHARAYDDPLNKPNVQTTKNLRENKSTGAELPSLLPPAPPPSVPPPRYIATTGSTARNVSSLPDSSSPTRFGYPAGRRVLCPVPASAAGRMSLFRRLFYRRPPDGLVEISGNILVFDHCYSTDLLEEDELMPYIGGILKQLLGRHSIDSFMVFNFEGSKKDNQIASIFSYYDMSVMGYPRNYEGCPLLTMEMIHHFLRSSESWLSLSQDNFLLIHAEHGGWPILAFALAALLVYLKRYNDERKALEAVCKQAPDGLAEFFSPLDPVPSQLRYLKCQILMGKGDVDQYSAFMA

SEQ ID NO: 195221 - protein, 531 aa, Zea Mays
MEEDDNLHSEGGLKVFDHCYSTDLLEEDELMPYIGGILKQLLGRHSIDSFMVFNFEGSKKDNQIASIFSYYDMSVMGYPRNYEGCPLLTMEMIHHFLRSSESWLSLSQDNFLLIHAEHGGWPILAFALAALLVYLKRYNDERKALEAVCKQAPDGLAEFFSPLDPVPSQLRYLKYVSKRHKSLESWPPVDRMLNLNCIIIRKVPNFDGQGGCRPIFRIYGLDPLAPNDRGTKLLFLTPKTSDFVQLYTQEDCEIIKVNVHCPVQGDIVIECVSLDEDFEHEVMMFRAMFSTAFIEDNLLVLDRNEIDILWDTKHRFPVDFRVEVIFSDMEIGTAVHKSGLSSEEKESLSKVGDAFSHLEWSSKSVHITNEDSKQKGLQTEHDGFEKIPLEETGTSSASAGNSSRTVQIHHIEPAENHSSLASVHSSPEPEASGSGPNFQGGQLSNDTSAQEEHEVDDTKVEPNPEIPRDAEAGDADAAATAAEWSDNNSDVFLSDTHTPSSSTPSSPPKFDEDILEAGMVGTRSQLTELKI

SEQ ID NO: 195222 - protein, 1331 aa, Zea Mays
MSSLVERLRVRSERRPRYALDESDDDLPLRVGAGKGKDQQNDAPAERIEREDAKEEACQRCGKSDNLVSCSTCTYKFHRKCLVPCLNITSDKWSCPECVSPLTEMERILDIEVLEAPREDSSSTEPRSKKMERYLIKWKGLSYIHCSWVSEKEYSEAANIHPRLRTRLNNFRRQKEAMKIEAERSGEDIVAIRPEWTTVDRILASRKNLVGDREYYVKWNELTYEECTWENESDITVFQPEIERFNEIQFRRKKSGDKGKATREPRQFKESPTFLSGGTLHPYQLEGLNFLRYSWFHNKRVILGDEMGLGKTIQSIAFLASLFEDKFGPHLVVAPLSTLRNWEREFATWAPQMNVVMYFGAAASRDIIRKYEFYYPKEKLKKLKKKKSSPSNEDKKQSRIRFDVLLTSYEMINMDSSILKNIEWECLVVDEGHRLKNKDSKLFGQLKDYNTKHRVLLTGTPVQNNLDELFMLMHFLEGESFGSITDLQEEFKDINQDKQIEKLHGMLKPHLLRRFKKDVMKELPPKKELILRVELTRKQKEYYKAILTKNYEVLARRNGGHTSLINVVMELRKLCCHGFMIDEPDLEPANPEEGLRRLLDSSGKMQLLDKMMVKLKEQGHRVLIYSQFQHMLDLLEDYLSYRKWTYERIDGKISGADRQIRIDRFNAKNSTRFCFLLSTRAGGLGINLATADTVIIYDSDWNPHADLQAMARAHRLGQTSKVMIYRLVSRGTIEERMMQLTKKKILLEHLVVGRLTKANNVNQEELDDIIRYGSKELFEDENDESRQIHYDEAAIERLLDRDQVDGDESVEDEEEDGFLKGFKVANFEYIDEAKAQAEKEEARRKAAAEAENSERNYWDELLKDRYDVQKVEEHTAMGKGKRSRKQMAAADEDDIHDLSSEDEDYSLEDDISDNDTSLQGNISGKRGQYSKRKSRNVDSIPLMEGEGRTLRVLGFNHAQRAMFLQTLNRFGFQNYDWKEYLPRLKGKSVEEIQRYAELVMAHLVEEINDSDYFSDGVPKEMMRVDDVLVRIANISLIEEKMAATGPGKITNIFPNYLLYEFQGLSGGRIWKAEHDLLLLRGILKHGYARWQYISDDRENGLFEAARRELHLPSVNEIIGAQLNEANGNLEGAQEGQANTTSMSHYKEIQRKIVEFLRKRYHLMERALNMEYAVIKKKIPVPDDITEQGVPAGHAPFIPDISELLRELPNLEPISTNELVSEGTAGQLQVPHLYNKMCGVLEESGAYALSSFFGDKSASSSLANSLRQFETVCENVVEALRPHQNGTGSAIKEELVDAATKAAAAAAPQQDSGHDAPHGQSSTAKADMEIDG

SEQ ID NO: 195223 - protein, 974 aa, Zea Mays
MSSLVERLRVRSERRPRYALDESDDDLPLRVGAGKGKDQQNDAPAERIEREDAKEEACQRCGKSDNLVSCSTCTYKFHRKCLVPCLNITSDKWSCPECVSPLTEMERILDIEVLEAPREDSSSTEPRSKKMERYLIKWKGLSYIHCSWVSEKEYSEAANIHPRLRTRLNNFRRQKEAMKIEAERSGEDIVAIRPEWTTVDRILASRKNLVGDREYYVKWNELTYEECTWENESDITVFQPEIERFNEIQFRRKKSGDKGKATREPRQFKESPTFLSGGTLHPYQLEGLNFLRYSWFHNKRVILGDEMGLGKTIQSIAFLASLFEDKFGPHLVVAPLSTLRNWEREFATWAPQMNVVMYFGAAASRDIIRKYEFYYPKEKLKKLKKKKSSPSNEDKKQSRIRFDVLLTSYEMINMDSSILKNIEWECLVVDEGHRLKNKDSKLFGQLKDYNTKHRVLLTGTPVQNNLDELFMLMHFLEGESFGSITDLQEEFKDINQDKQIEKLHGMLKPHLLRRFKKDVMKELPPKKELILRVELTRKQKEYYKAILTKNYEVLARRNGGHTSLINVVMELRKLCCHGFMIDEPDLEPANPEEGLRRLLDSSGKMQLLDKMMVKLKEQGHRVLIYSQFQHMLDLLEDYLSYRKWTYERIDGKISGADRQIRIDRFNAKNSTRFCFLLSTRAGGLGINLATADTVIIYDSDWNPHADLQAMARAHRLGQTSKVMIYRLVSRGTIEERMMQLTKKKILLEHLVVGRLTKANNVNQEELDDIIRYGSKELFEDENDESRQIHYDEAAIERLLDRDQVDGDESVEDEEEDGFLKGFKVANFEYIDEAKAQAEKEEARRKAAAEAENSERNYWDELLKDRYDVQKVEEHTAMGKGKRSRKQMAAADEDDIHDLSSEDEDYSLEDDISDNDTSLQGNISGKRGQYSKRKSRNVDSIPLMEGEGRTLRVLGFNHAQRAMFLQTLNSIKYLH

SEQ ID NO: 195224 - protein, 1145 aa, Zea Mays
MSSLVERLRVRSERRPRYALDESDDDLPLRVGAGKGKDQQNDAPAERIEREDAKEEACQRCGKSDNLVSCSTCTYKFHRKCLVPCLNITSDKWSCPECVSPLTEMERILDIEVLEAPREDSSSTEPRSKKMERYLIKWKGLSYIHCSWVSEKEYSEAANIHPRLRTRLNNFRRQKEAMKIEAERSGEDIVAIRPEWTTVDRILASRKNLVGDREYYVKWNELTYEECTWENESDITVFQPEIERFNEIQFRRKKSGDKGKATREPRQFKESPTFLSGGTLHPYQLEGLNFLRYSWFHNKRVILGDEMGLGKTIQSIAFLASLFEDKFGPHLVVAPLSTLRNWEREFATWAPQMNVVMYFGAAASRDIIRKYEFYYPKEKLKKLKKKKSSPSNEDKKQSRIRFDVLLTSYEMINMDSSILKNIEWECLVVDEGHRLKNKDSKLFGQLKDYNTKHRVLLTGTPVQNNLDELFMLMHFLEGESFGSITDLQEEFKDINQDKQIEKLHGMLKPHLLRRFKKDVMKELPPKKELILRVELTRKQKEYYKAILTKNYEVLARRNGGHTSLINVVMELRKLCCHGFMIDEPDLEPANPEEGLRRLLDSSGKMQLLDKMMVKLKEQGHRVLIYSQFQHMLDLLEDYLSYRKWTYERIDGKISGADRQIRIDRFNAKNSTRFCFLLSTRAGGLGINLATADTVIIYDSDWNPHADLQAMARAHRLGQTSKVMIYRLVSRGTIEERMMQLTKKKILLEHLVVGRLTKANNVNQEELDDIIRYGSKELFEDENDESRQIHYDEAAIERLLDRDQVDGDESVEDEEEDGFLKGFKVANFEYIDEAKAQAEKEEARRKAAAEAENSERNYWDELLKDRYDVQKVEEHTAMGKGKRSRKQMAAADEDDIHDLSSEDEDYSLEDDISDNDTSLQGNISGKRGQYSKRKSRNVDSIPLMEGEGRTLRVLGFNHAQRAMFLQTLNRFGFQNYDWKEYLPRLKGKSVEEIQRYAELVMAHLVEEINDSDYFSDGVPKEMMRVDDVLVRIANISLIEEKMAATGPGKITNIFPNYLLYEFQGLSGGRIWKAEHDLLLLRGILKHGYARWQYISDDRENGLFEAARRELHLPSVNEIIGEFGRCTGRPSEHNKHVALQGDPEKDS

SEQ ID NO: 195225 - protein, 304 aa, Zea Mays
MSSLVERLRVRSERRPRYALDESDDDLPLRVGAGKGKDQQNDAPAERIEREDAKEEACQRCGKSDNLVSCSTCTYKFHRKCLVPCLNITSDKWSCPECVSPLTEMERILDIEVLEAPREDSSSTEPRSKKMERYLIKWKGLSYIHCSWVSEKEYSEAANIHPRLRTRLNNFRRQKEAMKIEAERSGEDIVAIRPEWTTVDRILASRKNLVGDREYYVKWNELTYEECTWENESDITVFQPEIERFNEIQFRRKKSGDKGKATREPRQFKESPTFLSGGSIYQMTERMGFLRLHDESFISLRLMK

SEQ ID NO: 195226 - protein, 622 aa, Zea Mays
MARAHRLGQTSKVMIYRLVSRGTIEERMMQLTKKKILLEHLVVGRLTKANNVNQEELDDIIRYGSKELFEDENDESRQIHYDEAAIERLLDRDQVDGDESVEDEEEDGFLKGFKVANFEYIDEAKAQAEKEEARRKAAAEAENSERNYWDELLKDRYDVQKVEEHTAMGKGKRSRKQMAAADEDDIHDLSSEDEDYSLEDDISDNDTSLQGNISGKRGQYSKRKSRNVDSIPLMEGEGRTLRVLGFNHAQRAMFLQTLNRFGFQNYDWKEYLPRLKGKSVEEIQRYAELVMAHLVEEINDSDYFSDGVPKEMMRVDDVLVRIANISLIEEKMAATGPGKITNIFPNYLLYEFQGLSGGRIWKAEHDLLLLRGILKHGYARWQYISDDRENGLFEAARRELHLPSVNEIIGAQLNEANGNLEGAQEGQANTTSMSHYKEIQRKIVEFLRKRYHLMERALNMEYAVIKKKIPVPDDITEQGVPAGHAPFIPDISELLRELPNLEPISTNELVSEGTAGQLQVPHLYNKMCGVLEESGAYALSSFFGDKSASSSLANSLRQFETVCENVVEALRPHQNGTGSAIKEELVDAATKAAAAAAPQQDSGHDAPHGQSSTAKADMEIDG

SEQ ID NO: 195227 - protein, 1329 aa, Zea Mays
MSSLVERLRVRSERRPRYALDESDDDLPLRVGAGKGKDQQNDAPAERIEREDAKEEACQRCGKSDNLVSCSTCTYKFHRKCLVPCLNITSDKWSCPECVSPLTEMERILDIEVLEAPREDSSSTEPRSKKMERYLIKWKGLSYIHCSWVSEKEYSEAANIHPRLRTRLNNFRRQKEAMKIEAERSGEDIVAIRPEWTTVDRILASRKNLVGDREYYVKWNELTYEECTWENESDITVFQPEIERFNEIQFRRKKSGDKGKATREPRQFKESPTFLSGGTLHPYQLEGLNFLRYSWFHNKRVILGDEMGLGKTIQSIAFLASLFEDKFGPHLVVAPLSTLRNWEREFATWAPQMNVVMYFGAAASRDIIRKYEFYYPKEKLKKLKKKKSSPSNEDKKQSRIRFDVLLTSYEMINMDSSILKNIEWECLVVDEGHRLKNKDSKLFGQLKDYNTKHRVLLTGTPVQNNLDELFMLMHFLEGESFGSITDLQEEFKDINQDKQIEKLHGMLKPHLLRRFKKDVMKELPPKKELILRVELTRKQKEYYKAILTKNYEVLARRNGGHTSLINVVMELRKLCCHGFMIDEPDLEPANPEEGLRRLLDSSGKMQLLDKMMVKLKEQGHRVLIYSQFQHMLDLLEDYLSYRKWTYERIDGKISGADRQIRIDRFNAKNSTRFCFLLSTRAGGLGINLATADTVIIYDSDWNPHADLQAMARAHRLGQTSKVMIYRLVSRGTIEERMMQLTKKKILLEHLVVGRLTKANNVNQEELDDIIRYGSKELFEDENDESRQIHYDEAAIERLLDRDQVDGDESVEDEEEDGFLKGFKVANFEYIDEAKAQAEKEEARRKAAAEAENSERNYWDELLKDRYDVQKVEEHTAMGKGKRSRKQMAAADEDDIHDLSSEDEDYSLEDDISDNDTSLQGNISGKRGQYSKRKSRNVDSIPLMEGEGRTLRVLGFNHAQRAMFLQTLNRFGFQNYDWKEYLPRLKGKSVEEIQRYAELVMAHLVEEINDSDYFSDGVPKEMMRVDDVLVRIANISLIEEKMAATGPGKITNIFPNYLLYEFQGLSGGRIWKAEHDLLLLRGILKHGYARWQYISDDRENGLFEAARRELHLPSVNEIIGAQLNEGNLEGAQEGQANTTSMSHYKEIQRKIVEFLRKRYHLMERALNMEYAVIKKKIPVPDDITEQGVPAGHAPFIPDISELLRELPNLEPISTNELVSEGTAGQLQVPHLYNKMCGVLEESGAYALSSFFGDKSASSSLANSLRQFETVCENVVEALRPHQNGTGSAIKEELVDAATKAAAAAAPQQDSGHDAPHGQSSTAKADMEIDG

SEQ ID NO: 195228 - protein, 726 aa, Zea Mays
MSSLVERLRVRSERRPRYALDESDDDLPLRVGAGKGKDQQNDAPAERIEREDAKEEACQRCGKSDNLVSCSTCTYKFHRKCLVPCLNITSDKWSCPECVSPLTEMERILDIEVLEAPREDSSSTEPRSKKMERYLIKWKGLSYIHCSWVSEKEYSEAANIHPRLRTRLNNFRRQKEAMKIEAERSGEDIVAIRPEWTTVDRILASRKNLVGDREYYVKWNELTYEECTWENESDITVFQPEIERFNEIQFRRKKSGDKGKATREPRQFKESPTFLSGGTLHPYQLEGLNFLRYSWFHNKRVILGDEMGLGKTIQSIAFLASLFEDKFGPHLVVAPLSTLRNWEREFATWAPQMNVVMYFGAAASRDIIRKYEFYYPKEKLKKLKKKKSSPSNEDKKQSRIRFDVLLTSYEMINMDSSILKNIEWECLVVDEGHRLKNKDSKLFGQLKDYNTKHRVLLTGTPVQNNLDELFMLMHFLEGESFGSITDLQEEFKDINQDKQIEKLHGMLKPHLLRRFKKDVMKELPPKKELILRVELTRKQKEYYKAILTKNYEVLARRNGGHTSLINVVMELRKLCCHGFMIDEPDLEPANPEEGLRRLLDSSGKMQLLDKMMVKLKEQGHRVLIYSQFQHMLDLLEDYLSYRKWTYERIDGKISGADRQIRIDRFNAKNSTRFCFLLSTRAGGLGINLATADTVIIYDSDWNPHADLQAMARAHRLGQTSDDIQAC

SEQ ID NO: 195229 - protein, 1334 aa, Zea Mays
MSSLVERLRVRSERRPRYALDESDDDLPLRVGAGKGKDQQNDAPAERIEREDAKEEACQRCGKSDNLVSCSTCTYKFHRKCLVPCLNITSDKWSCPECVSPLTEMERILDIEVLEAPREDSSSTEPRSKKMERYLIKWKGLSYIHCSWVSEKEYSEAANIHPRLRTRLNNFRRQKEAMKIEAERSGEDIVAIRPEWTTVDRILASRYTGKNLVGDREYYVKWNELTYEECTWENESDITVFQPEIERFNEIQFRRKKSGDKGKATREPRQFKESPTFLSGGTLHPYQLEGLNFLRYSWFHNKRVILGDEMGLGKTIQSIAFLASLFEDKFGPHLVVAPLSTLRNWEREFATWAPQMNVVMYFGAAASRDIIRKYEFYYPKEKLKKLKKKKSSPSNEDKKQSRIRFDVLLTSYEMINMDSSILKNIEWECLVVDEGHRLKNKDSKLFGQLKDYNTKHRVLLTGTPVQNNLDELFMLMHFLEGESFGSITDLQEEFKDINQDKQIEKLHGMLKPHLLRRFKKDVMKELPPKKELILRVELTRKQKEYYKAILTKNYEVLARRNGGHTSLINVVMELRKLCCHGFMIDEPDLEPANPEEGLRRLLDSSGKMQLLDKMMVKLKEQGHRVLIYSQFQHMLDLLEDYLSYRKWTYERIDGKISGADRQIRIDRFNAKNSTRFCFLLSTRAGGLGINLATADTVIIYDSDWNPHADLQAMARAHRLGQTSKVMIYRLVSRGTIEERMMQLTKKKILLEHLVVGRLTKANNVNQEELDDIIRYGSKELFEDENDESRQIHYDEAAIERLLDRDQVDGDESVEDEEEDGFLKGFKVANFEYIDEAKAQAEKEEARRKAAAEAENSERNYWDELLKDRYDVQKVEEHTAMGKGKRSRKQMAAADEDDIHDLSSEDEDYSLEDDISDNDTSLQGNISGKRGQYSKRKSRNVDSIPLMEGEGRTLRVLGFNHAQRAMFLQTLNRFGFQNYDWKEYLPRLKGKSVEEIQRYAELVMAHLVEEINDSDYFSDGVPKEMMRVDDVLVRIANISLIEEKMAATGPGKITNIFPNYLLYEFQGLSGGRIWKAEHDLLLLRGILKHGYARWQYISDDRENGLFEAARRELHLPSVNEIIGAQLNEANGNLEGAQEGQANTTSMSHYKEIQRKIVEFLRKRYHLMERALNMEYAVIKKKIPVPDDITEQGVPAGHAPFIPDISELLRELPNLEPISTNELVSEGTAGQLQVPHLYNKMCGVLEESGAYALSSFFGDKSASSSLANSLRQFETVCENVVEALRPHQNGTGSAIKEELVDAATKAAAAAAPQQDSGHDAPHGQSSTAKADMEIDG

SEQ ID NO: 195230 - protein, 115 aa, Zea Mays
MGEAADRERPPWRCTVAVQAALCLALYAAFSLGEPQLIPRGGVDALGRGARGGGVAFLSVAGGARGPIDQERLLRQMETTAKLYEVKFVLDVTQLGADDPLWQNGSMYFQALNIP

SEQ ID NO: 195231 - protein, 212 aa, Zea Mays
METTAKLYEVKFVLDVTQLGADDPLWQNGSMYFQALNIPWYSTSSHGRTVGNFLKKVKMPYDQVLDIIGLGTWPLQEPLHGGRISTSYKGQIKWLDRLLALTESNWKIVVGYNPLLVCNGKETTKLDVPFQHIFAKYEVNAYISMGGSCGYFHRDNSILYIGHPRSPGGAQTSVDGFFLHRVRPLEMESMLINVEGKLVQRSDVQQHGTGAM

SEQ ID NO: 195232 - protein, 51 aa, Zea Mays
MPYDQVLDIIGLGTWPLQEPLHGGRISTSYKGQIKWLDRLLALTESNWVKQ

SEQ ID NO: 195233 - protein, 139 aa, Zea Mays
MEGSVRLGDLKPSPSHIKPSPSPDTGEPFLASQPPPSLGLRDLARIDVCSPAVSSRTLPPCPVADVSRPAPPGQMTPPCPASVLPTLAAPHRGPKPNTESCFRYDVPRPMKWIPTGLHPPILRRTAGRPKIQRYKGSHE

SEQ ID NO: 195234 - protein, 120 aa, Zea Mays
MEGSVRLGDLKPSPSHIKPSPSPDTGEPFLASQPPPSLGLRDLARIDVCSPAVSSRTLPPCPVADVSRPAPPGQMTPPCPASVLPTLAAPHRGPKPNTESCFRYDVPRPMKWIPTGESWI

SEQ ID NO: 195235 - protein, 431 aa, Zea Mays
MACGKFLSSTKKKEAYGTYKNHTKKGEWKTASHSTRGRLESPVSPLRTHWCSNYSPSLRAANKTSQSIAVLAASSARPSNYRMPLSCFAGGDPSAAPPSSSATSVYWTHLGGVTLTWSRAPIGLLLAAELSLRPAGDVHGGEDATPARFAFRPWLPWRRRGSKRFAAPGGRAVKFSWDLSRARFAATGRRPEPVSRYSLRVWVDGELALAVGDHAPAAGLLLSRRESAAVVADGRGEAYSTAVDVAGERHDVSLAVEGSTMWVAIDGEKALQVRRLRWKFRGSERLDLPTGRRVRVTWDLHGWLFCPDAAAAVFVLRFETSDAAEADDEGDADESEAGPHVLRQPSFSFRNHQAHGSGGDSWFSSDSDRRGWMRGPFRSGGSDTSPSVSVASTSAASSAASVATVSEWAAAEEAATLKDGGGFSLVVQLWW

SEQ ID NO: 195236 - protein, 66 aa, Zea Mays
MVSGDRPACACGAERRRTARRARRTRECLGSFCTLCARKGTVGAHLLVGPFGPPLCRVLLPSSRAK

SEQ ID NO: 195237 - protein, 342 aa, Zea Mays
MAAPCGRGGGTLTLVLVALSAAFLTYNVLISFHSSLQPLPSSFPTASRRFGAAGSARRRAFHTAVTASGSAYNTWQCRVMYHWFKEARRAPGGDEMGGFTRILHSGKPDEFVDEIPTFVADPLPDGDQGYIVLNRPWAFVQWLQKADIKEDYILMAEPDHIIVKPIPNLSRDGQAAAFPFFYIEPKKYENVLRKFFPEDKGPITKIDPIGNSPVIIEKESLGRIAPTWMNVSLAMKKDPDADKSFGWVLEMYAYAVASALHGVGNILRKDFMIQPPWDLEVGDSFIIHYTYGCDYDMTGKLTYGKIGEWRFDKRSYTDKPPPRNLPLPPHGVAQSDTCENGQ

SEQ ID NO: 195238 - protein, 343 aa, Zea Mays
MCVEEPKDAERFGFGDPGVEEPAKFPLAQMERVCENTTSADFRQKLSNFVPVIRSGDWSDIGGRQYMEDTHVCIPDLAKNFGFPSLDNEVVSFYGVFDGHGGKDAAHFVCDNLPRMIVEDSDFPLQLEKVVRRSFMQIDCQFAETCSLHRASSSGTTALTAMVFGRAVLSRCGTAVEMSMDHRPCSLSEKLRVESLGGYVDDGYLNGLLGVTRALGDWHLEGMKGAGETGGPLSADPELKMTTLTKDDEFLIIGSDGIWDVFSNQNSVDFARKRLQEHNDVKLCCREIVEEAIRRGATDNLTAVLVSFHLEAPPRIRVDRPGRVERSISAEGLNSLRILLGRQ

SEQ ID NO: 195239 - protein, 429 aa, Zea Mays
MAAAGTQLGRLLGGLWFLAALLGRPGATAAAAGQPAAPAVAAVDGRRAVAATGEDFVCATLDWWPPDKCDYGTCAWGRAGLLNLDLSNKVLLNAVRAFSPPLLLRLGGSLQDKVMYGYGAGRPCAPFVRNASEMHGFSQGCLPLRRWDDLNAFFRRSGAKVVFGLNALNGRVPLPDGSMGGPWDYTNAASLIRYTANKGYRIHGWELGNELSGTGVGARVGADQYAADVIALKALVDDVYRSEPSKPLVVAPGGFFDQAWFTELVVKTGPDLLSVVTHHVYNLGPGRDTHLIDKILDPSTLDGMVSTFSDLQRLLKSTGTSAVAWVGEAGGAYNSGRHLVTDAFVFSFWFLDQLGMAARFDTKSYCRQSLVGGNYGLLNTTTFQPNPDYYSALLWHRLMGTKVLAVTFSGTNKIRAYAHCARDSESLCC

SEQ ID NO: 195240 - protein, 136 aa, Zea Mays
MLRPARNHSAADQPERQRHRAGLGDGPRGCRGARAQAQARREEARRRQEVPARARPRLRRRRRGGGGRRETRVPPHPQGRRPDEPGRDAERQGVGHRRGGEHPRPGGGRGGRGAAHRRHALLHRVRSRSAFQCPGV

SEQ ID NO: 195241 - protein, 100 aa, Zea Mays
MATTPTTAILRLTPAPSPRTARHPRSATFLQPALSVSLSYSLPDCRNHRLAAASKDTASSKGQEQDQEPAPSAPQEGGPEKVTEVGAASPGEKSPEAVAG

SEQ ID NO: 195242 - protein, 63 aa, Zea Mays
MNVGDLWDNEFKLLNSKALLSYLIHVHNYLRPSRQGLVHVGLVTWEGCHNFYTQEARLGRLVR

SEQ ID NO: 195243 - protein, 317 aa, Zea Mays
MQRNDAVRALDVYKRATNQAERLSEFHEVCKTIHIGRGEKFLKIEQPPASFLQTMEDYVRDAPTGQKQKTILAIEYKKEPEEEEKPASPPPAPEQEPEQEPEPEPEPVKEEAPEAEPDLLGLNEPSPAATAIEEQNALALAIVPIDDVPGAAPTFENGVTGWELALVTAPSSTETAVAPSKKLAGGLDLLTLDSLYDEANRRASQPASYNPWDATASAPMMTTMAPAMHDPFYASNGYAAPHGVQMAAMAHHQQQQQVFMLQQQMMAPAPAVHHPMQMQQNPANPFGNPFAAAGAHPYGAAGMPLHAGPGNVYTGLI

SEQ ID NO: 195244 - protein, 492 aa, Zea Mays
MPSASSSSSSSLYIIGDSSRLRDDPIIEVGDMDEDGSSGGALSGKYGVPEQYSAVLPAGHQRACSPPGSAVSVYAHALEAGMRVPLHGFFCEVLAHFGVAPSQIAPNGWRAMAGFVVLSHSAGVAPSLPVFRHFFSLCAFKLKGWYYFRGKDAAGLLFKGMPLSIAGWKEAFFFLKSPTPWPCPVKWGGLSMGSTVEPALTREEQSVAKKLLRVHGAAVDIMTYLSESNLAAATIAGSSAKPPPPPIGTTSSASAKGMDPCVYDMMKNLRAAKAAQASGVTVKTEPSSDTPSSCKKRKVVEDATKQDPPRPEPPHYSPPGFFSAHKSPKVTREPDGGATSDWERARRMLQSIVTPALEQTFSVAKPSDVIASSYTTALQAANYASFSLGYALELEDKLAAREREADALRRELSQAKAELAGAKKAAAEGVRGAREAAVRDFRGSTEQVVRFAEHALAGYEKGMDDMKRAVLRRYPHLDPEQLVVPADGGGAQ

SEQ ID NO: 195245 - protein, 278 aa, Zea Mays
MDPNYGEWNFSEIKIAKALIASHNAKSSYSSDMNNKQTDIIDMLQARFPTKEKHKVTKLYVDLMLEKMQMILSGNQHATMGKKLVNDKFGMSIEDPAIDFMGGDLVEKRTAKRKAREDMNTHLDSQKERRYRRFWTIDEHSDWKNISKHFVTTRTPMQISSHAQKYFHRMENIARRQRSSINDIVLHDDEPRVQSNDSSLQRFTFTSGTYNPNHYGSSSQFVAMSNIAKHMWFPSVCCIDQESTSNNQITTLDRGGSGGSCVALEVQGVGSKAKLISD

SEQ ID NO: 195246 - protein, 109 aa, Zea Mays
MASSIGNFMGKRVPQKLKSKFYRTAIRPAMLYGAECWPTKRRHIQQLSFAEMCMLRWICRHTRLDRVRNDVICGRLGVAPIEEKLIQHRFRWFEHVHQRPQRHRCTEAS

SEQ ID NO: 195247 - protein, 339 aa, Zea Mays
MFAASPIAFFKKEMIYLSTKTYEDAVRILKTLLSTVACDRRRGYWALRLSIDLEHMGRPNESLSTAEGGATDPWVRAGSKFALQRRVLRLSKPPRRWKVPSYADYVKRNIREVSIEGRPLNCETGAKNVFYGYDGELCGVEQLALQYYADEGGGWQGTHSEGSIWMTIFGLLMWDVMFSDIQDVFQSKFQTAPLDLGTDDFYKSRENIAESQLKRIRDGMAEEMLISSWELHQGTSCQGVNWARYSLTDLRAVVACVGGHRLASLLRHLAVDYRSWSSGMPDLLLWRFLDERGGGEAKLVEVKGPRDQLSEQQRAWILVLMDFGFDVEVCKVSPVTKRR

SEQ ID NO: 195248 - protein, 408 aa, Zea Mays
MLTGRESLVRLIGRRRRSPLPASLVAALSLPSPSPSTSLAQADDGGGSGEAAGGEAGSTSGGSRVVGMGAEWVVCPVCGDSIRGSDYCVNTHLDMCLTRGTKRKLTQSTLLNFQFSKKVSAEPTINNLNNESETENMKQIDEGLSSDQAFFAFDSEIGSSKAGTTISSPTWELPTVATSCSFDECAVMDSSTVVVVDTVIVGRRFHENIELREDADITFMRDPQNAKDPDAIKVLHAGSECEEMLGYLPRDLAKVLAPLVDKHHVECEGSVVGLHEQQFGNVPIQITIQKCKSDNQRNNDPNCCQSLWENFVSIVKRENFRRPHSARYQTNFNLMIADVMVNHAHVFSDIEKSFLASFKSLSDDGQRLFIRIYTRKALLCLTDLLQPSCIFTEDLPPLKLPRFASGHF

SEQ ID NO: 195249 - protein, 575 aa, Zea Mays
MLTGRESLVRLIGRRRRSPLPASLVAALSLPSPSPSTSLAQADDGGGSGEAAGGEAGSTSGGSRVVGMGAEWVVCPVCGDSIRGSDYCVNTHLDMCLTRGTKRKLTQSTLLNFQFSKKVSAEPTINNLNNESETENMKQIDEGLSSDQAFFAFDSEIGSSKAGTTISSPTCMNDSLGTSETITSYAPSNTVLSDAKDAVNDGAGELPTVATSCSFDECAVMDSSTVVVVDTVIVGRRFHENIELREDADITFMRDPQNAKDPDAIKVLHAGSECEEMLGYLPRDLAKVLAPLVDKHHVECEGSVVGLHEQQFGNVPIQITIQKCKSDNQRNNDPNCCQSLWENFVSIVKRENFRRPHSARYQTNFNLMIADVMVNHAHVFSDIEKSFLASFKSLSDDGQRLFIRIYTRKGPWFRKGSISYQEISDLEHAVMELELAGYIDMLSCTIDPFEYDMKEILDVLSVPEMKEILKELPKDNTICTRRHELVSTLLSSYRNGTCASLPKRILKWTGTCIRISKMADELLWRIQRLFFLNGDQDLSSFLLVEFGIVKFPDYVCSISHRIFQERNDLLEYEDV

SEQ ID NO: 195250 - protein, 326 aa, Zea Mays
MNFCGVSRYEDAVRILKTLLSTVACDRRRGYWALRLSIDLEHMGRPNESLSTAEGGATDPWVRAGSKFALQRRVLRLSKPPRRWKVPSYADYVKRNIREVSIEGRPLNCETGAKNVFYGYDGELCGVEQLALQYYADEGGGWQGTHSEGSIWMTIFGLLMWDVMFSDIQDVFQSKFQTAPLDLGTDDFYKSRENIAESQLKRIRDGMAEEMLISSWELHQGTSCQGVNWARYSLTDLRAVVACVGGHRLASLLRHLAVDYRSWSSGMPDLLLWRFLDERGGGEAKLVEVKGPRDQLSEQQRAWILVLMDFGFDVEVCKVSPVTKRR

SEQ ID NO: 195251 - protein, 301 aa, Zea Mays
MLGYLPRDLAKVLAPLVDKHHVECEGSVVGLHEQQFGNVPIQITIQKCKSDNQRNNDPNCCQSLWENFVSIVKRENFRRPHSARYQTNFNLMIADVMVNHAHVFSDIEKSFLASFKSLSDDGQRLFIRIYTRKGPWFRKGSISYQEISDLEHAVMELELAGYIDMLSCTIDPFEYDMKEILDVLSVPEMKEILKELPKDNTICTRRHELVSTLLSSYRNGTCASLPKRILKWTGTCIRISKMADELLWRIQRLFFLNGDQDLSSFLLVEFGIVKFPDYVCSISHRIFQERNDLLEYEDVRF

SEQ ID NO: 195252 - protein, 433 aa, Zea Mays
MRLWILPVLIVQLQKTAEIGEVFRKVSTSLPPPQPGSNFREQYTLFQKKKKELGCPSFIWNFAYFLVQFPCFILWMTSIRSMCLNNHPGFDNGGILWFHNLTEFPHGTLAPIFPILVAGLHYLNVQISFQGSQIKDHPGIFGLLAKYYRIYLNVLTIPLFLVAHVVPQGCLVYWTTNGLFSVAQQLSLRNDAVRKLLGLPDTRAQVGYRAQKSPLEVPEMMQWSQLEDANLQTKSMPSDKGTASESTTPNFAMGSMDGNISASSSPEELLEQALQYLGTGCRDQAIPLIRTAVERNPDLYTALIGMGQTLFSNRLFPEAAVCFEHAIPKIQEDDPLLVLAYFGAGLSNKRQGDNETAIKLLERLAELKEPEKPINKSRYFQGMLALASILYREGRNSEAAKYLRMAIAYDPSVERLLKECEEGMDDQPKPEEK

SEQ ID NO: 195253 - protein, 254 aa, Zea Mays
MIKSQQLSLRNDAVRKLLGLPDTRAQVGYRAQKSPLEVPEMMQWSQLEDANLQTKSMPSDKGTASESTTPNFAMGSMDGNISASSSPEELLEQALQYLGTGCRDQAIPLIRTAVERNPDLYTALIGMGQTLFSNRLFPEAAVCFEHAIPKIQEDDPLLVLAYFGAGLSNKRQGDNETAIKLLERLAELKEPEKPINKSRYFQGMLALASILYREGRNSEAAKYLRMAIAYDPSVERLLKECEEGMDDQPKPEEK

SEQ ID NO: 195254 - protein, 305 aa, Zea Mays
MRLWILPVLIVQLQKTAEIGEVFRKVSTSLPPPQPGSNFREQYTLFQKKKKELGCPSFIWNFAYFLVQFPCFILWMTSIRSMCLNNHPGFDNGGILWFHNLTEFPHGTLAPIFPILVAGLHYLNVQISFQGSQIKDHPGIFGLLAKYYRIYLNVLTIPLFLVAHVVPQGCLVYWTTNGLFSVAQQLSLRNDAVRKLLGLPDTRAQVGYRAQKSPLEWSQLEDANLQTKSMPSDKGTASESTTPNFAMGSMDGNISASSSPEELLEQALQYLGTGCRDQAIPLISSREKPRSVHSVDWDGTNPVLK

SEQ ID NO: 195255 - protein, 283 aa, Zea Mays
MRLWILPVLIVQLQKTAEIGEVFRKVSTSLPPPQPGSNFREQYTLFQKKKKELGCPSFIWNFAYFLVQFPCFILWMTSIRSMCLNNHPGFDNGGILWFHNLTEFPHGTLAPIFPILVAGLHYLNVQISFQGSQIKDHPGIFGLLAKGCLVYWTTNGLFSVAQQLSLRNDAVRKLLGLPDTRAQVGYRAQKSPLEWSQLEDANLQTKSMPSDKGTASESTTPNFAMGSMDGNISASSSPEELLEQALQYLGTGCRDQAIPLISSREKPRSVHSVDWDGTNPVLK

SEQ ID NO: 195256 - protein, 321 aa, Zea Mays
MRLWILPVLIVQLQKTAEIGEVFRKVSTSLPPPQPGSNFREQYTLFQKKKKELGCPSFIWNFAYFLVQFPCFILWMTSIRSMCLNNHPGFDNGGILWFHNLTEFPHGTLAPIFPILVAGLHYLNVQISFQGSQIKDHPGIFGLLAKYYRIYLNVLTIPLFLVAHVVPQGCLVYWTTNGLFSVAQIRFHAFNLNKLDAAKNDAVRKLLGLPDTRAQVGYRAQKSPLEVPEMMQWSQLEDANLQTKSMPSDKGTASESTTPNFAMGSMDGNISASSSPEELLEQALQYLGTGCRDQAIPLISSREKPRSVHSVDWDGTNPVLK

SEQ ID NO: 195257 - protein, 310 aa, Zea Mays
MRLWILPVLIVQLQKTAEIGEVFRKVSTSLPPPQPGSNFREQYTLFQKKKKELGCPSFIWNFAYFLVQFPCFILWMTSIRSMCLNNHPGFDNGGILWFHNLTEFPHGTLAPIFPILVAGLHYLNVQISFQGSQIKDHPGIFGLLAKYYRIYLNVLTIPLFLVAHVVPQGCLVYWTTNGLFSVAQQLSLRNDAVRKLLGLPDTRAQVGYRAQKSPLEVPEMMQWSQLEDANLQTKSMPSDKGTASESTTPNFAMGSMDGNISASSSPEELLEQALQYLGTGCRDQAIPLISREKPRSVHSVDWDGTNPVLK

SEQ ID NO: 195258 - protein, 251 aa, Zea Mays
MIKSQQLSLRNDAVRKLLGLPDTRAQVGYRAQKSPLEVPEMMQLEDANLQTKSMPSDKGTASESTTPNFAMGSMDGNISASSSPEELLEQALQYLGTGCRDQAIPLIRTAVERNPDLYTALIGMGQTLFSNRLFPEAAVCFEHAIPKIQEDDPLLVLAYFGAGLSNKRQGDNETAIKLLERLAELKEPEKPINKSRYFQGMLALASILYREGRNSEAAKYLRMAIAYDPSVERLLKECEEGMDDQPKPEEK

SEQ ID NO: 195259 - protein, 308 aa, Zea Mays
MRLWILPVLIVQLQKTAEIGEVFRKVSTSLPPPQPGSNFREQYTLFQKKKKELGCPSFIWNFAYFLVQFPCFILWMTSIRSMCLNNHPGFDNGGILWFHNLTEFPHGTLAPIFPILVAGLHYLNVQISFQGSQIKDHPGIFGLLAKYYRIYLNVLTIPLFLVAHVVPQGCLVYWTTNGLFSVAQQLSLRNDAVRKLLGLPDTRAQVGYRAQKSPLEVPEMMQLEDANLQTKSMPSDKGTASESTTPNFAMGSMDGNISASSSPEELLEQALQYLGTGCRDQAIPLISSREKPRSVHSVDWDGTNPVLK

SEQ ID NO: 195260 - protein, 315 aa, Zea Mays
MRLWILPVLIVQLQKTAEIGEVFRKVSTSLPPPQPGSNFREQYTLFQKKKKELGCPSFIWNFAYFLVQFPCFILWMTSIRSMCLNNHPGFDNGGILWFHNLTEFPHGTLAPIFPILVAGLHYLNVQISFQGSQIKDHPGIFGLLAKYYRIYLNVLTIPLFLVAHVVPQGCLVYWTTNGLFSVAQIRFHAFNLNKLDAAKNDAVRKLLGLPDTRAQVGYRAQKSPLEWSQLEDANLQTKSMPSDKGTASESTTPNFAMGSMDGNISASSSPEELLEQALQYLGTGCRDQAIPLISSREKPRSVHSVDWDGTNPVLK

SEQ ID NO: 195261 - protein, 314 aa, Zea Mays
MGSQIKDHPGIFGLLAKYYRIYLNVLTIPLFLVAHVVPQGCLVYWTTNGLFSVAQIRFHAFNLNKLDAAKNDAVRKLLGLPDTRAQVGYRAQKSPLEVPEMMQWSQLEDANLQTKSMPSDKGTASESTTPNFAMGSMDGNISASSSPEELLEQALQYLGTGCRDQAIPLIRTAVERNPDLYTALIGMGQTLFSNRLFPEAAVCFEHAIPKIQEDDPLLVLAYFGAGLSNKRQGDNETAIKLLERLAELKEPEKPINKSRYFQGMLALASILYREGRNSEAAKYLRMAIAYDPSVERLLKECEEGMDDQPKPEEK

SEQ ID NO: 195262 - protein, 311 aa, Zea Mays
MRLWILPVLIVQLQKTAEIGEVFRKVSTSLPPPQPGSNFREQYTLFQKKKKELGCPSFIWNFAYFLVQFPCFILWMTSIRSMCLNNHPGFDNGGILWFHNLTEFPHGTLAPIFPILVAGLHYLNVQISFQGSQIKDHPGIFGLLAKYYRIYLNVLTIPLFLVAHVVPQGCLVYWTTNGLFSVAQQLSLRNDAVRKLLGLPDTRAQVGYRAQKSPLEVPEMMQWSQLEDANLQTKSMPSDKGTASESTTPNFAMGSMDGNISASSSPEELLEQALQYLGTGCRDQAIPLISSREKPRSVHSVDWDGTNPVLK

SEQ ID NO: 195263 - protein, 198 aa, Zea Mays
MPSDKGTASESTTPNFAMGSMDGNISASSSPEELLEQALQYLGTGCRDQAIPLIRTAVERNPDLYTALIGMGQTLFSNRLFPEAAVCFEHAIPKIQEDDPLLVLAYFGAGLSNKRQGDNETAIKLLERLAELKEPEKPINKSRYFQGMLALASILYREGRNSEAAKYLRMAIAYDPSVERLLKECEEGMDDQPKPEEK

SEQ ID NO: 195264 - protein, 416 aa, Zea Mays
MRLWILPVLIVQLQKTAEIGEVFRKVSTSLPPPQPGSNFREQYTLFQKKKKELGCPSFIWNFAYFLVQFPCFILWMTSIRSMCLNNHPGFDNGGILWFHNLTEFPHGTLAPIFPILVAGLHYLNVQISFQGSQIKDHPGIFGLLAKYYRIYLNVLTIPLFLVAHVVPQGCLVYWTTNGLFSVAQQLSLRNDAVRKLLGLPDTRAQWSQLEDANLQTKSMPSDKGTASESTTPNFAMGSMDGNISASSSPEELLEQALQYLGTGCRDQAIPLIRTAVERNPDLYTALIGMGQTLFSNRLFPEAAVCFEHAIPKIQEDDPLLVLAYFGAGLSNKRQGDNETAIKLLERLAELKEPEKPINKSRYFQGMLALASILYREGRNSEAAKYLRMAIAYDPSVERLLKECEEGMDDQPKPEEK

SEQ ID NO: 195265 - protein, 429 aa, Zea Mays
MRLWILPVLIVQLQKTAEIGEVFRKVSTSLPPPQPGSNFREQYTLFQKKKKELGCPSFIWNFAYFLVQFPCFILWMTSIRSMCLNNHPGFDNGGILWFHNLTEFPHGTLAPIFPILVAGLHYLNVQISFQGSQIKDHPGIFGLLAKYYRIYLNVLTIPLFLVAHVVPQGCLVYWTTNGLFSVAQQLSLRNDAVRKLLGLPDTRAQVGYRAQKSPLEVPEMMQWSQLEDANLQTKSMPSDKGTASESTTPNFAMGSMDGNISASSSPEELLEYLGTGCRDQAIPLIRTAVERNPDLYTALIGMGQTLFSNRLFPEAAVCFEHAIPKIQEDDPLLVLAYFGAGLSNKRQGDNETAIKLLERLAELKEPEKPINKSRYFQGMLALASILYREGRNSEAAKYLRMAIAYDPSVERLLKECEEGMDDQPKPEEK

SEQ ID NO: 195266 - protein, 259 aa, Zea Mays
MPGLLDYKWFIFCSSEQLSLRNDAVRKLLGLPDTRAQVGYRAQKSPLEWSQLEDANLQTKSMPSDKGTASESTTPNFAMGSMDGNISASSSPEELLEQALQYLGTGCRDQAIPLIRTAVERNPDLYTALIGMGQTLFSNRLFPEAAVCFEHAIPKIQEDDPLLVLAYFGAGLSNKRQGDNETAIKLLERLAELKEPEKPINKSRYFQGMLALASILYREGRNSEAAKYLRMAIAYDPSVERLLKECEEGMDDQPKPEEK

SEQ ID NO: 195267 - protein, 338 aa, Zea Mays
MFKGGILWFHNLTEFPHGTLAPIFPILVAGLHYLNVQISFQGSQIKDHPGIFGLLAKYYRIYLNVLTIPLFLVAHVVPQGCLVYWTTNGLFSVAQQLSLRNDAVRKLLGLPDTRAQVGYRAQKSPLEWSQLEDANLQTKSMPSDKGTASESTTPNFAMGSMDGNISASSSPEELLEQALQYLGTGCRDQAIPLIRTAVERNPDLYTALIGMGQTLFSNRLFPEAAVCFEHAIPKIQEDDPLLVLAYFGAGLSNKRQGDNETAIKLLERLAELKEPEKPINKSRYFQGMLALASILYREGRNSEAAKYLRMAIAYDPSVERLLKECEEGMDDQPKPEEK

SEQ ID NO: 195268 - protein, 128 aa, Zea Mays
MGQTLFSNRLFPEAAVCFEHAIPKIQEDDPLLVLAYFGAGLSNKRQGDNETAIKLLERLAELKEPEKPINKSRYFQGMLALASILYREGRNSEAAKYLRMAIAYDPSVERLLKECEEGMDDQPKPEEK

SEQ ID NO: 195269 - protein, 368 aa, Zea Mays
MQNLCTSFYCIPVASWARCKQVRDTALSINSNDAIPRSDVNREYFAEEHDRRARAGIDYDSSYGKARPNDTILKLQRTAPYYKRNRAHVCSFFVRGECTRGAECPYRHEMPETGELSQQNIKDRYYGVNDPVALKLLSKAGEMPSLTPPDDETIRTLYIGGLDSRITEQDLRDQFYAHGEIESIRMVLQRAIAFVTYTTREGAEKAAEELANKLVIKGVRLKLMWGKPQAPKPEEDESGRLGQVSHGGLLPRAVISQQQSGDQPQPPGMEGQQQQAAPASYYFNIPAPPATERTVYPSMDPQRMGAIVKPHDSEGKPGPQQAGQAQASSNPAQGGGYPAPPPYYHGGGQQQPPDGPPAQQQPQQPIQN

SEQ ID NO: 195270 - protein, 360 aa, Zea Mays
MLLLHEISLKQGTAFTVFTEAELIEATGNFADKNILGRGGFGTVYRGLLKDGGVVAVKRCVSSMASEQQQKEFGKEMLILSQINHKNIVKLLGCCLEVEVPMLVYEFIPNGTLFQFIHGDGGSRSAPFSVRIRIALESALALSYLHSWASPPILHGDVKSSNILLDQNYEAKVSDFGASILAPADKSQFMTLVQGTCGYLDPEYMQTCQLTDKSDVYSFGVVLLELLTGSTAFNLEGPESERSLSLRFLNAMKERRLGDIIDGRIKADSDAALLEEVAELALQCLDMVGERRPTMRDVAERLDVLAKAMQQQHPWVPAQHRPEEMESLLGESPVASAEMTSTGNFSMEERIVHGLLDSGR

SEQ ID NO: 195271 - protein, 592 aa, Zea Mays
MYVVKRDGRQETVHFDKITARLKKLSYGLSQDHCDPVLVAQKVCAGVYKGVTTSQLDELAAETAAAMTASHPDYASLAARIAVSNLHKNTKKSFSETIKDMYMHFNKRSGLMAPLVAEDVYEIIMKNAARLDSEIIYDRDFDYDYFGFKTLERSYLLKLDGKVVERPQHMLMRVSLGIHKEDIESAIRTYHLMSQRWFTHASPTLFNAGTPRPQLSSCFLICMKDDSIEGIYETLKECAVISKSAGGIGVSVHNIRATGSYIRGTNGSSNGIVPMLRVFNDTARYVDQGGGKRKGAFAVYLEPWHADIFEFLDLRKNHGKEENRARDLFYALWVPDLFMQRVQNNGEWSLFCPNEAPGLADSWGEEFDNLYKKYESQGKAKKVVPAQTLWFDILKAQIETGTPYMLYKDTCNRKSNQQNLGTIKSSNLCTEIIEFTSPTETAVCNLASIALPRFVREKDVPLESHPSKLVGSSDSKNRYFDFEKLAEVTSTVTYNLNKIIDINYYPVETAKRSNMRHRPIGIGVQGLADTFILLGMPFDSPEAQQLNKDIFETIYYHALKASAELAAKEGPYETYEGSPVSKCHLTDGTGHL

SEQ ID NO: 195272 - protein, 2278 aa, Zea Mays
MWNGAPPPPPPQMAAAPPPPGTTVPGAGQPPPPPPPAGAPLGGKPLTPAELEAQLVEKARKWHQLNSKRYGDKRKFGFVEAQKEDMPPEHVRKIIRDHGDMSSKKYRHDKRVYLGALKFVPHAVYKLLENMPMPWEQVRHVKILYHITGAITFINEIPWVVEPIYLAQWGTMWIMMRREKRDRRHFKRMRFPPFDDEEPPLDYADNLLDVEPLEAIQLELDEEEDAAVYEWFYDHKPLMKTKLINGPSYRKWHLSLPIMATLYRLAGQLLSDLIDRNYFYLFDMESFFTAKALNMCIPGGPKFEPLYRDMEKGDEDWNEFNDINKLIIRQPLRTEYRIAFPHLYNNRPRKVKLGIYHTPMIMYIKTEDPDLPAFYYDPLINPITSTNKVDRRERKAAEEEDDEDFCLPEDVEPLLKQTELYTDTTAAGISLLFAPKPFNMRSGRTRRAEDIPLVSEWFKEHCPPAYPVKVRVSYQKLLKCYVLNELHHRPPKAQKKKHLFRSLQATKFFQTTELDWAEAGLQVCKQGYNMLNLLIHRKNLNYLHLDYNFNLKPVKTLTTKERKKSRFGNAFHLCREILRLTKLVVDANIQFRLGNVDAFQLADGLQYIFSHVGQLTGMYRYKYRLMRQIRMCKDLKHLIYYRFNTGPVGKGPGCGFWAPMWRVWLFFLRGIVPLLERWLGNLLARQFEGRHSKGVAKTVTKQRVESHFDLELRAAVMHDVLDAMPEGIKQNKARTILQHLSEAWRCWKANIPWKVPGLPVPIENMILRYVKSKADWWTNVAHYNRERIRRGATVDKTVCRKNLGRLTRLWLKAEQERQHNYLKDGPYVTPEEAVAIYTTTVHWLESRKFSPIPFPPLSYKHDTKLLILALERLKESYSVAVRLNQLQREELGLIEQAYDNPHEALSRIKRHLLTQRAFKEVGIEFMDLYSYLIPVYEIEPLEKITDAYLDQYLWYEGDKRHLFPNWVKPADSEPPPLLVYKWCQGINNLLDIWDTSDGQCVVMLQTKFEKFFEKIDLTLLNRLLRLVLDHNIADYVTAKNNVVLSYKDMSHTNSYGLIRGLQFASFVVQYYGLVLDLLILGLTRASEIAGPPQMPNEFLTYADTKVETRHPIRLYSRYIDKVHILFRFTHEEARDLIQRYLTEHPDPNNENMVGYNNKKCWPRDARMRLMKHDVNLGRSVFWDMKNRLPRSITTLEWENSFVSVYSKDNPNLLFSMSGFEVRILPKIRMTQEAFSNTKDGVWNLQNEQTKERTAIAFLRVDDEHMKVFENRVRQILMSSGSTTFTKIVNKWNTALIGLMTYFREATVHTQELLDLLVKCENKIQTRIKIGLNSKMPSRFPPVIFYTPKEIGGLGMLSMGHILIPQSDLRYSKQTDVGVTHFRSGMSHEEDQLIPNLYRYIQPWESEFIDSQRVWAEYALKRQEAQSQNRRLTLEDLEDSWDRGIPRINTLFQKDRHTLAYDKGWRVRTDFKQYQVLKQNPFWWTHQRHDGKLWNLNNYRTDVIQALGGVEGILEHTLFKGTYFPTWEGLFWEKASGFEESMKYKKLTNAQRSGLNQIPNRRFTLWWSPTINRANVYVGFQVQLDLTGIFMHGKIPTLKISLIQIFRAHLWQKIHESVVMDLCQVLDQELDALEIETVQKETIHPRKSYKMNSSCADILLFAAHRWQMSKPSLVSESKDVFDQKASNKYWIDVQLRWGDYDSHDIERYTRAKFMDYTTDNMSIYPSPTGVMIGIDLAYNLHSAFGNWFPGSKPLLQQAMNKIMKVIHTSVWAGQKRLGQLAKWKTAEEVAALVRSLPVEEQPKQIIVTRKGMLDPLEVHLLDFPNIVIKGSELQLPFQACLKIEKFGDLILKATEPQMVLYNIYDDWLKSISSYTAFSRIVLILRALHVNNEKAKMLLKPDKTIVTEPHHIWPSLNDEQWLKVECALRDLILSDYAKKNNVNTSALTQSEMRDIILGAEIAPPSQQRQQIAEIEKQSRETTQLTAVTTRTTNVHGDELIITTTSPYEQQAFASKTDWRVRAISATNLYLRVNHIYVNSDDIKETGYTYIMPKNILKKFICVADLRTQIAGFLYGLSPQDNPQVKEIRCIAIPPQHGTHQMVTLPSNLPEHEFLNDLEPLGWMHTQPNEAPQLSPQDLTSHAKILENNKQWDGEKCIILTCSFTPGSCSLTAYKLTPSGYEWGRSNKDNGSNPHGYLPTHYEKVQMLLSDRFLGFYMIPDNTPWNFNFMGVKHDPQMKYNMKLGMPRDFYHEDHRPTHFLEFSNIEEGEVAEGDREDTFT

SEQ ID NO: 195273 - protein, 57 aa, Zea Mays
MCSSPSPTSWSSRPPSRYAGMSMVSIQTFFDYLSMVAIHQMQIICSSVTMLIGGNRA

SEQ ID NO: 195274 - protein, 77 aa, Zea Mays
MMVFCHYCGLHILRLKHSANRPPIAMSQDKLYCLNESLAKCSATADSVWEGTGSGVCNAVHTATLASGMLDLGGTES

SEQ ID NO: 195275 - protein, 55 aa, Zea Mays
MNAPQSTEYMGFLMSVRGDSMFVSGRYSPSVLTASQWLRLLMTRSFACMEGCLLS

SEQ ID NO: 195276 - protein, 512 aa, Zea Mays
MEMNSRKPNWRCPYCNTSSSFTDLRIDQKMMKILEETGDDVTDVLVFADGSWKVVPAQDEKSDRHRGDTIQQAGDAVETGSPSRDVIDLINGNDDGDMQMDWASAPEDSKPVLNSQDLSVSDYLTDFPMTAQTEDLNRGDGNNGGSNMASTSRQNLLLPPTSGLGSSSLGTLESILPQNVLHPVITDAVSPSLETSSASGMQHVSQETHCGTVQLQPQIGPVHGSEVRRLPIPRNPRREPIGVQGLTVPPQNPGSSTRLQPNILNCPPPIPLSSPSSSTYQAHQVKNPDSVIASRNSGSGPLPRTPSVAAASLHLQSTARDIRNTSSHLPSRVVGLPAPHLMGARPPPGISVQAGGANAYRTMQQTPTMDPLRHTRMSMNQTALAAAGQTTAAAYVRPTQADIQNHLFPVQQSQAPRSQQVPRTTTPPLQRAPPHLQPPSVPPTVPSTPQAGPSHGLPPELPVDDSWRPTGQMRGSLTGNAYSSAIRHYRGHSEQQQGEPRPPNTSGARRPQ

SEQ ID NO: 195277 - protein, 858 aa, Zea Mays
MTNAAGTAPHPTPPTPLQQQQHQPPKDQQQKALALNAFRLKGIGDRIRFHLKGMSVPPVAELAHLIYAFARGIDFAVSAGDIPLTAGDIPEILRKVYELRKETIIQSSLMILAISCKNACSNKWFQPADSRDILRMVNELSGNFCTSTGQAASDSTVLEIISQIMPRYYPRLKFERLITSIEAKVGYDILMADFFIERSLSRDEKIRLIVVQKENLDASSCVSSPPHVSFLVNGKGVDKRTNVSMEQGPQLPTDITKMLKYGANIIQGVGYFNANYIIAVAVVNDLTSFSAPKLDDYAQPITVYPADSDVLEGPSRVSLNCPIRRIKTPIKGRLCKHYQCFDYDNYMEMNSRKPNWRCPYCNTSSSFTDLRIDQKMMKILEETGDDVTDVLVFADGSWKVVPAQDEKSDRHRGDTIQQAGDAVETGSPSRDVIDLINGNDDGDMQMDWASAPEDSKPVLNSQDLSVSDYLTDFPMTAQTEDLNRGDGNNGGSNMASTSRQNLLLPPTSGLGSSSLGTLESILPQNVLHPVITDAVSPSLETSSASGMQHVSQETHCGTVQLQPQIGPVHGSEVRRLPIPRNPRREPIGVQGLTVPPQNPGSSTRLQPNILNCPPPIPLSSPSSSTYQAHQVKNPDSVIASRNSGSGPLPRTPSVAAASLHLQSTARDIRNTSSHLPSRVVGLPAPHLMGARPPPGISVQAGGANAYRTMQQTPTMDPLRHTRMSMNQTALAAAGQTTAAAYVRPTQADIQNHLFPVQQSQAPRSQQVPRTTTPPLQRAPPHLQPPSVPPTVPSTPQAGPSHGLPPELPVDDSWRPTGQMRGSLTGNAYSSAIRHYRGHSEQQQGEPRPPNTSGARRPQ

SEQ ID NO: 195278 - protein, 565 aa, Zea Mays
MAYFLIISSITVNDVYWSLVDSDVLEGPSRVSLNCPISFRRIKTPIKGRLCKHYQMNSRKPNWRCPYCNTSSSFTDLRIDQKMMKILEETGDDVTDVLVFADGSWKVVPAQDEKSDRHRGDTIQQAGDAVETGSPSRDVIDLINGNDDGDMQMDWASAPEDSKPVLNSQDLSVSDYLTDFPMTAQTEDLNRGDGNNGGSNMASTSRQNLLLPPTSGLGSSSLGTLESILPQNVLHPVITDAVSPSLETSSASGMQHVSQETHCGTVQLQPQIGPVHGSEVRRLPIPRNPRREPIGVQGLTVPPQNPGSSTRLQPNILNCPPPIPLSSPSSSTYQAHQVKNPDSVIASRNSGSGPLPRTPSVAAASLHLQSTARDIRNTSSHLPSRVVGLPAPHLMGARPPPGISVQAGGANAYRTMQQTPTMDPLRHTRMSMNQTALAAAGQTTAAAYVRPTQADIQNHLFPVQQSQAPRSQQVPRTTTPPLQRAPPHLQPPSVPPTVPSTPQAGPSHGLPPELPVDDSWRPTGQMRGSLTGNAYSSAIRHYRGHSEQQQGEPRPPNTSGARRPQ

SEQ ID NO: 195279 - protein, 926 aa, Zea Mays
MTNAAGTAPHPTPPTPLQQQQHQPPKDQQQKALALNAFRLKGIGDRIRFHLKGMSVPPVAELAHLIYAFARGIDFAVSAGDIPLTAGDIPEILRKVYELRKETIIQSSLMILAISCKNACSNKWFQPADSRDILRMVNELSGNFCTSTGQAASDSTVLEIISQIMPRYYPRLKFERLITSIEAKVGYDILMADFFIERSLSRDEKIRLIVVQKENLDASSCVSSPPHVSFLVNGKGVDKRTNVSMEQGPQLPTDITKMLKYGANIIQGVGYFNANYIIAVAVVNDLTSFSAPKLDDYAQPITVYPADSDVLEGPSRVSLNCPISFRRIKTPIKGRLCKHYQCFDYDNYMEMNSRKPNWRCPYCNTSSSFTDLRIDQKMMKILEETGDDVTDVLVFADGSWKVVPAQDEKSDRHRGDTIQQAGDAVETGSPSRDVIDLINGNDDGDMQMDWASAPEDSKPVLNSQDLSVSDYLTDFPMTAQTEDLNRGDGNNGGSNMASTSRQNLLLPPTSGLGSSSLGTLESILPQNVLHPVITDAVSPSLETSSASGMQHVSQETHCGTVQLQPQIGPVHGSEVRRLPIPRNPRREPIGVQGLTVPPQNPGSSTRLQPNILNCPPPIPLSSPSSSTYQAHQVKNPDSVIASRNSGSGPLPRTPSVAAASLHLQSTARDIRNTSSHLPSRVVGLPAPHLMGARPPPGISVQAGGANAYRTMQQTPTMDPLRHTRMSMNQTALAAAGQTTAAAYVRPTQADIQNHLFPVQQSQAPRSQQVPRTTTPPLQRAPPHLQPPSVPPTVPSTPQAGPSHGLPPELPVDDSWRPTGQMRGSLTGNAYSSAIRHYRGHSEQQQGEPRPPNTSGTRFALWQIKMRDILTQTEVDDTLDKFSKKDPKSWTHEEKILGKNTYLCLIYCTYKEGLDLRVPVPRKQVGG

SEQ ID NO: 195280 - protein, 346 aa, Zea Mays
MDAARLRCAAAIATATAVPAARALPIRRHPAFFRVPAAVGLRFSSCRIPVPRRAAAAMSSSAAAQGTEHEADAWYAVPGLSLRDHRFAVPLDHSSPERGDTITVFAREVVAAGKEYISLPYLLYLQGGPGFESPRPTEAGGWLKKACEDHRVVLLDQRGTGLSTPLTPSSLSQIKSPANQVEYLKHFRADNIVKDAEFIRVRLVPDAKPWTVLGQSYGGFCAVTYLSFAPEGLKSVLLTGGLPPLGEPCTADTVYRACFKQVQQQNEKYYKRYPQDIQVVHEVIRYLSESEGGGVLLPSGGRLTPKMLQCLGLSGLGFGGGFERLHYLAGLRGCGILYLSLELKRG

SEQ ID NO: 195281 - protein, 219 aa, Zea Mays
MDAARLRCAAAIATATAVPAARALPIRRHPAFFRVPAAVGLRFSSCRIPVPRRAAAAMSSSAAAQGTEHEADAWYAVPGLSLRDHRFAVPLDHSSPERGDTITVFAREVVAAGKEYISLPYLLYLQGGPGFESPRPTEAGGWLKKACEDHRVVLLDQRGTGLSTPLTPSSLSQIKSPANQVEYLKHFRADNIVKDAEFIRVRLVPDAKPWTVLGQGSHH

SEQ ID NO: 195282 - protein, 489 aa, Zea Mays
MRARWAVTLLLLAVLALTASAARLDLDDDDDSGVLDELLAIDEEAERGGLLDAEGAGEAVRRAQSMVLALDNDNARRAVEDHAELLLLGYAPWCERSAQLMPRFAEAAAALRAMGSAVAFAKLDGERYPKAAAAVGVKGFPTVLLFVNGTEHAYHGLHTKDAIVTWVRKKTGVPIIRLQSKDSAEEFLKKDMTFVIGLFKNFEGADHEEFVKAATTDNEVQFVETSDTSVAKVLFPGITSEEKFVGLVKSEPEKFEKFDGKFEEKEILRFVELNKFPLITVFTELNSGKVYSSPIELQVFTFAEAYDFEDLESMVEEIARAFKTKIMFIYVDTAEENLAKPFLTLYGLESEKKPTVTAFDTSNGAKYLMEADINANNLREFCLSLLDGTLPPYHKSEPLPQEKGLIEKVVGRTFDSSVLESHQNVFLEVHTPWCVDCEAISKNVEKLAKHFSGSDNLKFARIDASVNEHPKLKVAGLQCKFLSSINILC

SEQ ID NO: 195283 - protein, 216 aa, Zea Mays
MVEEIARAFKTKIMFIYVDTAEENLAKPFLTLYGLESEKKPTVTAFDTSNGAKYLMEADINANNLREFCLSLLDGTLPPYHKSEPLPQEKGLIEKVVGRTFDSSVLESHQNVFLEVHTPWCVDCEAISKNVEKLAKHFSGSDNLKFARIDASVNEHPKLKVNNYPTLFLYLAEDKSNPIKLSKKSSVKDMAKLIKEKLQIPDVETVAAPDNVKDEL

SEQ ID NO: 195284 - protein, 261 aa, Zea Mays
MEEDKRAEEARRAKEAGNDAYRKSFLETAVEHYTRGALLDPRDISFLTNRAAAYFHMGKYKECVRDCEGAVERGRDLSAANKLIAKALLRKASALLELATCSGDYAPAIRALQQSLTEHYSEETHEKLNKAVVVKKELEEQERLDQETADQHRERGNELFKQKQYHEAATHYTRAMKMNPKDPRAFSNRAQCHIYLGAFPQGLEDAEKCVELDPTFIKGYVRKAKVQFLMENYENAMATYLEGLTYDPNNLEVLDGLRSMH

SEQ ID NO: 195285 - protein, 346 aa, Zea Mays
MEEDKRAEEARRAKEAGNDAYRKSFLETAVEHYTRGALLDPRDISFLTNRAAAYFHMGKYKECVRDCEGAVERGRDLSAANKLIAKALLRKASALLELATCSGDYAPAIRALQQSLTEHYSEETHEKLNKAVVVKKELEEQERLDQETADQHRERGNELFKQKQYHEAATHYTRAMKMNPKDPRAFSNRAQCHIYLGAFPQGLEDAEKCVELDPTFIKGYVRKAKVQFLMENYENAMATYLEGLTYDPNNLEVLDGLRRCAACIKRANGGDVELEDLKDMLGNFQSENNLLKFRKATEQAAILKKEASDERLKRIESERMITATIFTVQCYDSLMNIFLSKKPPTY

SEQ ID NO: 195286 - protein, 413 aa, Zea Mays
MKLIKSRRKLYNEFSAKIPIISLQAASARWPSLVKSSPLPHSRHRRPACPRHATRHAQAAEGQKCARSCRSAIASSIRWGATRWRRTSGRRRRGAPRRPATTHTASPSSRRPSSTTPAARSSTPEISPSSLTAPPPTSTWYKECVRDCEGAVERGRDLSAANKLIAKALLRKASALLELATCSGDYAPAIRALQQSLTEHYSEETHEKLNKAVVVKKELEEQERLDQETADQHRERGNELFKQKQYHEAATHYTRAMKMNPKDPRAFSNRAQCHIYLGAFPQGLEDAEKCVELDPTFIKGYVRKAKVQFLMENYENAMATYLEGLTYDPNNLEVLDGLRSLCLNDAQMGNFQSENNLLKFRKATEQAAILKKEASDERLKRIESERMITATIFTVQCYDSLMNIFLSKKPPTY

SEQ ID NO: 195287 - protein, 100 aa, Zea Mays
MGKLSLGWTNTIKAGPQWEWRDGESIVYPPGKRLDGGVLSSRLAGTRSGLEKPVGELTYARVKCYICRVVRDPQLGINRFGSPNFSDMKTGSLTLIVDNK

SEQ ID NO: 195288 - protein, 214 aa, Zea Mays
MGRGQAGAPQRRRGRAERIHGEGARRKPRRVRRDEQGIESRTPSASHRSRELGELHGRAGVELAGEEARGSRAVELSYGGHGDKRTEGRGAGEESGVGEVERLGAQEAEACRESGAGSFEQRIHIRPGAGEKRSRGWARHQGEATAPWGLGREQGRGTRLRAEDRHRDGIFIQGGRADGNEATAVRKILSRAAAGIREEDGWKDRAARFFFLGT

SEQ ID NO: 195289 - protein, 718 aa, Zea Mays
MFSRNLTSSRPRLPRCVSRPPIYIYHKKQPNRARRRGRVVVGELEQSTEIAMDASAEVDHLAAERSAARFDVEAMKVAWAGSRHAVEVGDRMARLVASDPVFRKDNRTMLSRKDLFKDTLRKAAHAWKRIVELRLTEEEAGMLRLYVDQPGYVDLHWGMFVPAIKGQGTEEQQKKWLPMAYKFQIIGCYAQTELGHGSNVQGLETTATFDPKTDEFVIHSPTLTSSKWWPGGLGKASTHAVVYARLITEGKDYGIHGFIVQLRSLEDHSPLPGITLGDIGGKFGSGAYNSMDNGVLRFDHVRIPRDQMLMRLSQVTREGKYVHSDVPKQLLYGTMVFVRQTIVADASKALSRAVCIAVRYSAIRKQFGSQDGGPETKVLDYKTQQSRLFPLLASAYAFRFVGDWLKWLYMDVTQKLEAKDYSTLQEAHACTAGLKAVTTSATADAIEECRKLCGGHGYLNSSGLPELFAVYVPACTYEGDNIVLLLQVARILMKTLSQLTSGKQPVGTMAYMGNVQYLMQCKCAVNTAEDWLNPVAIQEAFEARALRMAVNCAQNIGQAANQEEGFYERSPDLLEAAVAHIQLVIVTKFISKVQQDIPGPGVKEQLQNLCNVYALYILHKHLGDFLATGCITPKQGALANEQLGKLYAQVRPNAVALVDAFNYTDHYLGSVLGRYDGNVYPALYEEAWKDPLNETVVPEGYHEYLRPLLKQQLKLSRL

SEQ ID NO: 195290 - protein, 631 aa, Zea Mays
MATPSAVGAACLLLARAAWPAAVGDRARPRRLQRVLRRRCVAELSREGPAPRPLPPALLAPPLVPGFLAPPAEPTGEPASTPPPVPDAGLGVLGLEPEGIAEGSIDNTVVVASEQDSEIVVGKEQARAKVTQNIVFVTGEASPYAKSGGLGDVCGSLPVALAARGHRVMVVMPRYLNGTSDKNYANAFYTEKHIRIPCFGGEHEVTFFHEYRDSVDWVFVDHPSYHRPGNLYGDKFGAFGDNQFRYTLLCYAACEAPLVLELGGYIYGQNCMFVVNDWHASLVPVLLAAKYRPYGVYKDSRSILVIHNLAHQGVEPASTYPDLGLPPEWYGALEWVFPEWARRHALDKGEAVNFLKGAVVTADRIVTVSKGYSWEVTTAEGGQGLNELLSSRKSVLNGIVNGIDINDWNPATDKCIPCHYSVDDLSGKAKCKGALQKELGLPIRPDVPLIGFIGRLDYQKGIDLIQLIIPDLMREDVQFVMLGSGDPELEDWMRSTESIFKDKFRGWVGFSVPVSHRITAGFEPCGLNQLYAMQYGTVPVVHATGGLRDTVENFNPFGENGEQGTGWAFAPLTTENMLWTLRTAISTYREHKSSWEGLMKRGMSKDFTWDHAAEQYEQIFQWAFIDRPYVM

SEQ ID NO: 195291 - protein, 462 aa, Zea Mays
MVPPIRIMQMHFTQKNTFGFHALAVNMKLPSSMSIEIQLTGCLLIIPHITDLEIYMEISLVLLVIIRYTLLCYAACEAPLVLELGGYIYGQNCMFVVNDWHASLVPVLLAAKYRPYGVYKDSRSILVIHNLAHQGVEPASTYPDLGLPPEWYGALEWVFPEWARRHALDKGEAVNFLKGAVVTADRIVTVSKGYSWEVTTAEGGQGLNELLSSRKSVLNGIVNGIDINDWNPATDKCIPCHYSVDDLSGKAKCKGALQKELGLPIRPDVPLIGFIGRLDYQKGIDLIQLIIPDLMREDVQFVMLGSGDPELEDWMRSTESIFKDKFRGWVGFSVPVSHRITAGCDILLMPSRFEPCGLNQLYAMQYGTVPVVHATGGLRDTVENFNPFGENGEQGTGWAFAPLTTENMLWTLRTAISTYREHKSSWEGLMKRGMSKDFTWDHAAEQYEQIFQWAFIDRPYVM

SEQ ID NO: 195292 - protein, 377 aa, Zea Mays
MATPSAVGAACLLLARAAWPAAVGDRARPRRLQRVLRRRCVAELSREGPAPRPLPPALLAPPLVPGFLAPPAEPTGEPASTPPPVPDAGLGVLGLEPEGIAEGSIDNTVVVASEQDSEIVVGKEQARAKVTQNIVFVTGEASPYAKSGGLGDVCGSLPVALAARGHRVMVVMPRYLNGTSDKNYANAFYTEKHIRIPCFGGEHEVTFFHEYRDSVDWVFVDHPSYHRPGNLYGDKFGAFGDNQFRYTLLCYAACEAPLVLELGGYIYGQNCMFVVNDWHASLVPVLLAAKYRPYGVYKDSRSILVIHNLAHQGVEPASTYPDLGLPPEWYGALEWVFPEWARRHALDKGEAVNFLKGAVVTADRIVTVRLFMGGHNC

SEQ ID NO: 195293 - protein, 148 aa, Zea Mays
MRSTESIFKDKFRGWVGFSVPVSHRITAGCDILLMPSRFEPCGLNQLYAMQYGTVPVVHATGGLRDTVENFNPFGENGEQGTGWAFAPLTTENMLWTLRTAISTYREHKSSWEGLMKRGMSKDFTWDHAAEQYEQIFQWAFIDRPYVM

SEQ ID NO: 195294 - protein, 1253 aa, Zea Mays
MDIFGSPFCSKQAVASCGGWTDILDSSSCTNHILETGTAALITVALALHLLVVRITTKTRASARRPPVAPGLPLQLAGAAFTACLGLVYLGLASWMLGSNFTQHASAYLPHWWVTALSQGLCLVLAGFALSGVGGARLLGPMSARAWSALLAAYAAFVACSSVVHMVADRALTMKGFLDALFLPGALLLVCGAWCVKEEDGDGGTGTAASLYKPLKTDDTVDDERGGSESHVTPFAKAGVFSVMSFWWMNPMMKTGYEKPLEEKDMPLLGPSDRAYSQYLVFLEKLNRKKQLRAHGNPSMFWTIVSCQKTGILVSGLFALLKVLTLSSGPVLLKAFINVSLGKGSFKYEGYVLAVAMFLCKCCESLSQRQWYFRTRRLGLQVRSFLSAAVYKKHQRLSNSAKLKHSSGEIMNYVTVDAYRIGEFPYWFHQTWTTSVQLCIALAILYDAVGLATVAALAVIIATVVCNAPLAKLQHKFQSRLMEAQDVRLKAMSESLVHMKVLKLYAWETHFKKVIEGLREVEIKWLSAFQLRKAYNSFLFWTSPILVSAATFLACYLLKIPLDASNVFTFVATLRLVQDPIRQIPDVIGVVIQAKVAFTRITKFLDAPELSGQVRKKSCLGDEYPIVMNCCSFSWDENPSKPALKNVNLVVKTGQKVAICGEVGSGKSTLLAAVLGEVPKTEGTIQVCGKTAYVSQNAWIQTGTVQDNILFGSSMDRQRYQETLERCSLVKDLEMLPYGDRTQIGERGINLSGGQKQRVQLARALYQNADIYLLDDPFSAVDAHTATSLFNGYVMGALSDKTVLLVTHQVDFLPVFDSILVSSDLSIVDLDIPFGFMFSIGAGINAYSNLGVLAVVTWQVLFVSVPMIVLAIRLQRYYLASSKELMRINGTTKSALANHLGESIAGAITIRAFQEEDRFFEKNLELVDKNAGPYFYNFAATEWLIQRLETMSAAVLSFSALIMALLPQGTFNPGFVGMALSYGLSLNISFVFSIQNQCQLASQIISVERVHQYMDIPSEAAEIIEENRPAPDWPQVGRVDLKDLKIRYRQDAPLVLHGITCSFHGGDKIGIVGRTGSGKTTLIGALFRLVEPTGGKIIIDSIDITTIGLHDLRSRLGIIPQDPTLFQGTIRYNLDPLGQFSDQQIWEVLGKCQLLEAVQEKEQGLDSLVVEDGSNWSMGQRQLFCLGRALLRRCRILVLDEATASIDNATDAILQKTIRTEFRDCTVITVAHRIPTVMDCDMVLAMSDGMFSS

SEQ ID NO: 195295 - protein, 1174 aa, Zea Mays
MDIFGSPFCSKQAVASCGGWTDILDSSSCTNHILETGTAALITVALALHLLVVRITTKTRASARRPPVAPGLPLQLAGAAFTACLGLVYLGLASWMLGSNFTQHASAYLPHWWVTALSQGLCLVLAGFALSGVGGARLLGPMSARAWSALLAAYAAFVACSSVVHMVADRALTMKGFLDALFLPGALLLVCGAWCVKEEDGDGGTGTAASLYKPLKTDDTVDDERGGSESHVTPFAKAGVFSVMSFWWMNPMMKTGYEKPLEEKDMPLLGPSDRAYSQYLVFLEKLNRKKQLRAHGNPSMFWTIVSCQKTGILVSGLFALLKVLTLSSGPVLLKAFINVSLGKGSFKYEGYVLAVAMFLCKCCESLSQRQWYFRTRRLGLQVRSFLSAAVYKKHQRLSNSAKLKHSSGEIMNYVTVDAYRIGEFPYWFHQTWTTSVQLCIALAILYDAVGLATVAALAVIIATVVCNAPLAKLQHKFQSRLMEAQDVRLKAMSESLVHMKVLKLYAWETHFKKVIEGLREVEIKWLSAFQLRKAYNSFLFWTSPILVSAATFLACYLLKIPLDASNVFTFVATLRLVQDPIRQIPDVIGVVIQAKVAFTRITKFLDAPELSGQVRKKSCLGDEYPIVMNCCSFSWDENPSKPALKNVNLVVKTGQKVAICGEVGSGKSTLLAAVLGEVPKTEGTIQVCGKTAYVSQNAWIQTGTVQDNILFGSSMDRQRYQETLERCSLVKDLEMLPYGDRTQIGERGINLSGGQKQRVQLARALYQNADIYLLDDPFSAVDAHTATSLFNGYVMGALSDKTVLLVTHQVDFLPVFDSILLMSDGQIIRSASYHDLLAYCQEFQNLVNAHKDTIGVSDLNRVPPHRENEILIKETIDVHGSRYKESLKPSPTDQLIKTEEREMGDTGLKPYILYLRQNKGFFYASLGIISHIVFVCGQISQNSWMATNVENPDVSTLKLTSVYIAIGIFSVFFLLFRSLAVVVLGVKTSRSLFSQLLNSLFRAPMSFYDSTPLGRILSRVSSDLSIVDLDIPFGFMFSIGAGINAYSNLGVLAVVTWQVLFVSVPMIVLAIRLQRYYLASSKELMRINGTTKSALANHLGESIAGAITIRAFQEEDRFFEKNLELVDKNAGPYFYNFAATEWLIQRLETMSAAVLSFSALIMALLPQGTFNPAS

SEQ ID NO: 195296 - protein, 659 aa, Zea Mays
MSDGQIIRSASYHDLLAYCQEFQNLVNAHKDTIGVSDLNRVPPHRENEILIKETIDVHGSRYKESLKPSPTDQLIKTEEREMGDTGLKPYILYLRQNKGFFYASLGIISHIVFVCGQISQNSWMATNVENPDVSTLKLTSVYIAIGIFSVFFLLFRSLAVVVLGVKTSRSLFSQLLNSLFRAPMSFYDSTPLGRILSRVSSDLSIVDLDIPFGFMFSIGAGINAYSNLGVLAVVTWQVLFVSVPMIVLAIRLQRYYLASSKELMRINGTTKSALANHLGESIAGAITIRAFQEEDRFFEKNLELVDKNAGPYFYNFAATEWLIQRLETMSAAVLSFSALIMALLPQGTFNPGFVGMALSYGLSLNISFVFSIQNQCQLASQIISVERVHQYMDIPSEAAEIIEENRPAPDWPQVGRVDLKDLKIRYRQDAPLVLHGITCSFHGGDKIGIVGRTGSGKTTLIGALFRLVEPTGGKIIIDSIDITTIGLHDLRSRLGIIPQDPTLFQGTIRYNLDPLGQFSDQQIWEVLGKCQLLEAVQEKEQGLDSLVVEDGSNWSMGQRQLFCLGRALLRRCRILVLDEATASIDNATDAILQKTIRTEFRDCTVITVAHRIPTVMDCDMVLAMSDGKVVEYDKPTKLVETEGSLFRDLVKEYWSYTSN

SEQ ID NO: 195297 - protein, 662 aa, Zea Mays
MELMSDGQIIRSASYHDLLAYCQEFQNLVNAHKDTIGVSDLNRVPPHRENEILIKETIDVHGSRYKESLKPSPTDQLIKTEEREMGDTGLKPYILYLRQNKGFFYASLGIISHIVFVCGQISQNSWMATNVENPDVSTLKLTSVYIAIGIFSVFFLLFRSLAVVVLGVKTSRSLFSQLLNSLFRAPMSFYDSTPLGRILSRVSSDLSIVDLDIPFGFMFSIGAGINAYSNLGVLAVVTWQVLFVSVPMIVLAIRLQRYYLASSKELMRINGTTKSALANHLGESIAGAITIRAFQEEDRFFEKNLELVDKNAGPYFYNFAATEWLIQRLETMSAAVLSFSALIMALLPQGTFNPGFVGMALSYGLSLNISFVFSIQNQCQLASQIISVERVHQYMDIPSEAAEIIEENRPAPDWPQVGRVDLKDLKIRYRQDAPLVLHGITCSFHGGDKIGIVGRTGSGKTTLIGALFRLVEPTGGKIIIDSIDITTIGLHDLRSRLGIIPQDPTLFQGTIRYNLDPLGQFSDQQIWEVLGKCQLLEAVQEKEQGLDSLVVEDGSNWSMGQRQLFCLGRALLRRCRILVLDEATASIDNATDAILQKTIRTEFRDCTVITVAHRIPTVMDCDMVLAMSDGKVVEYDKPTKLVETEGSLFRDLVKEYWSYTSN

SEQ ID NO: 195298 - protein, 399 aa, Zea Mays
MPRADSSSAKPRYGKMLGGLYGDLPPPSSAGDDDKASTASVWSSATKMAPPTLRKPSTAFATPPSILRNQHLRPPKAAPTSVPAPSAVAAEPAAATSFQPAFVAVQPTVLEEYDPARPNDYEDYRKDKLRRANEAKLNKELERRRREDQEPEREREQREREAREREEKDYQSRASSLNISGEEAWKRRAAMSGGGAAARTPSSPPHGDGFAIGSSSSAGLGVGAGGQMTAAQRMMAKMGWKEGQGLGKQEQGITAPLVAKKTDRRGGVIVDESSSRPSEKKSRSVNFDGQPTRVLLLRNMVGPGEVDDELEDEVASECARYGTVSRVLIFEITQAYFPSDEAVRIFIQFERAEEATKAMVDLQGRFFGGRVVQATFFDEERFARNELAPMPGEVPGFFD

SEQ ID NO: 195299 - protein, 506 aa, Zea Mays
MRRTVLVLRWNCGNEELYSLPVASLMSCALRCLFQEGWIGTMCSDGTCSPWVVVLLGLGITTILVLATLAVTTRKRTSKLKIIQNGQSIFAPPFRLHVRRWSRHAFASGGGALPVLVDIELQGIPAHLWDLETAELLLGAHGLVQGLSTVSSEGVDYADMTVFSVSFWCFSPEALPDVLFLHAVEPRVNVEVESWFPRTMVFKIAVKVIRSGDMIGADQPPPLLPDLGGDDGDRDNHRRRPHMHYHPSPSARVSALSRLGPRVSSAVPGGGPVDAISPLMVGVERMAPGSTLSSGSVISFPVDAHSFPVLAVDEVVAPGSPDSTAQDVEWDPVDAHSLPLISVDGMVAPGVLVGTVDCGPAVQLGSSVLSMPAAPSGSDIQVNDVLAGSVTVNAQFGISVQRNIWTVDPLNRMSSFLLSKMIHGWKDASPCLKVYSRRKKLVIEPVQDEECVLSSQLLEFKNDVTGLINSLLPPPRTTNRRRRTVPANFIPRRSRRCGQVSSRIGF

SEQ ID NO: 195300 - protein, 471 aa, Zea Mays
MARAALRLGDRALALLVLVSVALLPLVSSDDGHKHCEGVVRGWADSSTGRVKDGDKLSLKDLLFFLHIPRTGGRTYFHCFLKKLYTNAQECPRSYDKLRFDPSHPDCKLVVSHDDYSLTSKLPRERTSVVTILRNPVDRVFSTYEFSVEVAARFLVHPNLTSAKLMTTRVLKKSRAVSTLDIWPWKYLVPWMREDLFSRRDARGIDKVHSSKKVNAYDVEDMVMPLHQYINDPVAHEIIHNGATFQITGLTNNSYFDGAHEVRHCARKHPDLGRIVLEVAKNRLDQMLYVGLTEDHEESARLFAHMVGAQVLLQSGTLSLDLKEDLHSETGFDLFGDGVCALPDQNEYSHPSMVEPGDEEASEHLMTVGKLMEAYETCIAKLRKSQSSRRKISLKKVEEANFSKEARKLVPEAILKQIISLNSLDMELYDHAKKIFTQEHLMLKAQQSMAGQHRQLAEQEDPSDVQSASHG

SEQ ID NO: 195301 - protein, 530 aa, Zea Mays
MARAALRLGDRALALLVLVSVALLPLVSSDDGHKHCEGVVRGWADSSTGRVKDGDKLSLKDLLFFLHIPRTGGRTYFHCFLKKLYTNAQECPRSYDKLRFDPSHPDCKLVVSHDDYSLTSKLPRERTSVVTILRNPVDRVFSTYEFSVEVAARFLVHPNLTSAKLMTTRVLKKSRAVSTLDIWPWKYLVPWMREDLFSRRDARGIDKVHSSKKVNAYDVEDMVMPLHQYINDPVAHEIIHNGATFQITGLTNNSYFDGAHEVRHCARKHPDLGRIVLEVAKNRLDQMLYVGLTEDHEESARLFAHMVGAQVLLQSGTLSLDLKEDLHSETGFDLFGDGVCALPDQNEYSHPSMVEPGDEEASEHLNNTHGWQNNEALNSTSDEQGKGNMTVGKLMEAYETCIAKLRKSQSSRRKISLKKVEEANFSKEARKLVPEAILKQIISLNSLDMELYDHAKKIFTQEHLMLKAQQSMAGQHRQLAEQEEGWIGTMCSDGTCSPWVVVLLGLGITTILVLATLAVTTRKRTSKLKV

SEQ ID NO: 195302 - protein, 415 aa, Zea Mays
MARAALRLGDRALALLVLVSVALLPLVSSDDGHKHCEGVVRGWADSSTGRVKDGDKLSLKDLLFFLHIPRTGGRTYFHCFLKKLYTNAQECPRSYDKLRFDPSHPDCKLVVSHDDYSLTSKLPRERTSVVTILRNPVDRVFSTYEFSVEVAARFLVHPNLTSAKLMTTRVLKKSRAVSTLDIWPWKYLVPWMREDLFSRRDARGIDKVHSSKKVNAYDVEDMVMPLHQYINDPVAHEIIHNGATFQITGLTNNSYFDGAHEVRHCARKHPDLGRIVLEVAKNRLDQMLYVGLTEDHEESARLFAHMVGAQVLLQSGTLSLDLKEDLHSETDSHPSMVEPGDEEASEHLNNTHGWQNNEALNSTSDEQGKGNMTVGKLMEAYETCIAKLRKSQSSRRKISLKKVEEANFSKEFCLQ

SEQ ID NO: 195303 - protein, 306 aa, Zea Mays
MTTRVLKKSRAVSTLDIWPWKYLVPWMREDLFSRRDARGIDKVHSSKKVNAYDVEDMVMPLHQYINDPVAHEIIHNGATFQITGLTNNSYFDGAHEVRHCARKHPDLGRIVLEVAKNRLDQMLYVGLTEDHEESARLFAHMVGAQVLLQSGTLSLDLKEDLHSETGFDLFGDGVCALPDQNEYSHPSMVEPGDEEASEHLMTVGKLMEAYETCIAKLRKSQSSRRKISLKKVEEANFSKEARKLVPEAILKQIISLNSLDMELYDHAKKIFTQEHLMLKAQQSMAGQHRQLAEQEDPSDVQSASHG

SEQ ID NO: 195304 - protein, 287 aa, Zea Mays
MTTRVLKKSRAVSTLDIWPWKYLVPWMREDLFSRRDARGIDKVHSSKKVNAYDVEDMVMPLHQYINDPVAHEIIHNGATFQITGLTNNSYFDGAHEVRHCARKHPDLGRIVLEVAKNRLDQMLYVGLTEDHEESARLFAHMVGAQVLLQSGTLSLDLKEDLHSETDSHPSMVEPGDEEASEHLMTVGKLMEAYETCIAKLRKSQSSRRKISLKKVEEANFSKEARKLVPEAILKQIISLNSLDMELYDHAKKIFTQEHLMLKAQQSMAGQHRQLAEQEGGGRKHDRI

SEQ ID NO: 195305 - protein, 469 aa, Zea Mays
MARAALRLGDRALALLVLVSVALLPLVSSDDGHKHCEGVVRGWADSSTGRVKDGDKLSLKDLLFFLHIPRTGGRTYFHCFLKKLYTNAQECPRSYDKLRFDPSHPDCKLVVSHDDYSLTSKLPRERTSVVTILRNPVDRVFSTYEFSVEVAARFLVHPNLTSAKLMTTRVLKKSRAVSTLDIWPWKYLVPWMREDLFSRRDARGIDKVHSSKKVNAYDVEDMVMPLHQYINDPVAHEIIHNGATFQITGLTNNSYFDGAHEVRHCARKHPDLGRIVLEVAKNRLDQMLYVGLTEDHEESARLFAHMVGAQVLLQSGTLSLDLKEDLHSETDSHPSMVEPGDEEASEHLNNTHGWQNNEALNSTSDEQGKGNMTVGKLMEAYETCIAKLRKSQSSRRKISLKKVEEANFSKEARKLVPEAILKQIISLNSLDMELYDHAKKIFTQEHLMLKAQQSMAGQHRQLAEQEVKI

SEQ ID NO: 195306 - protein, 355 aa, Zea Mays
MPGSPKVFFASSASRRSGSLRRLLSTPVFSAACLLFGLAGFVAAALALSRSPSVTHSRCPDSSRPLSVSVAWDRSPGDGSAGGSAELPASLATGSRGRHKVMAFVGIFTGFGSIGRRRALRRTWLPADRQGLLRLEEATGLAFRFVIGKSNSKNKMAALNREVEEYDDFVLLDLEEEYSRLPYKTLAFFKAAYALFDSDFYVKADDDIYLRPDRLSLLLAKERSHPQTYIGCMKKGPVFTDPKLKWYEPQSFLLGSEYFLHAYGPIYALSADVVASLVALRNNSFRMFSNEDVTIGSWMLAMNVNHENTHALCEPDCTESSVAVWDIPKCSVEPRSTFGTFILYRSKKGILLYRN

SEQ ID NO: 195307 - protein, 350 aa, Zea Mays
MPGSPKVFFASSASRRSGSLRRLLSTPVFSAACLLFGLAGFVAAALALSRSPSVTHSRCPDSSRPLSVSVAWDRSPGDGSAGGSAELPASLATGSRGRHKVMAFVGIFTGFGSIGRRRALRRTWLPADRQGLLRLEEATGLAFRFVIGKSNSKNKMAALNREVEEYDDFVLLDLEEEYSRLPYKTLAFFKAAYALFDSDFYVKADDDIYLRPDRLSLLLAKERSHPQTYIGCMKKGPVFTDPKLKWYEPQSFLLGSEYFLHAYGPIYALSADVVASLVALRNNSFRMFSNEDVTIGSWMLAMNVNHENTHALCEPDCTESSVAVWDIPKCSVLMFTGQPAFAVRTPKGLL

SEQ ID NO: 195308 - protein, 86 aa, Zea Mays
MRTHMRSVNLTARSLQLLFGTFQNAQGYGGSTSGRFGVQDQDLDAWAPSGGWMGRRGTVQADEQRHADEQCCSLGGLRGFGGDGLG

SEQ ID NO: 195309 - protein, 173 aa, Zea Mays
MDGGGQPPDTEMSEAGAGGGGQPPQQPLPPVGGGVMLDNIQATLSHGGRFIQYNIFGNVFEVTAKYKPPVLPIGKGAYGIVCSALNSETAEQVAIKKIANAFDNKIDAKRTLREIKLLRHMDHENIVAIRDIIPPAQRAAFNDVYIAYELMDTDLHQIIRSNQALSEEHCQMV

SEQ ID NO: 195310 - protein, 297 aa, Zea Mays
MDGGGQPPDTEMSEAGAGGGGQPPQQPLPPVGGGVMLDNIQATLSHGGRFIQYNIFGNVFEVTAKYKPPVLPIGKGAYGIVCSALNSETAEQVAIKKIANAFDNKIDAKRTLREIKLLRHMDHENIVAIRDIIPPAQRAAFNDVYIAYELMDTDLHQIIRSNQALSEEHCQYFLYQILRGLKYIHSANVLHRDLKPSNLLLNANCDLKICDFGLARTTSETDFMTEYVVTRWYRAPELLLNSSEYTAAIDVWSVGCIFMELMDRKPLFPGRDHVHQLRLLMELKAHLHTLTWHHFMT

SEQ ID NO: 195311 - protein, 248 aa, Zea Mays
MDTDLHQIIRSNQALSEEHCQYFLYQILRGLKYIHSANVLHRDLKPSNLLLNANCDLKICDFGLARTTSETDFMTEYVVTRWYRAPELLLNSSEYTAAIDVWSVGCIFMELMDRKPLFPGRDHVHQLRLLMELIGTPNEGDLDFVNENARRYIRQLPRHPRQSLPEKFPHVQPLAIDLVEKMLTFDPRQRITVEGALAHPYLASLHDISDEPGCSMPFSFDFEQHALSEEQMKDLIYQEALAFNPDYQ

SEQ ID NO: 195312 - protein, 51 aa, Zea Mays
MEKLNTSITAVQHWTTKLISKHGLETISFFEWYSIALFTMTGISYTASYYR

SEQ ID NO: 195313 - protein, 210 aa, Zea Mays
MAMKLDMSALETNFANLTASAGDDTYFSAEAPDVPSMVLPICDDFDGFQAATKDMVKNKKGTTTLAFIFDKGVIVAADSRASMGGYISSQTVRKIIEINPYMLGTMAGGAADCQFWHRNLGTKCRLHELSNKRRISIAGASKLLANILYSYRGMGLSIGTMIAGWDEKGPGLYYVDSEGARLVGNRFSVGSGSLYAYVTASACQLRKPPN

SEQ ID NO: 195314 - protein, 96 aa, Zea Mays
MAMRGCGVIMWRSRATRLNNSVPSGLPSIFRSLSATAGRPSSPPPFSRCPGLRRSLCRLFAADEHQPGCLGDLITVIWVGLKEEKKLNHGEEKVSC

SEQ ID NO: 195315 - protein, 95 aa, Zea Mays
MFNGEEDSQPHQIGDNGGWSSYLMWSGVQWQGGQWTSQIGDNGGWQGPDAWQSKPFWSAIYGLGHLFCGSGGRLAYYKTQFGLVSSLTLMISILP

SEQ ID NO: 195316 - protein, 544 aa, Zea Mays
MAPPPASPADSAPDPRPTASAPVPITVPSPRDHAHHHHLVDRRDTPRGRAWEPERNRRGEAMDGAAAVKLVPGEAGYVLEDVPHVSDYLPDLPTYSNPLQDNPAYSVVKQYFVNPDDTVCQKIVVHKDGPRGNHFRRAGPRQKVYFEPDEVHACIVTCGGLCPGLNTVIREIVCGLSDMYGVTKILGIQGGYRGFYARNTITLTPKSVNDIHKRGGTILGSSRGGHDTVKIVDSIQDRDINQVYVIGGDGTQRGAGVIFEEVRRRGLKVSVAGIPKTIDNDIPVIDKSFGFDTAVEEAQRAINAAHVEAVSAENGIGLVKLMGRHSGFIAHYATLASRDVDCCLIPESPFYLEGEGGLFRYIEKRLKDNGHMVIVVAEGAGQKLIAETMQSIGKDASGNELLLDVGLWLSQKINEHFKKNKMTINLKYIDVSSTADPTYMIRAIPSNASDNVYCTLLAHSVVHGAMAGYTGFTIGQVNGRHCYIPFYRITEKQNRVSITDRMWARLLSSTNQPSFLCNKVVEEAKKEHERATRLLDGSPSHRKG

SEQ ID NO: 195317 - protein, 121 aa, Zea Mays
MSFVCLEFCEGKNGWRVELSRNSSGRGGRDRYGGSESKCYECGETGHFARECHLRIASGGLGSGRRRSRSRSRSRSGSPRYRRSRSRSRISVDEAHAFIYMNIFLTMFFFFLFSCHANQWV

SEQ ID NO: 195318 - protein, 334 aa, Zea Mays
MFICLICLLHLLAMFNLQMDLSSYITCFHVLELLLFIAVIITYGIYLSYMLVLFGISIFNLFKYVESMSLISLNLQHHVLEICLCGVENADTIQTKVSKRKKEDQNVMAMHSSRTSAKRSELMYLSPPLGNTVTIILPLFSCLEATFKQAARFAPEEMPTSRPSSLASLLAFAMASSVLTVTVSSMTEVSRTSGRNPGPTPWILCLPGAPPEITGLSAGSTQMILTPGFCIFRYFPTPETVPPVPEPATNTSTLPAVSFQISGPVNLKWASEFALFVTWFRTCTFGSCFRSCSTLSNMPGKPRAGSVKYSSAPMNLSKICLSSEYLAGMTAMSL

SEQ ID NO: 195319 - protein, 464 aa, Zea Mays
MNVTFTHLYVLSELVSGYTLWAHCLRTASCKISLFILYLCRGLGSVLELNNALVSSALDILLKPMSWGISIELGQRFPFSHAYFPSQQSDLLAILTGPLSYKGFLDLVSYISALVHLDNTRTRCSSQKNLQLQPSKGLVKYNSAWYMIISFPIWFSYATALLFHREGSQDYLSETLSKEITAESISDVSLVQRAAFYLSWLLCPYNHDQREMLSNNILEISHSWARNNKKCVSYQSTVNNRRKLRIPTAADSEKFHVPVNTISSLVKEFDDRCVKCCSPTAFPQAQVGNLSDLHPLYFNLLHQWIPLGVLLVSPSCVNEQNCDILLRYTSTGQVLESNGARVKTKDDATNDGFLGSCIGTAERWALTGAYLIFGWLDVVEDMAPLIFDCEDKCHSFVSQLRNKTGPYLLKCVKSLFKTLEQPNQDKDFVIDLHNRLLNWDKNVQGCEIFGDVILEMNKKFNLPL

SEQ ID NO: 195320 - protein, 318 aa, Zea Mays
MIISFPIWFSYATALLFHREGSQDYLSETLSKEITAESISDVSLVQRAAFYLSWLLCPYNHDQREMLSNNILEISHSWARNNKKCVSYQSTVNNRRKLRIPTAADSEKFHVPVNTISSLVKEFDDRCVKCCSPTAFPQAQVGNLSDLHPLYFNLLHQWIPLGVLLVSPSCVNEQNCDILLRYTSTGQVLESNGARVKTKDDATNDGFLGSCIGTAERWALTGAYLIFGWLDVVEDMAPLIFDCEDKCHSFVSQLRNKTGPYLLKCVKSLFKTLEQPNQDKDFVIDLHNRLLNWDKNVQGCEIFGDVILEMNKKFNLPL

SEQ ID NO: 195321 - protein, 482 aa, Zea Mays
MGTIAAELINHSSDHILPSDHSIPPRLLSWHLDPLILRHDLSAMLQEMRSLLHFWLLATGLGSVLELNNALVSSALDILLKPMSWGISIELGQRFPFSHAYFPSQQSDLLAILTGPLSYKGFLDLVSYISALVHLDNTRTRCSSQKNLQLQPSKGLVKYNSAWYMIISFPIWFSYATALLFHREGSQDYLSETLSKEITAESISDVSLVQRAAFYLSWLLCPYNHDQREMLSNNILEISHSWARNNKKCVSYQSTVNNRRKLRIPTAADSEKFHVPVNTISSLVKEFDDRCVKCCSPTAFPQAQVGNLSDLHPLYFNLLHQWIPLGVLLVSPSCVNEQNCDILLRYTSTGQVLESNGARVKTKDDATNDGFLGSCIGTAERWALTGAYLIFGWLDVVEDMAPLIFDCEDKCHSFVSQLRNKTGPYLLKCVKSLFKTLEQPNQDKDFVIDLHNRLLNWDKNVQGCEIFGDVILEMNKKFNLPL

SEQ ID NO: 195322 - protein, 432 aa, Zea Mays
MISQQCSRRGLGSVLELNNALVSSALDILLKPMSWGISIELGQRFPFSHAYFPSQQSDLLAILTGPLSYKGFLDLVSYISALVHLDNTRTRCSSQKNLQLQPSKGLVKYNSAWYMIISFPIWFSYATALLFHREGSQDYLSETLSKEITAESISDVSLVQRAAFYLSWLLCPYNHDQREMLSNNILEISHSWARNNKKCVSYQSTVNNRRKLRIPTAADSEKFHVPVNTISSLVKEFDDRCVKCCSPTAFPQAQVGNLSDLHPLYFNLLHQWIPLGVLLVSPSCVNEQNCDILLRYTSTGQVLESNGARVKTKDDATNDGFLGSCIGTAERWALTGAYLIFGWLDVVEDMAPLIFDCEDKCHSFVSQLRNKTGPYLLKCVKSLFKTLEQPNQDKDFVIDLHNRLLNWDKNVQGCEIFGDVILEMNKKFNLPL

SEQ ID NO: 195323 - protein, 376 aa, Zea Mays
MAPPLEDLTRVLAELASGLAQPPAGGGTFSSTDSLPASISSLAAALNPSGDGAAASSGTGVLDAALSLMCFDPLEVNSARVNCLVRTLVSVLSASVSCCVVRPDGDAAEEMLCVGSSVSPLDCRELLRSCAALVEKLGDCGDRRHSYDLLYAVVKTILLSPHYQCLSPLPYYKEEEERVSHMGTIAAELINHSSDHILPSDHSIPPRLLSWHLDPLILRHDLSAMLQEVIRRPLLCLRKELYNRMEWRIIIICLVCCPTIFMEMRSLLHFWLLATGLGSVLELNNALVSSALDILLKPMSWGISIELGQRFPFSHAYFPSQQSDLLAILTGPLSYKGFLDLVSYISALVHLDNTRTRCSSQKNLQLQPSKGLVHDY

SEQ ID NO: 195324 - protein, 594 aa, Zea Mays
MAPPLEDLTRVLAELASGLAQPPAGGGTFSSTDSLPASISSLAAALNPSGDGAAASSGTGVLDAALSLMCFDPLEVNSARVNCLVRTLVSVLSASVSCCVVRPDGDAAEEMLCVGSSVSPLDCRELLRSCAALVEKLGDCGDRRHSYDLLYAVVKTILLSPHYQCLSPLPYYKEEEERVSHMGTIAAELINHSSDHILPSDHSIPPRLLSWHLDPLILRHDLSAMLQEVIRRPLLCLRKELYNRMEWRIIIICLVCCPTIFMEMRSLLHFWLLATYMIISFPIWFSYATALLFHREGSQDYLSETLSKEITAESISDVSLVQRAAFYLSWLLCPYNHDQREMLSNNILEISHSWARNNKKCVSYQSTVNNRRKLRIPTAADSEKFHVPVNTISSLVKEFDDRCVKCCSPTAFPQAQVGNLSDLHPLYFNLLHQWIPLGVLLVSPSCVNEQNCDILLRYTSTGQVLESNGARVKTKDDATNDGFLGSCIGTAERWALTGAYLIFGWLDVVEDMAPLIFDCEDKCHSFVSQLRNKTGPYLLKCVKSLFKTLEQPNQDKDFVIDLHNRLLNWDKNVQGCEIFGDVILEMNKKFNLPL

SEQ ID NO: 195325 - protein, 517 aa, Zea Mays
MGTIAAELINHSSDHILPSDHSIPPRLLSWHLDPLILRHDLSAMLQEVIRRPLLCLRKELYNRMEWRIIIICLVCCPTIFMEMRSLLHFWLLATGLGSVLELNNALVSSALDILLKPMSWGISIELGQRFPFSHAYFPSQQSDLLAILTGPLSYKGFLDLVSYISALVHLDNTRTRCSSQKNLQLQPSKGLVKYNSAWYMIISFPIWFSYATALLFHREGSQDYLSETLSKEITAESISDVSLVQRAAFYLSWLLCPYNHDQREMLSNNILEISHSWARNNKKCVSYQSTVNNRRKLRIPTAADSEKFHVPVNTISSLVKEFDDRCVKCCSPTAFPQAQVGNLSDLHPLYFNLLHQWIPLGVLLVSPSCVNEQNCDILLRYTSTGQVLESNGARVKTKDDATNDGFLGSCIGTAERWALTGAYLIFGWLDVVEDMAPLIFDCEDKCHSFVSQLRNKTGPYLLKCVKSLFKTLEQPNQDKDFVIDLHNRLLNWDKNVQGCEIFGDVILEMNKKFNLPL

SEQ ID NO: 195326 - protein, 555 aa, Zea Mays
MDATPPSKKAKTTAAPPPRKLREAAALADEVRTPDKAAKKMTPAAAFEQIPTPEKPEEMPRARGRSVAFSVKEIRRAALGLRRPAAQAEAAVEDDLESVERELGVGAGAGRSPVKRKAEVKLPESYEMLFEFFNCLESSTRLLRMKGSKATFPNICSSIQNLTERRFTHSHLAQLKYIMPEAIVINKILLRDDTTCCMYPDLQVNLLVGAVENVLKQKGETAYLALRRTFRQRLVEFYREHPEGDDIPEHELPHPFNRARSSLPQDEQRTAPESSSPLKPSDVNGQQQTAAVMSHMSQSFKRRFSQRSPIGSATASAPSPLVKAASTAPSPLSRNSLFGCVDSGSTCGDEKSSSAKEDFCKSGVSENTPAKFASTPARLMAPTPGLKTPKRPISATGYDTPPLRTAKRSARAKLFTTPTKNNSTGGESQSASVSGASADDDLLSFLPQSLLQSVKEKEDRALVEKESGFADQVRRQKLIASLPSTFDVVFLIYQSRQRSVMTKQELVHKIIASSPKIADRSEVEGHLTLLKELVPDWFSEKTARSGDALCWSMPL

SEQ ID NO: 195327 - protein, 285 aa, Zea Mays
MAGRPPPSYARYPALQGGRPFAGEEHPSDSRVVYPSYLAPEGSVASYYASRPVLPVGSDVLRNDVISQPRTHGYDGPARVTNPALAGLTGLPAGVTARGPSALEDPSLAGLSGLAPVRATGGATARGSGALEDPSLAGLSGLAPARALGPRALKEELDVVGRSSSVGRGASIPDVEHHSSIPNFDGPSENESNILFVDCLPTDCTRREVAHLFRCFPGFKDIRVVHKEPRRIKRNVHIMKTKTRNYTSHKGSSAADMRFLAPISTNNLVISLTRQMSSAPTFSIC

SEQ ID NO: 195328 - protein, 170 aa, Zea Mays
MDGGSLADFLKTVKTIPEAYLAAICTQMLKGLIYLHNEKRVIHRDLKPSNILINHRGEVKISDFGVSAIISSSSSQRDTFIGTRNYMAPERIDGKKHGSMSDIWSLGLVILECATGIFPFPPCESFYELLVAVVDQPPPSAPPDQFSPEFFSRRMLMTGHQPKPYWTIRS

SEQ ID NO: 195329 - protein, 185 aa, Zea Mays
MLKGLIYLHNEKRVIHRDLKPSNILINHRGEVKISDFGVSAIISSSSSQRDTFIGTRNYMAPERIDGKKHGSMSDIWSLGLVILECATGIFPFPPCESFYELLVAVVDQPPPSAPPDQFSPEFCGFISACLQKDANDRSSAQALLDHPFLSMYDDLHVDLASYFTTAGSPLATFKSVIGSITLHI

SEQ ID NO: 195330 - protein, 219 aa, Zea Mays
MEPRFYALSKELHSSASPSHVFITHGRGAKQWRPRRRCSRPSALALPISGAASRPYISYSPSTRQRGGCAFAGRRHLVRPSSASSTPPTPRRRPRRRGARRMVGWRSPWRRTTGRVHCTLNSCVIENTKDADVVKRPSLWFSCLPSDLEGAIRQSGKASADFVNSGGMRAIAELLIPQLEFLNEEGAQAELWALSKIFLDTLVQETGQVWIQESYCHFP

SEQ ID NO: 195331 - protein, 290 aa, Zea Mays
MEPRFYALSKELHSSASPSHVFITHGRGAKQWRPRRRCSRPSALALPISGAASRPYISYSPSTRQRGGCAFAGRRHLVRPSSASSTPPTPRRRPRRRGARRMVGWRSPWRRTTGRVHCTLNSCVIENTKDADVVKRPSLWFSCLPSDLEGAIRQSGKASADFVNSGGMRAIAELLIPQLEFLNEEGAQAELWALSKIFLDTLVQETGQKVTAIFPDAGAAALLKHQWKDAQFKCASLGDRKPVGPEDEVAVMIIPDHQMLEAVERITSQLSDDPVWNLCLIRLQISADPV

SEQ ID NO: 195332 - protein, 178 aa, Zea Mays
MATTAPLLSPQRACPTHLRRRLSPLHLVFPLDASARRLRLRRAPPPCSAKFGKFDASDAPAEAEEAGGATDGGLAQPVEEDDSCLPSDLEGAIRQSGKASADFVNSGGMRAIAELLIPQLEFLNEEGAQAELWALSKIFLDTLVQETGQKVTAIFPDAGAAALLKHQWKDAQFKCARY

SEQ ID NO: 195333 - protein, 494 aa, Zea Mays
MTGAAALRQSSRRIFRHLAAAPAFSRSGLQHPERLLSSQSSPEHGARGAVSGSELALYPPERVRNFSIIAHVDHGKSTLADRLLELTGTIQKGHGQPQYLDKLQVERERGITVKAQTATMFYRHITASQDSDMPRYLLNLIDTPGHVDFSYEVSRSLAACQGALLVVDAAQGVQAQTIANFYLAFESNLSIIPVINKIDQPTADPDNVKDQLKRLFDIDPSEALLTSAKTGRGLEQVLPAVIERIPSPPGKCDAPVRMLLLDSYYDEYRGVICHVAVVDGALRKGDKIASAATSRAYEVLDVGIMHPELTPTGVLYTGQVGYVISGMRSTKEARIGDTLHQAKSTVEPLPGFKPVKHMVFSGLYPADGSDFEALSHAIEKLTCNDASVSVTKETSNALGMGFRCGFLGLLHMDVFHQRLEQEYGAQVISTIPTVPYIFEYGDGSKVQVENPAALASNPGKRVAACWEPTVIATIIIPSMLGLSLCFVQKEGANS

SEQ ID NO: 195334 - protein, 306 aa, Zea Mays
MTGAAALRQSSRRIFRHLAAAPAFSRSGLQHPERLLSSQSSPEHGARGAVSGSELALYPPERVRNFSIIAHVDHGKSTLADRLLELTGTIQKGHGQPQYLDKLQVERERGITVKAQTATMFYRHITASQDSDMPRYLLNLIDTPGHVDFSYEVSRSLAACQGALLVVDAAQGVQAQTIANFYLAFESNLSIIPVINKIDQPTADPDNVKDQLKRLFDIDPSEALLTSAKTGRGLEQVIRLLRLQLAVHMKFLTLALCTLSLHLLEFSTLDKLDMLLVECVQLKKHASVIPFTRQRVLLSHFLVSSL

SEQ ID NO: 195335 - protein, 503 aa, Zea Mays
MTGAAALRQSSRRIFRHLAAAPAFSRSGLQHPERLLSSQSSPEHGARGAVSGSELALYPPERVRNFSIIAHVDHGKSTLADRLLELTGTIQKGHGQPQYLDKLQVERERGITVKAQTATMFYRHITASQDSDMPRYLLNLIDTPGHVDFSYEVSRSLAACQGALLVVDAAQGVQAQTIANFYLAFESNLSIIPVINKIDQPTADPDNVKDQLKRLFDIDPSEALLTSAKTGRGLEQVLPAVIERIPSPPGKCDAPVRMLLLDSYYDEYRGVICHVAVVDGALRKGDKIASAATSRAYEVLDVGIMHPELTPTGVLYTGQVGYVISGMRSTKEARIGDTLHQAKSTVEPLPGFKPVKHMVFSGLYPADGSDFEALSHAIEKLTCNDASVSVTKETSNALGMGFRCGFLGLLHMDVFHQRLEQEYGAQVISTIPTVPYIFEYGDGSKVQVENPAALASNPGKRVAACWEPTVIATIIIPSEYVGPVIMLCSERRGEQLEYTFIDA

SEQ ID NO: 195336 - protein, 458 aa, Zea Mays
MTGAAALRQSSRRIFRHLAAAPAFSRSGLQHPERLLSSQSSPEHGARGAVSGSELALYPPERVRNFSIIAHVDHGKSTLADRLLELTGTIQKGHGQPQYLDKLQVERERGITVKAQTATMFYRHITASQDSDMPRYLLNLIDTPGHVDFSYEVSRSLAACQGALLVVDAAQGVQAQTIANFYLAFESNLSIIPVINKIDQPTADPDNVKDQLKRLFDIDPSEALLTSAKTGRGLEQVLPAVIERIPSPPGKCDAPVRMLLLDSYYDEYRGVICHVAVVDGALRKGDKIASAATSRAYEVLDVGIMHPELTPTGVLYTGQVGYVISGMRSTKEARIGDTLHQAKSTVEPLPGFKPVKHMVFSGLYPADGSDFEALSHAIEKLTCNDASVSVTKETSNALGMGFRCGFLGLLHMDVFHQRLEQEYGAQVISTIPTVPYIFEYARCKLRTLLLWLRILESV

SEQ ID NO: 195337 - protein, 357 aa, Zea Mays
MTGAAALRQSSRRIFRHLAAAPAFSRSGLQHPERLLSSQSSPEHGARGAVSGSELALYPPERVRNFSIIAHVDHGKSTLADRLLELTGTIQKGHGQPQYLDKLQVERERGITVKAQTATMFYRHITASQDSDMPRYLLNLIDTPGHVDFSYEVSRSLAACQGALLVVDAAQGVQAQTIANFYLAFESNLSIIPVINKIDQPTADPDNVKDQLKRLFDIDPSEALLTSAKTGRGLEQVLPAVIERIPSPPGKCDAPVRMLLLDSYYDEYRGVICHVAVVDGALRKGDKIASAATSRAYEVLDVGIMHPELTPTGVLYTGQVGYVISGMRSTKEARIGDTLHQAKSTVEPLPVFQVSSL

SEQ ID NO: 195338 - protein, 323 aa, Zea Mays
MFYRHITASQDSDMPRYLLNLIDTPGHVDFSYEVSRSLAACQGALLVVDAAQGVQAQTIANFYLAFESNLSIIPVINKIDQPTADPDNVKDQLKRLFDIDPSEALLTSAKTGRGLEQVLPAVIERIPSPPGKCDAPVRMLLLDSYYDEYRGVICHVAVVDGALRKGDKIASAATSRAYEVLDVGIMHPELTPTGVLYTGQVGYVISGMRSTKEARIGDTLHQAKSTVEPLPGFKPVKHMVFSGLYPADGSDFEALSHAIEKLTCNDASVSVTKETSNALGMGFRYHCTRFPTCELVRFCCFHYTEYGTCSNLFFYVCFTDVAS

SEQ ID NO: 195339 - protein, 360 aa, Zea Mays
MHLANWLCDNYLKDSLATLIVENMHLHILPTMNPDGFALRWRGNANNIDLNRDFPDQFFPVNNDIDYRQPETRAIMNWVKQEHFTASASLHGGALVANYPWDGTRDTSKHYYGCPDDKTFQHMASVYSRSHYNMSLSKEFEGGITNGAFWYPIYGGMQDWNYIHGGCFELTLEISDTKWPKADELPIIWEHNRMSMLNLLASLIKSGVHGRIFAADTGRPVPGSVMIKGIDSKVSASSTFGDYHRIVAPGETYEVVASMRGFRQKSTRIRLEQEAVSLDFILDPDGADGQTKLLPRSNDRGCRCDNDNAAKPFHVHEAHLWLYLLIVSVLLALYVVFKRKTVPRLLAYRHSSSLRRPVAV

SEQ ID NO: 195340 - protein, 294 aa, Zea Mays
MGGLLLPTIHGMELETQGLLASIILQICTSNRTCTRRRQIISKHYYGCPDDKTFQHMASVYSRSHYNMSLSKEFEGGITNGAFWYPIYGGMQDWNYIHGGCFELTLEISDTKWPKADELPIIWEHNRMSMLNLLASLIKSGVHGRIFAADTGRPVPGSVMIKGIDSKVSASSTFGDYHRIVAPGETYEVVASMRGFRQKSTRIRLEQEAVSLDFILDPDGADGQTKLLPRSNDRGCRCDNDNAAKPFHVHEAHLWLYLLIVSVLLALYVVFKRKTVPRLLAYRHSSSLRRPVAV

SEQ ID NO: 195341 - protein, 214 aa, Zea Mays
MGLLLDGVVMQTILISTGIFLTKQPETRAIMNWVKQEHFTASASLHGGALVANYPWDGTRDTSKHYYGCPDDKTFQHMASVYSRSHYNMSLSKEFEGGITNGAFWYPIYGGMQDWNYIHGGCFELTLEISDTKWPKADELPIIWEHNRMSMLNLLASLIKSGVHGRIFAADTGRPVPGSVMIKGIDSKVSASSTFGDYHRIVAPGETYEVNRRE

SEQ ID NO: 195342 - protein, 390 aa, Zea Mays
MGISHLQPVLLLLMLRALASLPTQAAARGGHDPSDDGAHGPFSRKLLEDKPQITEEMVRGYMSNTELETAVHAFGSRCSNISRVYSIGKSVNHFPLWVIEISDKPRQRESEPAFKFIGNVHGDEPVGREVLMHLANWLCDNYLKDSLATLIVENMHLHILPTMNPDGFALRWRGNANNIDLNRDFPDQFFPVNNDIDYRQPETRAIMNWVKQEHFTASASLHGGALVANYPWDGTRDTSKHYYGCPDDKTFQHMASVYSRSHYNMSLSKEFEGGITNGAFWYPIYGGMQDWNYIHGGCFELTLEISDTKWPKADELPIIWEHNRMSMLNLLASLIKSGVHGRIFAADTGRPVPGSVMIKGIDSKVSASSTFGDYHRIVAPGETYEVNRRE

SEQ ID NO: 195343 - protein, 223 aa, Zea Mays
MHLANWLCDNYLKDSLATLIVENMHLHILPTMNPDGFALRWRGNANNIDLNRDFPDQFFPVNNDIDYRQPETRAIMNWVKQEHFTASASLHGGALVANYPWDGTRDTSKHYYGCPDDKTFQHMASVYSRSHYNMSLSKEFEGGITNGAFWYPIYGGMQDWNYIHGGCFELTLEISDTKWPKADELPIIWEHNRMSMLNLLASLIKGFMEGYLQQIRAGLYPAQ

SEQ ID NO: 195344 - protein, 190 aa, Zea Mays
MGISHLQPVLLLLMLRALASLPTQAAARGGHDPSDDGAHGPFSRKLLEDKPQITEEMVRGYMSNTELETAVHAFGSRCSNISRVYSIGKSVNHFPLWVIEISDKPRQRESEPAFKFIGNVHGDEPVGREVLMHLANWLCDNYLKDSLATLIVENMHLHILPTMNPDGFALRWRGNANNIDLNRDFPDQTA

SEQ ID NO: 195345 - protein, 238 aa, Zea Mays
MASVYSRSHYNMSLSKEFEGGITNGAFWYPIYGGMQDWNYIHGGCFELTLEISDTKWPKADELPIIWEHNRMSMLNLLASLIKSGVHGRIFAADTGRPVPGSVMIKGIDSKVSASSTFGDYHRIVAPGETYEVVASMRGFRQKSTRIRLEQEAVSLDFILDPDGADGQTKLLPRSNDRGCRCDNDNAAKPFHVHEAHLWLYLLIVSVLLALYVVFKRKTVPRLLAYRHSSSLRRPVAV

SEQ ID NO: 195346 - protein, 496 aa, Zea Mays
MGSMLRDAVSPDEQPLLYLQLAFTATFFAGVFQASLGFLRLGFIVDFLSKATLTGFMGGAAVIVSLQQLKGLLGISHFTSHMGFLDVMRSVVNRHDEWKWQTIVMGSAFLAILLLTRQISARNPKLFWVSAGAPLASVIISTILSFIWKSPSISVIGILPRGVNPPSANMLSFSGSYVALTIKTGIMTGILSLTEGIAVGRTFASINNYQVDGNKEMMAIGLMNMAGSCASCYVTTGSFSRSAVNYSAGCRTALSNVVMAAAVLVTLLFLMPLFHYTPNVILAAIIITAVVGLVDVRGAARLWKVDKLDFLACVAAFLGVLLVSVQTGLGVAVGISLFKVLLQVTRPNVVVEGLVPGTQSYRSVAQYREAVRVPGFLVVGVESAVYFANSMYLVERVMRYLRDEEERALKSNHPSIRCVVLDMGAVAAIDTSGLDALSELKKVLDKRNIELVLANPVGSVAERMFNSAVGESFGSGRLFFSVAEAVAAGACKAAQP

SEQ ID NO: 195347 - protein, 400 aa, Zea Mays
MVVNNKVDSLSYDVEAPPPSAAGAAAGQAPPPASPAPAPAPATHAPVTREGGAASVLELHKVSLPERRTTAKALRQRLAEVFFPDDPLHQFKNQSSARRLVLALHYFFPIFQWGSAYSPRLLRSDLVAGLTIASLAIPQGISYAKLANLPPIVGLYSSFVPPLIYALLGSSRDLAVGPVSIASLVMGSMLRDAVSPDEQPLLYLQLAFTATFFAGVFQASLGFLRLGFIVDFLSKATLTGFMGGAAVIVSLQQLKGLLGISHFTSHMGFLDVMRSVVNRHDEWKWQTIVMGSAFLAILLLTRQISARNPKLFWVSAGAPLASVIISTILSFIWKSPSISVIGILPRGVNPPSANMLSFSGSYVALTIKTGIMTGILSLTGSQWAGPLRPSTTTRWTGTRR

SEQ ID NO: 195348 - protein, 288 aa, Zea Mays
MLSFSGSYVALTIKTGIMTGILSLTEGIAVGRTFASINNYQVDGNKEMMAIGLMNMAGSCASCYVTTGSFSRSAVNYSAGCRTALSNVVMAAAVLVTLLFLMPLFHYTPNVILAAIIITAVVGLVDVRGAARLWKVTRPNVVVEGLVPGTQSYRSVAQYREAVRVPGFLVVGVESAVYFANSMYLVERVMRYLRDEEERALKSNHPSIRCVVLDMGAVAAIDTSGLDALSELKKVLDKRNIELVLANPVGSVAERMFNSAVGESFGSGRLFFSVAEAVAAGACKAAQP

SEQ ID NO: 195349 - protein, 182 aa, Zea Mays
MEAGNLESANKCFSPSKIKQWAMDDLAQTMSWLDSQEEKPEPSELKAIASEGVITCLQDAIESLEQGNDIKGVAEQWSFVPHVVNELLKLDGGGKGAALPKEQLRQLAGKCKKIYQAEFARTDMGDKNKGRHQNDPHVTEHRRKTNTKSEDDHYDSDATIEMTEEEIDFACRRLPGLYADDT

SEQ ID NO: 195350 - protein, 82 aa, Zea Mays
MDVFCVARKRRGQGFIGAVAPPSIGRGTPTTQTIGGRGEGRGEAAGGADVVLEPMHFSGETYEPIHSREGDKRDGRRMRHHA

SEQ ID NO: 195351 - protein, 161 aa, Zea Mays
MLVPFQKMCAQRKVEAEAVLLESDDVASAISEEIGKFNICKLVLGSSSKSIFRRKLKGSKTATKISECIPSFCTAYVISKGKLSFVRSATSDIVETPRSISSSTISSPSTRSLSSCAPSGAASRAGGRRSLSRATWGSARQHGRLRRCRPGVQAGTVGLAT

SEQ ID NO: 195352 - protein, 230 aa, Zea Mays
MLVPFQKMCAQRKVEAEAVLLESDDVASAISEEIGKFNICKLVLGSSSKSIFRRKLKGSKTATKISECIPSFCTAYVISKGKLSFVRSATSDIVETPRSISSSTISSPSTRSLSSCAPSEWGDIYATTNVPLHQPSLPLQRDQALAIINKLSNRRVSSSSSVVSEISYNDEPALTRSHSMISEMQFSSGSSGNSVYKSFQRDNLPNNSDEASVSEISENVNHLSGQVSHS

SEQ ID NO: 195353 - protein, 117 aa, Zea Mays
MCHTRQEWGDIYATTNVPLHQPSLPLQRDQALAIINKLSNRRVSSSSSVVSEISYNDEPALTRSHSMISEMQFSSGSSGNSVYKSFQRDNLPNNSDEASVSEISENVNHLSGQVSHS

SEQ ID NO: 195354 - protein, 347 aa, Zea Mays
MARSTEQRAMHGSVDGHGRVSRRHQKSSLVTSGGAAVFHVPWLVRSTAAAGKNWQWLGLGTTLPPPAATVGLGWHCGGGGWWWWLAAAATRRQDGHIVRVAAAEAGCAAADDGGAALSALRSASSFSRRLFSSARRSHQRLRYSQSTSVCFSLVRARRFWNHTSTCRGRRPRRLASCTFCFCNTRDHTTKKLSDTPPGQDRIEPAATDGEEERVGGMLAYGVERAVRLEALLEDGGLVLGEPELLAPAGAAVRAVLLVAADASGAGALELPLPLPLGGGGVAAVGRRGRAHRHRGAGVVLRVRVTPRPGDVGHDGAQRGCPGGGAGGGGGGGEAALGGEGEARARQR

SEQ ID NO: 195355 - protein, 634 aa, Zea Mays
MKLKRLKLRKNNWESETYEFDELLTEFSSQKRVYEVVAKPVVESVMEGYNGTVMAYGQTGTGKTFTLGRLGEEDTAARGIMVRAMEDILADITPGTDSVSVSYLQLYMEMIQDLLDPVNDNIAIVEDPRTGDVSLPGATVVEVRDQKSFVDLLRVGEAHRVAANTKLNTESSRSHAILMVNVRRSVKGRTEMDVSISGENGHSLSMMGSLRPPVVRKSKLVVVDLAGSERIDKSGSEGHTLEEAKSINLSLSALGKCINALAESSPHVPVRDSKLTRLLKDSFGGTARTSLVVTIGPSPRHRGETTSTIMFGQRAMKVENMVKLKEEFDYKSLCRRLDIELDKLIAENERQRKYFDDEVERIRDEAQCRIAEAERECKITLENEKTKCHQEYLDSIRILEEKWKVHQQSPKKQNEEAESTSNDTREVHNLLQNEKMLRQSAEDEASDLKNQVSHWKKLEATATAEVVKLRKMLDTEASQKEKLEAEIDILRSQLLQMSMEADETGSLDKGNGPGKIFPGLDSLVSQTRSSQFREQSNGPKQPIAKLFEQVGLQKILSLLESEEPDVRVHAVKVVANLAAEEANQEKIVEAGGLTSLLMLLRSSEDETIRRVAAGAIANLAMNEQIKILSWQKEV

SEQ ID NO: 195356 - protein, 875 aa, Zea Mays
MASSGVRNGVGSRMSAKPDRQGAGATPKTAAGKHRLSSAAAGGGAYRRTSSGPLHAAAGGRAASDGVSSRVRVAVRLRPRNAEELVADADFGDCVELQPELKRLKLRKNNWESETYEFDELLTEFSSQKRVYEVVAKPVVESVMEGYNGTVMAYGQTGTGKTFTLGRLGEEDTAARGIMVRAMEDILADITPGTDSVSVSYLQLYMEMIQDLLDPVNDNIAIVEDPRTGDVSLPGATVVEVRDQKSFVDLLRVGEAHRVAANTKLNTESSRSHAILMVNVRRSVKGRTEMDVSISGENGHSLSMMGSLRPPVVRKSKLVVVDLAGSERIDKSGSEGHTLEEAKSINLSLSALGKCINALAESSPHVPVRDSKLTRLLKDSFGGTARTSLVVTIGPSPRHRGETTSTIMFGQRAMKVENMVKLKEEFDYKSLCRRLDIELDKLIAENERQRKYFDDEVERIRDEAQCRIAEAERECKITLENEEAESTSNDTREVHNLLQNEKMLRQSAEDEASDLKNQVSHWKKLEATATAEVVKLRKMLDTEASQKEKLEAEIDILRSQLLQMSMEADETGSLDKGNGPGKIFPGLDSLVSQTRSSQFREQSNGPKQPIAKLFEQVGLQKILSLLESEEPDVRVHAVKVVANLAAEEANQEKIVEAGGLTSLLMLLRSSEDETIRRVAAGAIANLAMNETNQDLIMAEGGVTLLSMTASDAEDPQTLRMVAGAIANLCGNDKLQIRLRGEGGIKALLGMVRCGHPDVLAQVARGIANFAKCESRAATQGNKVGKSLLIDDGSLPWIVKNANNEAAPIRRHIELALCHLAQHEVNSNDIINEGALWELVRISRDCSREDIRKLAYRTLTSSPTLQAEMRRLGIKL

SEQ ID NO: 195357 - protein, 499 aa, Zea Mays
MFGQRAMKVENMVKLKEEFDYKSLCRRLDIELDKLIAENERQRKYFDDEVERIRDEAQCRIAEAERECKITLENEKTKCHQEYLDSIRILEEKWKVHQQSPKKQNEEAESTSNDTREVHNLLQNEKMLRQSAEDEASDLKNQVSHWKKLEATATAEVVKLRKMLDTEASQKEKLEAEIDILRSQLLQMSMEADETGSLDKGNGPGKIFPGLDSLVSQTRSSQFREQSNGPKQPIAKLFEQVGLQKILSLLESEEPDVRVHAVKVVANLAAEEANQEKIVEAGGLTSLLMLLRSSEDETIRRVAAGAIANLAMNETNQDLIMAEGGVTLLSMTASDAEDPQTLRMVAGAIANLCGNDKLQIRLRGEGGIKALLGMVRCGHPDVLAQVARGIANFAKCESRAATQGNKVGKSLLIDDGSLPWIVKNANNEAAPIRRHIELALCHLAQHEVNSNDIINEGALWELVRISRDCSREDIRKLAYRTLTSSPTLQAEMRRLGIKL

SEQ ID NO: 195358 - protein, 281 aa, Zea Mays
MFGQRAMKVENMVKLKEEFDYKSLCRRLDIELDKLIAENERQRKYFDDEVERIRDEAQCRIAEAERECKITLENEKTKCHQEYLDSIRILEEKWKVHQQSPKKQNEEAESTSNDTREVHNLLQNEKMLRQSAEDEASDLKNQVSHWKKLEATATAEVVKLRKMLDTEASQKEKLEAEIDILRSQLLQMSMEADETGSLDKGNGPGKIFPGLDSLVSQTRSSQFREQSNGPKQPIAKLFEQVGLQKILSLLESEEPDVRVHAVKVVANLAAEGALRMRQFVE

SEQ ID NO: 195359 - protein, 110 aa, Zea Mays
MVERPIGHLFSSSMCYPFVSPLLLFISFIFCMIRTAETFYCILSLIIIMVFYYNVQIIVQYMQRRLLILHCLCYSFLCFYVDLNWSFYFNLQAVWFRIHETITTETRSEA

SEQ ID NO: 195360 - protein, 135 aa, Zea Mays
MRHHARPDDGASIARLELLPPPQPPSSQGGQARRGGACHRHVPQILFHNVEEKLCSLLAFFQVHQALAFFGHRAKASSATQSASHRSSLPHVVRGRARCPRHRGIDRTHRHLMYAKLSPSDVCPQCHSHEFLILY

SEQ ID NO: 195361 - protein, 126 aa, Zea Mays
MRHHARPDDGASIARLELLPPPQPPSSQGGQARRGGACHRHVPQILFHNVEEKLCSLLAFFQVHQALAFFGHRAKASSATQSASHRSSLPHVVRGRARCPRHRGIDRTHRHLMYAKLSPSDATGMH

SEQ ID NO: 195362 - protein, 647 aa, Zea Mays
MSMDFGAPADDPKAFRNICRDRILKDLLKPDKDKETKSSWKVLIMDKFTVKIMAYACKMAEITDAGISLVEDLFKRREPMPSMDAIYFLQPLKENVIMLLSDMSGRCPLYRKAYIFFSSPIPKDLVTYIKNDSSMNLEFFTIDMQGFVTDHDTALIDLYGPSEQNSKKFNDTISTMATRIATTFASLKEFPCVRYRAPKGDASTTTKFDMVPKWLATAVWEIVSKYKSTIPEFPQKETCELLIVDRPIDQIAPVIHEWTYDAMCHDLLEMDGNKYIYEVSKMGSEPEKKESLLEDHDPLWLELRHAHIADASERLYEKMNNFVAKNKAAQLSRDGGEVSTRDLQKIVQALPQYSDQVEKLTLHIEIAGKMNRCIREYGLRDIGQLEQDLVFGDAGAKEVISILRSKQDMSPENKMRLLIIYAIVYPEKFEGDKGEKLMQLAKLPHDDMDIINCLGYLDGSNTKKSSRTGTFSLKFDAQKKKNAARTDKQDGEETWALSRFFPLIEELIEKLSKGELPLKEYPSMSEPSSASASQDATQTASSTARPAQNPQPMSMRSRRTPTWAKSRNSDDSSSSDSSVLRHASGDFKRLGNRIFVFMIGGATRSELRTVHKLTMKMKREIVLGSSSIDDPPQFISKLKSIGSATKT

SEQ ID NO: 195363 - protein, 674 aa, Zea Mays
MSMDFGAPADDPKAFRNICRDRILKDLLKPDKDKETKSSWKVLIMDKFTVKIMAYACKMAEITDAGISLVEDLFKRREPMPSMDAIYFLQPLKENVIMLLSDMSGRCPLYRKAYIFFSSPIPKDLVTYIKNDSSMNLEFFTIDMQGFVTDHDTALIDLYGPSEQNSKKFNDTISTMATRIATTFASLKLIISRKFHVFCYAKEFPCVRYRAPKGDASTTTKFDMVPKWLATAVWEIVSKYKSTIPEFPQKETCELLIVDRPIDQIAPVIHEWTYDAMCHDLLEMDGNKYIYEVSKMGSEPEKKESLLEDHDPLWLELRHAHIADASERLYEKMNNFVAKNKAAQLSRDGGEVSTRDLQKIVQALPQYSDQVEKLTLHIEIAGKMNRCIREYGLRDIGQLEQDLVFGDAGAKEVISILRSKQDMSPENKMRLLIIYAIVYPEKFEGDKGEKLMQLAKLPHDDMDIINCLGYLDGSNTKKSSRTGTFSLKFDAQKKKNAARTDKQDGEETWALSRFFPLIEELIEKLSKGELPLKEYPSMSEPSSASASQDATQTASSTARPAQNPQPMSMRSRRTPTWAKSRNSDDSSSSDSSVLRHASGDFKRLGNRIFVFMIGGATRSELRTVHKLTMKMKREIVLGSSSIDDPPQFISVKTQFLFFRFYYYMFMQQLCKCRS

SEQ ID NO: 195364 - protein, 279 aa, Zea Mays
MSMDFGAPADDPKAFRNICRDRILKDLLKPDKDKETKSSWKVLIMDKFTVKIMAYACKMAEITDAGISLVEDLFKRREPMPSMDAIYFLQPLKENVIMLLSDMSGRCPLYRKAYIFFSSPIPKDLVTYIKNDSSMNLEFFTIDMQGFVTDHDTALIDLYGPSEQNSKKFNDTISTMATRIATTFASLKLIISRKFHVFCYAKEFPCVRYRAPKGDASTTTKFDMVPKWLATAVWEIVSKYKSTIPEFPQKETCELLIVDRPIDQLTTISYDCKDSTCYS

SEQ ID NO: 195365 - protein, 646 aa, Zea Mays
MSMDFGAPADDPKAFRNICRDRILKDLLKPDKDKETKSSWKVLIMDKFTVKIMAYACKMAEITDAGISLVEDLFKRREPMPSMDAIYFLQPLKENVIMLLSDMSGRCPLYRKAYIFFSSPIPKDLVTYIKNDSSMNLEFFTIDMQGFVTDHDTALIDLYGPSEQNSKKFNDTISTMATRIATTFASLKEFPCVRYRAPKGDASTTTKFDMVPKWLATAVWEIVSKYKSTIPEFPQKETCELLIVDRPIDQIAPVIHEWTYDAMCHDLLEMDGNKYIYEVSKMGSEPEKKESLLEDHDPLWLELRHAHIADASERLYEKMNNFVAKNKAAQLSRDGGEVSTRDLQKIVQALPQYSDQVEKLTLHIEIAGKMNRCIREYGLRDIGQLEQDLVFGDAGAKEVISILRSKQDMSPENKMRLLIIYAIVYPEKFEGDKGEKLMQLAKLPHDDMDIINCLGYLDGSNTKKSSRTGTFSLKFDAQKKKNAARTDKQDGEETWALSRFFPLIEELIEKLSKGELPLKEYPSMSEPSSASASQDATQTASSTARPAQNPQPMSMRSRRTPTWAKSRNSDDSSSDSSVLRHASGDFKRLGNRIFVFMIGGATRSELRTVHKLTMKMKREIVLGSSSIDDPPQFISKLKSIGSATKT

SEQ ID NO: 195366 - protein, 503 aa, Zea Mays
MSMDFGAPADDPKAFRNICRDRILKDLLKPDKDKETKSSWKVLIMDKFTVKIMAYACKMAEITDAGISLVEDLFKRREPMPSMDAIYFLQPLKENVIMLLSDMSGRCPLYRKAYIFFSSPIPKDLVTYIKNDSSVIPRIGALREMNLEFFTIDMQGFVTDHDTALIDLYGPSEQNSKKFNDTISTMATRIATTFASLKEFPCVRYRAPKGDASTTTKFDMVPKWLATAVWEIVSKYKSTIPEFPQKETCELLIVDRPIDQIAPVIHEWTYDAMCHDLLEMDGNKYIYEVSKMGSEPEKKESLLEDHDPLWLELRHAHIADASERLYEKMNNFVAKNKAAQLSRDGGEVSTRDLQKIVQALPQYSDQVEKLTLHIEIAGKMNRCIREYGLRDIGQLEQDLVFGDAGAKEVISILRSKQDMSPENKMRLLIIYAIVYPEKFEGDKGEKLMQLAKLPHDDMDIINCLGYLDGSNTKKSSRTGTFSLKFDAQKKKNAARTDKQDGAD

SEQ ID NO: 195367 - protein, 517 aa, Zea Mays
MSMDFGAPADDPKAFRNICRDRILKDLLKPDKDKETKSSWKVLIMDKFTVKIMAYACKMAEITDAGISLVEDLFKRREPMPSMDAIYFLQPLKENVIMLLSDMSGRCPLYRKAYIFFSSPIPKDLVTYIKNDSSVIPRIGALREMNLEFFTIDMQGFVTDHDTALIDLYGPSEQNSKKFNDTISTMATRIATTFASLKLIISRKFHVFCYAKEFPCVRYRAPKGDASTTTKFDMVPKWLATAVWEIVSKYKSTIPEFPQKETCELLIVDRPIDQIAPVIHEWTYDAMCHDLLEMDGNKYIYEVSKMGSEPEKKESLLEDHDPLWLELRHAHIADASERLYEKMNNFVAKNKAAQLSRDGGEVSTRDLQKIVQALPQYSDQVEKLTLHIEIAGKMNRCIREYGLRDIGQLEQDLVFGDAGAKEVISILRSKQDMSPENKMRLLIIYAIVYPEKFEGDKGEKLMQLAKLPHDDMDIINCLGYLDGSNTKKSSRTGTFSLKFDAQKKKNAARTDKQDGAD

SEQ ID NO: 195368 - protein, 385 aa, Zea Mays
MCHDLLEMDGNKYIYEVSKMGSEPEKKESLLEDHDPLWLELRHAHIADASERLYEKMNNFVAKNKAAQLSRDGGEVSTRDLQKIVQALPQYSDQVEKLTLHIEIAGKMNRCIREYGLRDIGQLEQDLVFGDAGAKEVISILRSKQDMSPENKMRLLIIYAIVYPEKFEGDKGEKLMQLAKLPHDDMDIINCLGYLDGSNTKKSSRTGTFSLKFDAQKKKNAARTDKQDGEETWALSRFFPLIEELIEKLSKGELPLKEYPSMSEPSSASASQDATQTASSTARPAQNPQPMSMRSRRTPTWAKSRNSDDSSSSDSSVLRHASGDFKRLGNRIFVFMIGGATRSELRTVHKLTMKMKREIVLGSSSIDDPPQFISKLKSIGSATKT

SEQ ID NO: 195369 - protein, 670 aa, Zea Mays
MSMDFGAPADDPKAFRNICRDRILKDLLKPDKDKETKSSWKVLIMDKFTVKIMAYACKMAEITDAGISLVEDLFKRREPMPSMDAIYFLQPLKENVIMLLSDMSGRCPLYRKAYIFFSSPIPKDLVTYIKNDSSVIPRIGALREMNLEFFTIDMQGFVTDHDTALIDLYGPSEQNSKKFNDTISTMATRIATTFASLKEFPCVRYRAPKGDASTTTKFDMVPKWLATAVWEIVSKYKSTIPEFPQKETCELLIVDRPIDQIAPVIHEWTYDAMCHDLLEMDGNKYIYEVSKMGSEPEKKESLLEDHDPLWLELRHAHIADASERLYEKMNNFVAKNKAAQLSRDGGEVSTRDLQKIVQALPQYSDQVEKLTLHIEIAGKMNRCIREYGLRDIGQLEQDLVFGDAGAKEVISILRSKQDMSPENKMRLLIIYAIVYPEKFEGDKGEKLMQLAKLPHDDMDIINCLGYLDGSNTKKSSRTGTFSLKFDAQKKKNAARTDKQDGEETWALSRFFPLIEELIEKLSKGELPLKEYPSMSEPSSASASQDATQTASSTARPAQNPQPMSMRSRRTPTWAKSRNSDDSSSSDSSVLRHASGDFKRLGNRIFVFMIGGATRSELRTVHKLTMKMKREIVLGSSSIDDPPQFISVKTQFLFFRFYYYMFMQQLCKCRS

SEQ ID NO: 195370 - protein, 667 aa, Zea Mays
MSMDFGAPADDPKAFRNICRDRILKDLLKPDKDKETKSSWKVLIMDKFTVKIMAYACKMAEITDAGISLVEDLFKRREPMPSMDAIYFLQPLKENVIMLLSDMSGRCPLYRKAYIFFSSPIPKDLVTYIKNDSSMNLEFFTIDMQGFVTDHDTALIDLYGPSEQNSKKFNDTISTMATRIATTFASLKEFPCVRYRAPKGDASTTTKFDMVPKWLATAVWEIVSKYKSTIPEFPQKETCELLIVDRPIDQIAPVIHEWTYDAMCHDLLEMDGNKYIYEVSKMGSEPEKKESLLEDHDPLWLELRHAHIADASERLYEKMNNFVAKNKAAQLSRDGGEVSTRDLQKIVQALPQYSDQVEKLTLHIEIAGKMNRCIREYGLRDIGQLEQDLVFGDAGAKEVISILRSKQDMSPENKMRLLIIYAIVYPEKFEGDKGEKLMQLAKLPHDDMDIINCLGYLDGSNTKKSSRTGTFSLKFDAQKKKNAARTDKQDGEETWALSRFFPLIEAPDRGILPLRKPWLYALRVSGSAQLQDEAILPVHLPLTNTPRTNKHASRHQRIQALEGTWKRANRALDRMGTEPWMLLGVMVCATEPLPHLNVKDTPIETSSVQYILQQYLAASGGHKLLASLPSTYAMGMVATEFETADRLTKNNAGHGGAWPFRAVADGP

SEQ ID NO: 195371 - protein, 371 aa, Zea Mays
MSMDFGAPADDPKAFRNICRDRILKDLLKPDKDKETKSSWKVLIMDKFTVKIMAYACKMAEITDAGISLVEDLFKRREPMPSMDAIYFLQPLKENVIMLLSDMSGRCPLYRKAYIFFSSPIPKDLVTYIKNDSSMNLEFFTIDMQGFVTDHDTALIDLYGPSEQNSKKFNDTISTMATRIATTFASLKLIISRKFHVFCYAKEFPCVRYRAPKGDASTTTKFDMVPKWLATAVWEIVSKYKSTIPEFPQKETCELLIVDRPIDQIAPVIHEWTYDAMCHDLLEMDGNKYIYEVSKMGSEPEKKESLLEDHDPLWLELRHAHIADASERLYEKMNNFVAKNKAAQLSRILECWNDLSFGMEFIKMIDVSIFN

SEQ ID NO: 195372 - protein, 614 aa, Zea Mays
MSMDFGAPADDPKAFRNICRDRILKDLLKPDKDKETKSSWKVLIMDKFTVKIMAYACKMAEITDAGISLVEDLFKRREPMPSMDAIYFLQPLKENVIMLLSDMSGRCPLYRKAYIFFSSPIPKDLVTYIKNDSSMNLEFFTIDMQGFVTDHDTALIDLYGPSEQNSKKFNDTISTMATRIATTFASLKLIISRKFHVFCYAKEFPCVRYRAPKGDASTTTKFDMVPKWLATAVWEIVSKYKSTIPEFPQKETCELLIVDRPIDQIAPVIHEWTYDAMCHDLLEMDGNKYIYEVSKMGSEPEKKESLLEDHDPLWLELRHAHIADASERLYEKMNNFVAKNKAAQLSRDGGEVSTRDLQKIVQALPQYSDQVEKLTLHIEIAGKMNRCIREYGLRDIGQLEQDLVFGDAGAKEVISILRSKQDMSPENKMRLLIIYAIVYPEKFEGDKGEKLMQLAKLPHDDMDIINCLGYLDGSNTKKSSRTGTFSLKFDAQKKKNAARTDKQDGEETWALSRFFPLIEAPDRGILPLRKPWLYALRVSGSAQLQDEAILPVHLPLTNTPRTNKHASRHQRIQALEGTWKRANRALDRMGTEPWCVASHELAVAPCVHLASANS

SEQ ID NO: 195373 - protein, 160 aa, Zea Mays
MDRGQNGRDDVFGRRDPFSGFGFGPHRSLFSGLLGGRDPFDDPFFTHPFGGRMMGDHDMFVPSPFGPMGGPFGDMRNGGFIEQAPPRGNRRRPVITEVEEDGGENAEHGNQQPNQDPYVQEPDDGIDGQKVAKSSCTGISVGLIVEGSRRLVLSHIRALP

SEQ ID NO: 195374 - protein, 290 aa, Zea Mays
MDRGQNGRDDVFGRRDPFSGFGFGPHRSLFSGLLGGRDPFDDPFFTHPFGGRMMGDHDMFVPSPFGPMGGPFGDMRNGGFIEQAPPRGNRRRPVITEVEEDGGENAEHGNQQPNQDPYVQEPDDGIDEGGQVELHRDLSRANSGGQPQARTFTYQSSSVTFGGINGAYYTTSKSRRTGSDGITVEESKEADTTTKEATHRISRGIHDKVDKSLLCQSCIWLIKIILNSPVHTGLCTEHIFDLSIDNGSKNAKKNFNLVQYNYFFFVFTNKRAFNLVQYSYFFFVFCRDIP

SEQ ID NO: 195375 - protein, 194 aa, Zea Mays
MYVSHLLICSFVETEGGQVELHRDLSRANSGGQPQARTFTYQSSSVTFGGINGAYYTTSKSRRTGSDGITVEESKEADTTTKEATHRISRGIHDKGHSLTRKLNSDGKVDTTQTLHNLNEDELAGFEQSWKGNAGHYLPDWNHNAGAPNSDNSGDRSSNGRDRRSASGWALPGTEQGRDPRRNGKPKSRVIPIS

SEQ ID NO: 195376 - protein, 405 aa, Zea Mays
MPPPPLARRLLLQPLPRGARALHTTPAPRRGPGVLACRLASRAVVRFAGPEAARFLHSLLTNDLLSAFSAAGASSPQRYAPTPNAPARGPAAPAYAALLTPQGRFLYDLFLYRPPPRSQMLDRTGSAPETGEAPEGHPHPQEVLADVDAAEVDDLVACFKRYRLRSKVEIDNVSENFACWQRFGHDVVHTEPSTQEPEAQSIGWGQGVDHAGESAAQGNGHGWQWLKDPRLDYLGYRGIFPADTIPPLVESDKEADERHYQLWRIENGVAEGEAIPLEYNLAGLNAISFEKGCYIGQELIARTHHRGVIRKRLMPMKFVDGNGQELEQAVAPGSEVVDEASGKKVGAVSTALGSRGMGLLRLEEALKPGSVLRAGGNRDVRVQAIKPDWWPAEWTQVLQEQRAAA

SEQ ID NO: 195377 - protein, 213 aa, Zea Mays
MPPPPLARRLLLQPLPRGARALHTTPAPRRGPGVLACRLASRAVVRFAGPEAARFLHSLLTNDLLSAFSAAGASSPQRYAPTPNAPARGPAAPAYAALLTPQGRFLYDLFLYRPPPRSQMLDRTGSAPETGEAPEGHPHPQEVLADVDAAEVDDLVACFKRYRLRSKVEIDNVLTMLASQLRKGTVMDGNGSKILGWTTLVTEEFFQLTRYHP

SEQ ID NO: 195378 - protein, 122 aa, Zea Mays
MPMKFVDGNGQGRRSRLGGRGRGFRQEGRGSEHRSGLPRDGPAKTRRSTETGLGPPRRRQQGREGPGDQAGLVASRVDTGASGTARSRLTAAELYVVLDPKPKPCLPSVSRLLEEDPNNPHS

SEQ ID NO: 195379 - protein, 357 aa, Zea Mays
MRAVAAAASPPLRALLLLSRHPRRAGFTNWPSLPRGQNAGPTAPPAATAPKPAAPSRRQGRGLTASLPRQVARISTPHLRPPATPPRCPDRRHQSHGVRALAGCPRKTVRHLPAPTSHLRFTMNPSSSSSSSGGYHSRAAAFASPQPRGGGGRRRGGGRGQDGSDRIDALGRLLTRVLRHMAAELRLDMRTDGYVRVRDLLKLNLQTFAKVPLKSHTVDEIREAVRRDNKQRFSLLEEDGELLIRANQGHTVTTVTSESLLKPILSPDEVSVCVHGTYRKNLDSILQSGLKRMARLHVHFSSGLPSDGEVISDGMKLYISDNKVILTEGFGFDGVVPVKYFERIETWPGRAPIPFQR

SEQ ID NO: 195380 - protein, 254 aa, Zea Mays
MRAVAAAASPPLRALLLLSRHPRRAGFTNWPSLPRGQNAGPTAPPAATAPKPAAPSRRQGRGLTASLPRQVARISTPHLRPPATPPRCPDRRHQSHGVRALAGCPRKTVRHLPAPTSHLRFTMNPSSSSSSSGGYHSRAAAFASPQPRGGGGRRRGGGRGQDGSDRIDALGRLLTRVLRHMAAELRLDMRTDGYVRVRDLLKLNLQTFAKVPLKSHTVDEIREAVRRDNKQRFSLLEEDGELLIRANQGHTVTV

SEQ ID NO: 195381 - protein, 365 aa, Zea Mays
MRAVAAAASPPLRALLLLSRHPRRAGFTNWPSLPRGQNAGPTAPPAATAPKPAAPSRRQGRGLTASLPRQVARISTPHLRPPATPPRCPDRRHQSHGVRALAGCPRKTVRHLPAPTSHLRFTMNPSSSSSSSGGYHSRAAAFASPQPRGGGGRRRGGGRGQDGSDRIDALGRLLTRVLRHMAAELRLDMRTDGYVRVRDLLKLNLQTFAKVPLKSHTVDEIREAVRRDNKQRFSLLEEDGELLIRANQGHTVTTVTSESLLKPILSPDEVSVCVHGTYRKNLDSILQSGLKRMARLHVHFSSGLPSDGEVISGLLLWWVSWVLDSGCTNHMTGEKDMFHTLQLTQEAQEIVFGDSGKSKVIGIGK

SEQ ID NO: 195382 - protein, 324 aa, Zea Mays
MRAVAAAASPPLRALLLLSRHPRRAGFTNWPSLPRGQNAGPTAPPAATAPKPAAPSRRQGRGLTASLPRQVARISTPHLRPPATPPRCPDRRHQSHGVRALAGCPRKTVRHLPAPTSHLRFTMNPSSSSSSSGGYHSRAAAFASPQPRGGGGRRRGGGRGQDGSDRIDALGRLLTRVLRHMAAELRLDMRTDGYVRVRDLLKLNLQTFAKVPLKSHTVDEIREAVRRDNKQRFSLLEEDGELLIRANQGHTVTTVTSESLLKPILSPDEVSVCVHGTYRKNLDSILQSGLKRMARLHVHFSSGLPSDGEVISGLCVRRLKLDTR

SEQ ID NO: 195383 - protein, 242 aa, Zea Mays
MRAVAAAASPPLRALLLLSRHPRRAGFTNWPSLPRGQNAGPTAPPAATAPKPAAPSRRQGRGLTASLPRQVARISTPHLRPPATPPRCPDRRHQSHGVRALAGCPRKTAVRRDNKQRFSLLEEDGELLIRANQGHTVTTVTSESLLKPILSPDEVSVCVHGTYRKNLDSILQSGLKRMARLHVHFSSGLPSDGEVISDGMKLYISDNKVILTEGFGFDGVVPVKYFERIETWPGRAPIPFQR

SEQ ID NO: 195384 - protein, 317 aa, Zea Mays
MRAVAAAASPPLRALLLLSRHPRRAGFTNWPSLPRGQNAGPTAPPAATAPKPAAPSRRQGRGLTASLPRQVARISTPHLRPPATPPRCPDRRHQSHGVRALAGCPRKTVRHLPAPTSHLRFTMNPSSSSSSSGGTRVLRHMAAELRLDMRTDGYVRVRDLLKLNLQTFAKVPLKSHTVDEIREAVRRDNKQRFSLLEEDGELLIRANQGHTVTTVTSESLLKPILSPDEVSVCVHGTYRKNLDSILQSGLKRMARLHVHFSSGLPSDGEVISDGMKLYISDNKVILTEGFGFDGVVPVKYFERIETWPGRAPIPFQR

SEQ ID NO: 195385 - protein, 82 aa, Zea Mays
MMYPGEPFFLVIHIHYFGGLAFFFGWGGVTLIVLGPLRYSFDDFCILCEKPWFFVTFFFGFLCVTKPKDERVLFFVLVNRIS

SEQ ID NO: 195386 - protein, 64 aa, Zea Mays
MPTKVLHITTRKSPCGEGTNTWDRFEMRIHKRVIDLVSTPDVVKQITSITIEPGVEVEVTISDA

SEQ ID NO: 195387 - protein, 153 aa, Zea Mays
MYFLSTSLSLQSSCVVVSHALLILDESAQHIEVVGEGLPGAPRVPDGHGDLGTGGKGEGHGHPVVVVRVDRRHVQLLRRRDDAVVRPFLNRCSQLWKTQTATEDGATAGKPLRGSELWKDDVRHVKYVALPWLAPSGSQPSSRSPLLSRKPRL

SEQ ID NO: 195388 - protein, 256 aa, Zea Mays
MEKHRIHLAADASPESGELFQGIDKRADVTGKDGHSPLQKCTAAIRMLAYGSSADQLDEVLKIGTSTALECLGNFAKGVIECFGPEYLRPPRSDELENILQQNESRGFPGMIGSIDCMHWAWKNCPKGWAGMFTRGDKGVPTMILEAVASRDLRIWHAFFGTAGSQNDINVLNKSTLFIDVLRGEAPKVHYTVNGNQYETPYYLADRIYPEWAVFVKTIHLPQLEKDKLFALRQESTRKDVECAFGVLQSRFDIVR

SEQ ID NO: 195389 - protein, 253 aa, Zea Mays
MRRPLFLRIVEKLGEWSSYFTQRADVTGKDGHSPLQKCTAAIRMLAYGSSADQLDEVLKIGTSTALECLGNFAKGVIECFGPEYLRPPRSDELENILQQNESRGFPGMIGSIDCMHWAWKNCPKGWAGMFTRGDKGVPTMILEAVASRDLRIWHAFFGTAGSQNDINVLNKSTLFIDVLRGEAPKVHYTVNGNQYETPYYLADRIYPEWAVFVKTIHLPQLEKDKLFALRQESTRKDVECAFGVLQSRFDIVR

SEQ ID NO: 195390 - protein, 504 aa, Zea Mays
MEGIANEACSLAGHWGLGKLIAFYDDNHISIDGDTEIAFTEDVSTRFEALGWHTIWVKNGNTGYDDIRAAIKEAKAVTDKPTLIKVTTTIGFGSPNKANSYSVHGSALGAKEVEATRQNLGWPYDTFFVPEDVKSHWSRHTPEGAALEADWNAKFAEYEKKYADDAATLKSIITGELPTGWVDALPKYTPESPGDATRNLSQQCLNALANVVPGLIGGSADLASSNMTLLKMFGDFQKDTAEERNVRFGVREHGMGAICNGIALHSPGFVPYCATFFVFTDYMRGAMRISALSEAGVIYVMTHDSIGLGEDGPTHQPIEHLVSFRAMPNILMLRPADGNETAGAYKVAVLNRKRPSILALSRQKLPHLPGTSIEGVEKGGYTISDNSTGNKPDIIVMGTGSELEIAAKAADELRKEGKTVRVVSFVSWELFDEQSDEYKESVLPAAVTARISIEAGSTLGWQKYVGAQGKAIGIDKFGASAPAGTIYKEYGITVESIIAAAKSF

SEQ ID NO: 195391 - protein, 144 aa, Zea Mays
MSVAFFSPFFGSSHEADSSHCMASPVLLWHVQSLTTGTVSIRPRAGEVAASISRSLRADSAHSQYHPTCSPGHGPTPTPRAGALCIGRGNRHARPTRQHDLGIGLRPVTRAIHGTKMHANPEQYHQQVVGARRTPHKTKPTAQQ

SEQ ID NO: 195392 - protein, 95 aa, Zea Mays
MDYIPVYDTCPLVGHTTPISPLARRRCQLLTPHSSNSPSNFSASAAAAASSSSSSMAKYEGDCHGSKPEPFRVIVTLFLPILRSYYSSSLLAFRN

SEQ ID NO: 195393 - protein, 95 aa, Zea Mays
MCVKASLCMCYSHMSRLFLSVLFTCISIDFAKCGNIGSWDDKLLERVFFQSCQKNQDWEWVLGNIGDALIGISGCSHIFATDGWNMNTSPDSLHW

SEQ ID NO: 195394 - protein, 367 aa, Zea Mays
MRVIDVGGGLGIDYDGTHSAQTDMSVAYSLEEYAGAVVAAVGRVCDRKGVQHPIICSESGRALVSHHSVLVFEAFSATAPGRLDAATAYLLDELTDDCRADYRNVMAAAVRGDYDTCGLYADQLKRRSAEQFKEGVLGLEHLAAVDAFCELVARGMGAPEPPRTYHINLSVFTSLPDMWAIGQQFPIIPIQRLQERPAVDGVLSDLTCDSDGKVSEFIGGRHSLPLHELPTHATRGYYLGMFLGGAYQEALGGLHNLFGGPSVVRVSQCDGPHCFAVTRAAAGPSCADVLRAMQHEPEVMYEVLKQRTDGATAAALARAFGAMPYLVFDPEAAVMSGGESSDSERSAAGAAEEEDDEEWEFMRGLTV

SEQ ID NO: 195395 - protein, 450 aa, Zea Mays
MDSDDEEMCDAASSAPSSPAAGGGVGEGEEEEGGVDDGRRGSEGVVIMEVTWFQVDLDYEFDAPRWFDLAQEEAPLDAAAAQEWFTSAPSYPPSPLIAKMLAEDLGLQTIRSIADTDDLHCSTASHECSSGMGPKIRQLEVKIGRKACNGASENERRSHYQTTMKGNSLRGSTLMKPTASQLAKQNRPAQLKNLTQNKKSVGVIRERSTISSNDCNYQSTKRQRLENGHLNKAAATAIQHEFIHKNHEKNVMNQNMDQPTVLPRLKITIPRSPDLATKLRAERSKAQRAVPTLPKQLNDLIQRVAPSAPTVQVAPTRKQVVQPFWATGHQHASRQHEDVGSNVAACTSNHARHLKSVDNKTEDTRHGLFKFKARPLDRKMLENKGDGVFRCAKRNTTVPKEFNLSTGRKANPAPLSELFNKLSLTAGAHQNRGVGRQIRDLPNYITTKRT

SEQ ID NO: 195396 - protein, 461 aa, Zea Mays
MDSDDEEMCDAASSAPSSPAAGGGVGEGEEEEGGVDDGRRGSEGVVIMEVTWFQVDLDYEFDAPRWFDLAQEEAPLDAAAAQEWFTSAPSYPPSPLIAKMLAEDLGLQTIRSIADTDDLHCSTASHECSSGMGPKIRQLEVKIGRKACNGASENERRSHYQTTMKGNSLRGSTLMKPTASQLAKQNRPAQLKNLTQNKKSVGVIRERSTISSNDCNYQSTKRQRLENGHLNKAAATAIQHEFIHKNHEKNVMNQNMDQPTVLPRLKITIPRSPDLATKLRAERSKAQRAVPTLPKQLNDLIQRVAPSAPTVQVAPTRKQVVQPFWATGHQHASRQHEDVGSNVAACTSNHARHLKSSVDNKTEDTRHGLFKFKARPLDRKMLENKGDGVFRCAKRNTTVPKEFNLSTGRKANPAPLSELFNKLSLTAGAHQNRGVGRQIRDLPNYITTKDCKENMIGNMHR

SEQ ID NO: 195397 - protein, 115 aa, Zea Mays
MASEAAIARAQCLLRFRRWSPLPLLPLPSPPATTRAASCRRSVRMASSLFKQWLRNLQSEKGVLTYGRLSLTRVLIQGVDMFGKRVGFLKFKADIVDEETKTKELSLQEGPRLLC

SEQ ID NO: 195398 - protein, 131 aa, Zea Mays
MLDDEKGDFVGTAVREVEEETGIKLNIEDMVDLTALLDPATGGRMLPSPGGCDEEIGLFLYRGRVDEETIRSLQGKETGLRDHGELIKLRVVPYSELWRSTGDAKALSAIALYEMAKREGLLPQPTPSANL

SEQ ID NO: 195399 - protein, 61 aa, Zea Mays
MRPSRSRMRRVRTMPGWTQLAVTLAPISLSRSASALVCRTLASLDSAYALVGSYGLLHILG

SEQ ID NO: 195400 - protein, 76 aa, Zea Mays
MDSRIQELSAKCYFFLVYDSQKTSALLDFSIVWRGYWCNQLLIQKGNMIMKRMQILYMTKTTQVHRLPYLVLVVQT

SEQ ID NO: 195401 - protein, 310 aa, Zea Mays
MRATFPEYVVALTTIVGSVLFTIFGGVGIACLPLGLIFSFVRRPKAVITRSQYIKEATELGKKARELKKAAEALHQEERSGNKGRKWRKNVKAVEKELLLLEDDMKALEEMYPQGEQAEATWAFTVLGYIGKLIFGVVGLIVSIAWVAHIVIYLLIDPPLSSFLNEVFIKLDGVWGLLGTAAFAFFCFYLLIAVIAGEMMLGLKLVFITIHPMKWGGTLMNSFLFNVGLILLCSISVIQFCATAFAYYAQATAAQEIFGHTLQSLRGIKYLYKYNVFQYGFVALAILTLFYYAIFGWRKKKPTGRFQLSK

SEQ ID NO: 195402 - protein, 350 aa, Zea Mays
MGDFNVALVIVAAVVSVLVLLVSVYLLVNYQHPDDVNQAYFPKLVVVLGLTVAVLSILMLPADVANRQACRKAVYNGACSLTLPMRTLWLVVYIVDAVLVFLVIPFAMFYYEGDQDKSVGKRLRTALIWVVASAVVCGLVLGILYGLVGKVDFTVRHLSSSVQTFPNSFSGFSSGQPCISPLTRQCAASTAPANSQTTWTMRATFPEYVVALTTIVGSVLFTIFGGVGIACLPLGLIFSFVRRPKAVITRSQYIKEATELGKKARELKKAAEALHQEERSGNKGRKWRKNVKAVEKELLLLEDDMKALEEMYPQGEQAEATWAFTVLGYIGKLIFGVVGLGCTYRHILVD

SEQ ID NO: 195403 - protein, 333 aa, Zea Mays
MGDFNVALVIVAAVVSVLVLLVSVYLLVNYQHPDDVNQAYFPKLVVVLGLTVAVLSILMLPADVANRQACRKAVYNGACSLTLPMRTLWLVVYIVDAVLVFLVIPFAMFYYEGDQDKSVGKRLRTALIWVVASAVVCGLVLGILYGLVGKVDFTVRHLSSSVQTFPNSFSGFSSGQPCISPLTRQCAASTAPANSQTTWTMRATFPEYVVALTTIVGSVLFTIFGGVGIACLPLGLIFSFVRRPKAVITRSQYIKEATELGKKARELKKAAEALHQEERSGNKGRKWRKNVKAVEKELLLLEDDMKALEEMQRLLGHSQSLGTLENLYLVLLG

SEQ ID NO: 195404 - protein, 492 aa, Zea Mays
MGDFNVALVIVAAVVSVLVLLVSVYLLVNYQHPDDVNQAYFPKLVVVLGLTVAVLSILMLPADVANRQACRKAVYNGACSLTLPMRTLWLVVYIVDAVLVFLVIPFAMFYYEGDQDKSVGKRLRTALIWVVASAVVCGLVLGILYGLVGKVDFTVRHLSSSVQTFPNSFSGFSSGQPCISPLTRQCAASTAPANSQTTWTMRATFPEYVVALTTIVGSVLFTIFGGVGIACLPLGLIFSFVRRPKAVITRSQYIKEATELGKKARELKKAAEALHQEERSGNKGRKWRKNVKAVEKELLLLEDDMKALEEMYPQGEQAEATWAFTVLGYIGKLIFGVVGLIVSIAWVAHIVIYLLIDPPLSSFLNEVFIKLDGVWVIAGEMMLGLKLVFITIHPMKWGGTLMNSFLFNVGLILLCSISVIQFCATAFAYYAQATAAQEIFGHTLQSLRGIKYLYKYNVFQYGFVALAILTLFYYAIFGWRKKKPTGRFQLSK

SEQ ID NO: 195405 - protein, 264 aa, Zea Mays
MGDFNVALVIVAAVVSVLVLLVSVYLLVNYQHPDDVNQAYFPKLVVVLGLTVAVLSILMLPADVANRQACRKAVYNGACSLTLPMRTLWLVVYIVDAVLVFLVIPFAMFYYEGDQDKSVGKRLRTALIWVVASAVVCGLVLGILYGLVGKVDFTVRHLSSSVQTFPNSFSGFSSGQPCISPLTRQCAASTAPANSQTTWTMRATFPEYVVALTTIVGSVLFTIFGGVGIACLPLGLIFSFVRRPKAVITRSQYIKVKICPAGSN

SEQ ID NO: 195406 - protein, 603 aa, Zea Mays
MSTAQRFDILPYGFSKRASNRGDGSGAAPRVAAPDARSGGGGGTCSFRAHPAPPVTQAVSWGAKPEPGGNGAAWERSRAVKRAHEEDAGEEYGGPVVRAKRTRMGGDGDKVWFHRSIAGTVQAAGSGDGHEAEEEKAFLVPSAAAFPHGMSAAAAGPSLAVAKKEEFSKSPSNSPASSGGTDGGSSAVPWPEQLHAQNGAAARVEAMELVVALTACADSVAACNHDAANYYLARLGEMASPAGPTPMHRVAAYFAEALTLRVVRMWPQVFDVSPPRELTDGAVAADDDATALRVLNAVTPIPRFLHFTLNERVLRAFDGHDRVHVIDFDIKQGLQWPGLLQSLATRVAPPAHVRITGVGESRQELQETGARLGRVAAALGLAFEFHAVVDRLEDVRLWMLHVKRGECVAVNCVLAAHRLLRDETGAAVADFLGLTRSTGAAILLLGEHEDALNSGRWEARFARALRYYAAAFDAVEAAGLADASPARAKAEEMFAREIRNAVAFEAADRFERHETFTGWRQRMQEGGFQNAGIGDREALQGRMIARMFAPGNYSVQVQGDGEGLTLRWMDQAMYTVSAWTPVSDGGSTVSASVSTTASHSQHS

SEQ ID NO: 195407 - protein, 85 aa, Zea Mays
MCISLFNPLAVSTGLPRYYRRRRRRPTPVTEVFVSPFAGGEHPLANNWWQLVCSVSCSMRHAAHLRRRSLRQSFAPLPMAKSWIK

SEQ ID NO: 195408 - protein, 58 aa, Zea Mays
MVEEILIPKARRSPGFAANNWWQLVCSVSCSMRHAAHLRRRSLRQSFAPLPMAKSWIK

SEQ ID NO: 195409 - protein, 115 aa, Zea Mays
MDFIPHVLIVCHFFCLWNFHGQIASSKQLVAIGLFRFVLHETCSSPSSSLPPSKLCSTTYGKELDKVTGQKRRGVINYDTSLCLVYPYISTLKCLLIHLNKASHIYSPQMEGFSN

SEQ ID NO: 195410 - protein, 75 aa, Zea Mays
MESFFTGGTISHLHRQCSSKTTFVHKRKYASTPHVGRAARALSRNRHVRSCVFIRQSSEKRYWYTGKRVQVLTAW

SEQ ID NO: 195411 - protein, 147 aa, Zea Mays
MAPKPSFFLPQLPWCSLSPARSLVLRVFSARRCSPRETALGRPTFLLLPAVVSLGAGRFFLLFHAAAIALLLQCAQPSDSLLCARYFSSMPRPVPAPCFSLRHGVSSPRGSSPSYPARIVPRLLSRSACFGSEVGRLGVKSPSRPGF

SEQ ID NO: 195412 - protein, 716 aa, Zea Mays
MPSTSMNGDSLMRVPASPISFSSNNISGSSVIDGCIMQQSPPQEQVQKQRSSSVTSQPVIDAGGALHAQKKSRIDVCQGGITEQQLIQQLLHGQNSLHYQGQQNPQLQALMQHHKLAQLQQRQQQHPFSQMQQPQVGIPRQPQLRPPLAQTGMQLGGPVRSPIESGICSRRILQYLYHKRHRPENNPITYWRKLVEEYFAPRARERWCVSSYENRGNSSAAAPQKALDTWRCGICNTHGGKGYEVTYEVLPRLCQIRFDHGVIDEYLYFDSPNEFRLPNGQMVLEHAKVVQKSVYEHLHVIHEGHLRIIFTPELKIMSWEFCSRRHEEYTTRKTIAPQVNNLLQVAQKFQAVVSESGSAGISNNDAQTICNMFVNASRQLAKNLEHHTLNEHGLSKRYVRCLQISEVVNHMKDLIEFSHKSKLGPKESLNSYSKTTAKFENMHDSRQAMAAANLANNQSNTKLMGVKQETSTSANNQTPGAGAIGNNNLPIAAPLNTYQNMLRSSGASTISLQQEASSVFKGPTAMHNGMQLEAARSFLGPNQVQFQHHPPSSSFQQQQQNSFHGFGVNPQYQQHVLNQLLQEVKNSNNRSKAQQPPLDAPPPNASGGGLAPGVATPNVIAATGEQGQHVNNSSSNHNGTVKGAAGTGPSNVINNSTASMASARNSSFKSVSSSPAAAGNAVSSKVDDSFHQLEDLDDMIANELVESGLFGAGHGW

SEQ ID NO: 195413 - protein, 433 aa, Zea Mays
MKTEGILQLLLHRKLWIRGDVAFAIHMVGKDMIMSWEFCSRRHEEYTTRKTIAPQVNNLLQVAQKFQAVVSESGSAGISNNDAQTICNMFVNASRQLAKNLEHHTLNEHGLSKRYVRCLQISEVVNHMKDLIEFSHKSKLGPKESLNSYSKTTAKFENMHDSRQAMAAANLANNQSNTKLMGVKQETSTSANNQTPGAGAIGNNNLPIAAPLNTYQNMLRSSGASTISLQQEASSVFKGPTAMHNGMQLEAARSFLGPNQVQFQHHPPSSSFQQQQQNSFHGFGVNPQYQQHVLNQLLQEVKNSNNRSKAQQPPLDAPPPNASGGGLAPGVATPNVIAATGEQGQHVNNSSSNHNGTVKGAAGTGPSNVINNSTASMASARNSSFKSVSSSPAAAGNAVSSKVDDSFHQLEDLDDMIANELVESGLFGAGHGW

SEQ ID NO: 195414 - protein, 730 aa, Zea Mays
MNGTHPWASMSGGPCSNLGYARDMNGNVPISTTNSSGPSIGVSSLVTDANSSLSGGAQLQPSTSMNGDSLMRVPASPISFSSNNISGSSVIDGCIMQQSPPQEQVQKQRSSSVTSQPVIDAGGALHAQKKSRIDVCQGGITEQQLIQQLLHGQNSLHYQGQQNPQLQALMQHHKLAQLQQRQQQHPFSQMQQPQVGIPRQPQLRPPLAQTGMQLGGPVRSPIESGICSRRILQYLYHKRHRPENNPITYWRKLVEEYFAPRARERWCVSSYENRGNSSAAAPQKALDTWRCGICNTHGGKGYVVQKSVYEHLHVIHEGHLRIIFTPELKIMSWEFCSRRHEEYTTRKTIAPQVNNLLQVAQKFQAVVSESGSAGISNNDAQTICNMFVNASRQLAKNLEHHTLNEHGLSKRYVRCLQISEVVNHMKDLIEFSHKSKLGPKESLNSYSKTTAKFENMHDSRQAMAAANLANNQSNTKLMGVKQETSTSANNQTPGAGAIGNNNLPIAAPLNTYQNMLRSSGASTISLQQEASSVFKGPTAMHNGMQLEAARSFLGPNQVQFQHHPPSSSFQQQQQNSFHGFGVNPQYQQHVLNQLLQEVKNSNNRSKAQQPPLDAPPPNASGGGLAPGVATPNVIAATGEQGQHVNNSSSNHNGTVKGAAGTGPSNVINNSTASMASARNSSFKSVSSSPAAAGNAVSSKVDDSFHQLEDLDDMIANELVESGLFGAGHGW

SEQ ID NO: 195415 - protein, 378 aa, Zea Mays
MLQPSTSMNGDSLMRVPASPISFSSNNISGSSVIDGCIMQQSPPQEQVQKQRSSSVTSQPVIDAGGALHAQKKSRIDVCQGGITEQQLIQQLLHGQNSLHYQGQQNPQLQALMQHHKLAQLQQRQQQHPFSQMQQPQVGIPRQPQLRPPLAQTGMQLGGPVRSPIESGICSRRILQYLYHKRHRPENNPITYWRKLVEEYFAPRARERWCVSSYENRGNSSAAAPQKALDTWRCGICNTHGGKGYEVTYEVLPRLCQIRFDHGVIDEYLYFDSPNEFRLPNGQMVLEHAKVVQKSVYEHLHVIHEGHLRIIFTPELKIMSWEFCSRRHEEYTTRKTIAPQVNNLLQVAQKFQAVVSESGSAGISNNDAQTICNIYRRW

SEQ ID NO: 195416 - protein, 717 aa, Zea Mays
MLQPSTSMNGDSLMRVPASPISFSSNNISGSSVIDGCIMQQSPPQEQVQKQRSSSVTSQPVIDAGGALHAQKKSRIDVCQGGITEQQLIQQLLHGQNSLHYQGQQNPQLQALMQHHKLAQLQQRQQQHPFSQMQQPQVGIPRQPQLRPPLAQTGMQLGGPVRSPIESGICSRRILQYLYHKRHRPENNPITYWRKLVEEYFAPRARERWCVSSYENRGNSSAAAPQKALDTWRCGICNTHGGKGYVTYEVLPRLCQIRFDHGVIDEYLYFDSPNEFRLPNGQMVLEHAKVVQKSVYEHLHVIHEGHLRIIFTPELKIMSWEFCSRRHEEYTTRKTIAPQVNNLLQVAQKFQAVVSESGSAGISNNDAQTICNMFVNASRQLAKNLEHHTLNEHGLSKRYVRCLQISEVVNHMKDLIEFSHKSKLGPKESLNSYSKTTAKFENMHDSRQAMAAANLANNQSNTKLMGVKQETSTSANNQTPGAGAIGNNNLPIAAPLNTYQNMLRSSGASTISLQQEASSVFKGPTAMHNGMQLEAARSFLGPNQVQFQHHPPSSSFQQQQQNSFHGFGVNPQYQQHVLNQLLQEVKNSNNRSKAQQPPLDAPPPNASGGGLAPGVATPNVIAATGEQGQHVNNSSSNHNGTVKGAAGTGPSNVINNSTASMASARNSSFKSVSSSPAAAGNAVSSKVDDSFHQLEDLDDMIANELVESGLFGAGHGW

SEQ ID NO: 195417 - protein, 697 aa, Zea Mays
MPHPPRATTTTASCALLSFLNQFFWYRKEPLTITAISAQIAVVPLGRLMAAALPARAVLRGTRWEFSLNPGPFSVKEHVLVTIFANSGAGTVYAIHVITAVRVFYGKHITFFVSLLVVLTTQVLGFGWAGIFRRYLVEPAAMWWPSNLVQVSLFRALHEKERRVKGGMTRNQFFLVAFVCSFAYYVFPGYLFQMLTSLSWLCWAFPRSVVAQQLGSGLSGLGVGAVGLDWSTISSYLGSPLASPWFATANVAAGFVLIMYVITPAAYYWLGLYGARSFPIFSDGLFTAAGQTYNISSIVDSNFRFDTEAYERNGPLYLSTFFAVTYGVGFASLTATVVHVFLFHGSEIWQLSRSAFQEKKVDVHTRLMRRYRQVPEWWFICILVANVAVTIFACEYYIEQLQLPWWGVLLACAIAFFFTLPIGIITATTNQTPGLNIITEYIMGYLYPGRPVANMCFKVYGYISMTQALAFLQDFKLGHYMKIPPRTMFMAQVVGTLIAALVYIGTAWWLMDSVPNICSTELLPADSPWTCPMDHVFYDASVIWGLIGPRRIFGDLGTYSAVNWFFLGGAVAPLLVWLAHRVFPSQSWILLVNMPVLIGSTGMMPPATAVNYTTWIIAGFLSGYVVYRYRRHWWERHNYLLSGALDAGLAFMAVLIYLCLGLENVGLNWWGNDLDGCPLASCPTAKGIVVEGCPVYT

SEQ ID NO: 195418 - protein, 106 aa, Zea Mays
MEEHGAEDLLCEAMGSAAQVVVVEDCVEAPGAFVLHLLLKRALAGCGSAAFLALAQPFSHYDRVLRKMVEQGKAPLLIALLYCTMKFKDWWRQTGLEKMKASSPSL

SEQ ID NO: 195419 - protein, 100 aa, Zea Mays
MNHTEHAKALMPSFGDCRGNQRVIEVLTHEITNLLKRSEKRPQKLSMEDPSEDSNFRKNVQCSLAMDLQNLSLGFWKKQSSYSKELRQQKEVPFLLSSDN

SEQ ID NO: 195420 - protein, 66 aa, Zea Mays
MSSVLLLWTCKTYHWGSGKSSHHIQRSFGNKKRLRGSRRRKGDVCHCPCHSDFGDHFLLTYIPISS

SEQ ID NO: 195421 - protein, 103 aa, Zea Mays
MARHGHDERRGCRAPPHNNGVCGDASTKQPCWHGDRRTATGRLRAGLGSGVGVDGLGGMLNRQPGCSSEDDCTWGSCFGWRVEAGPFVKDASTSAAEEAELSG

SEQ ID NO: 195422 - protein, 103 aa, Zea Mays
MARHGHDERRGCRAPPHNNGVCGDASAKQPCWHGDRQTATGRLRAGLGSGVGVDGLGGMLNRQPGYSSEDDCTWGSCFGWRVEAGPFVKDASTSAAEEAELSG

SEQ ID NO: 195423 - protein, 281 aa, Zea Mays
MVCFPSAVSYYAYYGKKLDPEPWRCRRTDGKKWRCSKEAHPDSKYCERHMHRGRNRSRKPVESKTASSPPQLSTVVTTTTTREAAAATPLESLAGAGGKAHGLSLGGGAGSSHLSVDASNAHFRYGSKYPLGAKSDAGELSFFSGAPGNSRGFTIDSPADNSWHSLPSNVPPFTLSKGRDSGLLPGAYSYSHIEPPQVLGQVTIASLSQDQERHQSSFSSGGAGAGGLLGSVKQENQPLRPFFDEWPGTRDSWSEMDDARSSRTSFSTTQLSISIPMPRCD

SEQ ID NO: 195424 - protein, 713 aa, Zea Mays
MLELARGVAQWAHGFKSGILFLFNTGEEEGLDGAHSFITQHHWRNSVIFAVDLEAMGISGKSTLFQGTDHWALESFAAVAKYPSAQIASQDVFSSGAIKSATDFQIYEEVGRLPGLDFAYTDTTSVYHTKNDKMALLKPGSLQHIGDNMLAFLLHSAASPKFLKDAQQRKQGKTEQDRAVYFDILGKYMVVYPLRLATMFHNSIILQSLLIWGTSLLMGGHPALVSFAISCLSIILMWIFSICLPVVVAFALPYMCPFPIPYVANPWLTIGLFGSPALLGAFIGQHIGFILLKRHLRRVHSKAKTGITPSMIENVTDLEAERWIFKSGFVQWLIALILGTYFKVGSSYIALIWLVSPAFAYGFLEATLSPVRLPKQLKVVTLVVGLVAPVVSSAGLAVRMADVIVGSIVRIDRNPGGLPDWLGNVIVSVAIAVVVCSTFVYLLSYIHISGDKRILGLLLSLSFGLSIALASSGIVPAFTEDVARSVNVVHVVDTTGVHGGHIEPVSYISLFSNTPGKLTNELVDLGGEEFSCGRNMTTDLVTFTVKYGCWSYKESSTGWSRSEVPVLLVESDSVIGGARQTVVSVDTKSSTRWTLGINKDGIDDFTVQVDSEKIVLPGDKSEIDGWHTIQFAGGKNSPTKFQLTLYWSSSKPSEREAKQAADAPLLVKLRTDVNRVTPQVARVVEKLPRWCTPFGKSTSPYTLAFLTALRVDI

SEQ ID NO: 195425 - protein, 565 aa, Zea Mays
MLAFLLHSAASPKFLKDAQQRKQGKTEQDRAVYFDILGKYMVVYPLRLATMFHNSIILQSLLIWGTSLLMGGHPALVSFAISCLSIILMWIFSICLPVVVAFALPYMCPFPIPYVANPWLTIGLFGSPALLGAFIGQHIGFILLKRHLRRVHSKAKTGITPSMIENVTDLEAERWIFKSGFVQWLIALILGTYFKVGSSYIALIWLVSPAFAYGFLEATLSPVRLPKQLKVVTLVVGLVAPVVSSAGLAVRMADVIVGSIVRIDRNPGGLPDWLGNVIVSVAIAVVVCSTFVYLLSYIHISGDKRILGLLLSLSFGLSIALASSGIVPAFTEDVARSVNVVHVVDTTGVHGGHIEPVSYISLFSNTPGKLTNELVDLGGEEFSCGRNMTTDLVTFTVKYGCWSYKESSTGWSRSEVPVLLVESDSVIGGARQTVVSVDTKSSTRWTLGINKDGIDDFTVQVDSEKIVLPGDKSEIDGWHTIQFAGGKNSPTKFQLTLYWSSSKPSEREAKQAADAPLLVKLRTDVNRVTPQVARVVEKLPRWCTPFGKSTSPYTLAFLTALRVDI

SEQ ID NO: 195426 - protein, 201 aa, Zea Mays
MHVCSTNVVPLPISVCIPVIGMCRFRSHVHAWQRRRVCGNSEMHSAGHACSKRYAAGGAEKPTTVMVQLHRTMQWCGCRLAAALACVFGPERRRRLGIGWGCCARTGPSHGRSPCWRRTPGPRTGVCCGRQSQPRSRARPKRQRRDAEPPGAAPAHPHRGCAQPPPAVRPLGSACSVAVVGRRAPMTGPRHRWPRPRPQGC

SEQ ID NO: 195427 - protein, 66 aa, Zea Mays
MVDGRFSATSGQMEDLISFEPLTTMVHNERRRQQLIYTTPLATNLKLVRLQDYVETPRVARMKALW

SEQ ID NO: 195428 - protein, 700 aa, Zea Mays
MTLVPSLMEIILPTLAEKLSDGCNPLKILIFSGEVLSVSLWKRVYEFLPEATIINLYGTTEVSGDCAFFDCKKLPTILEQEELNSVPIGFPISNCEVSLVTNDGLSDEGEISVSGACLFTGYLADPMTSNCPEGSEVLAYYRTGDFARRLKTGELIFLGRKDRIVKIYGHRFSLEEVESTLRDHPDVSDAAVTFQSNGSLDFKAYLVLRSNNKFLKCTQGYSGLHSSRDIIAPLRNWLIMKFPLAMVPRLFIPMKSLPLTLSGKIDYVKLSSLVCAFEPCEIHPESSPADPHMQVIKKAFSDALLVHEVSEYDDFFSLGGNSITAAHVAHKLEIDMRLLYIYTTPSKLFHGLLGEHSHVIPPTPEFHNRKKLRKYASISDSFGPVSEYLDSNFHDQGQISKEGAYDHFAGNHVSDIDGQLSKSRTYNTYQAKNLCPDTCSNDEIFSGRPWILNFHLQKVWSIGRCNRFMHGSEGMVHLEDICSYVPYNKKGYLVKIWSILLDSCVDASPLLVINNGMMSIFIGSHSYLFLCIDGYSGSVRWSVKLEGRIECSAAITGDFSEVVVGCYKGKIYFLDMSTGKLSWTFQTDGEGISFQVKMQPVVDKMRNLIWCGSYDHYLYALNYKDRCCTYKVFCGGSIYGSPAIDMAQNVIYVASTSGLVTAVSFKEPSFRVLWQYEAGAPIFGSLAIDHQSGTGISPAI

SEQ ID NO: 195429 - protein, 227 aa, Zea Mays
MHGSEGMVHLEDICSYVPYNKKGYLVKIWSILLDSCVDASPLLVINNGMMSIFIGSHSYLFLCIDGYSGSVRWSVKLEGRIECSAAITGDFSEVVVGCYKGKIYFLDMSTGKLSWTFQTDGEVKMQPVVDKMRNLIWCGSYDHYLYALNYKDRCCTYKVFCGGSIYGSPAIDMAQNVIYVASTSGLVTAVSFKEPSFRVLWQYEAGAPIFGSLAIDHQSGTGISPAI

SEQ ID NO: 195430 - protein, 417 aa, Zea Mays
MHGSEGMVHLEDICSYVPYNKKGYLVKIWSILLDSCVDASPLLVINNGMMSIFIGSHSYLFLCIDGYSGSVRWSVKLEGRIECSAAITGDFSEVVVGCYKGKIYFLDMSTGKLSWTFQTDGEVKMQPVVDKMRNLIWCGSYDHYLYALNYKDRCCTYKVFCGGSIYGSPAIDMAQNVIYVASTSGLVTAVSFKEPSFRVLWQYEAGAPIFGSLAIDHQSGTVICCLVNGLVMTLNSQGSVVWKATVGGPIFAGACLSPTLPHQVLIPSRDGNLYSFDTVSGALLWVYKAGDPITASTFVDELLTSVSFGPSERFACICTSSGKVHVIRIRVDIRTRVDAKYNQEQGGDGVKSEELVQGLDAKYNQEQAGEGAKSEELVQGLASIDLPGDIFSSPLMVGGRIFVGCRDDRLHCLTVTT

SEQ ID NO: 195431 - protein, 1168 aa, Zea Mays
MAAAEPCCISHAFERATRQEPGRLAVIHAAASGADSEERRFTCGDLLAAVGSLSRRIAAALGSTATDTRRDREQGSGFRAAGAVVPRVVGVYASPSLEYVAAVLAVLRCGAAFLPLDPSWPEERVSWAISASNAALVVSSVGSRGATLFESSACPVLRFYGGIRRRFRDGNGGDDGEELVWPCEHEWHRKFCYVMFTSGSTGKPKGVCGTEKGLLNRFLWMQRRNPLCSDDVLLFKTSVSFVDHLQEFLSAVLTCSTLVIPPSEWRANPASLANLIKVYRISRMTLVPSLMEIILPTLAEKLSDGCNPLKILIFSGEVLSVSLWKRVYEFLPEATIINLYGTTEVSGDCAFFDCKKLPTILEQEELNSVPIGFPISNCEVSLVTNDGLSDEGEISVSGACLFTGYLADPMTSNCPEGSEVLAYYRTGDFARRLKTGELIFLGRKDRIVKIYGHRFSLEEVESTLRDHPDVSDAAVTFQSNGSLDFKAYLVLRSNNKFLKCTQGYSGLHSSRDIIAPLRNWLIMKFPLAMVPRLFIPMKSLPLTLSGKIDYVKLSSLVCAFEPCEIHPESSPADPHMQVIKKAFSDALLVHEVSEYDDFFSLGGNSITAAHVAHKLEIDMRLLYIYTTPSKLFHGLLGEHSHVIPPTPEFHNRKKLRKYASISDSFGPVSEYLDSNFHDQGQISKEGAYDHFAGNHVSDIDGQLSKSRTYNTYQAKNLCPDTCSNDEIFSGRPWILNFHLQKVWSIGRCNRFMHGSEGMVHLEDICSYVPYNKKGYLVKIWSILLDSCVDASPLLVINNGMMSIFIGSHSYLFLCIDGYSGSVRWSVKLEGRIECSAAITGDFSEVVVGCYKGKIYFLDMSTGKLSWTFQTDGEVKMQPVVDKMRNLIWCGSYDHYLYALNYKDRCCTYKVFCGGSIYGSPAIDMAQNVIYVASTSGLVTAVSFKEPSFRVLWQYEAGAPIFGSLAIDHQSGTVICCLVNGLVMTLNSQGSVVWKATVGGPIFAGACLSPTLPHQVLIPSRDGNLYSFDTVSGALLWVYKAGDPITASTFVDELLTSVSFGPSERFACICTSSGKVHVIRIRVDIRTRVDAKYNQEQGGDGVKSEELVQGLDAKYNQEQAGEGAKSEELVQGLASIDLPGDIFSSPLMVGGRIFVGCRDDRLHCLTVTT

SEQ ID NO: 195432 - protein, 432 aa, Zea Mays
MTLVPSLMEIILPTLAEKLSDGCNPLKILIFSGEVLSVSLWKRVYEFLPEATIINLYGTTEVSGDCAFFDCKKLPTILEQEELNSVPIGFPISNCEVSLVTNDGLSDEGEISVSGACLFTGYLADPMTSNCPEGSEVLAYYRTGDFARRLKTGELIFLGRKDRIVKIYGHRFSLEEVESTLRDHPDVSDAAVTFQSNGSLDFKAYLVLRSNNKFLKCTQGYSGLHSSRDIIAPLRNWLIMKFPLAMVPRLFIPMKSLPLTLSGKIDYVKLSSLVCAFEPCEIHPESSPADPHMQVIKKAFSDALLVHEVSEYDDFFSLGGNSITAAHVAHKLEIDMRLLYIYTTPSKLFHGLLGEHSHVIPPTPEFHNRKKLRKYASISDSFGPVSEYLDSNFHDQGQISKEGAYDHFAGNHWQTMDTKFSLTKGVVYWPLQ

SEQ ID NO: 195433 - protein, 1151 aa, Zea Mays
MAAAEPCCISHAFERATRQEPGRLAVIHAAASGADSEERRFTCGDLLAAVGSLSRRIAAALGSTATDTRRDREQGSGFRAAGAVVPRVVGVYASPSLEYVAAVLAVLRCGAAFLPLDPSWPEERVSWAISASNAALVVSSVGSRGATLFESSACPVLRFYGGIRRRFRDGNGGDDGEELVWPCEHEWHRKFCYVMFTSGSTGKPKGVCGTEKDDVLLFKTSVSFVDHLQEFLSAVLTCSTLVIPPSEWRANPASLANLIKVYRISRMTLVPSLMEIILPTLAEKLSDGCNPLKILIFSGEVLSVSLWKRVYEFLPEATIINLYGTTEVSGDCAFFDCKKLPTILEQEELNSVPIGFPISNCEVSLVTNDGLSDEGEISVSGACLFTGYLADPMTSNCPEGSEVLAYYRTGDFARRLKTGELIFLGRKDRIVKIYGHRFSLEEVESTLRDHPDVSDAAVTFQSNGSLDFKAYLVLRSNNKFLKCTQGYSGLHSSRDIIAPLRNWLIMKFPLAMVPRLFIPMKSLPLTLSGKIDYVKLSSLVCAFEPCEIHPESSPADPHMQVIKKAFSDALLVHEVSEYDDFFSLGGNSITAAHVAHKLEIDMRLLYIYTTPSKLFHGLLGEHSHVIPPTPEFHNRKKLRKYASISDSFGPVSEYLDSNFHDQGQISKEGAYDHFAGNHVSDIDGQLSKSRTYNTYQAKNLCPDTCSNDEIFSGRPWILNFHLQKVWSIGRCNRFMHGSEGMVHLEDICSYVPYNKKGYLVKIWSILLDSCVDASPLLVINNGMMSIFIGSHSYLFLCIDGYSGSVRWSVKLEGRIECSAAITGDFSEVVVGCYKGKIYFLDMSTGKLSWTFQTDGEVKMQPVVDKMRNLIWCGSYDHYLYALNYKDRCCTYKVFCGGSIYGSPAIDMAQNVIYVASTSGLVTAVSFKEPSFRVLWQYEAGAPIFGSLAIDHQSGTVICCLVNGLVMTLNSQGSVVWKATVGGPIFAGACLSPTLPHQVLIPSRDGNLYSFDTVSGALLWVYKAGDPITASTFVDELLTSVSFGPSERFACICTSSGKVHVIRIRVDIRTRVDAKYNQEQGGDGVKSEELVQGLDAKYNQEQAGEGAKSEELVQGLASIDLPGDIFSSPLMVGGRIFVGCRDDRLHCLTVTT

SEQ ID NO: 195434 - protein, 715 aa, Zea Mays
MAAAEPCCISHAFERATRQEPGRLAVIHAAASGADSEERRFTCGDLLAAVGSLSRRIAAALGSTATDTRRDREQGSGFRAAGAVVPRVVGVYASPSLEYVAAVLAVLRCGAAFLPLDPSWPEERVSWAISASNAALVVSSVGSRGATLFESSACPVLRFYGGIRRRFRDGNGGDDGEELVWPCEHEWHRKFCYVMFTSGSTGKPKGVCGTEKGLLNRFLWMQRRNPLCSDDVLLFKTSVSFVDHLQEFLSAVLTCSTLVIPPSEWRANPASLANLIKVYRISRMTLVPSLMEIILPTLAEKLSDGCNPLKILIFSGEVLSVSLWKRVYEFLPEATIINLYGTTEVSGDCAFFDCKKLPTILEQEELNSVPIGFPISNCEVSLVTNDGLSDEGEISVSGACLFTGYLADPMTSNCPEGSEVLAYYRTGDFARRLKTGELIFLGRKDRIVKIYGHRFSLEEVESTLRDHPDVSDAAVTFQSNGSLDFKAYLVLRSNNKFLKCTQGYSGLHSSRDIIAPLRNWLIMKFPLAMVPRLFIPMKSLPLTLSGKIDYVKLSSLVCAFEPCEIHPESSPADPHMQVIKKAFSDALLVHEVSEYDDFFSLGGNSITAAHVAHKLEIDMRLLYIYTTPSKLFHGLLGEHSHVIPPTPEFHNRKKLRKYASISDSFGPVSEYLDSNFHDQGQISKEGAYDHFAGNHWQTMDTKFSLTKGVVYWPLQ

SEQ ID NO: 195435 - protein, 935 aa, Zea Mays
MAAAEPCCISHAFERATRQEPGRLAVIHAAASGADSEERRFTCGDLLAAVGSLSRRIAAALGSTATDTRRDREQGSGFRAAGAVVPRVVGVYASPSLEYVAAVLAVLRCGAAFLPLDPSWPEERVSWAISASNAALVVSSVGSRGATLFESSACPVLRFYGGIRRRFRDGNGGDDGEELVWPCEHEWHRKFCYVMFTSGSTGKPKGVCGTEKGLLNRFLWMQRRNPLCSDDVLLFKTSVSFVDHLQEFLSAVLTCSTLVIPPSEWRANPASLANLIKVYRISRMTLVPSLMEIILPTLAEKLSDGCNPLKILIFSGEVLSVSLWKRVYEFLPEATIINLYGTTEVSGDCAFFDCKKLPTILEQEELNSVPIGFPISNCEVSLVTNDGLSDEGEISVSGACLFTGYLADPMTSNCPEGSEVLAYYRTGDFARRLKTGELIFLGRKDRIVKIYGHRFSLEEVESTLRDHPDVSDAAVTFQSNGSLDFKAYLVLRSNNKFLKCTQGYSGLHSSRDIIAPLRNWLIMKFPLAMVPRLFIPMKSLPLTLSGKIDYVKLSSLVCAFEPCEIHPESSPADPHMQVIKKAFSDALLVHEVSEYDDFFSLGGNSITAAHVAHKLEIDMRLLYIYTTPSKLFHGLLGEHSHVIPPTPEFHNRKKLRKYASISDSFGPVSEYLDSNFHDQGQISKEGAYDHFAGNHVSDIDGQLSKSRTYNTYQAKNLCPDTCSNDEIFSGRPWILNFHLQKVWSIGRCNRFMHGSEGMVHLEDICSYVPYNKKGYLVKIWSILLDSCVDASPLLVINNGMMSIFIGSHSYLFLCIDGYSGSVRWSVKLEGRIECSAAITGDFSEVVVGCYKGKIYFLDMSTGKLSWTFQTDGEVKMQPVVDKMRNLIWCGSYDHYLYALNYKDRCCTYKVFCGGSIYGSPAIDMVSSPVHKKTFY

SEQ ID NO: 195436 - protein, 265 aa, Zea Mays
MSFTGIPMVRTVKVTNVSLSATVQDIKEFFSFSGDIDHVEMQSGDEWSQVAYVTFKDAQGAETALLLSGATIVDLSVIIAPAPEYQPPPTASAPPMSGTRVPVGGGDNNVVHKAEDVVSTMLAKGFVLGKDAVGKAKAFDEKHGFTSTAGATVASIDKKIGLTDKITTGTSLVSGKVKEMDQKFQVSDKTKSALAAAEQKVSSAGSAIMKNRYVFTGASWVTSAFNKVAKTATDVGTMTKEKMAAEEHHKGSGPSSGGHSYTPIR

SEQ ID NO: 195437 - protein, 414 aa, Zea Mays
MWFGRTGVYRSFMFSSPTVLVTTAEGCKQVLMDDDAFVTGWPKATVALVGPRSFVAMPYDEHRRIRKLTAAPINGFDALTGYLPFIDRTVTSSLRAWADHGGSVEFLTELRRMTFKIIVQIFLGGADQATTRALERSYTELNYGMRAMAINLPGFAYRGALRARRRLVAVLQGVLDERRAARAKGVSGGGVDMMDRLIEAQDERGRHLDDDEIIDVLVMYLNAGHESSGHITMWATVFLQENPDMFARAKAEQEAIMRSIPSSQRGLTLRDFRKMEYLSQVIDETLRLVNISFVSFRQATRDVFVNGYLIPKGWKVQLWYRSVHMDPQVYPDPTKFDPSRWEGHSPRAGTFLAFGLGARLCPGNDLAKLEISVFLHHFLLGYKLARTNPRCRVRYLPHPRPVDNCLAKITRVGS

SEQ ID NO: 195438 - protein, 415 aa, Zea Mays
MNQFGRTGVYRSFMFSSPTVLVTTAEGCKQVLMDDDAFVTGWPKATVALVGPRSFVAMPYDEHRRIRKLTAAPINGFDALTGYLPFIDRTVTSSLRAWADHGGSVEFLTELRRMTFKIIVQIFLGGADQATTRALERSYTELNYGMRAMAINLPGFAYRGALRARRRLVAVLQGVLDERRAARAKGVSGGGVDMMDRLIEAQDERGRHLDDDEIIDVLVMYLNAGHESSGHITMWATVFLQENPDMFARAKAEQEAIMRSIPSSQRGLTLRDFRKMEYLSQVIDETLRLVNISFVSFRQATRDVFVNGYLIPKGWKVQLWYRSVHMDPQVYPDPTKFDPSRWEGHSPRAGTFLAFGLGARLCPGNDLAKLEISVFLHHFLLGYKLARTNPRCRVRYLPHPRPVDNCLAKITRVGS

SEQ ID NO: 195439 - protein, 161 aa, Zea Mays
MRVEKEIRQRYGRFFYRFPNGESAADVYDRITGFRETLLSDIVLGRFQPPGHRSTSGDMNIVLVSHGLTLRVFLMRWYKWTVRQFEGLENLANGGELVMQTGEGGRYSLLVHHTPDELRAFGLTDEMLQDQMWQKTARPGELNHRFMTNGQSFFDPFTVIY

SEQ ID NO: 195440 - protein, 137 aa, Zea Mays
MMTSSACYYLCRSLVRAPPLKSRSAVRCPSAAPPGASGATSTSKLVLEVKERLAREHPGLPTGRNGRDDDDMVLWFLKDRKFSVDEAVSKLTKAIVSSNSLVPVKLTPNSFFTRSIISWYFFDEGAKPPISLRNRYV

SEQ ID NO: 195441 - protein, 109 aa, Zea Mays
MMTVSTSCYMCRFLVRAPPLKSRSAVRCPSAAPPGASGATSTSKLVLEVKERLAREHPGLPTGRYGRDDDDMVLWFLKDRKFSVDEAVSKLTKAIVSSNSLACSSEAHT

SEQ ID NO: 195442 - protein, 133 aa, Zea Mays
MVLWFLKDRKFSVDEAVSKLTKAIKWRQDFGVAELSEESVKSLYQTGKAYVHDSLDIYGRPVLIVVAAKHFPSTQDPVENQKLCAYLVEKAVNRLPPGAENILGIFDLRGFRVENGDLQFLKFLVSLVASRHD

SEQ ID NO: 195443 - protein, 238 aa, Zea Mays
MMTVSTSCYMCRFLVRAPPLKSRSAVRCPSAAPPGASGATSTSKLVLEVKERLAREHPGLPTGRYGRDDDDMVLWFLKDRKFSVDEAVSKLTKAIKWRQDFGVAELSEESVKSLYQTGKAYVHDSLDIYGRPVLIVVAAKHFPSTQDPVENQKLCAYLVEKAVNRLPPGAENILGIFDLRGFRVENGDLQFLKFLMDVFYYYYPKRLGQVLFVDAPFVFQPMWQVVKPLLKSYASLIL

SEQ ID NO: 195444 - protein, 190 aa, Zea Mays
MVLWFLKDRKFSVDEAVSKLTKAIKWRQDFGVAELSEESVKSLYQTGKAYVHDSLDIYGRPVLIVVAAKHFPSTQDPVENQKLCAYLVEKAVNRLPPGAENILGIFDLRGFRVENGDLQFLKFLMDVFYYYYPKRLGQVLFVDAPFVFQPMWQVVKPLLKSYASLVRFCDAETVRKEYFKEETVPPDFRD

SEQ ID NO: 195445 - protein, 260 aa, Zea Mays
MMTVSTSCYMCRFLVRAPPLKSRSAVRCPSAAPPGASGATSTSKLVLEVKERLAREHPGLPTGRYGRDDDDMVLWFLKDRKFSVDEAVSKLTKAIKWRQDFGVAELSEESVKSLYQTGKAYVHDSLDIYGRPVLIVVAAKHFPSTQDPVENQKLCAYLVEKAVNRLPPGAENILGIFDLRGFRVENGDLQFLKFLVVKPLLKSYASLVHINQLHSGRLNCNTTTSAITEKSGQQRRGSSDPHVQMPAWSFTWFQEEVNRV

SEQ ID NO: 195446 - protein, 264 aa, Zea Mays
MVFSTEGPSLPARGLRIRGEKKRKEKMMTVSTSCYMCRSLVRAPPLKSRSAVRCPSAAPPGASGATSTSKLVLEVKERLAREHPGLPTGRNGRDDDDMVLWFLKDRKFSVDEAVSKLTKAIKWRQDFGVAELSEESVKSLYQTGKAYVHDSLDIYGRPVLIVVAAKHFPSTQDPVGNQKLCAYLVEKAVSRLPPGVENILGIFDLRGFRVENGDLQFLKFLMDVFYYYYPKRLGQVLFVDAPFVFQPMWQVVKPLLKSYASLIL

SEQ ID NO: 195447 - protein, 135 aa, Zea Mays
MVFSTEGPSLPARGLRIRGEKKRKEKMMTVSTSCYMCRSLVRAPPLKSRSAVRCPSAAPPGASGATSTSKLVLEVKERLAREHPGLPTGRNGRDDDDMVLWFLKDRKFSVDEAVSKLTKAIVSSNSLACSSEAHT

SEQ ID NO: 195448 - protein, 165 aa, Zea Mays
MKTILASETMDIPEGVMVTVAAKLVTVEGPRGKLTRNFKHLNLDFQLQEAGRKLKVDAWFGTRRTMAAIRTAISHVQNLIKGVTKGYRYKMRFVYAHFPINASITNSNTAIEIRNFLGEKKVRKVDMLDGVTILRSEKVKDELILDGNDVELVSRSAALINQNVM

SEQ ID NO: 195449 - protein, 200 aa, Zea Mays
MWGRVLECEEETCGQERSRATAKFSHRLQLLSCSSPPAPARSTQHQPPHHPSRHYCSFLCPLLPHVSRQQKRQTPAADDHANSRSTRKGGGREEQRSGSRWCRRARRRTLWIRPSRPSWGAARRRRRRRWSLVPPPPPRPCRRLGSTTRRRAPGECASPTPSPSRARAGPTPSTTSSSRHCSCTLSRNLLVSFLGTTPKA

SEQ ID NO: 195450 - protein, 419 aa, Zea Mays
MASHRHFLRLLEDPFSPFPPPPPSSSSCPFLLDGVSDYPSPFPAASPFPDLDDLLLPPAPALDPFLAFTPTPLILRDLTNRVAALEVAVATARRRPGPPATRKRTYVTEAGGRKVKWTSVEKPRAGERTLKWEAEIKSPDDDGFDRKWKWEAKGGSSAASARKLKWGAAVKGKGCLEPWSQAYTWEEDFTASDSDKEEEERAADKNKAKKITMNKNEKKEVKAVKKEKKCPFATVKIEEISEDNDAGCVAIKKAFAKGNGKGKRKELSPQDAALLIQMTYRAHLAHRSQVLRCLRDLAVAKAKLKELRSLFYNISYRHRIAHDHEERQRFSEKIIVLLITVDALEGPDYMVRTAKKSMLEELEAMLEVVDPQPPGKQRSLSRRKFDLPEGGAIPDEKTAAVNKAIRIIEEGEVYIRVLC

SEQ ID NO: 195451 - protein, 280 aa, Zea Mays
MASHRHFLRLLEDPFSPFPPPPPSSSSCPFLLDGVSDYPSPFPAASPFPDLDDLLLPPAPALDPFLAFTPTPLILRDLTNRVAALEVAVATARRRPGPPATRKRTYVTEAGGRKVKWTSVEKPRAGERTLKWEAEIKSPDDDGFDRKWKWEAKGGSSAASARKLKWGAAVKGKGCLEPWSQAYTWEEDFTASDSDKEEEERAADKNKAKKITMNKNEKKEVKAVKKEKKCPFATVKIEEISEDNDAGCVAIKKVRPFLLHSSFPSLVSGDCLGFRFSQGF

SEQ ID NO: 195452 - protein, 135 aa, Zea Mays
MTYRAHLAHRSQVLRCLRDLAVAKAKLKELRSLFYNISYRHRIAHDHEERQRFSEKIIVLLITVDALEGPDYMVRTAKKSMLEELEAMLEVVDPQPPGKQRSLSRRKFDLPEGGAIPDEKTAAVNKAIRIIEEGK

SEQ ID NO: 195453 - protein, 535 aa, Zea Mays
MNVTTNYNVVVNVLNSLDEPLLITWDGIQQRKNCWQDGVLGTTCPIPPGWNWTYNFQVKDQIGSFFYFPPLGMQRAAGGFGGITVNNRAVISVPFDTPDGDITLFIGDWYKMNHTHLRKMLDDGKELGMPDGVLMNGKGPYRYNDSLVPDGIEHETIKVEPGKTYRFRVHNVGVSTSLNLRIQNHNMALVETEGSYTMKQNFTNLDIHVGQSYSFLVTMDQNASSDYYIVASARFVNESLWTRVTGVAILQYSNSKGKASGPLPDPPNDEYDKTFSMNQARSIRMNVSTGAARPNPQGSFHYGSINVSQVYKLRNEPPVIINGKKRTTLSGISYSPPDTPLRLADLYDKKDVYTLDFPTMPIDGPPVIRTSVINSTYKNFLEIVFQNNDSTVQTYHIDGYAFWVVGMDYGEWTENSRGTYNKWDGVSRCTTQVFPGAWTAVMLSLDSPGFWNVRTENLDTWYLGQETYIRVVDPNGGYNVTEMVAPDNMLYCGLLKDKQKAQKPHGSRSSASAAKLNYHVLAALVSLVVALVLGH

SEQ ID NO: 195454 - protein, 55 aa, Zea Mays
MQNSGIQAGQLWVTVSECIGYTRTYYWEHKNPSIIYNLNGLGNEFQARILVAPLF

SEQ ID NO: 195455 - protein, 393 aa, Zea Mays
MWTNIFKIGELQTVSWFQFLPIEPDASAASEKSSKVEQKDALNSIVLSAYLHLQSEGFLSTWTNSFVGPWDPSQGEHNPDEKIKLWLFLPGCHSSVSEIAQPAVNKLRVASNGLWVAPGNSEEVAAALSQALRNSLERSLKGLSYARFGDVFTKYNPPTRNQNSFRRAQPTVEFVFAATEEAIFVHVVISASDDIEKVLAHSPPSIGEGLPVVVAPSGMLGRLVGCCPSDLVRQVYSSKSLTPNLPGFSQPTVCQLRGQSYYVEVALGFPAASAKKVSEFEHIHIKKELDPVKDAMVGSDGQRKVESPDGLPILERTFIYPPEAVLVPMVHQAFVRFSSKRMCLQGSLGSSSWEAWPFWNFAPSSYFQNRSVSNYLFLWHAVSTILPRIDYSL

SEQ ID NO: 195456 - protein, 184 aa, Zea Mays
MWTNIFKIGELQTVSWFQFLPIEPDASAASEKSSKVEQKDALNSIVLSAYLHLQSEGFLSTWTNSFVGPWDPSQGEHNPDEKIKLWLFLPGCHSSVSEIAQPAVNKLRVASNGLWVAPGNSEEVAAALSQALRNSLERSLKGLSYARFGDVFTKYNPPTRNQNSFSLQSSLSLLPPRKQYLFTL

SEQ ID NO: 195457 - protein, 246 aa, Zea Mays
MWTNIFKIGELQTVSWFQFLPIEPDASAASEKSSKVEQKDALNSIVLSAYLHLQSEGFLSTWTNSFVGPWDPSQGEHNPDEKIKLWLFLPGCHSSVSEIAQPAVNKLRVASNGLWVAPGNSEEVAAALSQALRNSLERSLKGLSYARFGDVFTKYNPPTRNQNSFRRAQPTVEFVFAATEEAIFVHVVISARYVRNLCSDDIEKVLAHSPPSIGEGLPVVVAPSGMLGRLVGCCPSDLVRQVYSRF

SEQ ID NO: 195458 - protein, 1354 aa, Zea Mays
MDINILLSEFGDFSDFFQQEELDFGEPPGTAESHALVIPASDCGDVTFTDSPSTAMDIPEQRLSPVGFTTLDAFDHQIMAPAQDVVAKVQEPHNDTATPAQSHSQVLSSGRFDYLTKAEAKLTFAPEYAAVEILIAEAPTPLFTNPYFPRSKKPGSSSFSARVYSYDVAQSSQIESTGDKPDKTSKLISGNHLHDISSSNLYTLVQGGNKGSDKILKSTDTQPSKGELSPPISGVTSFNFSLVSQKKSGNMFNAGYFLLSMKTALATEIECITFQAAMCRIRHTLLSLRSKASAEFNSATSSFIQTNVSNKSDLTPRSLMDNVGVWRPVVTPKGPKSLESLSANTLTGASPSLSIQRQPVVDLLCAMTLLVQQSTSFVDMSLDMDDGDGSFFWLSLDEQKRRGFSCDPSMVHAGCGGLLGTCHSKDCAGVDLVDPLSAEVSEPSMISLLQSDIRVALKAAFANMDGPLSVIDWCRGRGNAAESAGTGDAYSFQYSSGDILEPSSSLSIGGDSMSPPQPTSSNRGISELEFQKGYHRVRPTIAVLPSPSMLVGYQDDWLKASVNSLKTWEKAPFEPYALPKPVTYYALCPDIDMLTSAVADFFMQLGTVYEVCKLGTHSPQNNGGQMELSPGKYLPSGLVLVDCPEQLKKVRCGHLGPISSTSDCLQAFSKHWSVKSFVTSISRILKDIKLTSNISTNQKESSSGPCTVIYVVCPFPEPCAILQTLVECSVALGYVISSPERERKLLYSQVAKALNSSASVDEASASNVVMLSGFSIPKLVLQIVTIETVLRMDKPNKELAVLKDIAFTVYNKARRIPRAVSTSDMFQSPTYLGRSQSTMMHVTSPAPTLWKECLVPRMSGPTLSRETDFDASMRSATWDNSWQPARSGGLLDPNASGSRVYGSISGSNSDSGVSPLLDVSESDSAASLHCCYGWTEDWRWLVCIWTDARGELLDSLIFPFGGISSRQDTKVLQSLFIQILQQGCQIMSSSPEASNMRPRDVIITRIGGFLELEIQEWQKAIYSYGGNEVKKWPVQLRRSIPEGIPPSSNGPTLQQQQQQDMALIQDRNMPSSPNPLYSPHPKSSFMKGALGQSGNKKQILVEQSGMDTSRGSLHLVRSISLVAVSQDHSLHLTCQADLLSRPASAGEGSQGSSGPWSYLEGFTPVKSIGSMSASHSYLLVPSPSMRYLSPATLQLPTCLTSESPPLAHLLHSKGTAIPLAMGYVVSKAVPPVRRDSAQLTKDEQPSVLSVSIIDHYGGSSGTVQEKMSRGGGGGSKQARNLSQETTGRECEMEMHSVLEAVAAELHSLSWLTVSPVYTERRTALPFHCDMVLRMRRLLHYADKYLSEPKGETTH

SEQ ID NO: 195459 - protein, 608 aa, Zea Mays
MDINILLSEFGDFSDFFQQEELDFGEPPGTAESHALVIPASDCGDVTFTDSPSTAMDIPEQRLSPVGFTTLDAFDHQIMAPAQDVVAKVQEPHNDTATPAQSHSQVLSSGRFDYLTKAEAKLTFAPEYAAVEILIAEAPTPLFTNPYFPRSKKPGSSSFSARVYSYDVAQSSQIESTGDKPDKTSKLISGNHLHDISSSNLYTLVQGGNKGSDKILKSTDTQPSKGELSPPISGVTSFNFSLVSQKKSGNMFNAGYFLLSMKTALATEIECITFQAAMCRIRHTLLSLRSKASAEFNSATSSFIQTNVSNKSDLTPRYDMRKKEIMTVRLSSDIDHEMFDRSLMDNVGVWRPVVTPKGPKSLESLSANTLTGASPSLSIQRQPVVDLLCAMTLLVQQSTSFVDMSLDMDDGDGSFFWLSLDEQKRRGFSCDPSMVHAGCGGLLGTCHSKDCAGVDLVDPLSAEVSEPSMISLLQSDIRVALKAAFANMDGPLSVIDWCRGRGNAAESAGTGDAYSFQYSSGDILEPSSSLSIGGDSMSPPQPTSSNRGISELEFQKGYHRVRPTIAVLPSPSMLVGYQDDWLKASVNSLKTWEKAPFEPYALPKPHCF

SEQ ID NO: 195460 - protein, 808 aa, Zea Mays
MPQQHPPSDIYTDFFMQLGTVYEVCKLGTHSPQNNGGQMELSPGKYLPSGLVLVDCPEQLKKVRCGHLGPISSTSDCLQAFSKHWSVKSFVTSISRILKDIKLTSNISTNQKESSSGPCTVIYVVCPFPEPCAILQTLVECSVALGYVISSPERERKLLYSQVAKALNSSASVDEASASNVVMLSGFSIPKLVLQIVTIETVLRMDKPNKELAVLKDIAFTVYNKARRIPRAVSTSDMFQSPTYLGRSQSTMMHVTSPAPTLWKECLVPRMSGPTLSRETDFDASMRSATWDNSWQPARSGGLLDPSKLPDLCAQDDRKYAFEPLFILADPGSADLNALMEPSKSGADASGSRVYGSISGSNSDSGVSPLLDVSESDSAASLHCCYGWTEDWRWLVCIWTDARGELLDSLIFPFGGISSRQDTKVLQSLFIQILQQGCQIMSSSPEASNMRPRDVIITRIGGFLELEIQEWQKAIYSYGGNEVKKWPVQLRRSIPEGIPPSSNGPTLQQQQQQDMALIQDRNMPSSPNPLYSPHPKSSFMKGALGQSGNKKQILVEQSGMDTSRGSLHLVRSISLVAVSQDHSLHLTCQADLLSRPASAGEGSQGSSGPWSYLEGFTPVKSIGSMSASHSYLLVPSPSMRYLSPATLQLPTCLTSESPPLAHLLHSKGTAIPLAMGYVVSKAVPPVRRDSAQLTKDEQPSVLSVSIIDHYGGSSGTVQEKMSRGGGGGSKQARNLSQETTGRECEMEMHSVLEAVAAELHSLSWLTVSPVYTERRTALPFHCDMVLRMRRLLHYADKYLSEPKGETTH

SEQ ID NO: 195461 - protein, 620 aa, Zea Mays
MDINILLSEFGDFSDFFQQEELDFGEPPGTAESHALVIPASDCGDVTFTDSPSTAMDIPEQRLSPVGFTTLDAFDHQIMAPAQDVVAKVQEPHNDTATPAQSHSQVLSSGRFDYLTKAEAKLTFAPEYAAVEILIAEAPTPLFTNPYFPRSKKPGSSSFSARVYSYDVAQSSQIESTGDKPDKTSKLISGNHLHDISSSNLYTLVQGGNKGSDKILKSTDTQPSKGELSPPISGVTSFNFSLVSQKKSGNMFNAGYFLLSMKTALATEIECITFQAAMCRIRHTLLSLRSKASAEFNSATSSFIQTNVSNKSDLTPRYDMRKKEIMTVRLSSDIDHEMFDRSLMDNVGVWRPVVTPKGPKSLESLSANTLTGASPSLSIQRQPVVDLLCAMTLLVQQSTSFVDMSLDMDDGDGSFFWLSLDEQKRRGFSCDPSMVHAGCGGLLGTCHSKDCAGVDLVDPLSAEVSEPSMISLLQSDIRVALKAAFANMDGPLSVIDWCRGRGNAAESAGTGDAYSFQYSSGDILEPSSSLSIGGDSMSPPQPTSSNRGDLRVTAGISELEFQKGYHRVRPTIAVLPSPSMLVGYQDDWLKASVNSLKTWEKAPFEPYALPKPQSHHSANA

SEQ ID NO: 195462 - protein, 469 aa, Zea Mays
MDINILLSEFGDFSDFFQQEELDFGEPPGTAESHALVIPASDCGDVTFTDSPSTAMDIPEQRLSPVGFTTLDAFDHQIMAPAQDVVAKVQEPHNDTATPAQSHSQVLSSGRFDYLTKAEAKLTFAPEYAAVEILIAEAPTPLFTNPYFPRSKKPGSSSFSARVYSYDVAQSSQIESTGDKPDKTSKLISGNHLHDISSSNLYTLVQGGNKGSDKILKSTDTQPSKGELSPPISGVTSFNFSLVSQKKSGNMFNAGYFLLSMKTALATEIECITFQAAMCRIRHTLLSLRSKASAEFNSATSSFIQTNVSNKSDLTPRYDMRKKEIMTVRLSSDIDHEMFDRSLMDNVGVWRPVVTPKGPKSLESLSANTLTGASPSLSIQRQPVVDLLCAMTLLVQQSTSFVDMSLDMDDGDGSFFWLSLDEQKRRGFSCDPSMVHAGCGGLLGTCHSKDCAGVDLVDPLSAEGSRQCC

SEQ ID NO: 195463 - protein, 152 aa, Zea Mays
MAMEEEQTPPELRYLSGLGNTSFTTPRARNLRTWLYRIKPSVTHEPFYPRNPTNERLVGEFDRTTTVATPTQLRWRPADVPLHPGLDFIDGLYTVCGAGSSCLRHGYAIHMYAANKPMDGCSLCNADGDFLIVPQQGSKFLGSVITRHHSLH

SEQ ID NO: 195464 - protein, 824 aa, Zea Mays
MAANNNPWRAPLPPLLNARAGFGGDTSLFSTSLPVLPHEKLIFADSSHGTPPMDDTLTKMKVLANDPDEKDYKFDFDLRQIDDLLPDEDEFFAGITDETEPVAQTNTTEELEEFDVFGNGGGMELDIDPVESITVGFANSSIVDGARCNSINPFGVPSTVGTVAGEHPFGEHPSRTLFVRNINSNVEDSELRSLFEQYGDIRTLYTATKHRGFVMISYFDIRAARNAMRALQNKPLRRRKLDIHFSIPKENPSDKDLNQGTLVIFNLDPSVSNEEVRQIFGAYGEVKEIRETPNKKHHKFIEFYDVRAAEAALRSLNKSEIAGKRIKLEPSRPGGTRRNLMQQLGHDLDQEEPRTYRHSHVGSPIANSPPGAWAQYSSPTDSNMLQAFTRSPTGNGMSPIGIPSLISNAPKIAPIGKDSNRSKYDQVFSNGNQSVGAAFQHSHSYQDHNSEHMSSSPGTLSGPQFLWGSPKPYSEHSKSPIWHPPGIGSALSSSSRTQGQGFLYSSRQASLFGSSDQHHHHVGSAPSGAPFESHFGFLPESPETSFMKQARFGNMGNFGTGRNGGGLLLGMANRASVNPGSSLIGSLTDNSSTNFRPMLSPRLGQTFYTNPPYHGIGTFGLDSSIDRVRNRRVDSSVLQADSKRQYQLDLEKIHRGDDTRTTLMIKNIPNKYTSKMLLAAIDELHRGTYDFFYLPIDFKNKCNVGYAFVNMISPVHIISFYQAFNGKKWEKFNSEKVASLAYARIQGRSALISHFQNSSLMNEDKRCRPILFNPNGQESVHQEAFPINGICIHMLPEDDYLDNEDGKSLNEKTGESSTDMAGSL

SEQ ID NO: 195465 - protein, 768 aa, Zea Mays
MLALVLVAIQASSQPRCRFFLMKSIDDLLPDEDEFFAGITDETEPVAQTNTTEELEEFDVFGNGGGMELDIDPVESITVGFANSSIVDGARCNSINPFGVPSTVGTVAGEHPFGEHPSRTLFVRNINSNVEDSELRSLFEQYGDIRTLYTATKHRGFVMISYFDIRAARNAMRALQNKPLRRRKLDIHFSIPKENPSDKDLNQGTLVIFNLDPSVSNEEVRQIFGAYGEVKEIRETPNKKHHKFIEFYDVRAAEAALRSLNKSEIAGKRIKLEPSRPGGTRRNLMQQLGHDLDQEEPRTYRHSHVGSPIANSPPGAWAQYSSPTDSNMLQAFTRSPTGNGMSPIGIPSLISNAPKIAPIGKDSNRSKYDQVFSNGNQSVGAAFQHSHSYQDHNSEHMSSSPGTLSGPQFLWGSPKPYSEHSKSPIWHPPGIGSALSSSSRTQGQGFLYSSRQASLFGSSDQHHHHVGSAPSGAPFESHFGFLPESPETSFMKQARFGNMGNFGTGRNGGGLLLGMANRASVNPGSSLIGSLTDNSSTNFRPMLSPRLGQTFYTNPPYHGIGTFGLDSSIDRVRNRRVDSSVLQADSKRQYQLDLEKIHRGDDTRTTLMIKNIPNKYTSKMLLAAIDELHRGTYDFFYLPIDFKNKCNVGYAFVNMISPVHIISFYQAFNGKKWEKFNSEKVASLAYARIQGRSALISHFQNSSLMNEDKRCRPILFNPNGQESVHQEAFPINGICIHMLPEDDYLDNEDGKSLNEKTGESSTDMAGSL

SEQ ID NO: 195466 - protein, 416 aa, Zea Mays
MDRSSDSSNPPGLAVPAASKPPQMAANNNPWRAPLPPLLNARAGFGGDTSLFSTSLPVLPHEKLIFADSSHGTPPMDDTLTKMKVLANDPDEKDYKFDFDLRQIDDLLPDEDEFFAGITDETEPVAQTNTTEELEEFDVFGNGGGMELDIDPVESITVGFANSSIVDGARCNSINPFGVPSTVGTVAGEHPFGEHPSRTLFVRNINSNVEDSELRSLFEQYGDIRTLYTATKHRGFVMISYFDIRAARNAMRALQNKPLRRRKLDIHFSIPKENPSDKDLNQGTLVIFNLDPSVSNEEVRQIFGAYGEVKEIRETPNKKHHKFIEFYDVRAAEAALRSLNKSEIAGKRIKLEPSRPGGTRRNNLVTIWTKKSQEPTDILMLVHLLLTLLQGHGLSTVVQQIAICCKLSPDLQLEME

SEQ ID NO: 195467 - protein, 101 aa, Zea Mays
MNAHDDITSEMIVFLKTTLTETMRGAKHRSTGASPNHGTRMASNPWNIRMGHQSMVHRRTTAWARAGRMHGGRDNRCMAGRGRMVTSVLGEDGEGAVRRSI

SEQ ID NO: 195468 - protein, 87 aa, Zea Mays
MIHMKFLHSKGGLRFFTVRSTYSPRFCCLLFHLMILHMLSWKLEHVLQSICNYCALIFLLNNLCNICNYRCHLRAALTAILPGTGLS

SEQ ID NO: 195469 - protein, 377 aa, Zea Mays
MHEYRTAEPQLPQGQNGSFVLYRLFNKNEEESEASDAADSPSTSSPPIAPEVKTENLSQPTSAKMSPHIATVSSNEPTSNQGDVNLLDVLTQLPDLHPEQAFDGFPTITSPMRPYTDHPFFGNAGDQDLSAYIDSIISHQDLEGLLASPSLADMVEQATVNVEPHPINVPVLDNSSNSNRLAENSRGKVGSETLLLIKGTDGTGAAACSSSATKILQDNTDDHTGAQSNLASSASAQVSHFYNQYELQSAFVPEMEPPNSGTLCSAASPTPHPQHLFNGVVASDVFNGIQGWPAEPLTDPHQGNAPRRIRLAHSIQRASVTEPVLTSDVEDEDEPGICYSADSSSASNTEDYANAGETMRIQRGGVISTQVVSSTEK

SEQ ID NO: 195470 - protein, 378 aa, Zea Mays
MHEYRTAEPQLPQGQNGSFVLYRLFNKNEEESEASDAADSPSTSSPPIAPEVKTENLSQPTSAKMSPHIATVSSNEPTSNQQGDVNLLDVLTQLPDLHPEQAFDGFPTITSPMRPYTDHPFFGNAGDQDLSAYIDSIISHQDLEGLLASPSLADMVEQATVNVEPHPINVPVLDNSSNSNRLAENSRGKVGSETLLLIKGTDGTGAAACSSSATKILQDNTDDHTGAQSNLASSASAQVSHFYNQYELQSAFVPEMEPPNSGTLCSAASPTPHPQHLFNGVVASDVFNGIQGWPAEPLTDPHQGNAPRRIRLAHSIQRASVTEPVLTSDVEDEDEPGICYSADSSSASNTEDYANAGETMRIQRGGVISTQVVSSTEK

SEQ ID NO: 195471 - protein, 440 aa, Zea Mays
MADIKKESLALHEMVISSGGEPDACVDEMSSLLKKLKDCVVTEAPTTETPNAQSTSIKHTSPIIPDEFRCPISLELMQDPVIVSSGQTYERSGIQKWLDSGHKTCPKTQQLLSHTSLTPNFVLKSLIAQWCEANGIELPKNKANSRDKKAAKSSDYDHAGLVSLMNRLRSGSQDEQRAAAGEIRLLAKRNVNNRICIADAGAIPLLVNLLSSTDPRTQEHAVTALLNLSIHENNKASIVSSHAIPKIVEVLKTGSMEARENAAATLFSLSVVDENKVTIGGAGAIPPLINLLCDGSPRGKKDAATAIFNLCIYQGNKIRAVKAGIVIHLMNFLVDPTGGMIDEALTLLAILAGNPEAKAVISQSDPIPPLVEVIKTGSPRNRENAAAILWSLCCTDIDQTRAAKAAGAEDALKELSDSGTERAKRKASSILELMRQAEEA

SEQ ID NO: 195472 - protein, 2254 aa, Zea Mays
MANTRSGGGGDAPPPPSSPPAAASATATRKLADGRETRNTAAASAHTPNLRRSTRENKGKHKSRLADTPPLHRSAKTPTKDATAIATPKSTPLPNNPKDSTKKPSRVRNTSVSPSPSKQEPNETSTPASTKRKTQDDALTASTPSKKQKRLLHAKSYIALFNIGEESVLATLREDEEKASEVQPEGDGAVLVHEESNAPEQPNQEASNVVASEVLGGHSSDLHEIEVILEGDGLKIGSHQSDVVLERCILTETRSLNKAVESIPMLETGEQATGGSNQKPLLELPNSACSTAHHEEASKSVEDGNSIGIQGACTSRNTEAIQCDETWYDDNICVVCRSREISDILKSCGGKGCKRHYHLSCMDPSLDVSLGIWLCIMCMKKRIQFGVYSVSEGIESLWDVKEGVVNSKQYFVKYKNLAHVHNQWVSESDIVDSTPQGSDLISKVSKKIHKEKTIRWKQEWAEPHRLLKRRLLMPQKEAEVFFNSLGDKFVYCNVEWLVKWKDLGYEHATWELESSSFLCTPEAEELKRSYEDRFKTARKASDPSKVDKAKGGIFQQLERLPDGCPPGLDDDHLRSLNQLREFWHNSCGAIFIDDQERVIKTILFVASILPHICQPLLIVSTTTTLSLWETKFNRLAASINVVVYNGEKDVRKSIQDLEFYQDGSVMLQVLLSHPDAILEDIEVIERINWEAVIVDDCQNSRVSKWLEQLRRLPTNFRMVLLSSSLKESIAEHISLLSFLNPEENGTLSVSNGVSFDTAGTLVVLKEKLARYVAFERKTDSSKLLEYWVPARLSPVQLEMYCYILLSNSPALRSHSKTDSVGALRNILISLRKCCDHPYLVDQSLQSTLTKDHPVTDILDIGVRSCGKLLLLDRMLQQIRIQGLRVLILSQSGGESGKPMGDILDDFVRQRFGYESYERVERGLLLQKKQTAMNMFNDKTKGRFIFLIDSRACGPSIKLSSVDAIIIYCSDWNPMNDLRALQRVSMESQSEPVPIFRLYSSFTVEEKALILAKHDHILDSNIVNITPSLSHCLLSWGASFLFNRLEELQQHSYSNVSGDELFMDNVDLEFLTKLLSKVELRTESGNTAISQAYLCGSFYSRAIVVAGEREGIPSVDGDLPKFWAYWLSLLNGRSPQWQYISEPVQRSRRKINNMEQQLKNTDKQLKITTEETDEARVKRRRIGEIMDSSAIDSPGKNKDTILPGNNTPPSSHQISVEDTWQELERSNLHATQKGLHVQLKPEISKLYKLLQLPEKVKSLCEEFLEYILKNHQISQEPKGILHAFNLALCWRAASLSKHKINHTESLALAVKNLNYECKEELVDFVYGKLKILKKKFARRAGEVSKQNYMVSVSDISTCEQVTSVRLRNDELVPSQVTLTDGNFENGSHHEATGDFWTEEMVSGEKELLPDPVTHEGEHLLRDELLSKIMDKRIKLVDKVFSLRGRSIYDKHSNQVSFLDMHRQKVVDKLRRACSLVVEHLRSSQNHIAQEDRDGKIKLIIEWFTMLLYAFLEHMKCQRNRLDMQQSASRIKESQLKEETLQAARCGQLDQNFDQHIPSPDFEFAMEEFRHFREVVGSCYVDPAALVPESLDDNSAMEIMLVQSATDAEVIEEVLNRPTEVLVQGPASEVVGPSVDVICNCSDGINSQRDASLAVHSLEPSSDDLRSTDHVEENTVGSQIQGGTSKHLGDAAMEVETGNRNTALADSPHFDKPALTAPSRQATLLVSRETEMLSNLVDQCAQQSLVSAQPLQDESEQADLSSAASTQPLQSERQQLISVSNNLLERAQLDQSQPNYQTDAAPGCAQSTELFPVTSMMFNHAPIDSEPLKNELHKLRLHMDTLNKVHEMKKTQLQTACSQELEKVKRKYDLLIKEHDSTHLQQKKALGDFYEKVQRNQSLAEDFRAKFISLSAAQGAAKGHTPPVRHTPQATQVVSSTSSIALSSACRPPVPRPRVQAPQVDQPLLSLSQFSRPSLQVVQPPNLELGNLFRATSTTLSHMPPQRGSYGVQSELAPRSPAPHLQFRSPRAHSMAPGNQQQSPAISVDAMSSRTQPVLAASTSPSDIHVGPLAASALSSLHSVLPSTSLPSSLHPSHLAQRVPPTPNPTLQAGAPKGSNATMPSIPTGMQLPDSGSLSLDAWLTANLGLNDASTAPAKDTASLGLSSDAPRAAPDTNTASLGLSSDVPRGTAPATNTASLGLSSDVPRGTTPATTTTSLGLISDSPRVIAPASSNSPGAIASATNGGSEIDVVCLSDDE

SEQ ID NO: 195473 - protein, 1885 aa, Zea Mays
MANTRSGGGGDAPPPPSSPPAAASATATRKLADGRETRNTAAASAHTPNLRRSTRENKGKHKSRLADTPPLHRSAKTPTKDATAIATPKSTPLPNNPKDSTKKPSRVRNTSVSPSPSKQEPNETSTPASTKRKTQDDALTASTPSKKQKRLLHAKSYIALFNIGEESVLATLREDEEKASEVQPEGDGAVLVHEESNAPEQPNQEASNVVASEVLGGHSSDLHEIEVILEGDGLKIGSHQSDVVLERCILTETRSLNKAVESIPMLETGEQATGGSNQKPLLELPNSACSTAHHEEASKSVEDGNSIGIQGACTSRNTEAIQCDETWYDDNICVVCRSREISDILKSCGGKGCKRHYHLSCMDPSLDVSLGIWLCIMCMKKRIQFGVYSVSEGIESLWDVKEGVVNSKQYFVKYKNLAHVHNQWVSESDIVDSTPQGSDLISKVSKKIHKEKTIRWKQEWAEPHRLLKRRLLMPQKEAEVFFNSLGDKFVYCNVEWLVKWKDLGYEHATWELESSSFLCTPEAEELKRSYEDRFKTARKASDPSKVDKAKGGIFQQLERLPDGCPPGLDDDHLRSLNQLREFWHNSCGAIFIDDQERVIKTILFVASILPHICQPLLIVSTTTTLSLWETKFNRLAASINVVVYNGEKDVRKSIQDLEFYQDGSVMLQVLLSHPDAILEDIEVIERINWEAVIVDDCQNSRVSKWLEQLRRLPTNFRMVLLSSSLKESIAEHISLLSFLNPEENGTLSVSNGVSFDTAGTLVVLKEKLARYVAFERKTDSSKLLEYWVPARLSPVQLEMYCYILLSNSPALRSHSKTDSVGALRNILISLRKCCDHPYLVDQSLQSTLTKDHPVTDILDIGVRSCGKLLLLDRMLQQIRIQGLRVLILSQSGGESGKPMGDILDDFVRQRFGYESYERVERGLLLQKKQTAMNMFNDKTKGRFIFLIDSRACGPSIKLSSVDAIIIYCSDWNPMNDLRALQRVSMESQSEPVPIFRLYSSFTVEEKALILAKHDHILDSNIVNITPSLSHCLLSWGASFLFNRLEELQQHSYSNVSGDELFMDNVDLEFLTKLLSKVELRTESGNTAISQAYLCGSFYSRAIVVAGEREGIPSVDGDLPKFWAYWLSLLNGRSPQWQYISEPVQRSRRKINNMEQQLKNTDKQLKITTEETDEARVKRRRIGEIMDSSAIDSPGKNKDTILPGNNTPPSSHQISVEDTWQELERSNLHATQKGLHVQLKPEISKLYKLLQLPEKVKSLCEEFLEYILKNHQISQEPKGILHAFNLALEPSSDDLRSTDHVEENTVGSQIQGGTSKHLGDAAMEVETGNRNTALADSPHFDKPALTAPSRQATLLVSRETEMLSNLVDQCAQQSLVSAQPLQDESEQADLSSAASTQPLQSERQQLISVSNNLLERAQLDQSQPNYQTDAAPGCAQSTELFPVTSMMFNHAPIDSEPLKNELHKLRLHMDTLNKVHEMKKTQLQTACSQELEKVKRKYDLLIKEHDSTHLQQKKALGDFYEKVQRNQSLAEDFRAKFISLSAAQGAAKGHTPPVRHTPQATQVVSSTSSIALSSACRPPVPRPRVQAPQVDQPLLSLSQFSRPSLQVVQPPNLELGNLFRATSTTLSHMPPQRGSYGVQSELAPRSPAPHLQFRSPRAHSMAPGNQQQSPAISVDAMSSRTQPVLAASTSPSDIHVGPLAASALSSLHSVLPSTSLPSSLHPSHLAQRVPPTPNPTLQAGAPKGSNATMPSIPTGMQLPDSGSLSLDAWLTANLGLNDASTAPAKDTASLGLSSDAPRAAPDTNTASLGLSSDVPRGTAPATNTASLGLSSDVPRGTTPATTTTSLGLISDSPRVIAPASSNSPGAIASATNGGSEIDVVCLSDDE

SEQ ID NO: 195474 - protein, 1850 aa, Zea Mays
MANTRSGGGGDAPPPPSSPPAAASATATRKLADGRETRNTAAASAHTPNLRRSTRENKGKHKSRLADTPPLHRSAKTPTKDATAIATPKSTPLPNNPKDSTKKPSRVRNTSVSPSPSKQEPNETSTPASTKRKTQDDALTASTPSKKQKRLLHAKSYIALFNIGEESVLATLREDEEKASEVQPEGDGAVLVHEESNAPEQPNQEASNVVASEVLGGHSSDLHEIEVILEGDGLKIGSHQSDVVLERCILTETRSLNKAVESIPMLETGEQATGGSNQKPLLELPNSACSTAHHEEASKSVEDGNSIGIQGACTSRNTEAIQCDETWYDDNICVVCRSREISDILKSCGGKGCKRHYHLSCMDPSLDVSLGIWLCIMCMKKRIQFGVYSVSEGIESLWDVKEGVVNSKQYFVKYKNLAHVHNQWVSESDIVDSTPQGSDLISKVSKKIHKEKTIRWKQEWAEPHRLLKRRLLMPQKEAEVFFNSLGDKFVYCNVEWLVKWKDLGYEHATWELESSSFLCTPEAEELKRSYEDRFKTARKASDPSKVDKAKGGIFQQLERLPDGCPPGLDDDHLRSLNQLREFWHNSCGAIFIDDQERVIKTILFVASILPHICQPLLIVSTTTTLSLWETKFNRLAASINVVVYNGEKDVRKSIQDLEFYQDGSVMLQVLLSHPDAILEDIEVIERINWEAVIVDDCQNSRVSKWLEQLRRLPTNFRMVLLSSSLKESIAEHISLLSFLNPEENGTLSVSNGVSFDTAGTLVVLKEKLARYVAFERKTDSSKLLEYWVPARLSPVQLEMYCYILLSNSPALRSHSKTDSVGALRNILISLRKCCDHPYLVDQSLQSTLTKDHPVTDILDIGVRSCGKLLLLDRMLQQIRIQGLRVLILSQSGGESGKPMGDILDDFVRQRFGYESYERVERGLLLQKKQTAMNMFNDKTKGRFIFLIDSRACGPSIKLSSVDAIIIYCSDWNPMNDLRALQRVSMESQSEPVPIFRLYSSFTVEEKALILAKHDHILDSNIVNITPSLSHCLLSWGASFLFNRLEELQQHSYSNVSGDELFMDNVDLEFLTKLLSKVELRTESGNTAISQAYLCGSFYSRAIVVAGEREGIPSVDGDLPKFWAYWLSLLNGRSPQWQYISEPVQRSRRKINNMEQQLKNTDKQLKITTEETDEARVKRRRIGEIMDSSAIDSPGKNKDTILPGNNTPPSSHQISVEDTWQELERSNLHATQKGLHVQLKPEISKLYKLLQLPEPSSDDLRSTDHVEENTVGSQIQGGTSKHLGDAAMEVETGNRNTALADSPHFDKPALTAPSRQATLLVSRETEMLSNLVDQCAQQSLVSAQPLQDESEQADLSSAASTQPLQSERQQLISVSNNLLERAQLDQSQPNYQTDAAPGCAQSTELFPVTSMMFNHAPIDSEPLKNELHKLRLHMDTLNKVHEMKKTQLQTACSQELEKVKRKYDLLIKEHDSTHLQQKKALGDFYEKVQRNQSLAEDFRAKFISLSAAQGAAKGHTPPVRHTPQATQVVSSTSSIALSSACRPPVPRPRVQAPQVDQPLLSLSQFSRPSLQVVQPPNLELGNLFRATSTTLSHMPPQRGSYGVQSELAPRSPAPHLQFRSPRAHSMAPGNQQQSPAISVDAMSSRTQPVLAASTSPSDIHVGPLAASALSSLHSVLPSTSLPSSLHPSHLAQRVPPTPNPTLQAGAPKGSNATMPSIPTGMQLPDSGSLSLDAWLTANLGLNDASTAPAKDTASLGLSSDAPRAAPDTNTASLGLSSDVPRGTAPATNTASLGLSSDVPRGTTPATTTTSLGLISDSPRVIAPASSNSPGAIASATNGGSEIDVVCLSDDE

SEQ ID NO: 195475 - protein, 1102 aa, Zea Mays
MEQQLKNTDKQLKITTEETDEARVKRRRIGEIMDSSAIDSPGKNKDTILPGNNTPPSSHQISVEDTWQELERSNLHATQKGLHVQLKPEISKLYKLLQLPEKVKSLCEEFLEYILKNHQISQEPKGILHAFNLALCWRAASLSKHKINHTESLALAVKNLNYECKEELVDFVYGKLKILKKKFARRAGEVSKQNYMVSVSDISTCEQVTSVRLRNDELVPSQVTLTDGNFENGSHHEATGDFWTEEMVSGEKELLPDPVTHEGEHLLRDELLSKIMDKRIKLVDKVFSLRGRSIYDKHSNQVSFLDMHRQKVVDKLRRACSLVVEHLRSSQNHIAQEDRDGKIKLIIEWFTMLLYAFLEHMKCQRNRLDMQQSASRIKESQLKEETLQAARCGQLDQNFDQHIPSPDFEFAMEEFRHFREVVGSCYVDPAALVPESLDDNSAMEIMLVQSATDAEVIEEVLNRPTEVLVQGPASEVVGPSVDVICNCSDGINSQRDASLAVHSLEPSSDDLRSTDHVEENTVGSQIQGGTSKHLGDAAMEVETGNRNTALADSPHFDKPALTAPSRQATLLVSRETEMLSNLVDQCAQQSLVSAQPLQDESEQADLSSAASTQPLQSERQQLISVSNNLLERAQLDQSQPNYQTDAAPGCAQSTELFPVTSMMFNHAPIDSEPLKNELHKLRLHMDTLNKVHEMKKTQLQTACSQELEKVKRKYDLLIKEHDSTHLQQKKALGDFYEKVQRNQSLAEDFRAKFISLSAAQGAAKGHTPPVRHTPQATQVVSSTSSIALSSACRPPVPRPRVQAPQVDQPLLSLSQFSRPSLQVVQPPNLELGNLFRATSTTLSHMPPQRGSYGVQSELAPRSPAPHLQFRSPRAHSMAPGNQQQSPAISVDAMSSRTQPVLAASTSPSDIHVGPLAASALSSLHSVLPSTSLPSSLHPSHLAQRVPPTPNPTLQAGAPKGSNATMPSIPTGMQLPDSGSLSLDAWLTANLGLNDASTAPAKDTASLGLSSDAPRAAPDTNTASLGLSSDVPRGTAPATNTASLGLSSDVPRGTTPATTTTSLGLISDSPRVIAPASSNSPGAIASATNGGSEIDVVCLSDDE

SEQ ID NO: 195476 - protein, 1185 aa, Zea Mays
MLQVLLSHPDAILEDIEVIERINWEAVIVDDCQNSRVSKWLEQLRRLPTNFRMVLLSSSLKESIAEHISLLSFLNPEENGTLSVSNGVSFDTAGTLVVLKEKLARYVAFERKTDSSKLLEYWVPARLSPVQLEMYCYILLSNSPALRSHSKTDSVGALRNILISLRKCCDHPYLVDQSLQSTLTKDHPVTDILDIGVRSCGKLLLLDRMLQQIRIQGLRVLILSQSGGESGKPMGDILDDFVRQRFGYESYERVERGLLLQKKQTAMNMFNDKTKGRFIFLIDSRACGPSIKLSSVDAIIIYCSDWNPMNDLRALQRVSMESQSEPVPIFRLYSSFTVEEKALILAKHDHILDSNIVNITPSLSHCLLSWGASFLFNRLEELQQHSYSNVSGDELFMDNVDLEFLTKLLSKVELRTESGNTAISQAYLCGSFYSRAIVVAGEREGIPSVDGDLPKFWAYWLSLLNGRSPQWQYISEPVQRSRRKINNMEQQLKNTDKQLKITTEETDEARVKRRRIGEIMDSSAIDSPGKNKDTILPGNNTPPSSHQISVEDTWQELERSNLHATQKGLHVQLKPEISKLYKLLQLPEPSSDDLRSTDHVEENTVGSQIQGGTSKHLGDAAMEVETGNRNTALADSPHFDKPALTAPSRQATLLVSRETEMLSNLVDQCAQQSLVSAQPLQDESEQADLSSAASTQPLQSERQQLISVSNNLLERAQLDQSQPNYQTDAAPGCAQSTELFPVTSMMFNHAPIDSEPLKNELHKLRLHMDTLNKVHEMKKTQLQTACSQELEKVKRKYDLLIKEHDSTHLQQKKALGDFYEKVQRNQSLAEDFRAKFISLSAAQGAAKGHTPPVRHTPQATQVVSSTSSIALSSACRPPVPRPRVQAPQVDQPLLSLSQFSRPSLQVVQPPNLELGNLFRATSTTLSHMPPQRGSYGVQSELAPRSPAPHLQFRSPRAHSMAPGNQQQSPAISVDAMSSRTQPVLAASTSPSDIHVGPLAASALSSLHSVLPSTSLPSSLHPSHLAQRVPPTPNPTLQAGAPKGSNATMPSIPTGMQLPDSGSLSLDAWLTANLGLNDASTAPAKDTASLGLSSDAPRAAPDTNTASLGLSSDVPRGTAPATNTASLGLSSDVPRGTTPATTTTSLGLISDSPRVIAPASSNSPGAIASATNGGSEIDVVCLSDDE

SEQ ID NO: 195477 - protein, 982 aa, Zea Mays
MFAAKCFCFVLFLLQCWRAASLSKHKINHTESLALAVKNLNYECKEELVDFVYGKLKILKKKFARRAGEVSKQNYMVSVSDISTCEQVTSVRLRNDELVPSQVTLTDGNFENGSHHEATGDFWTEEMVSGEKELLPDPVTHEGEHLLRDELLSKIMDKRIKLVDKVFSLRGRSIYDKHSNQVSFLDMHRQKVVDKLRRACSLVVEHLRSSQNHIAQEDRDGKIKLIIEWFTMLLYAFLEHMKCQRNRLDMQQSASRIKESQLKEETLQAARCGQLDQNFDQHIPSPDFEFAMEEFRHFREVVGSCYVDPAALVPESLDDNSAMEIMLVQSATDAEVIEEVLNRPTEVLVQGPASEVVGPSVDVICNCSDGINSQRDASLAVHSLEPSSDDLRSTDHVEENTVGSQIQGGTSKHLGDAAMEVETGNRNTALADSPHFDKPALTAPSRQATLLVSRETEMLSNLVDQCAQQSLVSAQPLQDESEQADLSSAASTQPLQSERQQLISVSNNLLERAQLDQSQPNYQTDAAPGCAQSTELFPVTSMMFNHAPIDSEPLKNELHKLRLHMDTLNKVHEMKKTQLQTACSQELEKVKRKYDLLIKEHDSTHLQQKKALGDFYEKVQRNQSLAEDFRAKFISLSAAQGAAKGHTPPVRHTPQATQVVSSTSSIALSSACRPPVPRPRVQAPQVDQPLLSLSQFSRPSLQVVQPPNLELGNLFRATSTTLSHMPPQRGSYGVQSELAPRSPAPHLQFRSPRAHSMAPGNQQQSPAISVDAMSSRTQPVLAASTSPSDIHVGPLAASALSSLHSVLPSTSLPSSLHPSHLAQRVPPTPNPTLQAGAPKGSNATMPSIPTGMQLPDSGSLSLDAWLTANLGLNDASTAPAKDTASLGLSSDAPRAAPDTNTASLGLSSDVPRGTAPATNTASLGLSSDVPRGTTPATTTTSLGLISDSPRVIAPASSNSPGAIASATNGGSEIDVVCLSDDE

SEQ ID NO: 195478 - protein, 82 aa, Zea Mays
MGSGSFLKVLAKNFDVLAGPVISHAYPLYASVRAIETKNPVDDQQWLTYWVLYSFVTLFELTLAPIIEWLPFWSYAKLFFNY

SEQ ID NO: 195479 - protein, 114 aa, Zea Mays
MHANSPLLQQPKRWPRRCAATRTPEYGNNGKWRWWPQRWAWTGSMSWTEASAARYQVRQLSGVLLSPLLVTVFWEEIGPPLPHLTLVVIWSRGELPDNVGSRAREFLVGETSRA

SEQ ID NO: 195480 - protein, 86 aa, Zea Mays
MSSTPRPRRAAKQTVFVPRRPLRPARSPHLDPATPHVPLFRRSDGVRGFLGRVRGAVRAALPRRPQHHPLRDEVSALRGEARAQGH

SEQ ID NO: 195481 - protein, 252 aa, Zea Mays
MPEWSIEQSRRRQPRTRRVRARRPKKRARPPAVRRDRGGKREAIDGRPGLELEGGGEVHRLRRDRDGVGEPLQRLAHPRVGAARDGLGGGDPLPAARGHLGPPVQLRGDAQREHEALVRGVVAAAAVAPAAQRGARLAEHAGLLRGLAPGRLVHGLVQLPPALGDQHAPRGALLLRADHQDLHLAVAPAHAVRDAAHHHAPARARAVPLQLPALARHHNCCHLCRSLPQITRSLWEKGDSLNGREEDEWARH

SEQ ID NO: 195482 - protein, 308 aa, Zea Mays
MEDDEGKKQHQRIIPNANGHVMIVVPDDAHAHALPASASAPPRDADGPDEESGDEEERTPAGATSSLWRAAVLALAALALAAAAYACLYAGGDDDAGAAWRLLEARRQEDGGDDEHPGGRTSFLLPLYPKPPRRGGDDWPQNSTLFPHSLAGNLFPEGLYYTAISLGSPPRPYFLDVDTGSHTTWVQCDAPPCASCAKGAHPLYRPARTADALPASDPLCEGAQHENPNQCDYEISYADGSSSMGVYVRDSMQFVGEDGERENADIVFGCGYDQQGVLLNALETTDGVLGLTNKALSLPTQLASRGGE

SEQ ID NO: 195483 - protein, 531 aa, Zea Mays
MEDDEGKKQHQRIIPNANGHVMIVVPDDAHAHALPASASAPPRDADGPDEESGDEEERTPAGATSSLWRAAVLALAALALAAAAYACLYAGGDDDAGAAWRLLEARRQEDGGDDEHPGGRTSFLLPLYPKPPRRGGDDWPQNSTLFPHSLAGNLFPEGLYYTAISLGSPPRPYFLDVDTGSHTTWVQCDAPPCASCAKGAHPLYRPARTADALPASDPLCEGAQHENPNQCDYEISYADGSSSMGVYVRDSMQFVGEDGERENADIVFGCGYDQQGVLLNALETTDGVLGLTNKALSLPTQLASRGIISNAFGHCMSTDPSGAGGYLFLGDDYIPRWGMTWVPIRDGPAEAQVKQINHGDQQLNAQGKLTQVVFDTGSTYTYFPDEALTRLISSLKEAASPRFVQDDSDKTLPFCMKSDFPVRSVEDVKHFFKPLSLQFEKRFFFSRTFNIRPEHYLVISDKGNVCLGVLNGTTIGYDSVVIVGDVSLRGKLVAYDNDKNEVGWVDFDCTNPRKRSRIPSFLRRALRNQLL

SEQ ID NO: 195484 - protein, 116 aa, Zea Mays
MKSDFPVRSVEDVKHFFKPLSLQFEKRFFFSRTFNIRPEHYLVISDKGNVCLGVLNGTTIGYDSVVIVGDVSLRGKLVAYDNDKNEVGWVDFDCTNPRKRSRIPSFLRRALRNQLL

SEQ ID NO: 195485 - protein, 117 aa, Zea Mays
MNPCRLLHIHSASLTLPCAVEPSSPCPTSSSRPWMSCRAASSICAAIASPCSLAMRPCSSLFGKMSGLVLVVCWEDRHCDADCLILGRTTHTWCSVNSSNQIASSKSRLRVDSDMVS

SEQ ID NO: 195486 - protein, 404 aa, Zea Mays
MTIEQKFAAHLVPERHQVRQATSEFKVFASVWWTGLVGDGRAPTTWEDLKVAMRDRFVPPSYHRQLRKKLMRLEQGDKSVQDYYAELQKGLQHCGTVEGHEDALCRFYLGLRRDIQDIMDYKEFNTVNKLFQFAMLAETELQGRQHRPRATFGASSTSRTHTPASSHTPSTTPASTRPPSTPAAHVGNLPLQVPTKKHNSLAPAATSSGRSSGIVCHRCHGIGHVKKDCPSQRTYIATDDGYISTSDAEGDDDDSSDVAANDDAMLGADAIVNLRSIMVQRVLSSQPESSKKQQHHNLFQTFFTIENRRAHVIIDGGSCNNLVSSDLVKKLGLTTRPRPHPYYIQWINDSGKVKVTHMVRVHFSIGMYSDYADCDVVPMEACSLLLGRPWEYDTDARHHGRSNT

SEQ ID NO: 195487 - protein, 67 aa, Zea Mays
MRPCSSLFGKMSGLVLVVCWEDRHCDADCLILGRTTHTWCSVNSSNQIASSKSRLRVDSDMVIVLCC

SEQ ID NO: 195488 - protein, 511 aa, Zea Mays
MHRLLPGVLQRFSTAAAVEEPITPSVHVNYTKLLINGNFVDSASGKTFPTLDPRTGEVIAHVAEGDAEDINRAVAAARKAFDEGPWPKMTAYERSRILLRFADLIEKHNDELAALETWDNGKPYEQAAQIEVPMVARLMRYYAGWADKIHGLIVPADGPHHVQILHEPIGVAGQIIPWNFPLLMYAWKVGPALACGNTLVLKTAEQTPLSALYISKLLHEAGLPEGVVNVVSGFGPTAGAALASHMDVDKIAFTGSTDTGKIILELAAKSNLKTVTLELGGKSPFIIMDDADVDHAVELAHFALFFNQGQCCCAGSRTFVHERVYDEFVEKAKARALKRVVGDPFRKGVEQGPQIDDEQFNKILRYIRYGVDGGATLVTGGDRLGDKGFYIQPTIFSDVQDGMKIAQEEIFGPVQSILKFKDLNEVIKRANASQYGLAAGVFTNSLDTANTLTRALRAGTVWVNCFDVFDAAIPFGGYKMSGIGREKGVDSLKNYLQVKAVVTPIKNAAWL

SEQ ID NO: 195489 - protein, 112 aa, Zea Mays
MVTTLASGTICSLCGGCLRSLELTWETCYAECFCAFFILVSFISNFKMNYTNKMTIYMSTYLTFQASEKLAHAKKWVETHIEATKMKWISVKEKLVVLKNVEPYVQKVSTRC

SEQ ID NO: 195490 - protein, 122 aa, Zea Mays
MVHKAWLPPWLAAQYAHYVTSSFVGGCLRSLELTWETCYAECFCAFFILVSFISNFKMNYTNKMTIYMSTYLTFQASEKLAHAKKWVETHIEATKMKWISVKEKLVVLKNVEPYVQKVSTRC

SEQ ID NO: 195491 - protein, 66 aa, Zea Mays
MVHKAWLPPWLAAQYAHYVASEKLAHAKKWVETHIEATKMKWISVKEKLVVLKNVEPYVQKVSTRC

SEQ ID NO: 195492 - protein, 533 aa, Zea Mays
MQNNNITGPIPAEIGKLTKLKTLDLSSNHLYGGIPASVGHLESLQYLRLNNNTLSGPFPSASANLSQLVFLDLSYNNLSGPIPGSLARTFNIVGNPLICGTNTEEDCYGTAPMPMSYKLNSSQGAPPLAKSKSHKFVAVAFGAAIGCISILSLAAGFLFWWRHRRNRQILFDVDDQHMENVGLGNVKRFQFRELQAATDKFSGKNLLGKGGFGFVYRGQLPDGTLVAVKRLKDGNVAGGEAQFQTEVEMISLALHRNLLRLYGFCTTATERLLVYPYMSNGSVASRLKGKPPLDWATRRRIALGAGRGLLYLHEQCDPKIIHRDVKAANVLLDDCCEAIVGDFGLAKLLDHRDSHVTTAVRGTVGHIAPEYLSTGQSSDKTDVFGFGILLLELVTGQTALEFGKAANQKKGAMLDWQSIVVVVVGQVKKMHQEKKLDVLVDKGLRSRYDGIEMEEMVQVALLCTQYLPGHRPKMSEVVRMLEGDGLAERWQASQRADSHKSFKVPDFTFSRCYSDLTDDSSLLVQAVELSGPR

SEQ ID NO: 195493 - protein, 481 aa, Zea Mays
MQNNNITGPIPAEIGKLTKLKTLDLSSNHLYGGIPASVGHLESLQYLRLNNNTLSGPFPSASANLSQLVFLDLSYNNLSGPIPGSLARTFNIVGNPLICGTNTEEDCYGTAPMPMSYKLNSSQGAPPLAKSKSHKFVAVAFGAAIGCISILSLAAGFLFWWRHRRNRQILFDVDDQHMENVGLGNVKRFQFRELQAATDKFSGKNLLGKGGFGFVYRGQLPDGTLVAVKRLKDGNVAGGEAQFQTEVEMISLALHRNLLRLYGFCTTATERLLVYPYMSNGSVASRLKGKPPLDWATRRRIALGAGRGLLYLHEQCDPKIIHRDVKAANVLLDDCCEAIVGDFGLAKLLDHRDSHVTTAVRGTVGHIAPEYLSTGQSSDKTDVFGFGILLLELVTGQTALEFGKAANQKKGAMLDWHCCCCCWSGEEDAPGEEAGRSGGQGAEEQVRRDRDGGDGAGGVAVHAVPPRPPAEDVGGGPDAGR

SEQ ID NO: 195494 - protein, 395 aa, Zea Mays
MDYNFDTSVLDEDVAGRGGREGSCPPAWARACDGCRAAPSVVYCHADTAYLCASCNSRVHAANRVASRHERVRVCEACECAPAVLACRADAAALCAACDAQVHSANPLAGRHQRVPVLPLPAAAVPAASVLAEAAATAAAVAGDKDEEVDSWLLLTKDPDDDDKNHNCSSNNNNISSNTSTFYADVDEYFDLVGYSSYCDNHINSNTKQYGMQEQQLLLHKEFGDKEGSEYVVPSQVGQQQSGYHRVIGTEQAASMTPGVSAYTDSISNSISFSSSMEVGIVPDNMATTDMPSSGILLTPAGAISLFSSGPPLQMPLHLASMDREARVLRYREKKKSRKFEKTIRYATRKTYAEARPRIKGRFAKRSSDMDVEVDQMFSAAALSSDGSYGTVPWF

SEQ ID NO: 195495 - protein, 56 aa, Zea Mays
MRIGIGAVQIFVGGRTALVLADSGDFSWKISDNQYDNHVEICHTFPTSTYALDSEL

SEQ ID NO: 195496 - protein, 735 aa, Zea Mays
MNPSMPPPPPRNPNSFSSSASMPPSPLPNPSPPTARPEAASEPDLSSAEMEAKAAEAEGGAVPSPSVSGSSAKEAPNSSGASSGNNVMEEAAASPVERQRARAPYAIPEWSTAPSQPFFLEVLKDGTIVDQLDVSKKGAYMFGRIDLCDFVLEHPTISRFHAVLQFRNDGKVFLFDLGSTHGSFINKNLIKKKLYTEIHVGDVIRFGQSSRLYIFQGPSELMPPEKDLQKLRDARIQQDMLDREASILRAKTQAALAEGISWGMTDDAIEESAEDDADEITWQTYKGQLTDRQEKTRSKIVKRMEKIANMKKEIDAIRVKDISQGGLTQGQQTQIARNEQRMSQIMEELDNLEETLNDSIRESIGARSGKAKRGSYKASLEEEDDVLSDDDEFYDRTKKKSTQKSSEQQSVETADSLLEKKDFITNDIESKTKLLEEEKHKLSQSDTPDLRDDLDAYMSGLSSQLVHDKIARIQKELSDLQDELDRVVYLLKIADPTGEAARKRDLKPREAKPPTSNDNPRLESKKQNKIGKATAEEKPKDSSSEVGTDKPAKLQTDISKNQEDGSKPAFAMPKPQWLGDKRIIKPEENLINEEKSDAEEPDNFVDYKDRKIILSSGSEKKLEEAAPGLILRKRKSADESVASEANSSSVESEASVADAVALLLKHKRGLQTSEEMENETEPYSSKTEGKKSKQKRVLGPARPDFLEARQDSETWVPPEGQTGDGRTALNDRLGY

SEQ ID NO: 195497 - protein, 514 aa, Zea Mays
MPPEKDLQKLRDARIQQDMLDREASILRAKTQAALAEGISWGMTDDAIEESAEDDADEITWQTYKGQLTDRQEKTRSKIVKRMEKIANMKKEIDAIRVKDISQGGLTQGQQTQIARNEQRMSQIMEELDNLEETLNDSIRESIGARSGKAKRGSYKASLEEEDDVLSDDDEFYDRTKKKSTQKSSEQQSVETADSLLEKKDFITNDIESKTKLLEEEKHKLSQSDTPDLRDDLDAYMSGLSSQLVHDKIARIQKELSDLQDELDRVVYLLKIADPTGEAARKRDLKPREAKPPTSNDNPRLESKKQNKIGKATAEEKPKDSSSEVGTDKPAKLQTDISKNQEDGSKPAFAMPKPQWLGDKRIIKPEENLINEEKSDAEEPDNFVDYKDRKIILSSGSEKKLEEAAPGLILRKRKSADESVASEANSSSVESEASVADAVALLLKHKRGLQTSEEMENETEPYSSKTEGKKSKQKRVLGPARPDFLEARQDSETWVPPEGQTGDGRTALNDRLGY

SEQ ID NO: 195498 - protein, 572 aa, Zea Mays
MLFRNDGKVFLFDLGSTHGSFINKNLIKKKLYTEIHVGDVIRFGQSSRLYIFQGPSELMPPEKDLQKLRDARIQQDMLDREASILRAKTQAALAEGISWGMTDDAIEESAEDDADEITWQTYKGQLTDRQEKTRSKIVKRMEKIANMKKEIDAIRVKDISQGGLTQGQQTQIARNEQRMSQIMEELDNLEETLNDSIRESIGARSGKAKRGSYKASLEEEDDVLSDDDEFYDRTKKKSTQKSSEQQSVETADSLLEKKDFITNDIESKTKLLEEEKHKLSQSDTPDLRDDLDAYMSGLSSQLVHDKIARIQKELSDLQDELDRVVYLLKIADPTGEAARKRDLKPREAKPPTSNDNPRLESKKQNKIGKATAEEKPKDSSSEVGTDKPAKLQTDISKNQEDGSKPAFAMPKPQWLGDKRIIKPEENLINEEKSDAEEPDNFVDYKDRKIILSSGSEKKLEEAAPGLILRKRKSADESVASEANSSSVESEASVADAVALLLKHKRGLQTSEEMENETEPYSSKTEGKKSKQKRVLGPARPDFLEARQDSETWVPPEGQTGDGRTALNDRLGY

SEQ ID NO: 195499 - protein, 496 aa, Zea Mays
MLDREASILRAKTQAALAEGISWGMTDDAIEESAEDDADEITWQTYKGQLTDRQEKTRSKIVKRMEKIANMKKEIDAIRVKDISQGGLTQGQQTQIARNEQRMSQIMEELDNLEETLNDSIRESIGARSGKAKRGSYKASLEEEDDVLSDDDEFYDRTKKKSTQKSSEQQSVETADSLLEKKDFITNDIESKTKLLEEEKHKLSQSDTPDLRDDLDAYMSGLSSQLVHDKIARIQKELSDLQDELDRVVYLLKIADPTGEAARKRDLKPREAKPPTSNDNPRLESKKQNKIGKATAEEKPKDSSSEVGTDKPAKLQTDISKNQEDGSKPAFAMPKPQWLGDKRIIKPEENLINEEKSDAEEPDNFVDYKDRKIILSSGSEKKLEEAAPGLILRKRKSADESVASEANSSSVESEASVADAVALLLKHKRGLQTSEEMENETEPYSSKTEGKKSKQKRVLGPARPDFLEARQDSETWVPPEGQTGDGRTALNDRLGY

SEQ ID NO: 195500 - protein, 548 aa, Zea Mays
MLIKKKLYTEIHVGDVIRFGQSSRLYIFQGPSELMPPEKDLQKLRDARIQQDMLDREASILRAKTQAALAEGISWGMTDDAIEESAEDDADEITWQTYKGQLTDRQEKTRSKIVKRMEKIANMKKEIDAIRVKDISQGGLTQGQQTQIARNEQRMSQIMEELDNLEETLNDSIRESIGARSGKAKRGSYKASLEEEDDVLSDDDEFYDRTKKKSTQKSSEQQSVETADSLLEKKDFITNDIESKTKLLEEEKHKLSQSDTPDLRDDLDAYMSGLSSQLVHDKIARIQKELSDLQDELDRVVYLLKIADPTGEAARKRDLKPREAKPPTSNDNPRLESKKQNKIGKATAEEKPKDSSSEVGTDKPAKLQTDISKNQEDGSKPAFAMPKPQWLGDKRIIKPEENLINEEKSDAEEPDNFVDYKDRKIILSSGSEKKLEEAAPGLILRKRKSADESVASEANSSSVESEASVADAVALLLKHKRGLQTSEEMENETEPYSSKTEGKKSKQKRVLGPARPDFLEARQDSETWVPPEGQTGDGRTALNDRLGY

SEQ ID NO: 195501 - protein, 595 aa, Zea Mays
MFGRIDLCDFVLEHPTISRFHAVLQFRNDGKVFLFDLGSTHGSFINKNLIKKKLYTEIHVGDVIRFGQSSRLYIFQGPSELMPPEKDLQKLRDARIQQDMLDREASILRAKTQAALAEGISWGMTDDAIEESAEDDADEITWQTYKGQLTDRQEKTRSKIVKRMEKIANMKKEIDAIRVKDISQGGLTQGQQTQIARNEQRMSQIMEELDNLEETLNDSIRESIGARSGKAKRGSYKASLEEEDDVLSDDDEFYDRTKKKSTQKSSEQQSVETADSLLEKKDFITNDIESKTKLLEEEKHKLSQSDTPDLRDDLDAYMSGLSSQLVHDKIARIQKELSDLQDELDRVVYLLKIADPTGEAARKRDLKPREAKPPTSNDNPRLESKKQNKIGKATAEEKPKDSSSEVGTDKPAKLQTDISKNQEDGSKPAFAMPKPQWLGDKRIIKPEENLINEEKSDAEEPDNFVDYKDRKIILSSGSEKKLEEAAPGLILRKRKSADESVASEANSSSVESEASVADAVALLLKHKRGLQTSEEMENETEPYSSKTEGKKSKQKRVLGPARPDFLEARQDSETWVPPEGQTGDGRTALNDRLGY

SEQ ID NO: 195502 - protein, 1108 aa, Zea Mays
MALQLRRFLPHGYGQRHRAVTHVLSPPPPLAMLQFEVFQRYSSAPWPLSPFRPCEMCGVAFRSNSTRKMCSRNIFGVASQPKSSTFFTTGLSGNRSSVCFRARDSRGIALKTNNIVNSRPFSTIYSKKLRFLIKNKTSCNNLNVRREDGSVAHSLFCRSEKRQSTVATCSTIADEASTSTSNSSKSVTDSKTDTAKMRRSRGSKKEVDGVMKDKEVHTKKKRISSRTCIAATKTTESSSAKQENKKTDNCKLKKGTDSPKEKKVNNRSKSKAKVSASSVSSEAEICMKSSIDGSGIEKKPLVPLYPPRAKSVVVVESATKAKVIQNYLGDMYEVLPSYGHVRDLAGRSKSVRPNDDFSMVWEVPAAAWTHLKSIKVALKGAENLILASDPDREGEAIAWHIKEMLEQQGALGCDVTVARVVFHEITENAIKKALMSPRYIDMDLVNAYLARRSLDYVIGFGISPLLWRKLPGCQSAGRVQSAALALVCDRESEIEQFKPQEYWTVRADFKMQFADLSNGTCIPFHIKHLNSKKLGQLSIPSQEEAQAIEKRIHSSKFEVLGVKRSKIHKNPPMPYITSSLQQDAANKLHFTAGYTMKIAQKLYEGINLSSEETTGLITYIRTDGFHISDGAAEDIRSLVKERYGQKYVLEDTRKYLKKVKNAQEAHEAIRPTSIRRLPSSLVGILDDDSLKLYTLIWKRTMACQMEASRTQMIQVDVGTPEGEMIFHSAASKLDFKGYQSVYEDTEGDSVHEDNFEALSKLMVKDLVSPVNVHLGQHFTKPPSRYSEGALIKKLEELGIGRPSTYASIMKVLQDRKYVTAKSRVLHPEFRGRMVSAFLLHHFSEVADYSFTANMETELDNVSAGLTEWKGLLKGYWERFSKYCADASNLDGRKVERMLEEKFGPILFPNVDTDNRICPSCSEGTLRFKVSRYGEGYFIGCDRHPKCKYIARSLSQQEDETEPTEECQKTFTPRLLGVMPDSDEKVFLKQGPYGHYVQIGEDKKGLFPKRASLSKVKDIDSVTLEDAIELLQYPKILGKHPEDDYPVLITHSKVGYNIKHRRSLALVPKSVDPKKMTLERALKLLSGKSVRRIGRPKGKVENKEPMEWH

SEQ ID NO: 195503 - protein, 894 aa, Zea Mays
MALQLRRFLPHGYGQRHRAVTHVLSPPPPLAMLQFEVFQRYSSAPWPLSPFRPCEMCGVAFRSNSTRKMCSRNIFGVASQPKSSTFFTTGLSGNRSSVCFRARDSRGIALKTNNIVNSRPFSTIYSKKLRFLIKNKTSCNNLNVRREDGSVAHSLFCRSEKRQSTVATCSTIADEASTSTSNSSKSVTDSKTDTAKMRRSRGSKKEVDGVMKDKEVHTKKKRISSRTCIAATKTTESSSAKQENKKTDNCKLKKGTDSPKEKKVNNRSKSKAKVSASSVSSEAEICMKSSIDGSGIEKKPLVPLYPPRAKSVVVVESATKAKVIQNYLGDMYEVLPSYGHVRDLAGRSKSVRPNDDFSMVWEVPAAAWTHLKSIKVALKGAENLILASDPDREGEAIAWHIKEMLEQQGALGCDVTVARVVFHEITENAIKKALMSPRYIDMDLVNAYLARRSLDYVIGFGISPLLWRKLPGCQSAGRVQSAALALVCDRESEIEQFKPQEYWTVRADFKMQFADLSNGTCIPFHIKHLNSKKLGQLSIPSQEEAQAIEKRIHSSKFEVLGVKRSKIHKNPPMPYITSSLQQDAANKLHFTAGYTMKIAQKLYEGINLSSEETTGLITYIRTDGFHISDGAAEDIRSLVKERYGQKYVLEDTRKYLKKVKNAQEAHEAIRPTSIRRLPSSLVGILDDDSLKLYTLIWKRTMACQMEASRTQMIQVDVGTPEGEMIFHSAASKLDFKGYQSVYEDTEGDSVHEDNFEALSKLMVKDLVSPVNVHLGQHFTKPPSRYSEGALIKKLEELGIGRPSTYASIMKVLQDRKYVTAKSRVLHPEFRGRMVSAFLLHHFSEVADYSFTANMETELDNVSAGLTEWKGLLKGYWERFSKYCADASNLDGRKR

SEQ ID NO: 195504 - protein, 868 aa, Zea Mays
MALQLRRFLPHGYGQRHRAVTHVLSPPPPLAMLQFEVFQRYSSAPWPLSPFRPCEMCGVAFRSNSTRKMCSRNIFGVASQPKSSTFFTTGLSGNRSSVCFRARDSRGIALKTNNIVNSRPFSTIYSKKLRFLIKNKTSCNNLNVRREDGSVAHSLFCRSEKRQSTVATCSTIADEASTSTSNSSKSVTDSKTDTAKMRRSRGSKKEVDGVMKDKEVHTKKKRISSRTCIAATKTTESSSAKQENKKTDNCKLKKGTDSPKEKKVNNRSKSKAKVSASSVSSEAEICMKSSIDGSGIEKKPLVPLYPPRAKSVVVVESATKAKVIQNYLGDMYEVLPSYGHVRDLAGRSKSVRPNDDFSMVWEVPAAAWTHLKSIKVALKGAENLILASDPDREGEAIAWHIKEMLEQQGALGCDVTVARVVFHEITENAIKKALMSPRYIDMDLVNAYLARRSLDYVIGFGISPLLWRKLPGCQSAGRVQSAALALVCDRESEIEQFKPQEYWTIAQKLYEGINLSSEETTGLITYIRTDGFHISDGAAEDIRSLVKERYGQKYVLEDTRKYLKKVKNAQEAHEAIRPTSIRRLPSSLVGILDDDSLKLYTLIWKRTMACQMEASRTQMIQVDVGTPEGEMIFHSAASKLDFKGYQSVYEDTEGDSVHEDNFEALSKLMVKDLVSPVNVHLGQHFTKPPSRYSEGALIKKLEELGIGRPSTYASIMKVLQDRKYVTAKSRVLHPEFRGRMVSAFLLHHFSEVADYSFTANMETELDNVSAGLTEWKGLLKGYWERFSKYCADASNLDGRKVERMLEEKFGPILFPNVDTDNRICPRYIARSLSQQEDETEPTEECQKTFTPRLLGVMPDSDEKDWCCQ

SEQ ID NO: 195505 - protein, 896 aa, Zea Mays
MALQLRRFLPHGYGQRHRAVTHVLSPPPPLAMLQFEVFQRYSSAPWPLSPFRPCEMCGVAFRSNSTRKMCSRNIFGVASQPKSSTFFTTGLSGNRSSVCFRARDSRGIALKTNNIVNSRPFSTIYSKKLRFLIKNKTSCNNLNVRREDGSVAHSLFCRSEKRQSTVATCSTIADEASTSTSNSSKSVTDSKTDTAKMRRSRGSKKEVDGVMKDKEVHTKKKRISSRTCIAATKTTESSSAKQENKKTDNCKLKKGTDSPKEKKVNNRSKSKAKVSASSVSSEAEICMKSSIDGSGIEKKPLVPLYPPRAKSVVVVESATKAKVIQNYLGDMYEVLPSYGHVRDLAGRSKSVRPNDDFSMVWEVPAAAWTHLKSIKVALKGAENLILASDPDREGEAIAWHIKEMLEQQGALGCDVTVARVVFHEITENAIKKALMSPRYIDMDLVNAYLARRSLDYVIGFGISPLLWRKLPGCQSAGRVQSAALALVCDRESEIEQFKPQEYWTIAQKLYEGINLSSEETTGLITYIRTDGFHISDGAAEDIRSLVKERYGQKYVLEDTRKYLKKVKNAQEAHEAIRPTSIRRLPSSLVGILDDDSLKLYTLIWKRTMACQMEASRTQMIQVDVGTPEGEMIFHSAASKLDFKGYQSVYEDTEGDSVHEDNFEALSKLMVKDLVSPVNVHLGQHFTKPPSRYSEGALIKKLEELGIGRPSTYASIMKVLQDRKYVTAKSRVLHPEFRGRMVSAFLLHHFSEVADYSFTANMETELDNVSAGLTEWKGLLKGYWERFSKYCADASNLDGRKVERMLEEKFGPILFPNVDTDNRICPSCSEGTLRFKVSRYGEGYFIGCDRHPKCKYIARSLSQQEDETEPTEECQKTFTPRLLGVMPDSDEKDWCCQ

SEQ ID NO: 195506 - protein, 1015 aa, Zea Mays
MALQLRRFLPHGYGQRHRAVTHVLSPPPPLAMLQFEVFQRYSSAPWPLSPFRPCEMCGVAFRSNSTRKMCSRNIFGVASQPKSSTFFTTGLSGNRSSVCFRARDSRGIALKTNNIVNSRPFSTIYSKKLRFLIKNKTSCNNLNVRREDGSVAHSLFCRSEKRQSTVATCSTIADEASTSTSNSSKSVTDSKTDTAKMRRSRGSKKEVDGVMKDKEVHTKKKRISSRTCIAATKTTESSSAKQENKKTDNCKLKKGTDSPKEKKVNNRSKSKAKVSASSVSSEAEICMKSSIDGSGIEKKPLVPLYPPRAKSVVVVESATKAKVIQNYLGDMYEVLPSYGHVRDLAGRSKSVRPNDDFSMVWEVPAAAWTHLKSIKVALKGAENLILASDPDREGEAIAWHIKEMLEQQGALGCDVTVARVVFHEITENAIKKALMSPRYIDMDLVNAYLARRSLDYVIGFGISPLLWRKLPGCQSAGRVQSAALALVCDRESEIEQFKPQEYWTIAQKLYEGINLSSEETTGLITYIRTDGFHISDGAAEDIRSLVKERYGQKYVLEDTRKYLKKVKNAQEAHEAIRPTSIRRLPSSLVGILDDDSLKLYTLIWKRTMACQMEASRTQMIQVDVGTPEGEMIFHSAASKLDFKGYQSVYEDTEGDSVHEDNFEALSKLMVKDLVSPVNVHLGQHFTKPPSRYSEGALIKKLEELGIGRPSTYASIMKVLQDRKYVTAKSRVLHPEFRGRMVSAFLLHHFSEVADYSFTANMETELDNVSAGLTEWKGLLKGYWERFSKYCADASNLDGRKVERMLEEKFGPILFPNVDTDNRICPSCSEGTLRFKVSRYGEGYFIGCDRHPKCKYIARSLSQQEDETEPTEECQKTFTPRLLGVMPDSDEKVFLKQGPYGHYVQIGEDKKGLFPKRASLSKVKDIDSVTLEDAIELLQYPKILGKHPEDDYPVLITHSKVGYNIKHRRSLALVPKSVDPKKMTLERALKLLSGKSVRRIGRPKGKVENKEPMEWH

SEQ ID NO: 195507 - protein, 642 aa, Zea Mays
MALQLRRFLPHGYGQRHRAVTHVLSPPPPLAMLQFEVFQRYSSAPWPLSPFRPCEMCGVAFRSNSTRKMCSRNIFGVASQPKSSTFFTTGLSGNRSSVCFRARDSRGIALKTNNIVNSRPFSTIYSKKLRFLIKNKTSCNNLNVRREDGSVAHSLFCRSEKRQSTVATCSTIADEASTSTSNSSKSVTDSKTDTAKMRRSRGSKKEVDGVMKDKEVHTKKKRISSRTCIAATKTTESSSAKQENKKTDNCKLKKGTDSPKEKKVNNRSKSKAKVSASSVSSEAEICMKSSIDGSGIEKKPLVPLYPPRAKSVVVVESATKAKVIQNYLGDMYEVLPSYGHVRDLAGRSKSVRPNDDFSMVWEVPAAAWTHLKSIKVALKGAENLILASDPDREGEAIAWHIKEMLEQQGALGCDVTVARVVFHEITENAIKKALMSPRYIDMDLVNAYLARRSLDYVIGFGISPLLWRKLPGCQSAGRVQSAALALVCDRESEIEQFKPQEYWTVRADFKMQFADLSNGTCIPFHIKHLNSKKLGQLSIPSQEEAQAIEKRIHSSKFEVLGVKRSKIHKNPPMPYITSSLQQDAANKLHFTAGYTMKIAQKLYEGINLSSEETTGLITYIRTDGFHISDGAAEDIRSLVKER

SEQ ID NO: 195508 - protein, 989 aa, Zea Mays
MALQLRRFLPHGYGQRHRAVTHVLSPPPPLAMLQFEVFQRYSSAPWPLSPFRPCEMCGVAFRSNSTRKMCSRNIFGVASQPKSSTFFTTGLSGNRSSVCFRARDSRGIALKTNNIVNSRPFSTIYSKKLRFLIKNKTSCNNLNVRREDGSVAHSLFCRSEKRQSTVATCSTIADEASTSTSNSSKSVTDSKTDTAKMRRSRGSKKEVDGVMKDKEVHTKKKRISSRTCIAATKTTESSSAKQENKKTDNCKLKKGTDSPKEKKVNNRSKSKAKVSASSVSSEAEICMKSSIDGSGIEKKPLVPLYPPRAKSVVVVESATKAKVIQNYLGDMYEVLPSYGHVRDLAGRSKSVRPNDDFSMVWEVPAAAWTHLKSIKVALKGAENLILASDPDREGEAIAWHIKEMLEQQGALGCDVTVARVVFHEITENAIKKALMSPRYIDMDLVNAYLARRSLDYVIGFGISPLLWRKLPGCQSAGRVQSAALALVCDRESEIEQFKPQEYWTVRADFKMQFADLSNGTCIPFHIKHLNSKKLGQLSIPSQEEAQAIEKRIHSSKFEVLGVKRSKIHKNPPMPYITSSLQQDAANKLHFTAGYTMKIAQKLYEGINLSSEETTGLITYIRTDGFHISDGAAEDIRSLVKERYGQKYVLEDTRKYLKKVKNAQEAHEAIRPTSIRRLPSSLVGILDDDSLKLYTLIWKRTMACQMEASRTQMIQVDVGTPEGEMIFHSAASKLDFKGYQSVYEDTEGDSVHEDNFEALSKLMVKDLVSPVNVHLGQHFTKPPSRYSEGALIKKLEELGIGRPSTYASIMKVLQDRKYVTAKSRVLHPEFRGRMVSAFLLHHFSEVADYSFTANMETELDNVSAGLTEWKGLLKGYWERFSKYCADASNLDGRKVERMLEEKFGPILFPNVDTDNRICPSCSEGTLRFKVSRYGEGYFIGCDRHPKCKYIARSLSQQEDETEPTEECQKTFTPRLLGVMPDSDEKDWCCQ

SEQ ID NO: 195509 - protein, 961 aa, Zea Mays
MALQLRRFLPHGYGQRHRAVTHVLSPPPPLAMLQFEVFQRYSSAPWPLSPFRPCEMCGVAFRSNSTRKMCSRNIFGVASQPKSSTFFTTGLSGNRSSVCFRARDSRGIALKTNNIVNSRPFSTIYSKKLRFLIKNKTSCNNLNVRREDGSVAHSLFCRSEKRQSTVATCSTIADEASTSTSNSSKSVTDSKTDTAKMRRSRGSKKEVDGVMKDKEVHTKKKRISSRTCIAATKTTESSSAKQENKKTDNCKLKKGTDSPKEKKVNNRSKSKAKVSASSVSSEAEICMKSSIDGSGIEKKPLVPLYPPRAKSVVVVESATKAKVIQNYLGDMYEVLPSYGHVRDLAGRSKSVRPNDDFSMVWEVPAAAWTHLKSIKVALKGAENLILASDPDREGEAIAWHIKEMLEQQGALGCDVTVARVVFHEITENAIKKALMSPRYIDMDLVNAYLARRSLDYVIGFGISPLLWRKLPGCQSAGRVQSAALALVCDRESEIEQFKPQEYWTVRADFKMQFADLSNGTCIPFHIKHLNSKKLGQLSIPSQEEAQAIEKRIHSSKFEVLGVKRSKIHKNPPMPYITSSLQQDAANKLHFTAGYTMKIAQKLYEGINLSSEETTGLITYIRTDGFHISDGAAEDIRSLVKERYGQKYVLEDTRKYLKKVKNAQEAHEAIRPTSIRRLPSSLVGILDDDSLKLYTLIWKRTMACQMEASRTQMIQVDVGTPEGEMIFHSAASKLDFKGYQSVYEDTEGDSVHEDNFEALSKLMVKDLVSPVNVHLGQHFTKPPSRYSEGALIKKLEELGIGRPSTYASIMKVLQDRKYVTAKSRVLHPEFRGRMVSAFLLHHFSEVADYSFTANMETELDNVSAGLTEWKGLLKGYWERFSKYCADASNLDGRKVERMLEEKFGPILFPNVDTDNRICPRYIARSLSQQEDETEPTEECQKTFTPRLLGVMPDSDEKDWCCQ

SEQ ID NO: 195510 - protein, 714 aa, Zea Mays
MALQLRRFLPHGYGQRHRAVTHVLSPPPPLAMLQFEVFQRYSSAPWPLSPFRPCEMCGVAFRSNSTRKMCSRNIFGVASQPKSSTFFTTGLSGNRSSVCFRARDSRGIALKTNNIVNSRPFSTIYSKKLRFLIKNKTSCNNLNVRREDGSVAHSLFCRSEKRQSTVATCSTIADEASTSTSNSSKSVTDSKTDTAKMRRSRGSKKEVDGVMKDKEVHTKKKRISSRTCIAATKTTESSSAKQENKKTDNCKLKKGTDSPKEKKVNNRSKSKAKVSASSVSSEAEICMKSSIDGSGIEKKPLVPLYPPRAKSVVVVESATKAKVIQNYLGDMYEVLPSYGHVRDLAGRSKSVRPNDDFSMVWEVPAAAWTHLKSIKVALKGAENLILASDPDREGEAIAWHIKEMLEQQGALGCDVTVARVVFHEITENAIKKALMSPRYIDMDLVNAYLARRSLDYVIGFGISPLLWRKLPGCQSAGRVQSAALALVCDRESEIEQFKPQEYWTVRADFKMQFADLSNGTCIPFHIKHLNSKKLGQLSIPSQEEAQAIEKRIHSSKFEVLGVKRSKIHKNPPMPYITSSLQQDAANKLHFTAGYTMKIAQKLYEGINLSSEETTGLITYIRTDGFHISDGAAEDIRSLVKERYGQKYVLEDTRKYLKKVKNAQEAHEAIRPTSIRRLPSSLVGILDDDSLKLYTLIWKRTMACQMEASRTQMAC

SEQ ID NO: 195511 - protein, 385 aa, Zea Mays
MALQLRRFLPHGYGQRHRAVTHVLSPPPPLAMLQFEVFQRYSSAPWPLSPFRPCEMCGVAFRSNSTRKMCSRNIFGVASQPKSSTFFTTGLSGNRSSVCFRARDSRGIALKTNNIVNSRPFSTIYSKKLRFLIKNKTSCNNLNVRREDGSVAHSLFCRSEKRQSTVATCSTIADEASTSTSNSSKSVTDSKTDTAKMRRSRGSKKEVDGVMKDKEVHTKKKRISSRTCIAATKTTESSSAKQENKKTDNCKLKKGTDSPKEKKVNNRSKSKAKVSASSVSSEAEICMKSSIDGSGIEKKPLVPLYPPRAKSVVVVESATKAKVIQNYLGDMYEVLPSYGHVRDLAGRSKSVRPNDDFSMVWEVPAAAWTHLKSIKVALKGITIIN

SEQ ID NO: 195512 - protein, 963 aa, Zea Mays
MALQLRRFLPHGYGQRHRAVTHVLSPPPPLAMLQFEVFQRYSSAPWPLSPFRPCEMCGVAFRSNSTRKMCSRNIFGVASQPKSSTFFTTGLSGNRSSVCFRARDSRGIALKTNNIVNSRPFSTIYSKKLRFLIKNKTSCNNLNVRREDGSVAHSLFCRSEKRQSTVATCSTIADEASTSTSNSSKSVTDSKTDTAKMRRSRGSKKEVDGVMKDKEVHTKKKRISSRTCIAATKTTESSSAKQENKKTDNCKLKKGTDSPKEKKVNNRSKSKAKVSASSVSSEAEICMKSSIDGSGIEKKPLVPLYPPRAKSVVVVESATKAKVIQNYLGDMYEVLPSYGHVRDLAGRSKSVRPNDDFSMVWEVPAAAWTHLKSIKVALKGAENLILASDPDREGEAIAWHIKEMLEQQGALGCDVTVARVVFHEITENAIKKALMSPRYIDMDLVNAYLARRSLDYVIGFGISPLLWRKLPGCQSAGRVQSAALALVCDRESEIEQFKPQEYWTVRADFKMQFADLSNGTCIPFHIKHLNSKKLGQLSIPSQEEAQAIEKRIHSSKFEVLGVKRSKIHKNPPMPYITSSLQQDAANKLHFTAGYTMKIAQKLYEGINLSSEETTGLITYIRTDGFHISDGAAEDIRSLVKERYGQKYVLEDTRKYLKKVKNAQEAHEAIRPTSIRRLPSSLVGILDDDSLKLYTLIWKRTMACQMEASRTQMIQVDVGTPEGEMIFHSAASKLDFKGYQSVYEDTEGDSVHEDNFEALSKLMVAVKDLVSPVNVHLGQHFTKPPSRYSEGALIKKLEELGIGRPSTYASIMKVLQDRKYVTAKSRVLHPEFRGRMVSAFLLHHFSEVADYSFTANMETELDNVSAGLTEWKGLLKGYWERFSKYCADASNLDGRKVERMLEEKFGPILFPNVDTDNRICPRYIARSLSQQEDETEPTEECQKTFTPRLLGVMPDSDEKDWCCQ

SEQ ID NO: 195513 - protein, 1105 aa, Zea Mays
MALQLRRFLPHGYGQRHRAVTHVLSPPPPLAMLQFEVFQRYSSAPWPLSPFRPCEMCGVAFRSNSTRKMCSRNIFGVASQPKSSTFFTTGLSGNRSSVCFRARDSRGIALKTNNIVNSRPFSTIYSKKLRFLIKNKTSCNNLNVRREDGSVAHSLFCRSEKRQSTVATCSTIADEASTSTSNSSKSVTDSKTDTAKMRRSRGSKKEVDGVMKDKEVHTKKKRISSRTCIAATKTTESSSAKQENKKTDNCKLKKGTDSPKEKKVNNRSKSKAKVSASSVSSEAEICMKSSIDGSGIEKKPLVPLYPPRAKSVVVVESATKAKVIQNYLGDMYEVLPSYGHVRDLAGRSKSVRPNDDFSMVWEVPAAAWTHLKSIKVALKGAENLILASDPDREGEAIAWHIKEMLEQQGALGCDVTVARVVFHEITENAIKKALMSPRYIDMDLVNAYLARRSLDYVIGFGISPLLWRKLPGCQSAGRVQSAALALVCDRESEIEQFKPQEYWTVRADFKMQFADLSNGTCIPFHIKHLNSKKLGQLSIPSQEEAQAIEKRIHSSKFEVLGVKRSKIHKNPPMPYITSSLQQDAANKLHFTAGYTMKIAQKLYEGINLSSEETTGLITYIRTDGFHISDGAAEDIRSLVKERYGQKYVLEDTRKYLKKVKNAQEAHEAIRPTSIRRLPSSLVGILDDDSLKLYTLIWKRTMACQMEASRTQMIQVDVGTPEGEMIFHSAASKLDFKGYQSVYEDTEGDSVHEDNFEALSKLMVKDLVSPVNVHLGQHFTKPPSRYSEGALIKKLEELGIGRPSTYASIMKDRKYVTAKSRVLHPEFRGRMVSAFLLHHFSEVADYSFTANMETELDNVSAGLTEWKGLLKGYWERFSKYCADASNLDGRKVERMLEEKFGPILFPNVDTDNRICPSCSEGTLRFKVSRYGEGYFIGCDRHPKCKYIARSLSQQEDETEPTEECQKTFTPRLLGVMPDSDEKVFLKQGPYGHYVQIGEDKKGLFPKRASLSKVKDIDSVTLEDAIELLQYPKILGKHPEDDYPVLITHSKVGYNIKHRRSLALVPKSVDPKKMTLERALKLLSGKSVRRIGRPKGKVENKEPMEWH

SEQ ID NO: 195514 - protein, 825 aa, Zea Mays
MALQLRRFLPHGYGQRHRAVTHVLSPPPPLAMLQFEVFQRYSSAPWPLSPFRPCEMCGVAFRSNSTRKMCSRNIFGVASQPKSSTFFTTGLSGNRSSVCFRARDSRGIALKTNNIVNSRPFSTIYSKKLRFLIKNKTSCNNLNVRREDGSVAHSLFCRSEKRQSTVATCSTIADEASTSTSNSSKSVTDSKTDTAKMRRSRGSKKEVDGVMKDKEVHTKKKRISSRTCIAATKTTESSSAKQENKKTDNCKLKKGTDSPKEKKVNNRSKSKAKVSASSVSSEAEICMKSSIDGSGIEKKPLVPLYPPRAKSVVVVESATKAKVIQNYLGDMYEVLPSYGHVRDLAGRSKSVRPNDDFSMVWEVPAAAWTHLKSIKVALKGAENLILASDPDREGEAIAWHIKEMLEQQGALGCDVTVARVVFHEITENAIKKALMSPRYIDMDLVNAYLARRSLDYVIGFGISPLLWRKLPGCQSAGRVQSAALALVCDRESEIEQFKPQEYWTVRADFKMQFADLSNGTCIPFHIKHLNSKKLGQLSIPSQEEAQAIEKRIHSSKFEVLGVKRSKIHKNPPMPYITSSLQQDAANKLHFTAGYTMKIAQKLYEGINLSSEETTGLITYIRTDGFHISDGAAEDIRSLVKERYGQKYVLEDTRKYLKKVKNAQEAHEAIRPTSIRRLPSSLVGILDDDSLKLYTLIWKRTMACQMEASRTQMIQVDVGTPEGEMIFHSAASKLDFKGYQSVYEDTEGDSVHEDNFEALSKLMVKDLVSPVNVHLGQHFTKPPSRYSEGALIKKLEELGIGRPSTYASIMKVLQEVRDSKKSSSTP

SEQ ID NO: 195515 - protein, 904 aa, Zea Mays
MALQLRRFLPHGYGQRHRAVTHVLSPPPPLAMLQFEVFQRYSSAPWPLSPFRPCEMCGVAFRSNSTRKMCSRNIFGVASQPKSSTFFTTGLSGNRSSVCFRARDSRGIALKTNNIVNSRPFSTIYSKKLRFLIKNKTSCNNLNVRREDGSVAHSLFCRSEKRQSTVATCSTIADEASTSTSNSSKSVTDSKTDTAKMRRSRGSKKEVDGVMKDKEVHTKKKRISSRTCIAATKTTESSSAKQENKKTDNCKLKKGTDSPKEKKVNNRSKSKAKVSASSVSSEAEICMKSSIDGSGIEKKPLVPLYPPRAKSVVVVESATKAKVIQNYLGDMYEVLPSYGHVRDLAGRSKSVRPNDDFSMVWEVPAAAWTHLKSIKVALKGAENLILASDPDREGEAIAWHIKEMLEQQGALGCDVTVARVVFHEITENAIKKALMSPRYIDMDLVNAYLARRSLDYVIGFGISPLLWRKLPGCQSAGRVQSAALALVCDRESEIEQFKPQEYWTVRADFKMQFADLSNGTCIPFHIKHLNSKKLGQLSIPSQEEAQAIEKRIHSSKFEVLGVKRSKIHKNPPMPYITSSLQQDAANKLHFTAGYTMKIAQKLYEGINLSSEETTGLITYIRTDGFHISDGAAEDIRSLVKERYGQKYVLEDTRKYLKKVKNAQEAHEAIRPTSIRRLPSSLVGILDDDSLKLYTLIWKRTMACQMEASRTQMIQVDVGTPEGEMIFHSAASKLDFKGYQSVYEDTEGDSVHEDNFEALSKLMVKDLVSPVNVHLGQHFTKPPSRYSEGALIKKLEELGIGRPSTYASIMKVLQDRKYVTAKSRVLHPEFRGRMVSAFLLHHFSEVADYSFTANMETELDNVSAGLTEWKGLLKGYWERFSKYCADASNLDGRKVHCSLIITTRR

SEQ ID NO: 195516 - protein, 413 aa, Zea Mays
MLEQQGALGCDVTVARVVFHEITENAIKKALMSPRYIDMDLVNAYLARRSLDYVIGFGISPLLWRKLPGCQSAGRVQSAALALVCDRESEIEQFKPQEYWTVRADFKMQFADLSNGTCIPFHIKHLNSKKLGQLSIPSQEEAQAIEKRIHSSKFEVLGVKRSKIHKNPPMPYITSSLQQDAANKLHFTAGYTMKIAQKLYEGINLSSEETTGLITYIRTDGFHISDGAAEDIRSLVKERYGQKYVLEDTRKYLKKVKNAQEAHEAIRPTSIRRLPSSLVGILDDDSLKLYTLIWKRTMACQMEASRTQMIQVDVGTPEGEMIFHSAASKLDFKGYQSVYEDTEGDSVHEDNFEALSKLMVKDLVSPVNVHLGQHFTKPPSRYSEGALIKKLEELGIGRPSTYASIMKVLQLYS

SEQ ID NO: 195517 - protein, 332 aa, Zea Mays
MGEGESTLGAGKKASGKTMLAADEEGMLVGAALVIGRSRKRGKEMVLPPTLHGGEMGHHRVQRRGWRGRCQRLEGRRRGWCKHTRARSRVAHGEGGTGRLGRGGTSAGIETEFDIVQVERMLEEKFGPILFPNVDTDNRICPSCSEGTLRFKVSRYGEGYFIGCDRHPKCKYIARSLSQQEDETEPTEECQKTFTPRLLGVMPDSDEKVFLKQGPYGHYVQIGEDKKGLFPKRASLSKVKDIDSVTLEDAIELLQYPKILGKHPEDDYPVLITHSKVGYNIKHRRSLALVPKSVDPKKMTLERALKLLSGKSVRRIGRPKGKVENKEPMEWH

SEQ ID NO: 195518 - protein, 69 aa, Zea Mays
MPDSDEKVFLKQGPYGHYVQIGEDKKGLFPKRASLSKPACWLGLRLVMGELGVFEGGFGRIFYKRTYAM

SEQ ID NO: 195519 - protein, 131 aa, Zea Mays
MPDSDEKVFLKQGPYGHYVQIGEDKKGLFPKRASLSKVKDIDSVTLEDAIELLQYPKILGKHPEDDYPVLITHSKVGYNIKHRRSLALVPKSVDPKKMTLERALKLLSGKSVRRIGRPKGKVENKEPMEWH

SEQ ID NO: 195520 - protein, 178 aa, Zea Mays
MRAKVADFGLSKEEVYDGRKSGLKGTYGYMDPDYMSTNKLTKKSDVYSFGIILFELITAINPQQGLMEYINLAAIGGEGRVDWDEILDKDLLVGNIPEEVRMLADVAYRCVNKNPRKRPWISEVTQAISRLRQHQLIKHDAITLPRSETRTVLRRIDYQHVELSDLTSIKELTPIRAS

SEQ ID NO: 195521 - protein, 238 aa, Zea Mays
MSNGSLARLLYGDNKRSLSWQERLQIAHDVSHGIEYLHEGAVPSVIHRDLKSDNILLDHSMRAKVADFGLSKEEVYDGRKSGLKGTYGYMDPDYMSTNKLTKKSDVYSFGIILFELITAINPQQGLMEYINLAAIGGEGRVDWDEILDKDLLVGNIPEEVRMLADVAYRCVNKNPRKRPWISEVTQAISRLRQHQLIKHDAITLPRSETRTVLRRIDYQHVELSDLTSIKELTPIRAS

SEQ ID NO: 195522 - protein, 188 aa, Zea Mays
MSADASLASSTNNGFSTNGPGSVRRCSLICSSIQACMPTPNRTIAGLLQLGRHHLLQERKANVPIVCLQNSLDERTAKFYCNFVLCPIKLILLFAGFSVNSYNIHWLSSLPLACTYVYSWGSSSQLLDEDGWIGGCMHGSSSGVSKSRACERLTGYASPAGRCAMTKLQGLTSSLLSQDAKFCGPCWF

SEQ ID NO: 195523 - protein, 290 aa, Zea Mays
MSADASLASSTNNGFSTNGPGSVRRCSLICSSIQACMPTPNRTIAGLLQLGRHHLLQERKANVPIVCLQNSLDERTAKFYCNFVLCPIKLILLFAGFSVNSYNIHWLSSLPLACTYVYSWGSSSQLLDEDGWIGGCMHGSSSGVSKSRACERLTGYASPAGRCAMTKLQGLTSSLLSQDDHSICRPPSSVLFVSLFEQLSFVDLAGSERVKKSGSAGKQLKEAQGKQLKEAQSINKSLSALADVIGSLSSDGQHIPYRNHKLTMLMSDYLMWIVYKKKVLYFNHPFVFSL

SEQ ID NO: 195524 - protein, 199 aa, Zea Mays
MHGSSSGVSKSRACERLTGYASPAGRCAMTKLQGLTSSLLSQDDHSICRPPSSVLFVSLFEQLSFVDLAGSERVKKSGSAGKQLKEAQGKQLKEAQSINKSLSALADVIGSLSSDGQHIPYRNHKLTMLMSDYLMWIVYKKKENYKVFIFHFLVSIYEQTTITNEYKNVLLCSTNAYQQFEQLRSMFFVFFLEIVSVID

SEQ ID NO: 195525 - protein, 167 aa, Zea Mays
MGGRSPKSIFTDQDEAIMQAVKQIFPNTQHCFSYWHILKNAQSHLGSLNTSQAFEIMFTKCMQGSDSETISLRIVKLTNQMYFSYDGFLILSVVLYILKQHRPWCQQHRSWNCLKTTGQNFNYRNLTAQGYLMTVIRGLENMAWIRTEAFSTDKLKCDWRKEPYLPS

SEQ ID NO: 195526 - protein, 220 aa, Zea Mays
MHDRSHKPQPAEAGNGGPAGEGGGGNVDRVLFKNLVEMVPLVESLMDRRVNPAYSRRASLVYTPAPPKKASDLKSVKLPQSVSAKKRRDPGDIAKKSTPDSNGDNGSVVPLSLSGAENMPKDEVAVLSEQINDLQKKLLEKEEALRSAESSVTEMNAAYATIDELRRLVADKEALIRSTNSQLHDAKIMLADKQASLEKLEWEVKMSNKKRMFQVTLMMI

SEQ ID NO: 195527 - protein, 56 aa, Zea Mays
MVQGGAEAPEGKELPKQPSGEGKETIERYKFSSRYGRIEKKRVKIYFYSILNSTRF

SEQ ID NO: 195528 - protein, 279 aa, Zea Mays
MAPSTRATLSLPAAPPMASRLRLVDPTPSTDADSAQNPGISGKAAGEGERVGEAKTPQPRQPDVTDLGGGSEVVYIPRFVAREKAWEWFDYLDNAIPWTRPEIRVFGRSAIQPRDVCYVADEGLTDLRYSGHQPLAHSWDEFPVLKDVLKVVHEALPGSYFNSLLLNRYKTGSDYVSWHADDEPLYGPTPEIASVTFGCERDFLLRKKPTKSQATSGSGEAGRKRLKVDAPQKPHHFLLKHGSLLVMRGYTQRDWQHSVPKRAKVSSPRINLTFRHVLR

SEQ ID NO: 195529 - protein, 186 aa, Zea Mays
MIEGWCLDTGATHHMTGRREFFIELDSSVRGSVKFGDASGVEIKGAGSVVFTVASGEHRLLTGVYYIPALRNSIISLRQLDENGSRVEVEHGVMRIWDPSRRLLAKVHRSLNRLYILNVKVAQPCCLAARQDDGAWQWHERFRHLNFKALKRLSAKEMVRGLPCLDHVEQFCDVCVLTKQRRLPFP

SEQ ID NO: 195530 - protein, 177 aa, Zea Mays
MKPSSPPMTKPRDVCYVADEGLTDLRYSGHQPLAHSWDEFPVLKDVLKVVHEALPGSYFNSLLLNRYKTGSDYVSWHADDEPLYGPTPEIASVTFGCERDFLLRKKPTKSQATSGSGEAGRKRLKVDAPQKPHHFLLKHGSLLVMRGYTQRDWQHSVPKRAKVSSPRINLTFRHVLR

SEQ ID NO: 195531 - protein, 175 aa, Zea Mays
MLSYKPGMANVAAVDQQLQDRYVFLEDIKQRLLQAQVTMKSTQGKSRREVQYNVEDWVWLRLQQQSAVGVTTAASCKLGPKFYGPYQILQHIGDVLYKLQLPANARIHEVFHVALLKKFQGDPPAAPVPLPAVLRGKMLPVLSKVVKARLNRGVWELLVQWMGRAPSDATWEQCT

SEQ ID NO: 195532 - protein, 367 aa, Zea Mays
MSLKSHVEKSNYSEKIGLKKWMDDNDIPGLVDQYSAKIYDTLWEQVDQLAVQYNLTDFTSGFRHFLISQSVDPKSKALISSRPHPYSMKLQSIATRVRNREWVEIYWELDSFFRELLITREDLVIKAKELALQGTEIAKRLLSSSTSVLGGSANLMLSITLRIVSGAAEVVNFLSQLMVFLWVLYYLITVEGGGATEQIIDLLPVSKQVKDRCVEVMDHAISSVLLATAKIAIFQGGLTWLLFKFFKVHFVYTSTVLGFISALVPILPFWLSSIFATGQLLMEGRYVLALVVTVIHLMLMDYGTTTILEDIPGYNGYLTGLSIIGGMTLFPNALEGAILGPLIMTVVIALKNLYTEFVLADGEETSS

SEQ ID NO: 195533 - protein, 52 aa, Zea Mays
MLNDLSVQLNRKLCSIFSFLFFSRFLSFSDPTHVDVGASSTRSTHLLPIVVM

SEQ ID NO: 195534 - protein, 971 aa, Zea Mays
MRLVVRVIEARGLPPTDADGTREPYAKAQLGKQRAKTKVMRKTLCPVWDEEFTFRVGDLSDNLLVSVLDEDRYFADDVLGQVKVPLTAVLDADNRTLGMQWYQLQPKSKKSKLKDCGEIHLSVSLAQNYSDETTAHWASDDHDLASNSDKSTELVKGSSFSNIPIEVRTQVSEVDETEVAKEDKSNAAPSFVNKLYQMFNSKPKDAEASAPSSSKLNDASDITEEMLSTNSEAPDKQDLDASASMSFDELLKAFGSRGEGKEMPENLSGGVVLDQVYAVAPSDLNTLLFSPSSDFLQSLAEIQGTTGLEIQQWRLENDGEILRRVVSYTKAPTKLVKAVKATEDMTYLKADREMFAVLADVSTPDVPFGNTFRVEVLTCIIPGPELPDDEKSSRLMVSWRINFVQSTMMKSMVENGAKQGLKDNYVQFSELLAKNFRPVDAKDTTYSNEVLSSVQPEQESDWKLAFRVFGNFTLFSSVFAFVYVSAHIFLTSPSIIQGLEFPGLDLPDSVGEVVVCGVLILQGQRVLNMVARFIQAKRQRGDHGVKAQGDGWLLTVALMEGTNMAATKSSDYSDPYVVFTCNGKTKTSSIKFHTLEPQWNEIFEFDAMEDPPSVMEIHVYDFDGPFDKVASLGHTEVNFLKYNNISKLADIWIPLKGKLAQACQSKLHLRIFLNNTRGTEVVKDYLDKMEKEVGKKIAMRSPHTNLAFQKIFSLPPEEFLINYFTCHLKRKMLTQGRLFLSPRIFGFYTNIFGHKTKFFLLWEDIEDILLVPATLSLMGSPSLVIILRKGRGMDAKHGAKQLDSQGRLNFHFQSFVSFNVAHKTITALWKARSLTPEQKVELVEEESETEEFQNVEGESFLGIEDAQMSGVFSSTKPFDVTTLMGIFEGGPLECRVMEKVGCMDYSVTAWEPVRADIYQRQVHYKFDKKSVRHGGEAMSTQQKSPLPNKNGWLVEEVMTLEGIPVGECFNE

SEQ ID NO: 195535 - protein, 977 aa, Zea Mays
MRLVVRVIEARGLPPTDADGTREPYAKAQLGKQRAKTKVMRKTLCPVWDEEFTFRVGDLSDNLLVSVLDEDRYFADDVLGQVKVPLTAVLDADNRTLGMQWYQLQPKSKKSKLKDCGEIHLSVSLAQNYSDETTAHWASDDHDLASNSDKSTELVKGSSFSNIPIEVRTQVSEVDETEVAKEDKSNAAPSFVNKLYQMFNSKPKDAEASAPSSSKLNDASDITEEMLSTNSEAPDKQDLDASASMSFDELLKAFGSRGEGKEMPENLSGGVVLDQVYAVAPSDLNTLLFSPSSDFLQSLAEIQGTTGLEIQQWRLENDGEILRRVVSYTKAPTKLVKAVKATEDMTYLKADREMFAVLADVSTPDVPFGNTFRVEVLTCIIPGPELPDDEKSSRLMVSWRINFVQSTMMKSMVENGAKQGLKDNYVQFSELLAKNFRPVDAKDTTYSNEVLSSVQPEQESDWKLAFRVFGNFTLFSSVFAFVYVSAHIFLTSPSIIQGLEFPGLDLPDSVGEVVVCGVLILQGQRVLNMVARFIQAKRQRGDHGVKAQGDGWLLTVALMEGTNMAATKSSDYSDPYVVFTCNGKTKTSSIKFHTLEPQWNEIFEFDAMEDPPSVMEIHVYDFDGPFDKVASLGHTEVNFLKYNNISKLADIWIPLKGKLAQACQSKLHLRIFLNNTRGTEVVKDYLDKMEKEVGKKIAMRSPHTNLAFQKIFSLPPEEFLINYFTCHLKRKMLTQGRLFLSPRIFGFYTNIFGHKTKFFLLWEDIEDILLVPATLSLMGSPSLVIILRKGRGMDAKHGAKQLDSQGRLNFHFQSFVSFNVAHKTITALWKARSLTPEQKVELVEEESETEEFQNVEGESFLGIEDAQMSGVFSSTKPFDVTTLMGIFEGGPLECRVMEKVGCMDYSVTAWEPVRADIYQRQVHYKFDKKSVRHGGEAMSTQQKSPLPNKNGWLVEEVMTLEGIPVGECFNVSSESGI

SEQ ID NO: 195536 - protein, 574 aa, Zea Mays
MQIVGEVGGNWRAIMHEQSNQCYYWNTVTGETSWDIPNGLASGAATASVPSDVGYSIEAQAHVLPHSTLEAYPSDMSVGNGTSTFANFGMACGSAQVTQDAYAYAAPIASHEPMDIDPLYLAKYGDDLLQRLNLLERLCGLNEGLELIRREIGIRISDCNALSSYGSSLLPLWMHAEVHLKQLDSSISRMEMSYHADTEHRNSKTEVVEHNAPDGADLTTPSNGEALKSEVSPGITIDENVEIDKPTSILSAQDSQGRDIAAVPPKVESDNDQDMDVEMEVDEDNVEEQAHCSSVPKKEHPPSEQLSSTNLPSFEDPTPEDNSVPPPPPEEEWIPPPPPENEPAPPDPPKEPAASYVQVDAIPQPYIAQENVGYTISGMEYYGIVGTEGTNANYYMQVSEPHVLQAQQHSYYAPVSGSGVSVSVDGTSIAPESYYTHPSVTMAASAVAAEHSVYYASSISAISSSAADIKTSSASLVSANSNSDLKGPDKLISNDASIVPLTQAVVATSGAGTPSVLGSSTQPSSSTKNLTKVTRNKKRAVGITSSLRSNKKVSSLVDKIPYVSCQEEIVDSAS

SEQ ID NO: 195537 - protein, 391 aa, Zea Mays
MGRRKERRLAAMAAAGRRVKLDLFLDLPPGEASHNDGIGGENRDQQTVVPTSSSDKKENPLALLGQYSDDEEENEETTDQPTDEAKRSPGDASAKLSSPCVDTAGNNGVARTEPSVSVGDQQEAPQAGDIKNYTQSVTENTIAPEPILQDENVKSTESVPDSSGMQIVGEVGGNWRAIMHEQSNQCYYWNTVTGETSWDIPNGLASGAATASVPSDVGYSIEAQAHVLPHSTLEAYPSDMSVGNGTSTFANFGMACGSAQVTQDAYAYAAPIASHEPMDIDPLYLAKYGDDLLQRLNLLERLCGLNEGLELIRREIGIRISDCNALSSYGSSLLPLWMHAEVHLKQLDSSISRMEMSYHADTEHRNSKTEVVEHNAPDGADLTTPSNGFTR

SEQ ID NO: 195538 - protein, 681 aa, Zea Mays
MQIVGEVGGNWRAIMHEQSNQCYYWNTVTGETSWDIPNGLASGAATASVPSDVGYSIEAQAHVLPHSTLEAYPSDMSVGNGTSTFANFGMACGSAQVTQDAYAYAAPIASHEPMDIDPLYLAKYGDDLLQRLNLLERLCGLNEGLELIRREIGIRISDCNALSSYGSSLLPLWMHAEVHLKQLDSSISRMEMSYHADTEHRNSKTEVVEHNAPDGADLTTPSNGEALKSEVSPGITIDENVEIDKPTSILSAQDSQGRDIAAVPPKVESDNDQDMDVEMEVDEDNVEEQAHCSSVPKKEHPPSEQLSSTNLPSFEDPTPEDNSVPPPPPEEEWIPPPPPENEPAPPDPPKEPAASYVQVDAIPQPYIAQENVGYTISGMEYYGIVGTEGTNANYYMQVSEPHVLQAQQHSYYAPVSGSGVSVSVDGTSIAPESYYTHPSVTMAASAVAAEHSVYYASSISAISSSAADIKTSSASLVSANSNSDLKGPDKLISNDASIVPLTQAVVATSGAGTPSVLGSSTQPSSSTKNLTKVTRNKKRAVGITSSLRSNKKVSSLVDKWKAAKEELRNEEEEEPESALEALERKRQKEIEEWRKQQIASGEAQENANFIPVRGDWRDRVKRKRAQAKNESKDDIVAASLGSSEQHKGPPDLAELSKDLPTGWQVSILDCSISDANILSCA

SEQ ID NO: 195539 - protein, 296 aa, Zea Mays
MQVSEPHVLQAQQHSYYAPVSGSGVSVSVDGTSIAPESYYTHPSVTMAASAVAAEHSVYYASSISAISSSAADIKTSSASLVSANSNSDLKGPDKLISNDASIVPLTQAVVATSGAGTPSVLGSSTQPSSSTKNLTKVTRNKKRAVGITSSLRSNKKVSSLVDKWKAAKEELRNEEEEEPESALEALERKRQKEIEEWRKQQIASGEAQENANFIPVRGDWRDRVKRKRAQAKNESKDDIVAASLGSSEQHKGPPDLAELSKDLPTGWQAYLDEYTKQVYYGNNLTSETSWERPTK

SEQ ID NO: 195540 - protein, 568 aa, Zea Mays
MGRRKERRLAAMAAAGRRVKLDLFLDLPPGEASHNDGIGGENRDQQTVVPTSSSDKKENPLALLGQYSDDEEENEETTDQPTDEAKRSPGDASAKLSSPCVDTAGNNGVARTEPSVSVGDQQEAPQAGDIKNYTQSVTENTIAPEPILQDENVKSTESVPDSSGMQIVGEVGGNWRAIMHEQSNQCYYWNTVTGETSWDIPNGLASGAATASVPSDVGYSIEAQAHVLPHSTLEAYPSDMSVGNGTSTFANFGMACGSAQVTQDAYAYAAPIASHEPMDIDPLYLAKYGDDLLQRLNLLERLCGLNEGLELIRREIGIRISDCNALSSYGSSLLPLWMHAEVHLKQLDSSISRMEMSYHADTEHRNSKTEVVEHNAPDGADLTTPSNGEALKSEVSPGITIDENVEIDKPTSILSAQDSQGRDIAAVPPKVESDNDQDMDVEMEVDEDNVEEQAHCSSVPKKEHPPSEQLSSTNLPSFEDPTPEDNSVPPPPPEEEWIPPPPPENEPAPPDPPKEPAASYVQVDAIPQPYIAQENVGYTISGMEYYGIVGTEGTNANYYMQQFRSQRS

SEQ ID NO: 195541 - protein, 348 aa, Zea Mays
MGISGCDCSLLDKKENPLALLGQYSDDEEENEETTDQPTDEAKRSPGDASAKLSSPCVDTAGNNGVARTEPSVSVGDQQEAPQAGDIKNYTQSVTENTIAPEPILQDENVKSTESVPDSSGMQIVGEVGGNWRAIMHEQSNQCYYWNTVTGETSWDIPNGLASGAATASVPSDVGYSIEAQAHVLPHSTLEAYPSDMSVGNGTSTFANFGMACGSAQVTQDAYAYAAPIASHEPMDIDPLYLAKYGDDLLQRLNLLERLCGLNEGLELIRREIGIRISDCNALSSYGSSLLPLWMHAEVHLKQLDSSISRMEMSYHADTEHRNSKTEVVEHNAPDGADLTTPSNGFTR

SEQ ID NO: 195542 - protein, 712 aa, Zea Mays
MGRRKERRLAAMAAAGRRVKLDLFLDLPPGEASHNDGIGGENRDQQTVVPTSSSDKKENPLALLGQYSDDEEENEETTDQPTDEAKRSPGDASAKLSSPCVDTAGNNGVARTEPSVSVGDQQEAPQAGDIKNYTQSVTENTIAPEPILQDENVKSTESVPDSSGMQIVGEVGGNWRAIMHEQSNQCYYWNTVTGETSWDIPNGLASGAATASVPSDVGYSIEAQAHVLPHSTLEAYPSDMSVGNGTSTFANFGMACGSAQVTQDAYAYAAPIASHEPMDIDPLYLAKYGDDLLQRLNLLERLCGLNEGLELIRREIGIRISDCNALSSYGSSLLPLWMHAEVHLKQLDSSISRMEMSYHADTEHRNSKTEVVEHNAPDGADLTTPSNGEALKSEVSPGITIDENVEIDKPTSILSAQDSQGRDIAAVPPKVESDNDQDMDVEMEVDEDNVEEQAHCSSVPKKEHPPSEQLSSTNLPSFEDPTPEDNSVPPPPPEEEWIPPPPPENEPAPPDPPKEPAASYVQVDAIPQPYIAQENVGYTISGMEYYGIVGTEGTNANYYMQVSEPHVLQAQQHSYYAPVSGSGVSVSVDGTSIAPESYYTHPSVTMAASAVAAEHSVYYASSISAISSSAADIKTSSASLVSANSNSDLKGPDKLISNDASIVPLTQAVVATSGAGTPSVLGSSTQPSSSTKNLTKVESCKRGTSQRRGRGA

SEQ ID NO: 195543 - protein, 737 aa, Zea Mays
MGISGCDCSLLDKKENPLALLGQYSDDEEENEETTDQPTDEAKRSPGDASAKLSSPCVDTAGNNGVARTEPSVSVGDQQEAPQAGDIKNYTQSVTENTIAPEPILQDENVKSTESVPDSSGMQIVGEVGGNWRAIMHEQSNQCYYWNTVTGETSWDIPNGLASGAATASVPSDVGYSIEAQAHVLPHSTLEAYPSDMSVGNGTSTFANFGMACGSAQVTQDAYAYAAPIASHEPMDIDPLYLAKYGDDLLQRLNLLERLCGLNEGLELIRREIGIRISDCNALSSYGSSLLPLWMHAEVHLKQLDSSISRMEMSYHADTEHRNSKTEVVEHNAPDGADLTTPSNGEALKSEVSPGITIDENVEIDKPTSILSAQDSQGRDIAAVPPKVESDNDQDMDVEMEVDEDNVEEQAHCSSVPKKEHPPSEQLSSTNLPSFEDPTPEDNSVPPPPPEEEWIPPPPPENEPAPPDPPKEPAASYVQVDAIPQPYIAQENVGYTISGMEYYGIVGTEGTNANYYMQVSEPHVLQAQQHSYYAPVSGSGVSVSVDGTSIAPESYYTHPSVTMAASAVAAEHSVYYASSISAISSSAADIKTSSASLVSANSNSDLKGPDKLISNDASIVPLTQAVVATSGAGTPSVLGSSTQPSSSTKNLTKVTRNKKRAVGITSSLRSNKKVSSLVDKWKAAKEELRNEEEEEPESALEALERKRQKEIEEWRKQQIASGEAQENANFIPVRGDW

SEQ ID NO: 195544 - protein, 227 aa, Zea Mays
MQIVGEVGGNWRAIMHEQSNQCYYWNTVTGETSWDIPNGLASGAATASVPSDVGYSIEAQAHVLPHSTLEAYPSDMSVGNGTSTFANFGMACGSAQVTQDAYAYAAPIASHEPMDIDPLYLAKYGDDLLQRLNLLERLCGLNEGLELIRREIGIRISDCNALSSYGSSLLPLWMHAEVHLKQLDSSISRMEMSYHADTEHRNSKTEVVEHNAPDGADLTTPSNGFTR

SEQ ID NO: 195545 - protein, 784 aa, Zea Mays
MMKRKMRKQQINPLMKLRGVLEMLVLSPCVDTAGNNGVARTEPSVSVGDQQEAPQAGDIKNYTQSVTENTIAPEPILQDENVKSTESVPDSSGMQIVGEVGGNWRAIMHEQSNQCYYWNTVTGETSWDIPNGLASGAATASVPSDVGYSIEAQAHVLPHSTLEAYPSDMSVGNGTSTFANFGMACGSAQVTQDAYAYAAPIASHEPMDIDPLYLAKYGDDLLQRLNLLERLCGLNEGLELIRREIGIRISDCNALSSYGSSLLPLWMHAEVHLKQLDSSISRMEMSYHADTEHRNSKTEVVEHNAPDGADLTTPSNGEALKSEVSPGITIDENVEIDKPTSILSAQDSQGRDIAAVPPKVESDNDQDMDVEMEVDEDNVEEQAHCSSVPKKEHPPSEQLSSTNLPSFEDPTPEDNSVPPPPPEEEWIPPPPPENEPAPPDPPKEPAASYVQVDAIPQPYIAQENVGYTISGMEYYGIVGTEGTNANYYMQVSEPHVLQAQQHSYYAPVSGSGVSVSVDGTSIAPESYYTHPSVTMAASAVAAEHSVYYASSISAISSSAADIKTSSASLVSANSNSDLKGPDKLISNDASIVPLTQAVVATSGAGTPSVLGSSTQPSSSTKNLTKVTRNKKRAVGITSSLRSNKKVSSLVDKWKAAKEELRNEEEEEPESALEALERKRQKEIEEWRKQQIASGEAQENANFIPVRGDWRDRVKRKRAQAKNESKDDIVAASLGSSEQHKGPPDLAELSKDLPTGWQAYLDEYTKQVYYGNNLTSETSWERPTK

SEQ ID NO: 195546 - protein, 429 aa, Zea Mays
MDSQGRDIAAVPPKVESDNDQDMDVEMEVDEDNVEEQAHCSSVPKKEHPPSEQLSSTNLPSFEDPTPEDNSVPPPPPEEEWIPPPPPENEPAPPDPPKEPAASYVQVDAIPQPYIAQENVGYTISGMEYYGIVGTEGTNANYYMQVSEPHVLQAQQHSYYAPVSGSGVSVSVDGTSIAPESYYTHPSVTMAASAVAAEHSVYYASSISAISSSAADIKTSSASLVSANSNSDLKGPDKLISNDASIVPLTQAVVATSGAGTPSVLGSSTQPSSSTKNLTKVTRNKKRAVGITSSLRSNKKVSSLVDKWKAAKEELRNEEEEEPESALEALERKRQKEIEEWRKQQIASGEAQENANFIPVRGDWRDRVKRKRAQAKNESKDDIVAASLGSSEQHKGPPDLAELSKDLPTGWQVSILDCSISDANILSCA

SEQ ID NO: 195547 - protein, 198 aa, Zea Mays
MEGAVTENAAVPVRAAAPEAAVHSDQHVESGAMVEDSAASTVAPESTSDADQAIEDAAPEDGVDEDTVTNVDVSPEDMRSIIEVIADTGKFWHDWRFLKSVLSIQLKQVLDEYFEVEMVSQNDGQLRSFSELFSRLNGALERFEEGPPFTLQRLCEILLDPKGTYTKLPKLTLALEKLLMGCHVRIARKLQKFLGLLM

SEQ ID NO: 195548 - protein, 304 aa, Zea Mays
MALQPRKLAAYWILASHRRRSLPLHLLSEVLRMPQPVAFVSVQPSDGQPTPSNVLNKKMKHGGEVMFLDGAGEVAVTIGRNSQHPLSTAPPPVGTNVGDIGSWDVSTKDRLVVRNFKVWDLSKCTIILQASLVKDPVVSVNRIIWSPDGTLFGVAYSRHIVQIYSYNGGDDIRQHLELSENMSLKLDKLLSSSTNNFGHLAWPLAPCSHHYCKILSVRPVAAPYSTIINFRVEGFNLLSTSSRDEMEEVDEHEGQHGIISRKHLKEMSIMLHVKEVESPSMLYVKFKERYISRLLHYLLLIFRM

SEQ ID NO: 195549 - protein, 332 aa, Zea Mays
MAPGRSPSPSVATRNILSPQPLHPSQNYQQDDFHKTVARTLSQGSTPMSMDFHPLQQTLLNVGTNVGDIGSWDVSTKDRLVVRNFKVWDLSKCTIILQASLVKDPVVSVNRIIWSPDGTLFGVAYSRHIVQIYSYNGGDDIRQHLELSENMSLKLDKLLSSSTNNFGHLAWPLAPCSHHYCKILSVRPVAAPYSTIINFRVEGFNLLSTSSRDEMEEVDEHEGQHGIISRKHLKEMSIMLHVKEVESPSMLYVKFKERRCPRYEERAMIAARHEEQAILVECKAGSPPPCGKRKDRAKSLEGSARACTCPDTLLTKSPRGLFPYPVFILITT

SEQ ID NO: 195550 - protein, 273 aa, Zea Mays
MAPGRSPSPSVATRNILSPQPLHPSQNYQQDDFHKTVARTLSQGSTPMSMDFHPLQQTLLNVGTNVGDIGSWDVSTKDRLVVRNFKVWDLSKCTIILQASLVKDPVVSVNRIIWSPDGTLFGVAYSRHIVQIYSYNGGDDIRQHLELSENMSLKLDKLLSSSTNNFGHLAWPLAPCSHHYCKILSVRPVAAPYSTIINFRVEGFNLLSTSSRDEMEEVDEHEGQHGIISRKHLKEMSIMLHVKEVESPSMLYVKFKERYISRLLHYLLLIFRM

SEQ ID NO: 195551 - protein, 182 aa, Zea Mays
MSLKLDKLLSSSTNNFGHLAWPLAPCSHHYCKILSVRPVAAPYSTIINFRVEGFNLLSTSSRDEMEEVDEHEGQHGIISRKHLKEMSIMLHVKEVESPSMLYVKFKERRCPRYEERAMIAARHEEQAILVECKAGSPPPCGKRKDRAKSLEGSARACTCPDTLLTKSPRGLFPYPVFILITT

SEQ ID NO: 195552 - protein, 93 aa, Zea Mays
MQGSKPLPSIQPPRRPQGIPTDGPPTMLFHALGCCWKLINRLVRPSQISGGIPRFNNLVSGHALDVIIWLEASMEYSLGSTQEGNQGIQDFMH

SEQ ID NO: 195553 - protein, 97 aa, Zea Mays
MQGSKPLPSIQPPRRPQGIPTDGPPTMLFHALGCCWKLINRLVRPSQISGGIPRQAWSIRLVLLKKGIKEFRTLCTDCNSPTKERIHMLKISASVPF

SEQ ID NO: 195554 - protein, 335 aa, Zea Mays
MKRLSIPPPFLRFWHSLVLNLCIIWNCKQDMARSHSFSSANQGSEASPRPVNMDFSRRGSFSAVQPGNNLPPQSTEFNDHPSTQSPYSSPPPSQSQHPSPSQSYSSPSYQATDYPSSDIHKPSPNYSSSPYTSTDYPTNELHKPPSNYSPPPYTRTDHPSNDGYNPHSNDKPDVSAYPQAYQPPPYTIDPQHISQNYYSTKAPAAPYNYPNFQSYPSFQDSTSPSVPTEPTYQSSFYPATDGPAATSYTPASNSSAPTHYHSTADYSPQVTPPAAPPASQYKYDSSYQPEVEKIAEAHKAARFAVGALAFDDVSVAVDHLKRALDLLTNPSAEPR

SEQ ID NO: 195555 - protein, 435 aa, Zea Mays
MWRGTRMYSLLGVLLLLALAYLNWHPGHGPSAGGPGGFKLPMPWLQPRMSFVGRAGTHFVDTLTGAPIYINGWNSYWLLSARSPSLSVEMLRRGRRMGLTICRTWAFSDGGPGALQISPGRFSEPVFQMLDYVIYESRRNHVRLILCLVNNLDNFGGKAQYVQWAQAAGVNVTNSTDSFFFHPTIKGYYMEYVKAILTRRNTYSGIKYCDEPAIFAWELMNEPRCVSNSSGPYIQSWIEEMAAYIKSLDRKHLITVGTEGFYGPGRGERLGVNPGDWAASVCSDFIQNSAVKDIDFASVHAYPDSWLPKASMEEKVKYLSVWVDSHLNDSEYVLRKPVLFTEVGYLQHAEANSTVDGDILLKVVYDKLYDSAKKLQAGSGALIWQLMVEGTQMYHDDFSMVARDRPSTYKLMKEQSCRLQSLYGKEGDPTWKCSP

SEQ ID NO: 195556 - protein, 369 aa, Zea Mays
MWRGTRMYSLLGVLLLLALAYLNWHPGHGPSAGGPGGFKLPMPWLQPRMSFVGRAGTHFVDTLTGAPIYINGWNSYWLLSARSPSLSVEMLRRGRRMGLTICRTWAFSDGGPGALQISPGRFSEPVFQAILTRRNTYSGIKYCDEPAIFAWELMNEPRCVSNSSGPYIQSWIEEMAAYIKSLDRKHLITVGTEGFYGPGRGERLGVNPGDWAASVCSDFIQNSAVKDIDFASVHAYPDSWLPKASMEEKVKYLSVWVDSHLNDSEYVLRKPVLFTEVGYLQHAEANSTVDGDILLKVVYDKLYDSAKKLQAGSGALIWQLMVEGTQMYHDDFSMVARDRPSTYKLMKEQSCRLQSLYGKEGDPTWKCSP

SEQ ID NO: 195557 - protein, 240 aa, Zea Mays
MWRGTRMYSLLGVLLLLALAYLNWHPGHGPSAGGPGGFKLPMPWLQPRMSFVGRAGTHFVDTLTGAPIYINGWNSYWLLSARSPSLSVEMLRRGRRMGLTICRTWAFSDGGPGALQISPGRFSEPVFQMLDYVIYESRRNHVRLILCLVNNLDNFGGKAQYVQWAQAAGVNVTNSTDSFFFHPTIKGYYMEYVKAILTRRNTYSGIKYCDEPAIFAWELMNEPRCVSNSSVLDRRNGSIY

SEQ ID NO: 195558 - protein, 135 aa, Zea Mays
MMQKHQLETPQFHQTRFSVLQNVPRSTEKDVSFLIPHSWLPAMLDDQMSFPSLRQTRTTGCFRLHPIRDEDAKFKLCNRRSVQFDVGNMVMVTGGRNTGRVGVIKNWEKHKGIFEENIEWNSNLVVVKVWRLEFK

SEQ ID NO: 195559 - protein, 110 aa, Zea Mays
MSSSKTYTGLPVLMDLCLFGTLPLLMGNRQGENLLIDLFRHCDNHLGEKQVNNPFFHKTPSGSARQPLQLTNDVTKMMQKHQLETPQFHQTRFSVLQNVPRSTEKCHFHP

SEQ ID NO: 195560 - protein, 90 aa, Zea Mays
MDLCLFGTLPLLMGNRQGENLLIDLFRHCDNHLGEKQKTPSGSARQPLQLTNDVTKMMQKHQLETPQFHQTRFSVLQNVPRSTEKCHFHP

SEQ ID NO: 195561 - protein, 179 aa, Zea Mays
MSSSKTYTGLPVLMDLCLFGTLPLLMGNRQGENLLIDLFRHCDNHLGEKQKTPSGSARQPLQLTNDVTKMMQKHQLETPQFHQTRFSVLQNMSFPSLRQTRTTGCFRLHPIRDEDAKFKLCNRRSVQFDVGNMVMVTGGRNTGRVGVIKNWEKHKGIFEENIEWNSNLVVVKVWRLEFK

SEQ ID NO: 195562 - protein, 79 aa, Zea Mays
MSGASAQEELSMWHHLWLRHSGLRDAEGLYLASDSNKRLLIYFPFMQVKLHSVLFKGPKDDAMAMTIYQWTSWSYLPII

SEQ ID NO: 195563 - protein, 257 aa, Zea Mays
MSGASAQEELSMWHHLWLRHSGLRDAEGLYLASDSNKRLLIYFPFMQVKLHSVLFKGPKDDGLPVLMDLCLFGTLPLLMGNRQGENLLIDLFRHCDNHLGEKQKTPSGSARQPLQLTNDVTKMMQKHQLETPQFHQTRFSVLQNVPRSTEKDVSFLIPHSWLPAMLDDQMSFPSLRQTRTTGCFRLHPIRDEDAKFKLCNRRSVQFDVGNMVMVTGGRNTGRVGVIKNWEKHKGIFEENIEWNSNLVVVKVWRLEFK

SEQ ID NO: 195564 - protein, 454 aa, Zea Mays
MAAAAWWETLVVAAAADGTGGSSTTVVSICMFTTVLCLCLVAGHLLEENKWVNESITALVIGCIIGVIVFLLTKGKHSHILRFDEQLFFIYVLPPIIFNAGFQVKKKQFFHNFMTIMSFGVFGVFISGAIVSAGCYWLFPKVGFGELGAVDYLALGAIFSSTDTVCTLQVINQDETPRLYSLVFGEGVVNDATAVVLFNAIKDLDISRLKGGVVLKVIFDFLYLFATSTVLGISIGLVTAYVLKALYFGRHSTDREVALMALMAYLSYMLAELLELSGILTVFFCGIVMSHYAWHNVTESSRITTKHIFATLSFIAETFIFLYVGMDALDIDKWRTSKESFKTSIGIFGILILLILLGRVAFVFPISILSNIMSGSSERTPITFKHQVVIWWAGLMRGAVSIALAYNQFTFSGVTSDPVHATIITSTIIVVFFTTLAPDQWHAPAPVEGAVQRP

SEQ ID NO: 195565 - protein, 409 aa, Zea Mays
MAAAAWWETLVVAAAADGTGGSSTTVVSICMFTTVLCLCLVAGHLLEENKWVNESITALVIGCIIGVIVFLLTKGKHSHILRFDEQLFFIYVLPPIIFNAGFQVKKKQFFHNFMTIMSFGVFGVFISGAIVSAGCYWLFPKVGFGELGAVDYLALGAIFSSTDTVCTLQVINQDETPRLYSLVFGEGVVNDATAVVLFNAIKDLDISRLKGGVVLKVIFDFLYLFATSTVLGISIGLVTAYVLKALYFGRHSTDREVALMALMAYLSYMLAELLELSGILTVFFCGIVMSHYAWHNVTESSRITTKHIFATLSFIAETFIFLYVGMDALDIDKWRTSKESFKTSIGIFGILILLILLGRVAFVFPISILSNIMSGSSERTPITFKHQVVIWWAGLMRGAVSIALAYNQV

SEQ ID NO: 195566 - protein, 75 aa, Zea Mays
MSDGAPDCPVRYPTEDKDSFPNEAPTAPRPFGAIKGTPRRLKQEKKSSQQVHTSFGSILSLPLLCISLVCVEVKL

SEQ ID NO: 195567 - protein, 276 aa, Zea Mays
MEMVECSLVATLAPRPLPGQVRKALPRPAAFGARARLRVRSVGREEPLHPQQTAVRASGPDHGGRALGQAAVGFAAAAVVSLTGFSGDVSPLPTPPARAESLTVAFPVSKAREVNRVQRTLVETWGLIRETFVDPTFNHQDWDQKLQQTMVEIFPLKSADAAYSKISGMLSTLGDPFTRIISPKEYQSFRIGSDGNVQGVGVFINKEPSSGRLLVMDCIQGGPADRAGIHEGDELVEIDGKSVSGLDGEAAAQRLRGRVGTTVKVKLELTMKGVGV

SEQ ID NO: 195568 - protein, 269 aa, Zea Mays
MQKTQQQLAELDRREADIKRLAALSATRYVEACQELGLQGINVREELIESAKTLPSTFSKILEVLNSDPVSNAMEYYTTFVKDCHTEDKRNSDSVLPKLKDLQANPPSLHVSVYNEIKSSLGEASKSPGFTVIAGEIDSNVAAADDIDWDISVDTNEIDWDIGAVEQPGEESGDGFGSYEIIDANIELAGSENYNVGVSDKSMNKEDLASSESGICWDITADSSEEIASIQNASSVLEQSQSQMIAEDRSLLLEKEYRNNILDDLLEGR

SEQ ID NO: 195569 - protein, 428 aa, Zea Mays
MVQNVNYDIPYQRKQMQKTQQQLAELDRREADIKRLAALSATRYVEACQELGLQGINVREELIESAKTLPSTFSKILEVLNSDPVSNAMEYYTTFVKDCHTEDKANPPSLHVSVYNEIKSSLGEASKSPGFTVIAGEIDSNVAAADDIDWDISVDTNEIDWDIGAVEQPGEESGDGFGSYEIIDANIELAGSENYNVGVSDKSMNKEDLASSESGICWDITADSSEEIASIQNASSVLEQSQSQMIAEDRSLLLEKEYRNNILDDLLEVKSFLTQRLGEMRNADTSSLQHQVQAVSPFVLQQHAPDSLENMLVEISSAISLLTNQKTLDLIMILNSKRFLDRLVSSLEEKKHHEVKLREGLGDLSVKRMELQNALSSSWPKQEAAITKTRELKKLCESTLSSVFDGRPVYIIGEINTLLSSSVSQLAG

SEQ ID NO: 195570 - protein, 581 aa, Zea Mays
MQPSPTESSSYIVHYFTLVVLPDRFRPRVRRLLPPRRPRDLPAARTPRARRCTTRRRSATSPSTSPLAASRSGSWTASECRTTGGSASPVFAPASRPLSPPCRGTCTPHSSPSIQKGEWESIIKAYEKDHVFLGEAAQIMVQNVNYDIPYQRKQMQKTQQQLAELDRREADIKRLAALSATRYVEACQELGLQGINVREELIESAKTLPSTFSKILEVLNSDPVSNAMEYYTTFVKDCHTEDKRNSDSVLPKLKDLQANPPSLHVSVYNEIKSSLGEASKSPGFTVIAGEIDSNVAAADDIDWDISVDTNEIDWDIGAVEQPGEESGDGFGSYEIIDANIELAGSENYNVGVSDKSMNKEDLASSESGICWDITADSSEEIASIQNASSVLEQSQSQMIAEDRSLLLEKEYRNNILDDLLEVKSFLTQRLGEMRNADTSSLQHQVQAVSPFVLQQHAPDSLENMLVEISSAISLLTNQKTLDLIMILNSKRFLDRLVSSLEEKKHHEVKLREGLGDLSVKRMELQNALSSSWPKQEAAITKTRELKKLCESTLSSVFDGRPVYIIGEINTLLSSSVSQLAG

SEQ ID NO: 195571 - protein, 553 aa, Zea Mays
MHDPSEIRNLPIDIAFGRLQEWLVDRKRVPHDWRKRLAGIRARIAPAFSALPRNLHPSLLALDPEEIGYLEAKKIYSILLESNTESRNIFGRLTGSAGEWESIIKAYEKDHVFLGEAAQIMVQNVNYDIPYQRKQMQKTQQQLAELDRREADIKRLAALSATRYVEACQELGLQGINVREELIESAKTLPSTFSKILEVLNSDPVSNAMEYYTTFVKDCHTEDKRNSDSVLPKLKDLQANPPSLHVSVYNEIKSSLGEASKSPGFTVIAGEIDSNVAAADDIDWDISVDTNEIDWDIGAVEQPGEESGDGFGSYEIIDANIELAGSENYNVGVSDKSMNKEDLASSESGICWDITADSSEEIASIQNASSVLEQSQSQMIAEDRSLLLEKEYRNNILDDLLEVKSFLTQRLGEMRNADTSSLQHQVQAVSPFVLQQHAPDSLENMLVEISSAISLLTNQKTLDLIMILNSKRFLDRLVSSLEEKKHHEVKLREGLGDLSVKRMELQNALSSSWPKQAGRYLSCCKQSFAWCGWTDYQKQRWGQPSWTNKGVRR

SEQ ID NO: 195572 - protein, 55 aa, Zea Mays
MPLLISALPWALGDTKFTRYPLHLKILDPLIIMKDAGIIHCDLNPGKNSYSSNMS

SEQ ID NO: 195573 - protein, 89 aa, Zea Mays
MHREPFGESFPLVAADRYQAWAVTSGCGGSVRRGRREVGPVAIAGLLIGVAFPLSLRPAVAVTTRATIQAMRSRGSEESSWYLESQVTG

SEQ ID NO: 195574 - protein, 234 aa, Zea Mays
MSLFEGVIKRNDEIEDDGKRIENLVRGILAGNIFDLGSAQLAEVFAKDGMSFLASCQNLVSRPWVIDDLDAFKSKWTKKSWEKAVIFVDNSGADIILGILPFARELLRRGTKVILAANDMPSINDVTYPELVEIINKLKDADGKLSNVDASGLLVANSGNDLPVIDLSSVSPELAFMANDADLVVLEGMGRAIETNLYAQMKCDSIKIGMVKHPEVAQFLGGRLYDCVFKFNEA

SEQ ID NO: 195575 - protein, 185 aa, Zea Mays
MSFLASCQNLVSRPWVIDDLDAFKSKWTKKSWEKAVIFVDNSGADIILGILPFARELLRRGTKVILAANDMPSINDVTYPELVEIINKLKDADGKLSNVDASGLLVANSGNDLPVIDLSSVSPELAFMANDADLVVLEGMGRAIETNLYAQMKCDSIKIGMVKHPEVAQFLGGRLYDCVFKFNEA

SEQ ID NO: 195576 - protein, 303 aa, Zea Mays
MAYKKIAKMRMHCALIMYTSMLEELKKNPESHGGPPDCILLCRLRELVLRELGFRDIFKKVKDEENAKAMSLFEGVIKRNDEIEDDGKRIENLVRGILAGNIFDLGSAQLAEVFAKDGMSFLASCQNLVSRPWVIDDLDAFKSKWTKKSWEKAVIFVDNSGADIILGILPFARELLRRGTKVILAANDMPSINDVTYPELVEIINKLKDADGKLSNVDASGLLVANSGNDLPVIDLSSVSPELAFMANDADLVVLEGMGRAIETNLYAQMKCDSIKIGMVKHPEVAQFLGGRLYDCVFKFNEA

SEQ ID NO: 195577 - protein, 282 aa, Zea Mays
MHCALIMYTSMLEELKKNPESHGGPPDCILLCRLRELVLRELGFRDIFKKVKDEENAKAMSLFEGVIKRNDEIEDDGKRIENLVRGILAGNIFDLGSAQLAEVFAKDGMSFLASCQNLVSRPWVIDDLDAFKSKWTKKSWEKAVIFVDNSGADIILGILPFARELLRRGTKVILAANDMPSINDVTYPELVEIINKLKDADGKLSNVDASGLLVANSGNDLPVIDLSSVSPELAFMANDADLVVLEGMMKCDSIKIGMVKHPEVAQFLGGRLYDCVFKFNEA

SEQ ID NO: 195578 - protein, 276 aa, Zea Mays
MKFFEKFSHRNRLLCRLRELVLRELGFRDIFKKVKDEENAKAMSLFEGVIKRNDEIEDDGKRIENLVRGILAGNIFDLGSAQLAEVFAKDGMSFLASCQNLVSRPWVIDDLDAFKSKWTKKSWEKAVIFVDNSGADIILGILPFARELLRRGTKVILAANDMPSINDVTYPELVEIINKLKDADGKLSNVDASGLLVANSGNDLPVIDLSSVSPELAFMANDADLVVLEGMGRAIETNLYAQMKCDSIKIGMVKHPEVAQFLGGRLYDCVFKFNEA

SEQ ID NO: 195579 - protein, 262 aa, Zea Mays
MLGRTRDQIRTTEQVKATIGTCQALKLDALVIIGGVTSNTDAAQLAETFAQLKCPTKVVGVPVTLNGDLKNQFVETTVGFDTICKVNSQLISNACIDALSAEKYYYFIRMMGRKASHVALECALQSHPNMVILGEEVSVSKLTIFDITKQICDAVQARAEKDKYHGVVLIPEGLVESIPELYALLQEIHGLHNKGVSVENISSHLSPWASALFEFLPPFIRKQLLLHPGSDDSAQLSQIEIEKLLAQLVETEMDKRLEGRHL

SEQ ID NO: 195580 - protein, 350 aa, Zea Mays
MLGRTRDQIRTTEQVKATIGTCQALKLDALVIIGGVTSNTDAAQLAETFAQLKCPTKVVGVPVTLNGDLKNQFVETTVGFDTICKVNSQLISNACIDALSAEKYYYFIRMMGRKASHVALECALQSHPNMVILGEEVSVSKLTIFDITKQICDAVQARAEKDKYHGVVLIPEGLVESIPELYALLQEIHGLHNKGVSVENISSHLSPWASALFEFLPPFIRKQLLLHPGSDDSAQLSQIEIEKLLAQLVETEMDKRLKEGTYNGKKFNAICHFFGYQARGALPSKFDCDYGYVLGHVCYHIVAAGLNGYMATVTNLKSPVNKWKCGAAPITSMMTVKRWSRGAATSQIGC

SEQ ID NO: 195581 - protein, 267 aa, Zea Mays
MLGRTRDQIRTTEQVKATIGTCQALKLDALVIIGGVTSNTDAAQLAETFAQLKCPTKVVGVPVTLNGDLKNQFVETTVGFDTICKVNSQLISNACIDALSAEKYYYFIRMMGRKASHVALECALQSHPNMVILGEEVSVSKLTIFDITKQICDAVQARAEKDKYHGVVLIPEGLVESIPELYALLQEIHGLHNKGVSVENISSHLSPWASALFEFLPPFIRKQLLLHPGSDDSAQLSQIEIEKLLAQLVETEMDKRLVFLDMYVITS

SEQ ID NO: 195582 - protein, 410 aa, Zea Mays
MLGRTRDQIRTTEQVKATIGTCQALKLDALVIIGGVTSNTDAAQLAETFAQLKCPTKVVGVPVTLNGDLKNQFVETTVGFDTICKVNSQLISNACIDALSAEKYYYFIRMMGRKASHVALECALQSHPNMVILGEEVSVSKLTIFDITKQICDAVQARAEKDKYHGVVLIPEGLVESIPELYALLQEIHGLHNKGVSVENISSHLSPWASALFEFLPPFIRKQLLLHPGSDDSAQLSQIEIEKLLAQLVETEMDKRLVLGHVCYHIVAAGLNGYMATVTNLKSPVNKWKCGAAPITSMMTVKRWSRGAATSQIGKPAVHMASVDLKGKAYELLRQNSSSFMMEDIYRNPGPLQFEGSGADTKPISLCVEDQDYMGRIKKLQEYLEKVKSIVKPGCSQDVLKAAVFSEKIC

SEQ ID NO: 195583 - protein, 295 aa, Zea Mays
MLGRTRDQIRTTEQVKATIGTCQALKLDALVIIGGVTSNTDAAQLAETFAQLKCPTKVVGVPVTLNGDLKNQFVETTVGFDTICKVNSQLISNACIDALSAEKYYYFIRMMGRKASHVALECALQSHPNMVILGEEVSVSKLTIFDITKQICDAVQARAEKDKYHGVVLIPEGLVESIPELYALLQEIHGLHNKGVSVENISSHLSPWASALFEFLPPFIRKQLLLHPGSDDSAQLSQIEIEKLLAQLVETEMDKRLKEGTYNGKKFNAICHFFGYQARGALPSKFDCDYGYRLV

SEQ ID NO: 195584 - protein, 147 aa, Zea Mays
MERAGRRGCSGARTTRCRGRRWRWRSGWAVSTSTSFSSLRRSSSSPAAPLPYPFIDAESWRSSSCSCSRPSTTGTNGARASPGSYADTQWATSLSLCMWRTTSPWIPAGLTVCSRKPASPFMDAAVIVSIIQSISAHGSRESINFSC

SEQ ID NO: 195585 - protein, 75 aa, Zea Mays
MGQAQQPESINTTLNPELGLGFHSNLVPEPIFSHPHSRQTLLCLSTPTAAGLLPVRPHSLLWSSNLPPWTPPSPV

SEQ ID NO: 195586 - protein, 53 aa, Zea Mays
MSCCIPHSHLCAHPMFPATHIKGSCYTHQRLWSHDSISLKVNMHVSCTQMCWF

SEQ ID NO: 195587 - protein, 429 aa, Zea Mays
MAKKPVEEALLAAADEQESLSVREELKKQLWLAGPMIAGALLQNVIQMISVMYVGHLGELPLAGASMANSFATVTGLSLLLGMASALDTLCGQAFGARQYYLLGIYKQRAMFLLTLCHVRFLQTQNIVVPVMASAGAAAACHVVVCWALVYALGMGSKGAALSNSISYWVNVAVLAVYVRVSSACKETWTGFSTEAFRDALGFFRLAVPSALMVCLEMWSFELIVLLSGLLPNPKLETSVLSISLNTAAFVWMIPFGLSSAISTRVSNELGAGRPRAARLAVRVVVLLSVAEGLGVGLILVCVRYVWGHAYSNVEEVVTYVANMMLVIAVSNFFDGIQCVLSGVARGCGWQKIGACINLGAYYIVGIPSAYLIAFVLRVGGTGLWLGIICGLIVQLLLLAIITLCTNWDSEATKAKNRVFNSSSPASGT

SEQ ID NO: 195588 - protein, 76 aa, Zea Mays
MDFGLASAVTTLWTCTDVTHLVHVLLQFRLVWCGKLIRYARAVAAHYVCSVKGLCFDLFIIRGRNRAFNACWRCTM

SEQ ID NO: 195589 - protein, 191 aa, Zea Mays
MGVSQVLGLWCWSNTVAVGSGPRSFPWLDVEEGHASAVVAWLAGWRSTFGQLRLLGLLLTSCIINMQAWGLAASVCGLRGGLWLHCASVVAASCRRGGGYEDRFSGDDGAPRDGVWFCVLNWRGWRSTQLCGCCSSRCVDAPLEGLVRDVRASVTTEVACFDPGSLPNVVLGVFLGESLGDSDARGCRLPC

SEQ ID NO: 195590 - protein, 422 aa, Zea Mays
MSEGDRARERLDFEAAAEAIEKGKGKKVIDPLSVFSLPGMNEQRFVAATQPESSVVIQDEKPIYPQRQQFEWRPSPILCKRFDIVDPFMGKPMHVQRPRSKMENLIFMTESNKGTNDEVESSSRSLQHASMEALSDVESRGAATDPDFEPSSLQRPVDLYKAIFSDDSDDDADEILSNQLVDPVKTSEGANMALNRLVAEDFLESLGKELGLEVPPERPHVSSEPEKFSASRASLSSQDERITTALTKVKENQCSIDIVQVGNINEDTPLASAETLGMKYENQENRTEKIRSRPMNRQSQNHSPRSDSSSERHRSWKRRHRHIWNGTPESESGERHRSKRKESHSRHRKRRSRSPGSDTPSDTQHETKRKEKRHRRTYTSDTDSSDHEHSERYKSSSRRSSDKDRSRKRRIHHKHRRKDHVD

SEQ ID NO: 195591 - protein, 425 aa, Zea Mays
MLWRHLSSTIPLVLQLQSTLENRHPRNKRRASCRPSAIPGPIPDEFVVPTTNSIGVTLLMKMGWRQGRSIRDSHADSLYESRRNARKAFLALSGAKDGEDQDQSAEKPSLDKAVVGSVGEIPVSGNTPVYVLHPKQDFHGLGYDPFKHAPEFRDRKTLQKSRERGRKRNDVSMRGNLLISNSGHYAPGFGIGALEELDVEDEDIYASGFAYEQTEVDIEPSKTANDSNYKLDDRKRGFYLSFKIASNSEYKLERFLPPEIPDDFDAQHKFPTPVQSAEMFSDSAPLEVPPPEDTSLTLLIDGCAAMVARCGKHIEDFYKEKSKTNPQFLFLSGGAGCNYYMRKLWEHQQKHIGQRWHDSAKSKTSSDKLTAENRGKILGERPLDRTTKVHSPSLSAKEAVQLQSNLTETFVKPISLQMFFFFVCK

SEQ ID NO: 195592 - protein, 708 aa, Zea Mays
MRGNLLISNSGHYAPGFGIGALEELDVEDEDIYASGFAYEQTEVDIEPSKTANDSNYKLDDRKRGFYLSFKIASNSEYKLERFLPPEIPDDFDAQHKFPTPVQSAEMFSDSAPLEVPPPEDTSLTLLIDGCAAMVARCGKHIEDFYKEKSKTNPQFLFLSGGAGCNYYMRKLWEHQQKHIGQRWHDSAKSKTSSDKLTAENRGKILGERPLDRTTKVHSPSLSAKEAVQLQSNLTETFVKPISLDGLPEYEKPFSNDPAKQVRFEQFLRDKYKGGLRAANVTPTSTMSEGDRARERLDFEAAAEAIEKGKGKKVIDPLSVFSLPGMNEQRFVAATQPESSVVIQDEKPIYPQRQQFEWRPSPILCKRFDIVDPFMGKPMHVQRPRSKMENLIFMTESNKGTNDEVESSSRSLQHASMEALSDVESRGAATDPDFEPSSLQRPVDLYKAIFSDDSDDDADEILSNQLVDPVKTSEGANMALNRLVAEDFLESLGKELGLEVPPERPHVSSEPEKFSASRASLSSQDERITTALTKVKENQCSIDIVQVGNINEDTPLASAETLGMKYENQENRTEKIRSRPMNRQSQNHSPRSDSSSERHRSWKRRHRHIWNGTPESESGERHRSKRKESHSRHRKRRSRSPGSDTPSDTQHETKRKEKRHRRTYTSDTDSSDHEHSERYKSSSRRSSDKDRSRKRRIHHKHRRKDHVD

SEQ ID NO: 195593 - protein, 821 aa, Zea Mays
MKMGWRQGRSIRDSHADSLYESRRNARKAFLALSGAKDGEDQDQSAEKPSLDKAVVGSVGEIPVSGNTPVYVLHPKQDFHGLGYDPFKHAPEFRDRKTLQKSRERGRKRNDVSMRGNLLISNSGHYAPGFGIGALEELDVEDEDIYASGFAYEQTEVDIEPSKTANDSNYKLDDRKRGFYLSFKIASNSEYKLERFLPPEIPDDFDAQHKFPTPVQSAEMFSDSAPLEVPPPEDTSLTLLIDGCAAMVARCGKHIEDFYKEKSKTNPQFLFLSGGAGCNYYMRKLWEHQQKHIGQRWHDSAKSKTSSDKLTAENRGKILGERPLDRTTKVHSPSLSAKEAVQLQSNLTETFVKPISLDGLPEYEKPFSNDPAKQVRFEQFLRDKYKGGLRAANVTPTSTMSEGDRARERLDFEAAAEAIEKGKGKKVIDPLSVFSLPGMNEQRFVAATQPESSVVIQDEKPIYPQRQQFEWRPSPILCKRFDIVDPFMGKPMHVQRPRSKMENLIFMTESNKGTNDEVESSSRSLQHASMEALSDVESRGAATDPDFEPSSLQRPVDLYKAIFSDDSDDDADEILSNQLVDPVKTSEGANMALNRLVAEDFLESLGKELGLEVPPERPHVSSEPEKFSASRASLSSQDERITTALTKVKENQCSIDIVQVGNINEDTPLASAETLGMKYENQENRTEKIRSRPMNRQSQNHSPRSDSSSERHRSWKRRHRHIWNGTPESESGERHRSKRKESHSRHRKRRSRSPGSDTPSDTQHETKRKEKRHRRTYTSDTDSSDHEHSERYKSSSRRSSDKDRSRKRRIHHKHRRKDHVD

SEQ ID NO: 195594 - protein, 534 aa, Zea Mays
MGVDSDDEDLVVYGTPIEREEDTSARKRRAVAEAGQLRALPAWKQEVRDEEGRRRFHGAFTGGFSAGFYNTVGSKEGWTPQTFTSSRKNRAELTKQSIYNFLDEEDIKDMGGNALETSQQYDTFGFTAAEHARKQASKEQKERPSAIPGPIPDEFVVPTTNSIGVTLLMKMGWRQGRSIRDSHADSLYESRRNARKAFLALSGAKDGEDQDQSAEKPSLDKAVVGSVGEIPVSGNTPVYVLHPKQDFHGLGYDPFKHAPEFRDRKTLQKSRERGRKRNDVSMRGNLLISNSGHYAPGFGIGALEELDVEDEDIYASGFAYEQTEVDIEPSKTANDSNYKLDDRKRGFYLSFKIASNSEYKLERFLPPEIPDDFDAQHKFPTPVQSAEMFSDSAPLEVPPPEDTSLTLLIDGCAAMVARCGKHIEDFYKEKSKTNPQFLFLSGGAGCNYYMRKLWEHQQKHIGQRWHDSAKSKTSSDKLTAENRGKILGERPLDRTTKVHSPSLSAKEAVQLQSNLTETFVKPISLQMFFFFVCK

SEQ ID NO: 195595 - protein, 602 aa, Zea Mays
MFSDSAPLEVPPPEDTSLTLLIDGCAAMVARCGKHIEDFYKEKSKTNPQFLFLSGGAGCNYYMRKLWEHQQKHIGQRWHDSAKSKTSSDKLTAENRGKILGERPLDRTTKVHSPSLSAKEAVQLQSNLTETFVKPISLDGLPEYEKPFSNDPAKQVRFEQFLRDKYKGGLRAANVTPTSTMSEGDRARERLDFEAAAEAIEKGKGKKVIDPLSVFSLPGMNEQRFVAATQPESSVVIQDEKPIYPQRQQFEWRPSPILCKRFDIVDPFMGKPMHVQRPRSKMENLIFMTESNKGTNDEVESSSRSLQHASMEALSDVESRGAATDPDFEPSSLQRPVDLYKAIFSDDSDDDADEILSNQLVDPVKTSEGANMALNRLVAEDFLESLGKELGLEVPPERPHVSSEPEKFSASRASLSSQDERITTALTKVKENQCSIDIVQVGNINEDTPLASAETLGMKYENQENRTEKIRSRPMNRQSQNHSPRSDSSSERHRSWKRRHRHIWNGTPESESGERHRSKRKESHSRHRKRRSRSPGSDTPSDTQHETKRKEKRHRRTYTSDTDSSDHEHSERYKSSSRRSSDKDRSRKRRIHHKHRRKDHVD

SEQ ID NO: 195596 - protein, 1168 aa, Zea Mays
MAPTKRMEKLKLSTLLTFMRCHRGSSDDHSRIGTVGFSRVVYVNEPDMLEEEGFNYPLNEVSTTKYTLATFLPKSLFEQFRRVANFYFLVSGILALTPLAPYTAVSALAPLCVVIVATMAKEGVEDWRRKQQDHELNNRIVKVHRGSGHFEETKWKNIKVGDVIKLEKDNFFPADMILLSSSYPDGICYVETMNLDGETNLKIKQALEVTLDLQEDTKFREVRQTIKCEDPNANLYSFVGSMEWRGQQYPLSPLQLLLRDSKLRNTDYIYGAVIFTGHDTKVMQNATDPPSKRSKIEKKMDQIIYVLMSSLLMIALLGSIFFGIWTKEDVRDGGLKRWYLRPDATTIFYDPKRAALASFFHLLTALMLYSYFIPISLYISIEIVKILQALFINQDIEMYHEESDKPTHARTSNLNEELGMVDTILSDKTGTLTCNMMEFIKCSIAGTAYGKGVTEVERAMAMRKGDSLDDDIENGDYKDKKNHNSPNVKGFNFKDPRIMDGNWIHEPNKDMIRDFFRLLAICHTCIAEIDENEKVSYEAESPDEAAFVIAARELGFEFYKRSLATIIIREQDPSWNVVEKRYRKYELLNILEFSSSRRRMSVIVKEPEGRILLLSKGADSVMFKRLAPNGRKYEEETRRHINEYSDSGLRTLVLAYRVLDEKEYKEFNEKLNTAKASVPECIDKLAQAGIKIWVLTGDKMETAINIGFACSLLRQDMTQIIVTLEQPDIIALEKDGDKYKIFKASKKKVMSQIEDGIKQIPPSTKISTASFALIIDGKSIPYALEDDVKFKFLDLAINCASVICCRSSPKQKALVTRFVKQVTHKVTLAIGDGANDVGMLQEADIGVGISGAEGMQAVMASDVAVAQFRFLERLLLVHGHWCYRRISVMICYFFYKNVTFGVTLFLYEAFASFSGKPAYNDWFLSLYNVFFTSLPVIALGVFDQDVSARLCIQYPQLYQEGVQNILFSWCRILGWMLNGVMNAVLIFFFCITTFEDQVFRRDGQVAGLDALGVAMYTCIVWVVNCQMALSVNYFTIIQHIFIWGSIAVWYLFLIVYGSMNPRFSTTAYMVFIEQLAPALSFWLVTLFVVLATLVPYFTYAAIQIRFFPMFHNKIQWKRYLGKAEDPEVARQLSSRHRTSSQQRMVGISARRDGKAMQITRETEIEVQE

SEQ ID NO: 195597 - protein, 626 aa, Zea Mays
MAPTKRMEKLKLSTLLTFMRCHRGSSDDHSRIGTVGFSRVVYVNEPDMLEEEGFNYPLNEVSTTKYTLATFLPKSLFEQFRRVANFYFLVSGILALTPLAPYTAVSALAPLCVVIVATMAKEGVEDWRRKQQDHELNNRIVKVHRGSGHFEETKWKNIKVGDVIKLEKDNFFPADMILLSSSYPDGICYVETMNLDGETNLKIKQALEVTLDLQEDTKFREVRQTIKCEDPNANLYSFVGSMEWRGQQYPLSPLQLLLRDSKLRNTDYIYGAVIFTGHDTKVMQNATDPPSKRSKIEKKMDQIIYVLMSSLLMIALLGSIFFGIWTKEDVRDGGLKRWYLRPDATTIFYDPKRAALASFFHLLTALMLYSYFIPISLYISIEIVKILQALFINQDIEMYHEESDKPTHARTSNLNEELGMVDTILSDKTGTLTCNMMEFIKCSIAGTAYGKGVTEVERAMAMRKGDSLDDDIENGDYKDKKNHNSPNVKGFNFKDPRIMDGNWIHEPNKDMIRDFFRLLAICHTCIAEIDENEKVSYEAESPDEAAFVIAARELGFEFYKRSLATIIIREQDPSWNVVEKRYRKYELLNILEFSSSRRRMSVIVKEPEGRILLLSKGADRLVLYLH

SEQ ID NO: 195598 - protein, 1196 aa, Zea Mays
MAPTKRMEKLKLSTLLTFMRCHRGSSDDHSRIGTVGFSRVVYVNEPDMLEEEGFNYPLNEVSTTKYTLATFLPKSLFEQFRRVANFYFLVSGILALTPLAPYTAVSALAPLCVVIVATMAKEGVEDWRRKQQDHELNNRIVKVHRGSGHFEETKWKNIKVGDVIKLEKDNFFPADMILLSSSYPDGICYVETMNLDGETNLKIKQALEVTLDLQEDTKFREVRQTIKCEDPNANLYSFVGSMEWRGQQYPLSPLQLLLRDSKLRNTDYIYGAVIFTGHDTKVMQNATDPPSKRSKIEKKMDQIIYVLMSSLLMIALLGSIFFGIWTKEDVRDGGLKRWYLRPDATTIFYDPKRAALASFFHLLTALMLYSYFIPISLYISIEIVKILQALFINQDIEMYHEESDKPTHARTSNLNEELGMVDTILSDKTGTLTCNMMEFIKCSIAGTAYGKGVTEVERAMAMRKGDSLDDDIENGDYKDKKNHNSPNVKGFNFKDPRIMDGNWIHEPNKDMIRDFFRLLAICHTCIAEIDENEKVSYEAESPDEAAFVIAARELGFEFYKRSLATIIIREQDPSWNVVEKRKYELLNILEFSSSRRRMSVIVKEPEGRILLLSKGADRLAPNGRKYEEETRRHINEYSDSGLRTLVLAYRVLDEKEYKEFNEKLNTAKASVSADRDVKIEQAADSIEQDLILLGATAVEDKLQQGVPECIDKLAQAGIKIWVLTGDKMETAINIGFACSLLRQDMTQIIVTLEQPDIIALEKDGDKYKIFKASKKKVMSQIEDGIKQIPPSTKISTASFALIIDGKSIPYALEDDVKFKFLDLAINCASVICCRSSPKQKALVTRFVKQVTHKVTLAIGDGANDVGMLQEADIGVGISGAEGMQAVMASDVAVAQFRFLERLLLVHGHWCYRRISVMICYFFYKNVTFGVTLFLYEAFASFSGKPAYNDWFLSLYNVFFTSLPVIALGVFDQDVSARLCIQYPQLYQEGVQNILFSWCRILGWMLNGVMNAVLIFFFCITTFEDQVFRRDGQVAGLDALGVAMYTCIVWVVNCQMALSVNYFTIIQHIFIWGSIAVWYLFLIVYGSMNPRFSTTAYMVFIEQLAPALSFWLVTLFVVLATLVPYFTYAAIQIRFFPMFHNKIQWKRYLGKAEDPEVARQLSSRHRTSSQQRMVGISARRDGKAMQITRETEIEVQE

SEQ ID NO: 195599 - protein, 1004 aa, Zea Mays
MAPTKRMEKLKLSTLLTFMRCHRGSSDDHSRIGTVGFSRVVYVNEPDMLEEEGFNYPLNEVSTTKYTLATFLPKSLFEQFRRVANFYFLVSGILALTPLAPYTAVSALAPLCVVIVATMAKEGVEDWRRKQQDHELNNRIVKVHRGSGHFEETKWKNIKVGDVIKLEKDNFFPADMILLSSSYPDGICYVETMNLDGETNLKIKQALEVTLDLQEDTKFREVRQTIKCEDPNANLYSFVGSMEWRGQQYPLSPLQLLLRDSKLRNTDYIYGAVIFTGHDTKVMQNATDPPSKRSKIEKKMDQIIYVLMSSLLMIALLGSIFFGIWTKEDVRDGGLKRWYLRPDATTIFYDPKRAALASFFHLLTALMLYSYFIPISLYISIEIVKILQALFINQDIEMYHEESDKPTHARTSNLNEELGMVDTILSDKTGTLTCNMMEFIKCSIAGTAYGKGVTEVERAMAMRKGDSLDDDIENGDYKDKKNHNSPNVKGFNFKDPRIMDGNWIHEPNKDMIRDFFRLLAICHTCIAEIDENEKVSYEAESPDEAAFVIAARELGFEFYKRSLATIIIREQDPSWNVVEKRKYELLNILEFSSSRRRMSVIVKEPEGRILLLSKGADSVMFKRLAPNGRKYEEETRRHINEYSDSGLRTLVLAYRVLDEKEYKEFNEKLNTAKASVSADRDVKIEQAADSIEQDLILLGATAVEDKLQQGVPECIDKLAQAGIKIWVLTGDKMETAINIGFACSLLRQDMTQIIVTLEQPDIIALEKDGDKYKIFKHRACCSHFTYNNVNIGMPYQAFSIRDATSEEAEDAEPAAADATCVLIFVLPWTCRWGRESASFFVSCVPTTFSLIPAALQQASKKKVMSQIEDGIKQIPPSTKISTASFALIIDGKSIPYALEDDVKFKFLDLAINCASVICCRSSPKQKALVTRFVKQVTHKVTLAIGDGANDVGMLQEADIGVGISGAEGMQAVMASDVAVAQFRFLERLLLVHGHWCYRRISVMV

SEQ ID NO: 195600 - protein, 624 aa, Zea Mays
MAPTKRMEKLKLSTLLTFMRCHRGSSDDHSRIGTVGFSRVVYVNEPDMLEEEGFNYPLNEVSTTKYTLATFLPKSLFEQFRRVANFYFLVSGILALTPLAPYTAVSALAPLCVVIVATMAKEGVEDWRRKQQDHELNNRIVKVHRGSGHFEETKWKNIKVGDVIKLEKDNFFPADMILLSSSYPDGICYVETMNLDGETNLKIKQALEVTLDLQEDTKFREVRQTIKCEDPNANLYSFVGSMEWRGQQYPLSPLQLLLRDSKLRNTDYIYGAVIFTGHDTKVMQNATDPPSKRSKIEKKMDQIIYVLMSSLLMIALLGSIFFGIWTKEDVRDGGLKRWYLRPDATTIFYDPKRAALASFFHLLTALMLYSYFIPISLYISIEIVKILQALFINQDIEMYHEESDKPTHARTSNLNEELGMVDTILSDKTGTLTCNMMEFIKCSIAGTAYGKGVTEVERAMAMRKGDSLDDDIENGDYKDKKNHNSPNVKGFNFKDPRIMDGNWIHEPNKDMIRDFFRLLAICHTCIAEIDENEKVSYEAESPDEAAFVIAARELGFEFYKRSLATIIIREQDPSWNVVEKRYRKYELLNILEFSSSRRRMSVIVKEPEGRILLLSKGADRCLNA

SEQ ID NO: 195601 - protein, 714 aa, Zea Mays
MEILRALMLPVVLFKFGTWNMEHVLSSRRFPTDPNEYKLYEEIGDGVSATVYRALCVPLDILVAIKVLDLEKCNNDLDGIRREVQTMSLIDHPNLLRAYCSFTNGHQLWVVMPYMAAGSALHIMKTSFPEGFDEPVIATLLREVLKALVYLHSQGHIHRDVKAGNILIDTNGAVKLGDFGVSACMFDTGNRQRARNTFVGTPCWMAPEVMQQLHGYDYKADIWSFGITALELAHGHAPFSKYPPMKVLLMTLQNAPPGLDYERDKRFSKSFKDLVATCLVKDPRKRPSSEKLLKHSFFKHARSAEYLARSILDGLPPLGERFRELKSKEAELLLNNKLGQESKEQLSQKEYIRGISGWNFNLEDLKNAAALIDSSNGTCYLDVRENRVKDDSQEAYNGPEHIYQERLNHVASRRPEEDEIQEVEALNDAVSSSFSSRSLEALKSCFDVCGVDDPSPTATDSRAQPSVGTLPFQQLQKFEHCKSGDCNGESLERSVSVPTNLVTSGYHKHSSGSLIPEQVLSPYLSSDLERDGFRQKNLSSRNCSGPLLFRQMKDSRTHQSVAPDESSEGKIIRRRGRFQVTSDSISEKVATSSCNSSRINLPIDAARSSPKLSAILPTLQFLMKQNTMQKEVLSRLISSIEETSDDSEATGSSSYQSSGGPAREKELHLYVLQLQRSVTELAEEVQRLKLQNNKLEHQINILSRKDERSSTQDN

SEQ ID NO: 195602 - protein, 629 aa, Zea Mays
MEHVLSSRRFPTDPNEYKLYEEIGDGVSATVYRALCVPLDILVAIKVLDLEKCNNDLDGIRREVQTMSLIDHPNLLRAYCSFTNGHQLWVVMPYMAAGSALHIMKTSFPEGFDEPVIATLLREVLKALVYLHSQGHIHRDVKAGNILIDTNGAVKLGDFGVSACMFDTGNRQRARNTFVGTPCWMAPEVMQQLHGYDYKADIWSFGITALELAHGHAPFSKYPPMKVLLMTLQNAPPGLDYERDKRFSKSKEAELLLNNKLGQESKEQLSQKEYIRGISGWNFNLEDLKNAAALIDSSNGTCYLDVRENRVKDDSQEAYNGPEHIYQERLNHVASRRPEEDEIQEVEALNDAVSSSFSSRSLEALKSCFDVCGVDDPSPTATDSRAQPSVGTLPFQQLQKFEHCKSGDCNGESLERSVSVPTNLVTSGYHKHSSGSLIPEQVLSPYLSSDLERDGFRQKNLSSRNCSGPLLFRQMKDSRTHQSVAPDESSEGKIIRRRGRFQVTSDSISEKVATSSCNSSRINLPIDAARSSPKLSAILPTLQFLMKQNTMQKEVLSRLISSIEETSDDSEATGSSSYQVCNILMWTVVYFCFFFSKHAGELCPIYNILRRFRKRSKEDQKQNSFFTEA

SEQ ID NO: 195603 - protein, 614 aa, Zea Mays
MEHVLSSRRFPTDPNEYKLYEEIGDGVSATVYRALCVPLDILVAIKVLDLEKCNNDLDGIRREVQTMSLIDHPNLLRAYCSFTNGHQLWVVMPYMAAGSALHIMKTSFPEGFDEPVIATLLREVLKALVYLHSQGHIHRDVKAGNILIDTNGAVKLGDFGVSACMFDTGNRQRARNTFVGTPCWMAPEVMQQLHGYDYKADIWSFGITALELAHGHAPFSKYPPMKVLLMTLQNAPPGLDYERDKRFSKSFKDLVATCLVKDPRKRPSSEKLLKHSFFKHARSAEYLARSILDGLPPLGERFRELKSKEAELLLNNKLGQESKEQLSQKEYIRGISGWNFNLEDLKNAAALIDSSNGTCYLDVRENRVKDDSQEAYNGPEHIYQERLNHVASRRPEEDEIQEVEALNDAVSSSFSSRSLEALKSCFDVCGVDDPSPTATDSRAQPSVGTLPFQQLQKFEHCKSGDCNGESLERSVSVPTNLVTSGYHKHSSGSLIPEQVLSPYLSSDLERDGFRQKNLSSRNCSGPLLFRQMKDSRTHQSVAPDESSEGKIIRRRGRFQVTSDSISEKVATSSCNSSRINLPIDAARSSPKLSAILPTLQFLMKQNTMQKYSVG

SEQ ID NO: 195604 - protein, 234 aa, Zea Mays
MDRRQSSSSGMMEGPFRFLPAEVKEMEERLFPVTNRRLDHILMDELALKFSCFRRRAGMVPVKPKQVLNWFYNNRNKTSAKVAAREAHAPWEFWANHQQARARGGSSISKLKPKKATTHAGSSSGNNYIDVYHTKFEAKSARDGSWYLVEEFLTEKFCESGDLQVLVRFPGFGVEEAEWIDVRTCTLRQRSVPYKATECADVHIWDPVLCYKEKNVIAKSLFFMCMIILRTSFP

SEQ ID NO: 195605 - protein, 84 aa, Zea Mays
MCLFSEINVPRLDDASNLEEQCFDHTIDEPPMNYHEETDQHVLEPLSASNTSNNSAFPPSFNQMLKSCSIDYDQGELISEEDLR

SEQ ID NO: 195606 - protein, 198 aa, Zea Mays
MTHWIGNNCNYHMECSCGSSGTMDIIPFGSDYVCEDSSASEYIVSNGLHHRLDDASNLEEQCFDHTIDEPPMNYHEETDQHVLEPLSASNTSNNSAFPPSFNQMLKSCSIDYDQEEPCPLAASNHVLQEVYVLDTSHDVANEERTAGKGMDAAEGVDASILTYDLMARIKTYMADESFNDMLLKLDKAIDELGGDMSL

SEQ ID NO: 195607 - protein, 210 aa, Zea Mays
MIARRNPRGITGRTTPLPGFPTSTPQIANACVMFKAEDPKDKKFSYLHCWKILKDKPKWMDRRKEIGSAKKSATKKQKTTTNSSPASIANAIVVDAPLGGADHDEPSCRPDGKKKEKQKLRQRTSMEVVDYLIAKKKDSDLEKDLKKEERCNKAFALQEERMKLDKEKFAFQRQLEEDRIIGLDLSTMNYKQRQYYEDRQNEILARRFNI

SEQ ID NO: 195608 - protein, 178 aa, Zea Mays
MFKAEDPKDKKFSYLHCWKILKDKPKWMDRRKEIGSAKKSATKKQKTTTNSSPASIANAIVVDAPLGGADHDEPSCRPDGKKKEKQKLRQRTSMEVVDYLIAKKKDSDLEKDLKKEERCNKAFALQEERMKLDKEKFAFQRQLEEDRIIGLDLSTMNYKQRQYYEDRQNEILARRFNI

SEQ ID NO: 195609 - protein, 226 aa, Zea Mays
MCHDDRSAGARGRGTLGGCRMSARVSAGSRSWPVGGCGSAIEIANACVMFKAEDPKDKKFSYLHCWKILKDKPKWMDRRKEIGSAKKSATKKQKTTTNSSPASIANAIVVDAPLGGADHDEPSCRPDGKKKEKQKLRQRTSMEVVDYLIAKKKDSDLEKDLKKEERCNKAFALQEERMKLDKEKFAFQRQLEEDRIIGLDLSTMNYKQRQYYEDRQNEILARRFNI

SEQ ID NO: 195610 - protein, 76 aa, Zea Mays
MPWIWDRVSLNPAIPYMKRQSRTRSGEIARVARTLLAKDRLKGVVCSRVAQTCSCSGGFVGMVDICKSYEKHMSYS

SEQ ID NO: 195611 - protein, 478 aa, Zea Mays
MDRSRSKRGYHYDQDSPPPRSKQRFDRRSGGGQNANSSYHRRGPLGGGGSDRRGFLPPAPAPPPPPPPPPLPPSSATAGGGAGPTTTTTSFRILCPECKAYGFPPGFVAKVRDDSGALVTVHPPFAGDYVRVIETVDGARREADGRPPMFSPAQEALLMVHRRILETDADDGDEDGEYGPRGKDSRDRGKTTTRLIVPKMHVGCLLGKGGKIIEQMRMETKTHIRILPRDQHTPRCVSLSEEVVQVVGDGNCVKKAVAIITDRLKESLHRDRGPFRGRMNSPEPRISQEDDYLGVSQMPAYEESLGRSDQIRNNTSMEPPGYEFDSNDGKVIEHPDILYDDIIFRILCPNDKVDNLVATNDGILEMLQADVGVDVRLSDIIAGSDERVVIITSREGPDHELFPAQEAVLHIQTHIVDLGPDKDNIITTRLLVPSSEIACFDGREGSLSDIQRQTSANVQILPKEDLPLCALESDELIQ

SEQ ID NO: 195612 - protein, 517 aa, Zea Mays
MDRSRSKRGYHYDQDSPPPRSKQRFDRRSGGGQNANSSYHRRGPLGGGGSDRRGFLPPAPAPPPPPPPPPLPPSSATAGGGAGPTTTTTSFRILCPECKAYGFPPGFVAKVRDDSGALVTVHPPFAGDYVRVIETVDGARREADGRPPMFSPAQEALLMVHRRILETDADDGDEDGEYGPRGKDSRDRGKTTTRLIVPKMHVGCLLGKGGKIIEQMRMETKTHIRILPRDQHTPRCVSLSEEVVQGPDHELFPAQEAVLHIQTHIVDLGPDKDNIITTRLLVPSSEIACFDGREGSLSDIQRQTSANVQILPKEDLPLCALESDELIQIVGEISAARNALIQVTTKLRSFLYREMSGPIQVGNINVHGAISPVAGSPGGPNLGNDMPMSAYHQASQLATSWHSKDSGGSASGSFDQGSNIIDEIRQGATKRFAVPLVTRSTLEVVIPNSAVASLTMRAGSKLAQISEISGATVTLAEDRPDILEKVVRISGTPEQASKAENLLQGFILSIPDDIPSG

SEQ ID NO: 195613 - protein, 357 aa, Zea Mays
MDRSRSKRGYHYDQDSPPPRSKQRFDRRSGGGQNANSSYHRRGPLGGGGSDRRGFLPPAPAPPPPPPPPPLPPSSATAGGGAGPTTTTTSFRILCPECKAYGFPPGFVAKVRDDSGALVTVHPPFAGDYVRVIETVDGARREADGRPPMFSPAQEALLMVHRRILETDADDGDEDGEYGPRGKDSRDRGKTTTRLIVPKMHVGCLLGKGGKIIEQMRMETKTHIRILPRDQHTPRCVSLSEEVVQVVGDGNCVKKAVAIITDRLKESLHRDRGPFRGRMNSPEPRISQEDDYLGVSQMPAYEESLGRSDQIRNNTSMEPPGYEFDSNDGKVIEHPDILLMLVLMLDYLILLLVLMKG

SEQ ID NO: 195614 - protein, 412 aa, Zea Mays
MDRSRSKRGYHYDQDSPPPRSKQRFDRRSGGGQNANSSYHRRGPLGGGGSDRRGFLPPAPAPPPPPPPPPLPPSSATAGGGAGPTTTTTSFRILCPECKAYGFPPGFVAKVRDDSGALVTVHPPFAGDYVRVIETVDGARREADGRPPMFSPAQEALLMVHRRILETDADDGDEDGEYGPRGKDSRDRGKTTTRLIVPKMHVGCLLGKGGKIIEQMRMETKTHIRILPRDQHTPRCVSLSEEVVQGPDHELFPAQEAVLHIQTHIVDLGPDKDNIITTRLLVPSSEIACFDGREGSLSDIQRQTSANVQILPKEDLPLCALESDELIQIVGEISAARNALIQVTTKLRSFLYREMSGPIQVGNINVHGAISPVAGSPGGPNLGNDMPMSAYHQASQLATSWHSKFGVPLQGI

SEQ ID NO: 195615 - protein, 441 aa, Zea Mays
MDRSRSKRGYHYDQDSPPPRSKQRFDRRSGGGQNANSSYHRRGPLGGGGSDRRGFLPPAPAPPPPPPPPPLPPSSATAGGGAGPTTTTTSFRILCPECKAYGFPPGFVAKVRDDSGALVTVHPPFAGDYVRVIETVDGARREADGRPPMFSPAQEALLMVHRRILETDADDGDEDGEYGPRGKDSRDRGKTTTRLIVPKMHVGCLLGKGGKIIEQMRMETKTHIRILPRDQHTPRCVSLSEEVVQGPDHELFPAQEAVLHIQTHIVDLGPDKDNIITTRLLVPSSEIACFDGREGSLSDIQRQTSANVQILPKEDLPLCALESDELIQDSGGSASGSFDQGSNIIDEIRQGATKRFAVPLVTRSTLEVVIPNSAVASLTMRAGSKLAQISEISGATVTLAEDRPDILEKVVRISGTPEQASKAENLLQGFILSIPDDIPSG

SEQ ID NO: 195616 - protein, 516 aa, Zea Mays
MDRSRSKRGYHYDQDSPPPRSKQRFDRRSGGGQNANSSYHRRGPLGGGGSDRRGFLPPAPAPPPPPPPPPLPPSSATAGGGAGPTTTTTSFRILCPECKAYGFPPGFVAKVRDDSGALVTVHPPFAGDYVRVIETVDGARREADGRPPMFSPAQEALLMVHRRILETDADDGDEDGEYGPRGKDSRDRGKTTTRLIVPKMHVGCLLGKGGKIIEQMRMETKTHIRILPRDQHTPRCVSLSEEVVQVVGDGNCVKKAVAIITDRLKESLHRDRGPFRGRMNSPEPRISQEDDYLGVSQMPAYEESLGRSDQIRNNTSMEPPGYEFDSNDGKGPDHELFPAQEAVLHIQTHIVDLGPDKDNIITTRLLVPSSEIACFDGREGSLSDIQRQTSANVQILPKEDLPLCALESDELIQIVGEISAARNALIQVTTKLRSFLYREMSGPIQVGNINVHGAISPVAGSPGGPNLGNDMPMSAYHQASQLATSWHSKDSGGSASGSFDQGSNIIDEIRQGATKR

SEQ ID NO: 195617 - protein, 361 aa, Zea Mays
MDRSRSKRGYHYDQDSPPPRSKQRFDRRSGGGQNANSSYHRRGPLGGGGSDRRGFLPPAPAPPPPPPPPPLPPSSATAGGGAGPTTTTTSFRILCPECKAYGFPPGFVAKVRDDSGALVTVHPPFAGDYVRVIETVDGARREADGRPPMFSPAQEALLMVHRRILETDADDGDEDGEYGPRGKDSRDRGKTTTRLIVPKMHVGCLLGKGGKIIEQMRMETKTHIRILPRDQHTPRCVSLSEEVVQVVGDGNCVKKAVAIITDRLKESLHRDRGPFRGRMNSPEPRISQEDDYLGVSQMPAYEESLGRSDQIRNNTSMEPPGYEFDSNDGKLQQMMEYWRCYRLMLVLMLDYLILLLVLMKG

SEQ ID NO: 195618 - protein, 91 aa, Zea Mays
MSIQADATPVAAQTEATHSSRQHHCIQMDHSPVRSVVTRECTSGYSRVAPIPTMALKPRAKLITYAGMPFQSSVAVISVPKLHINCHLVAN

SEQ ID NO: 195619 - protein, 197 aa, Zea Mays
MPLFSLEKSQPFSYLLHVLDLWNTHTLSFLSLTHAMVSSFIPSVFYLLYDAEVALIVFFPNRAKPSLPSITEILHRLQFAGRAPPSRSDPATDAQPQRDVTHPWRAPHYSYYPALDVFDEMSQQAPPRICAAPTHTVDLRSYDHDSSLASCAPPHRTRRARRRPHTTTSLIRAAMTHVVVFLFGQPRSRCHRIPVVN

SEQ ID NO: 195620 - protein, 210 aa, Zea Mays
MPLFSLEKSQPFSYLLHVLDLWNTHTLSFLSLTHAMVSSFIPSVFYLLYDAEVALIVFFPNRAKPSLPSITEILHRLQFAGRAPPSRSDPATDAQPQRDVTHPWRAPHYSYYPALDVFDEMSQQAPPRICAAPTHTVDLRSYDHDSSLASCAPPHRTRRARRRPHTTTSLIRAAMTHVVVFLFGQPRSRCHRIPLINHVMWRPRVGLISK

SEQ ID NO: 195621 - protein, 229 aa, Zea Mays
MRAEYGRLDKTEMGIWECIELLNEFIDDSDPDLDMPQIEHLLQTAEAIRKDYPDEDWLHLTGLIHDLGKVLLHPSFGELPQWAVVGDTFPVGCAYDECNVHFKYFKENPDYHNPKLNTKLGVYSEGCGLNKVLMSWGHDDYMYLVAKENKCTLPSAGLFIIRYHSFYPLHKHGAYTHLMDDEDKENLKWLHVFNKYDLYSKSNSRIDVEEVKPYYMSLIDKYFPAKLRW

SEQ ID NO: 195622 - protein, 457 aa, Zea Mays
MLPRRFSNHPGSSSPLPFLVVCGLLLAAAVAFSPVAAAEAAGRGGGGGGGGAGHEGRAGKPEVEAEAEARGDGVAVAEAGGEVVAQGNATEAKEGSLADMIDRALEKEFPESESEQGGGETDPGSFNNTVAEKQGVLETVARRVTKKNETKDNKSFPFKEVFLDRSEQEDVPTLIDRKDNVFIISNPKSKYPVLQLDLRLISDLVVVIVSATCGGIAFACLGQPVITGYLLAGSIIGPGGFSFVNEMVQVETVAQFGVIFLLFALGLEFSTAKLRVVRAVAVLGGMLQIMLFMFLCGILATLCGGKTKEGVFVGVLLSMSSTAVVLKFLMERNSINALHGQVTVGTLILQDCAVGLLFALLPILSGTSGLLHGVASMTKSLVVLITFLTILSILSRTGVPWFLKLMISLSSQTNELYQLAAVAFCLLFAWEIRLIFWLLPKYPSHLEDRWHLLSTTA

SEQ ID NO: 195623 - protein, 226 aa, Zea Mays
MLPRRFSNHPGSSSPLPFLVVCGLLLAAAVAFSPVAAAEAAGRGGGGGGGGAGHEGRAGKPEVEAEAEARGDGVAVAEAGGEVVAQGNATEAKEGSLADMIDRALEKEFPESESEQGGGETDPGSFNNTVAEKQGVLETVARRVTKKNETKDNKSFPFKEVFLDRSEQEDVPTLIDRKDNVFIISNPKSKYPVLQLDLRLISDLVVVIVSATCGGIAFACLGQPDL

SEQ ID NO: 195624 - protein, 175 aa, Zea Mays
MISTTDLAQHTLEQIEPIRNLFAALFLASIGMLINVHFLWNHVDILLAAVILVITVKTFIVAIVVKGFGYSNKTSLLVGMSLAQIGEFAFVLLSRASSIHLIEGKLYLLLLGTTALSLVTTPLLFKMIPAVVHLGVLLRWFSVDTNQVELGLKNDVLRIDSGKRINLIVQGSHDS

SEQ ID NO: 195625 - protein, 139 aa, Zea Mays
MSSTAVVLKFLMERNSINALHGQVTVGTLILQDCAVGLLFALLPILSGTSGLLHGVASMTKSLVVLITFLTILSILSRTGVPWFLKLMISLSSQTNELYQLAAVAFCLLFAWEIRLIFWLLPKYPSHLEDRWHLLSTTA

SEQ ID NO: 195626 - protein, 463 aa, Zea Mays
MLPRRFSNHPGSSSPLPFLVVCGLLLAAAVAFSPVAAAEAAGRGGGGGGGGAGHEGRAGKPEVEAEAEARGDGVAVAEAGGEVVAQGNATEAKEGSLADMIDRALEKEFPESESEQGGGETDPGSFNNTVAEKQGVLETVARRVTKKNETKDNKSFPFKEVFLDRSEQEDVPTLIDRKDNVFIISNPKSKYPVLQLDLRLISDLVVVIVSATCGGIAFACLGQPVITGYLLAGSIIGPGGFSFVNEMVQVETVAQFGVIFLLFALGLEFSTAKLRVVRAVAVLGGMLQIMLFMFLCGILATLCGGKTKEGVFVGVLLSMSSTAVVLKFLMERNSINALHGQVTVGTLILQDCAVGLLFALLPILSGTSGLLHGVASMTKSLVVLITFLTILSILSRTGVPWFLKLMISLSSQTNELYQLAAVAFCLLFAWCSDKLGLSLELGSFAAGVMISTTDLAQHTLEQR

SEQ ID NO: 195627 - protein, 486 aa, Zea Mays
MLPRRFSNHPGSSSPLPFLVVCGLLLAAAVAFSPVAAAEAAGRGGGGGGGGAGHEGRAGKPEVEAEAEARGDGVAVAEAGGEVVAQGNATEAKEGSLADMIDRALEKEFPESESEQGGGETDPGSFNNTVAEKQGVLETVARRVTKKNETKDNKSFPFKEVFLDRSEQEDVPTLIDRKDNVFIISNPKSKYPVLQLDLRLISDLVVVIVSATCGGIAFACLGQPVITGYLLAGSIIGPGGFSFVNEMVQVETVAQFGVIFLLFALGLEFSTAKLRVVRAVAVLGGMLQIMLFMFLCGILATLCGGKTKEGVFVGVLLSMSSTAVVLKFLMERNSINALHGQVTVGTLILQDCAVGLLFALLPILSGTSGLLHGVASMTKSLVVLITFLTILSILSRTGVPWFLKLMISLSSQTNELYQLAAVAFCLLFAWCSDKLGLSLELGSFAAGVMISTTDLAQHTLEQVCSFCRSNLSATYSLLFSLPALGC

SEQ ID NO: 195628 - protein, 201 aa, Zea Mays
MLQIMLFMFLCGILATLCGGKTKEGVFVGVLLSMSSTAVVLKFLMERNSINALHGQVTVGTLILQDCAVGLLFALLPILSGTSGLLHGVASMTKSLVVLITFLTILSILSRTGVPWFLKLMISLSSQTNELYQLAAVAFCLLFAWCSDKLGLSLELGSFAAGVMISTTDLAQHTLEQVCSFCRSNLSATYSLLFSLPALGC

SEQ ID NO: 195629 - protein, 499 aa, Zea Mays
MTICLLCTWEGVLETVARRVTKKNETKDNKSFPFKEVFLDRSEQEDVPTLIDRKDNVFIISNPKSKYPVLQLDLRLISDLVVVIVSATCGGIAFACLGQPVITGYLLAGSIIGPGGFSFVNEMVQVETVAQFGVIFLLFALGLEFSTAKLRVVRAVAVLGGMLQIMLFMFLCGILATLCGGKTKEGVFVGVLLSMSSTAVVLKFLMERNSINALHGQVTVGTLILQDCAVGLLFALLPILSGTSGLLHGVASMTKSLVVLITFLTILSILSRTGVPWFLKLMISLSSQTNELYQLAAVAFCLLFAWCSDKLGLSLELGSFAAGVMISTTDLAQHTLEQIEPIRNLFAALFLASIGMLINVHFLWNHVDILLAAVILVITVKTFIVAIVVKGFGYSNKTSLLVGMSLAQIGEFAFVLLSRASSIHLIEGKLYLLLLGTTALSLVTTPLLFKMIPAVVHLGVLLRWFSVDTNQVELGLKNDVLRIDSGKRINLIVQGSHDS

SEQ ID NO: 195630 - protein, 168 aa, Zea Mays
MSSTAVVLKFLMERNSINALHGQVTVGTLILQDCAVGLLFALLPILSGTSGLLHGVASMTKSLVVLITFLTILSILSRTGVPWFLKLMISLSSQTNELYQLAAVAFCLLFAWCSDKLGLSLELGSFAAGVMISTTDLAQHTLEQVCSFCRSNLSATYSLLFSLPALGC

SEQ ID NO: 195631 - protein, 173 aa, Zea Mays
MISTTDLAQHTLEQIEPIRNLFAALFLASIGMLINVHFLWNHVDILLAAVILVITVKTFIVAIVVKGFGYSNKTSLLVGMSLAQIGEFAFVLLSRASSIHLIEGKLYLLLLGTTALSLVTTPLLFKMIPAVVHLGVLLRWFSVDTNQLGLKNDVLRIDSGKRINLIVQGSHDS

SEQ ID NO: 195632 - protein, 57 aa, Zea Mays
MFRPPRARPTTLVETSVLESTLASQMPLDRIRSQVVGWGRWKTAVWSPTLCNIDCYR

SEQ ID NO: 195633 - protein, 64 aa, Zea Mays
MAVASSPQSTHGKTEGVRSVRAEPSGSLSSASGIRLARGYIGPRAPPLSLLATTQESCSRPTPV

SEQ ID NO: 195634 - protein, 796 aa, Zea Mays
MLAAVMADSGDAAMAVVLGWSSSWICGEEDGGRLTLTVASKCVQRTLIDCVNVVLFIAYVCTLAAACVRRRQRSADASSGRSGAPSRWVLLVVSTCCVAAAVAYCVTALQDAYDIKTAVPYFVRGLVWIALAASLHAQPTRPARVVAVLWWVLLSLLATAYNSEILAGGHSLDLAEMIAWPVSLLLLLCALGSLLPRGDGHHYRDASNGSSGLSEPLIGNDRTVPTSELYRAGLFGQLAFSWLNPLLRVGRSKALDLGDIPLIATDDTAHHTSQQFTEAWSRHVSDKARSRRGVGSNSLALVLGKCFLSEILLTGFYAFLRMLSIAVAPLLLFGFVWYSNQEERDLRVGLSLVGCLLLAKLVESLSQRHWFFSSRRTGMRIRSALMAVIFQKQLRLSIQGRNNHSTGEIVNYIAVDAYRLGDAISWLHMGWTSPLQLVFAVATLFWALKLGALPGLVPLVIFGFLNVPFAKMLQGYQAKFMVAQDERLRSTSEILNSMKIIKLQSWEDKFRSTIESLRDGEFKWLRQTQMKKAYGAVMYWMSPTVVSAVMYTATAIMGSAPLNASTLFTVLATLRVMSEPVRMLPEVLTMMIQYKVALDRIEKFLLEDEIREDDVKRVPSDDSGVRVRVQAGNFSWKASGADLSLRNVNLRVNRGEKVAVCGPVGSGKSSLLYALLGEIPRLSGSVEVFGSVAYVSQSSWIQSGTVRDNILFGKPFNKELYDKAIKSCALDKDIENFDHGDLTEIGQRGLNMSGGQKQRIQLARAVYSDADVYLLDDPFSAVDAHTAAVLFYVCCR

SEQ ID NO: 195635 - protein, 294 aa, Zea Mays
MEYYRFYSYLENYIISVERIKQYMHLPVEPPAIIPDSRPPTSWPQEGRIDLQDLKIRYRPNAPLVLKGITCTFAAGNKIGVVGRTGSGKSTLISSLFRLVDPAGGRILIDKLDICSIGLKDLRTKLSIIPQEPTLFRGTVRNNLDPLGQHSDEEIWEALEKCQLKTAISTTSALLDTVVSDDGDNWSAGQRQLFCLGRVLLRRNKILVLDEATASIDSATDAILQKVIRQQFSSCTVITIAHRVPTVTDSDKVMVLSYGKLLEYETPAKLLEDKQSAFAKLVAEYWANTKRNST

SEQ ID NO: 195636 - protein, 109 aa, Zea Mays
MLDINLFRTDKGGNPDLIHESQCSRFASVELVDEVIALDKAWRERQFELDKIRQELNATSKKIDKLKAANNKIVRAFGEKRVEDNLKNHVDLCRMLDIVALEKAIVSDR

SEQ ID NO: 195637 - protein, 1079 aa, Zea Mays
MGRSGRRRRDRMRWSNLYTFSCFRAQHEHAGDAGPSSDGAGAVGGPGFSRVVYCNNAALQKPLKYITNYITTTKYNVVTFFPKAIFEQFRRVANLYFLLTAILSLTPVCPFSAVSMIAPLAFVVGLSMMKEGLEDWRRFMQDMKVNNRNVSVHKSDGEFDYRHWEDLCVGDVVRVEKDQFFPADLLLLSSSYEDGICYVETMNLDGETNLKVKRSLEVTLPLEEDESFKDFQAVIRCEDPNPSLYTFTGNFEYERQVYALDPSQILLRDSKLRNTAFVYGVVIFTGHDSKVMQNSTESPSKRSRIERKMDLIIYILFTVLVLISLISSIGFAVRIKLDLPRWWYLQPQKSNKLDDPSRPALSGIFHLITALILYGYLIPISLYVSIELVKVLQAHFINQDIHMFDEETGNTAQARTSNLNEELGQVHTILSDKTGTLTCNQMDFLKCSIAGVSYGVGSSEVELAAAKQMASGADDQDIPIQDIWEENNEDQIELVEGVTFSVGNNRKPSIKGFSFEDDRLMQGNWTKEPNSSTILLFFRILALCHTAIPEINEATGSIAYEAESPDEGAFLVAAREFGFEFFKRTQSSVFVREKHTSSKGTIEREFKILNLLEFNSKRKRMTVILQDEDGQILLLCKGADSIIFDRLAKNGRMYEVDTTKHLNEYGEAGLRTLALSYRVLDESEYSSWNAEFLKAKTSIGPDRELQLERVSELIERELILVGATAVEDKLQKGVPQCIDRLAQAGLKIWVLTGDKMETAINIGYACSLLRQGMKQICLSIPTGEQVAQDAKKAAKESLLSQIANGSQMVKLEKDPDAAFALVIDGKALAFALEDDMKHMFLNLAIECASVICCRVSPKQKALVTRLVKEGIGQTTLAVGDGANDVGMIQEADIGVGISGVEGMQAVMASDFSISQFRFLERLLVVHGHWCYKRIAQMICYFFYKNIAFGLTIFYFEAFAGFSGQSVYDDWFMLLFNVVLTSLPVISLGVFEQDVSSEICLQFPALYQQGPKNLFFDWYRILGWMGNGLFSSLAIFFLNLCIFYDQAIRAGGQTADMAAVGTTMFTCIIWAVNISLYGAA

SEQ ID NO: 195638 - protein, 1220 aa, Zea Mays
MGRSGRRRRDRMRWSNLYTFSCFRAQHEHAGDAGPSSDGAGAVGGPGFSRVVYCNNAALQKPLKYITNYITTTKYNVVTFFPKAIFEQFRRVANLYFLLTAILSLTPVCPFSAVSMIAPLAFVVGLSMMKEGLEDWRRFMQDMKVNNRNVSVHKSDGEFDYRHWEDLCVGDVVRVEKDQFFPADLLLLSSSYEDGICYVETMNLDGETNLKVKRSLEVTLPLEEDESFKDFQAVIRCEDPNPSLYTFTGNFEYERQVYALDPSQILLRDSKLRNTAFVYGVVIFTGHDSKVMQNSTESPSKRSRIERKMDLIIYILFTVLVLISLISSIGFAVRIKLDLPRWWYLQPQKSNKLDDPSRPALSGIFHLITALILYGYLIPISLYVSIELVKVLQAHFINQDIHMFDEETGNTAQARTSNLNEELGQVHTILSDKTGTLTCNQMDFLKCSIAGVSYGVGSSEVELAAAKQMASGADDQDIPIQDIWEENNEDQIELVEGVTFSVGNNRKPSIKGFSFEDDRLMQGNWTKEPNSSTILLFFRILALCHTAIPEINEATGSIAYEAESPDEGAFLVAAREFGFEFFKRTQSSVFVREKHTSSKGTIEREFKILNLLEFNSKRKRMTVILQDEDGQILLLCKGADSSIIFDRLAKNGRMYEVDTTKHLNEYGEAGLRTLALSYRVLDESEYSSWNAEFLKAKTSIGPDRELQLERVSELIERELILVGATAVEDKLQKGVPQCIDRLAQAGLKIWVLTGDKMETAINIGYACSLLRQGMKQICLSIPTGEQVAQDAKKAAKESLLSQIANGSQMVKLEKDPDAAFALVIDGKALAFALEDDMKHMFLNLAIECASVICCRVSPKQKALVTRLVKEGIGQTTLAVGDGANDVGMIQEADIGVGISGVEGMQAVMASDFSISQFRFLERLLVVHGHWCYKRIAQMICYFFYKNIAFGLTIFYFEAFAGFSGQSVYDDWFMLLFNVVLTSLPVISLGVFEQDVSSEICLQFPALYQQGPKNLFFDWYRILGWMGNGLFSSLAIFFLNLCIFYDQAIRAGGQTADMAAVGTTMFTCIIWAVNIQIALTMSHFTWIQHLFVWGSITTWYIFILAYGMTLRSGDNYQILLEVLGPAPIYWAGTLLVTAACNIPYLIHISYQRSCNPLDHHVIQEIKYLKKDVEDQTMWKRERSKARQKTKIGFTARVDAKIKQIKGKLHKKGPSLTIQTVS

SEQ ID NO: 195639 - protein, 1229 aa, Zea Mays
MGRSGRRRRDRMRWSNLYTFSCFRAQHEHAGDAGPSSDGAGAVGGPGFSRVVYCNNAALQKPLKYITNYITTTKYNVVTFFPKAIFEQFRRVANLYFLLTAILSLTPVCPFSAVSMIAPLAFVVGLSMMKEGLEDWRRFMQDMKVNNRNVSVHKSDGEFDYRHWEDLCVGDVVRVEKDQFFPADLLLLSSSYEDGICYVETMNLDGETNLKVKRSLEVTLPLEEDESFKDFQAVIRCEDPNPSLYTFTGNFEYERQVYALDPSQILLRDSKLRNTAFVYGVVIFTGHDSKVMQNSTESPSKRSRIERKMDLIIYILFTVLVLISLISSIGFAVRIKLDLPRWWYLQPQKSNKLDDPSRPALSGIFHLITALILYGYLIPISLYVSIELVKVLQAHFINQDIHMFDEETGNTAQARTSNLNEELGQVHTILSDKTGTLTCNQMDFLKCSIAGVSYGVGSSEVELAAAKQMASGADDQDIPIQDIWEENNEDQIELVEGVTFSVGNNRKPSIKGFSFEDDRLMQGNWTKEPNSSTILLFFRILALCHTAIPEINEATGSIAYEAESPDEGAFLVAAREFGFEFFKRTQSSVFVREKHTSSKGTIEREFKILNLLEFNSKRKRMTVILQDEDGQILLLCKGADSIIFDRLAKNGRMYEVDTTKHLNEYGEAGLRTLALSYRVLDESEYSSWNAEFLKAKTSIGPDRELQLERVSELIERELILVGATAVEDKLQKGVPQCIDRLAQAGLKIWVLTGDKMETAINIGYACSLLRQGMKQICLSIPTGEQVAQDAKKALLSSLTTEQAAKESLLSQIANGSQMVKLEKDPDAAFALVIDGKALAFALEDDMKHMFLNLAIECASVICCRVSPKQKALVTRLVKEGIGQTTLAVGDGANDVGMIQEADIGVGISGVEGMQAVMASDFSISQFRFLERLLVVHGHWCYKRIAQMICYFFYKNIAFGLTIFYFEAFAGFSGQSVYDDWFMLLFNVVLTSLPVISLGVFEQDVSSEICLQFPALYQQGPKNLFFDWYRILGWMGNGLFSSLAIFFLNLCIFYDQAIRAGGQTADMAAVGTTMFTCIIWAVNIQIALTMSHFTWIQHLFVWGSITTWYIFILAYGMTLRSGDNYQILLEVLGPAPIYWAGTLLVTAACNIPYLIHISYQRSCNPLDHHVIQEIKYLKKDVEDQTMWKRERSKARQKTKIGFTARVDAKIKQIKGKLHKKGPSLTIQTVS

SEQ ID NO: 195640 - protein, 904 aa, Zea Mays
MGRSGRRRRDRMRWSNLYTFSCFRAQHEHAGDAGPSSDGAGAVGGPGFSRVVYCNNAALQKPLKYITNYITTTKYNVVTFFPKAIFEQFRRVANLYFLLTAILSLTPVCPFSAVSMIAPLAFVVGLSMMKEGLEDWRRFMQDMKVNNRNVSVHKSDGEFDYRHWEDLCVGDVVRVEKDQFFPADLLLLSSSYEDGICYVETMNLDGETNLKVKRSLEVTLPLEEDESFKDFQAVIRCEDPNPSLYTFTGNFEYERQVYALDPSQILLRDSKLRNTAFVYGVVIFTGHDSKVMQNSTESPSKRSRIERKMDLIIYILFTVLVLISLISSIGFAVRIKLDLPRWWYLQPQKSNKLDDPSRPALSGIFHLITALILYGYLIPISLYVSIELVKVLQAHFINQDIHMFDEETGNTAQARTSNLNEELGQVHTILSDKTGTLTCNQMDFLKCSIAGVSYGVGSSEVELAAAKQMASGADDQDIPIQDIWEENNEDQIELVEGVTFSVGNNRKPSIKGFSFEDDRLMQGNWTKEPNSSTILLFFRILALCHTAIPEINEATGSIAYEAESPDEGAFLVAAREFGFEFFKRTQSSVFVREKHTSSKGTIEREFKILNLLEFNSKRKRMTVILQDEDGQILLLCKGADSIIFDRLAKNGRMYEVDTTKHLNEYGEAGLRTLALSYRVLDESEYSSWNAEFLKAKTSIGPDRELQLERVSELIERELILVGATAVEDKLQKGVPQCIDRLAQAGLKIWVLTGDKMETAINIGYACSLLRQGMKQICLSIPTGEQVAQDAKKAAKESLLSQIANGSQMVKLEKDPDAAFALVIDGKALAFALEDDMKHMFLNLAIECASVICCRVSPKQKALVTRLVKEGIGQTTLAVGDGANDVGMIQEADIGVGISGVEGMQ

SEQ ID NO: 195641 - protein, 196 aa, Zea Mays
MGNGLFSSLAIFFLNLCIFYDQAIRAGGQTADMAAVGTTMFTCIIWAVNIQIALTMSHFTWIQHLFVWGSITTWYIFILAYGMTLRSGDNYQILLEVLGPAPIYWAGTLLVTAACNIPYLIHISYQRSCNPLDHHVIQEIKYLKKDVEDQTMWKRERSKARQKTKIGFTARVDAKIKQIKGKLHKKGPSLTIQTVS

SEQ ID NO: 195642 - protein, 58 aa, Zea Mays
MGRVCLCSASRVVDLVMTDPQSCCPNEYRAFELILERCMGATELKQRFLPGLHYISSI

SEQ ID NO: 195643 - protein, 79 aa, Zea Mays
MQRCASARCGESADQGNRPRPPQGSRSPHGDGRARANVVVTPSYMCLELLADIPYGTKSNIWSLGVYHFSVINYVSAPR

SEQ ID NO: 195644 - protein, 61 aa, Zea Mays
MRCASARCGESADQGNRPRPPQGSRSPHGDGRARANVERAPVYLLPEIKAYALVTLVLPMY

SEQ ID NO: 195645 - protein, 71 aa, Zea Mays
MVAGTDPNRGPSIPLEFARLLMQCKPATCRGALVPGAASQQIKETARGRPRGPGLLTATGEREPMWSAVLD

SEQ ID NO: 195646 - protein, 57 aa, Zea Mays
MRCASARCGESADQGNRPRPPQGSRSPHGDGRARANVERMLHLTNDYSQACKLHITT

SEQ ID NO: 195647 - protein, 86 aa, Zea Mays
MVAGTDPNRGPSIPLEFARLLMQCKPATCRGALVPGAASQQIKETARGRPRGPGLLTATGEREPMWSGMLHLTNDYSQACKLHITT

SEQ ID NO: 195648 - protein, 69 aa, Zea Mays
MVAGTDPNRGPSIPLEFARLLMQCKPATCRGALVPGAASQQIKETARGRPRGPGLLTATGEREPMWSGQ

SEQ ID NO: 195649 - protein, 69 aa, Zea Mays
MQRCASARCGESADQGNRPRPPQGSRSPHGDGRARANVERLVGRCCQLFCAYKISRLLHLNCYWKFQGQ

SEQ ID NO: 195650 - protein, 96 aa, Zea Mays
MTTGENKQASEDDPKILYSLVLSFWATLFATEVQSESKWKQLGELAMSNGKVRKLEAYIISYWYKKGHRPIEHPLLPDARRIVKFDLYDDSVSTRI

SEQ ID NO: 195651 - protein, 60 aa, Zea Mays
MMAYLITFRWQKKLHCLRYFITYSCFSCIENLHLYVQMIYGHINVKNNKFWLKMLVSNLL

SEQ ID NO: 195652 - protein, 79 aa, Zea Mays
MTTGENKQASEDDPKILYSLVLSFWATLFATEVQSESKWKQLGELAMSNGKVQLSGLSFILHAQCHSLHCHMLMSSYFL

SEQ ID NO: 195653 - protein, 80 aa, Zea Mays
MTTGENKQASEDDPKILYSLVLSFWATLFATEVQSESKWKQLGELAMSNGKNFLGEGKSYPSRVWPVSFSVGGVFRLGDK

SEQ ID NO: 195654 - protein, 82 aa, Zea Mays
MFQAYGIFLSSGLVYYIISALVYYCFLLVWDESVLSQVRKLEAYIISYWYKKGHRPIEHPLLPDARRIVKFDLYDDSVSTRI

SEQ ID NO: 195655 - protein, 53 aa, Zea Mays
MGWATWFLAAVCFFAASQLFVSDALDSPFGVGSVTSAKLAHVLSFATFWGAAL

SEQ ID NO: 195656 - protein, 65 aa, Zea Mays
MFIVSTRFYILWVIVSRSRIFWGREKATLAGSGRFPFQLGGSSGSEINRFDQSTPVHYSYSFTQD

SEQ ID NO: 195657 - protein, 364 aa, Zea Mays
MASTKAPGPGEKHHSIDAQLRQLVPGKVSEDDKLIEYDALLVDRFLNILQDLHGPSLREFVQECYEVSADYEGKGDTTKLGELGAKLTGLAPADAILVASSILHMLNLANLAEEVQIAHRRRNSKLKKGGFADEGSATTESDIEETLKRLVSEVGKSPEEVFEALKNQTVDLVFTAHPTQSARRSLLQKNARIRNCLTQLNAKDITDDDKQELDEALQREIQAAFRTDEIRRAQPTPQDEMRYGMSYIHETVWKGVPKFLRRVDTALKNIGINERLPYNVSLIRFSSWMGGDRDGNPRVTPEVTRDVCLLARMMAANLYIDQIEELMFELSMWRCNDELRVRAEELHSSSGSKVTKYYIVYLLA

SEQ ID NO: 195658 - protein, 336 aa, Zea Mays
MASTKAPGPGEKHHSIDAQLRQLVPGKVSEDDKLIEYDALLVDRFLNILQDLHGPSLREFVQECYEVSADYEGKGDTTKLGELGAKLTGLAPADAILVASSILHMLNLANLAEEVQIAHRRRNSKLKKGGFADEGSATTESDIEETLKRLVSEVGKSPEEVFEALKNQTVDLVFTAHPTQSARRSLLQKNARIRNCLTQLNAKDITDDDKQELDEALQREIQAAFRTDEIRRAQPTPQDEMRYGMSYIHETVWKGVPKFLRRVDTALKNIGINERLPYNVSLIRFSSWMGGDRDGNPRVTPEVTRDVCLLARMMAANLYIDQIEELMFELYVALQR

SEQ ID NO: 195659 - protein, 592 aa, Zea Mays
MASTKAPGPGEKHHSIDAQLRQLVPGKVSEDDKLIEYDALLVDRFLNILQDLHGPSLREFVQECYEVSADYEGKGDTTKLGELGAKLTGLAPADAILVASSILHMLNLANLAEEVQIAHRRRNSKLKKGGFADEGSATTESDIEETLKRLVSEVGKSPEEVFEALKNQTVDLVFTAHPTQSARRSLLQKNARIRNCLTQLNAKDITDDDKQELDEALQREIQAAFRTDEIRRAQPTPQDEMRYGMSYIHETVWKGVPKFLRRVDTALKNIGINERLPYNVSLIRFSSWMGGDRDGNPRVTPEVTRDVCLLARMMAANLYIDQIEELMFELSMWRCNDELRVRAEELHSSSGSKVTKYYIEFWKQIPPNEPYRVILGHVRDKLYNTRERARHLLASGVSEISAESSFTSIEEFLEPLELCYKSLCDCGDKAIADGSLLDLLRQVFTFGLSLVKLDIRQESERHTDVIDAITTHLGIGSYREWPEDKRQEWLLSELRGKRPLLPPDLPQTDEIADVIGAFHVLAELPPDSFGPYIISMATAPSDVLAVELLQRECGVRQPLPGGGRDESVRRGAGSQWIVAARPLCHLQCPVAF

SEQ ID NO: 195660 - protein, 176 aa, Zea Mays
MHVSIDCDGCEDNVRKALEKLKGVHHVSIDRMHGKVTVTGSVSQRKALRAARRTGKLAVLWPSAYNNPSYHQAHAMRAYYQYQYQANKPAQAQQHQYYSSVQRAGKNSGGISAVATKPAGHQYPQSKASSYNYHVHGYYDSELYGYYHDHEQPGDVVPAAVRSYFSDENPSACSIM

SEQ ID NO: 195661 - protein, 140 aa, Zea Mays
MKDRSREYFDKLFNGENESSNLVLDDSFDDTNRYFEENSEHRDHGGSEEDGGKAMGPDGNPMEVCRCLGTRAIVWLTKLFSLIFQSNRMPKEWRSILVPIFKKGDVQSYTNYHAIKLMSHMMKLWKRVIEHRLRRVTCVT

SEQ ID NO: 195662 - protein, 131 aa, Zea Mays
MHGFGYLQDDSLRRRARAQPRGVCGAAEPIIGGASGVASPLNFISELDPEAKALLEVALTDANRERERRRSSRAPSILSRRHLPLASTRTMPLTKRPQRPVTRSCAASASSKRARSRCRTTGTRCVRRARW

SEQ ID NO: 195663 - protein, 60 aa, Zea Mays
MVNIGSELQIRLYCVMFGTMIQSHTLAIVEPNCRSYRTMEDAEEDGVGATSQAVLSTEYY

SEQ ID NO: 195664 - protein, 248 aa, Zea Mays
MRVGPRRHSCLPPTPAAAMAVAHAPPRRGVLPLLLVAALVAALPATCAAARSKKSYTAIFSFGDSLSDAGNLIVNGTPKALTTARPPYGMTFFRKPTGRCSNGRLVVDFLAEHFGLPLPPPSQAKGKDFKKGANFAITGATALEYSFFKAHGIDQRIWNTGSINTQIGWLQDMKPSLCKSEQDCKDYFSKSLFVVGEFGGNDYNAPLFSGVPFSDVKTYVPLVAKAIANGVETSWCLAFSQLAASRCT

SEQ ID NO: 195665 - protein, 206 aa, Zea Mays
MRPQHGVEFSMKEVNSTSWNVGETPNILVPIANGTEEMEATMILDILRRAKANVVVASLEDKLEIVASRKVKMIADVLLDDALKEQYDLILLPGGLGGAEAYAKSDKLMDLIKKQAAANRLYGAICASPAIALEPHGLLKGKKVTSYPAMWNKLADQSECNNRVIVDGNLITSQGPGTSMEFSLAIVEKLFGRERALELAKSMVFI

SEQ ID NO: 195666 - protein, 210 aa, Zea Mays
MKRTLKFRVFKKKNYEQRGHNMAEMAALDDDELQPFTVPVVPAGTSSLPTTDHKNNPHLMQYDFPSFDPSMQLPQLMSADQPVPTLFPSHPGVATAMSSSIDVECSQNLLTMLTSNGSDGMLHVRAGGAGAGVDRFAGTTDWSILDKLLASHQNLDQLFHGKVTAASASPMAPYHQQLMELGGSSSSSSLQRLPLQYLSGETTDLLRFPK

SEQ ID NO: 195667 - protein, 136 aa, Zea Mays
MVHTRAWHQVTVGHRDVEIAALVTRKRGAARGFFGDEVVGRAEVEEGEEGDATHLDAHLHCFAGADVDDRVHRDMWFVVGRSFHARVRLVVYRRQVEEDDALADTVVTAPELSLQLKHSPKRVSKGTLTLIKRMTL

SEQ ID NO: 195668 - protein, 76 aa, Zea Mays
MLKDYRGQSKAGCPLDAQDLFHQSGAVPEPAGLQLAGGELAAPGVVVELVEALFVVDVEAVKRGSPHTDHGVPACG

SEQ ID NO: 195669 - protein, 123 aa, Zea Mays
MCRMMYYSVSDKNIHYRCYPCPTSSVFDTHLSVFASENIRICIRIRSYPYSNSNPKKNMKTNMVSVKSVCIRSDYTPTHKIASSRMCCRMTVLLGDDLVLSCWGEAKVSLRKFLGKHLFLMLK

SEQ ID NO: 195670 - protein, 930 aa, Zea Mays
MRRHHHLFVILRRAVASSASQRAQPLPLLHSVALRNGAAGSFSPCFFSSRARSSVGAAKSLVEDEAELSDWISDLKTDSFHLGLSSGDEGDAPSTRRSSVGSSRGGRGGSDSRGSFPRSSTAGGEFSGDRRGGFEQRGRMISSGLDDADSGFGSSRGRRGRGERTSGFVRRGGRGNGFDEEATFRSPREQRSQRGRASGVARRGGRYSDFDQDDGDTGFGSSRGRHGASGQLSVSSHRRGRVSDLDDDEDSDDDLVGFGDLDGKQHHGRRKGGRENTVGLGRGRGRRDLGLSRKGGSYNDFGDYDDGRRRTSDLLQRTGRGSDLDDDEDDDAGPVGFDGYSVRQQGGRRGKMAKSVGPHRGGRGSDTDFGHRQPRGLKKIDFGLSEDDDEAGEVDEEDEPSGFEDDLFEDEGDKEDVGHIIGNKSGSSMLPEDEPAKNESVQGRSAGGGDSYLSQKRFDECPLSPLSLKGVKAAGYERMTAVQEATLPIILQGKDVLAKAKTGTGKTVAFLLPAIEVVSKLPPVDRDLKKPPISVVVVCPTRELADQAAAEANKLLKFHPSIGVQLVIGGTRMALEQKRMHTNPCQILVATPGRLRDHMENTPGFATRLLGVKVLILDEADRLLDMGFRSDIEKIVAALPKQRQTLLFSATVPDEVRQVCHIAMKRDLEFVNTVQEGSEETHSQVKQMHLIAPLDKQFSNLYGLLTDHISENVDYKVIVFCTTAKVTSLVAELLSELKLNVREIHSRKPQSYRTRISKEFKESKGLILVSSDVSARGVDYPNVTLVVQLGVPTDREQYIHRLGRTGRRGNEGTGILLLAPWEEYFLRSINDLPITEATQPLIDLDTKKKVDKALAHVEVKDKESAYQAWLGYYNSNKVIGRDKYQLVSLANEFSRSMGLNNPPAVSKLALRKMGLNNIPDEQATLETEVQ

SEQ ID NO: 195671 - protein, 718 aa, Zea Mays
MRRHHHLFVILRRAVASSASQRAQPLPLLHSVALRNGAAGSFSPCFFSSRARSSVGAAKSLVEDEAELSDWISDLKTDSFHLGLSSGDEGDAPSTRRSSVGSSRGGRGGSDSRGSFPRSSTAGGEFSGDRRGGFEQRGRMISSGLDDADSGFGSSRGRRGRGERTSGFVRRGGRGNGFDEEATFRSPREQRSQRGRASGVARRGGRYSDFDQDDGDTGFGSSRGRHGASGQLSVSSHRRGRVSDLDDDEDSDDDLVGFGDLDGKQHHGRRKGGRENTVGLGRGRGRRDLGLSRKGGSYNDFGDYDDGRRRTSDLLQRTGRGSDLDDDEDDDAGPVGFDGYSVRQQGGRRGKMAKSVGPHRGGRGSDTDFGHRQPRGLKKIDFGLSEDDDEAGEVDEEDEPSGFEDDLFEDEGDKEDVGHIIGNKSGSSMLPEDEPAKNESVQGRSAGGGDSYLSQKRFDECPLSPLSLKGVKAAGYERMTAVQEATLPIILQGKDVLAKAKTGTGKTVAFLLPAIEVVSKLPPVDRDLKKPPISVVVVCPTRELADQAAAEANKLLKFHPSIGVQLVIGGTRMALEQKRMHTNPCQILVATPGRLRDHMENTPGFATRLLGVKVLILDEADRLLDMGFRSDIEKIVAALPKQRQTLLFSATVPDEVRQVCHIAMKRDLEFVNTVQEGSEETHSQVKQMHLIAPLDKQFSNLYGLLTDHISENVDYKQK

SEQ ID NO: 195672 - protein, 421 aa, Zea Mays
MVHRVSSLGLDSARRQQQQSPDAESAKHVSAPSMSEVTCNWSNRHSDTCKMEGDLRIHGMAGTVYVLSSSNFRPNNSTITIRPYTRKWEQETMLRIREVSIRSTAPEPFSFVIPPKCTVRHDVPAVVFSTGGCGTNFFHAMTDLIVPLYITAREHNGHVQLLVADYQPEWVAKFRPILTALSIYPVIDFDADTAVRCFPSAHVGLESHRILGINPALSRNSYTMMGFRDFLRDVFSLRRPWATPVSRSSGQKPRLVFVLRRHSREVTNEVDAIAALAGLGFEVVVAGPEDVRDMAKIAGVVNSCDVMVGVHGAGLTNMVFLPHNGTIVQIIPWGNLKYPCRFDFGDPAPDMGLRYVEYEANAEETTLKYKYPRDHPVFTDPISIERSGKLWETFLEGQNVTLDIDRFREAMQQVYNSITTE

SEQ ID NO: 195673 - protein, 82 aa, Zea Mays
MHLQGSHFSYFVVRTRATQQEPVTIQSTIKKSLLGRLLNLLNRRRCSVHLLTVHRMSRNMFRLSQKSQGCTCLQPQMLQTTL

SEQ ID NO: 195674 - protein, 69 aa, Zea Mays
MLRDCSYVLLVLFRLYGQRNRSYYTREIEDTILLALQKPEVYDDIARATCCKFGIDRPQVVPVQGLPQV

SEQ ID NO: 195675 - protein, 123 aa, Zea Mays
MRSRPAAPSCWSPAEPPSVPDAASPWCSPLFPPALDDLALPPCSRFLHATSHGRQPSAMDAEPPLFSAFLYSPCVAVRVRCLYKCSRGVTCHGQPFWRRRMFDVLCIPSTTPSTIGAKSVKSR

SEQ ID NO: 195676 - protein, 2179 aa, Zea Mays
MAKGVGGGDPIPLSRFGALVAQLESVVASARQKTPDALLCFDLLSELSSAIDEAPKETIQLWQRKCEDALQSLLVLGTRRPVRRLASSAMGRIIEKGDVISVYSRASNLQGWLVDVKRAEATACAGAAQCLGEIYRLFGRKITAGLIETSSIVAKLMKYHEDFVRQDALLLLENALEGSGGGGAAAAYQEAFRIIMRGVSDKSFIVRAAAARCLKAFANIGGPALGMADFDSSMSYCVKGLEDSVSSVRDSFAEALGAILALAVNPDAQVKKGGKKQTASAKKIEDGVQKHLIVPFVKANGANAKELRIGLTLSWVFFLHMIHMKYGTPDSELQNYAIQTMEILQGNDSLDPHALACVLYVLRVGVADQMTELTQRDFLLFLGRKLESLNYTAATRVATLRILCYLLRSVGEVPAEFKDVLDNTVVAALSHSSAHVRVEAALTLRALAEVDPTCVGGLVSYGLTTLQALRETVSFDKGKSLNLELDSLHGQATVLAALVAISPKLLLGYPARLPKSVLELSKKMLNGFSRNPVAAIAEREAGWLLLASLLASMPKEELEDQVFDVLLLWAGPFTGNPESYLRHIQDWASELRVLSVAVEALTAFIRSFVYPSITTTDCGILLNPVLAYLGGALSLISSLRSKQVPNVRSALDLLTTRTLMAYWSLSNPVVYKTEHQQILQLCSSPFSDPSGWEESSCLKFLLDKRDASLGPWIPGRDSFEDELRAFDGGADGFLPCVWDDEISNFPQPESIRKMLVNQMLLCYGSIFACQENTVKISLLNNLDQCLKSGKKYLWFKFLITNACVALLSGLKEFLALRGAQSLPIDILSMIQSIFKAILVEPEISTAQRRAACEGLGLLARAGNDIFTARMARSLLGELVTTTDLSYTTSVAFSLGCIHRSAGGMALSTLVTPTVSSLSHLSKSSNFNLQLWSLHALLLTIEAAGLSYVSQVQGTLFLAMEILLLEENGYVDLRQGIGHLINAIVAVIGPELAPDSTFFSRCKSVIAEISSSNEMATLLESVRFSQQLVLFAPQAVPVHLHVQGLIPMLYSRQPSLRYLAVSTLHHLIERDPAAMIDENIEENLFSMLDEETDSETAMLVRATIIRLLYTSCPVCPSRWLAVLRNIVLATSIRRNTGEVLSCFGHNPPDSTSENDVYYGEDEDNMISSSKQQQIRCAGSISSQFPPRNKHLRYRTRVFAAECVSHVPIAVGAEPAHFDLLLARSAISQGTYLSNDWLVLKLQELVSLSYQISTGQFEGMQPIGVKLLCLIMDKFGKAVDPEFPGHILLEQFQAQLVSAVRMAISTASGPLLLEAGLELATRVMTSSIIGGDRLALSRLFSLITRPLSDIEGLLYPSFADWVVCKIKVRLLTAHAAVKCNTYQFLRMRENAPNEYQQLAPSLVNSSTLLGKYWIRALKDYVSISFGLHSKINYKPFLDGIQSLLVLSKVQRYLDEVWLLILKATALDAAPLDFDENNPKNLLEQTFISGHCMVKLDRTEFQFLWGLSILVLFHSCQSMKNNSLKINLDFKQDKNFGEFIVHGLDDKRPCDQVLRVLSSLTTEVFFSNNFISVDICQQLLQALTYADCSSAPIIHLFTQIIRFCPDNFFEVEAFVFSAIELLSQYLGLILQCRDGSSQNNSSNTLISELSIASETMAYRIKGEYLWKLVMLVVSTSHQSFQQVSTNLCFSNIICFLQNIFPFMRKIFRERVESDGECTSPKVVFGAMVGLVGYFYVECDKKISLLENKISDSYKLLNKILLFCLGEATALAKLVPEIIYRSENVSNNDVLLWGSFRLCVQVIQGSFRSTNIQVHMLGLQVLRSYAQKELTEGSETKLDSFMMLLTELLGDLFLVMETTLKECSNKKSVSVVDECLKLVFLFHTLAQSKKYRQDATTLLLEALLMVFSLSSDTVSQELAEVNTISRKLFSHFIQIPSVAIQIKDIMLSAPAERRLQLQDMVRASVSQGQITVPVATSAHSEQNIQDSCSKNPGSTSEASDCVATHGNNDNEVVDDDWDDDWDAFQSLPAIANDGVDSGEISLTTRYNEQIPQENSSYGSCNADITARAMEDITCVDKELEEPSDLQFSSTEQQPKHDLPGSSHEGCAKLERHPSVDCKEQLADDETADELQQQVHEDTDHVNKDSEVLSAEIHGVKLDILDEDVEDDSPMNSNNLSDIAEEES

SEQ ID NO: 195677 - protein, 786 aa, Zea Mays
MAKGVGGGDPIPLSRFGALVAQLESVVASARQKTPDALLCFDLLSELSSAIDEAPKETIQLWQRKCEDALQSLLVLGTRRPVRRLASSAMGRIIEKGDVISVYSRASNLQGWLVDVKRAEATACAGAAQCLGEIYRLFGRKITAGLIETSSIVAKLMKYHEDFVRQDALLLLENALEGSGGGGAAAAYQEAFRIIMRGVSDKSFIVRAAAARCLKAFANIGGPALGMADFDSSMSYCVKGLEDSVSSVRDSFAEALGAILALAVNPDAQVKKGGKKQTASAKKIEDGVQKHLIVPFVKANGANAKELRIGLTLSWVFFLHMIHMKYGTPDSELQNYAIQTMEILQGNDSLDPHALACVLYVLRVGVADQMTELTQRDFLLFLGRKLESLNYTAATRVATLRILCYLLRSVGEVPAEFKDVLDNTVVAALSHSSAHDMQLLHVQEKDMPPQYKKVNFSLMLVGCSHCALMKCKHETGYMSHLFLIMLSFCCIKLVRVEAALTLRALAEVDPTCVGGLVSYGLTTLQALRETVSFDKGKSLNLELDSLHGQATVLAALVAISPKLLLGYPARLPKSVLELSKKMLNGFSRNPVAAIAEREAGWLLLASLLASMPKEELEDQVFDVLLLWAGPFTGNPESYLRHIQDWASELRVLSVAVEALTAFIRSFVYPSITTTDCGILLNPVLAYLGGALSLISSLRSKQVPNVRSALDLLTTRTLMAYWSLSNPVVYKTEHQQILQLCSSPFRRTVSHYIKKVKQGLKIDPEQGLPYRGLKLSNLRRSIIHSSI

SEQ ID NO: 195678 - protein, 1276 aa, Zea Mays
MALSTLVTPTVSSLSHLSKSSNFNLQLWSLHALLLTIEAAGLSYVSQVQGTLFLAMEILLLEENGYVDLRQGIGHLINAIVAVIGPELAPDSTFFSRCKSVIAEISSSNEMATLLESVRFSQQLVLFAPQAVPVHLHVQGLIPMLYSRQPSLRYLAVSTLHHLIERDPAAMIDENIEENLFSMLDEETDSETAMLVRATIIRLLYTSCPVCPSRWLAVLRNIVLATSIRRNTGEVLSCFGHNPPDSTSENDVYYGEDEDNMISSSKQQQIRCAGSISSQFPPRNKHLRYRTRVFAAECVSHVPIAVGAEPAHFDLLLARSAISQGTYLSNDWLVLKLQELVSLSYQISTGQFEGMQPIGVKLLCLIMDKFGKAVDPEFPGHILLEQFQAQLVSAVRMAISTASGPLLLEAGLELATRVMTSSIIGGDRLALSRLFSLITRPLSDIEGLLYPSFADWVVCKIKVRLLTAHAAVKCNTYQFLRMRENAPNEYQQLAPSLVNSSTLLGKYWIRALKDYVSISFGLHSKINYKPFLDGIQSLLVLSKVQRYLDEVWLLILKATALDAAPLDFDENNPKNLLEQTFISGHCMVKLDRTEFQFLWGLSILVLFHSCQSMKNNSLKINLDFKQDKNFGEFIVHGLDDKRPCDQVLRVLSSLTTEVFFSNNFISVDICQQLLQALTYADCSSAPIIHLFTQIIRFCPDNFFEVEAFVFSAIELLSQYLGLILQCRDGSSQNNSSNTLISELSIASETMAYRIKGEYLWKLVMLVVSTSHQSFQQVSTNLCFSNIICFLQNIFPFMRKIFRERVESDGECTSPKVVFGAMVGLVGYFYVECDKKISLLENKISDSYKLLNKILLFCLGEATALAKLVPEIIYRSENVSNNDVLLWGSFRLCVQVIQGSFRSTNIQVHMLGLQVLRSYAQKELTEGSETKLDSFMMLLTELLGDLFLVMETTLKECSNKKSVSVVDECLKLVFLFHTLAQSKKYRQDATTLLLEALLMVFSLSSDTVSQELAEVNTISRKLFSHFIQIPSVAIQIKDIMLSAPAERRLQLQDMVRASVSQGQITVPVATSAHSEQNIQDSCSKNPGSTSEASDCVATHGNNDNEVVDDDWDDDWDAFQSLPAIANDGVDSGEISLTTRYNEQIPQENSSYGSCNADITARAMEDITCVDKELEEPSDLQFSSTEQQPKHDLPGSSHEGCAKLERHPSVDCKEQLADDETADELQQQVHEDTDHVNKDSEVLSAEIHGVKLDILDEDVEDDSPMNSNNLSDIAEEES

SEQ ID NO: 195679 - protein, 2178 aa, Zea Mays
MAKGVGGGDPIPLSRFGALVAQLESVVASARQKTPDALLCFDLLSELSSAIDEAPKETIQLWQRKCEDALQSLLVLGTRRPVRRLASSAMGRIIEKGDVISVYSRASNLQGWLVDVKRAEATACAGAAQCLGEIYRLFGRKITAGLIETSSIVAKLMKYHEDFVRQDALLLLENALEGSGGGGAAAAYQEAFRIIMRGVSDKSFIVRAAAARCLKAFANIGGPALGMADFDSSMSYCVKGLEDSVSSVRDSFAEALGAILALAVNPDAQVKKGGKKQTASAKKIEDGVQKHLIVPFVKANGANAKELRIGLTLSWVFFLHMIHMKYGTPDSELQNYAIQTMEILQGNDSLDPHALACVLYVLRVGVADQMTELTQRDFLLFLGRKLESLNYTAATRVATLRILCYLLRSVGEVPAEFKDVLDNTVVAALSHSSAHVRVEAALTLRALAEVDPTCVGGLVSYGLTTLQALRETVSFDKGKSLNLELDSLHGQATVLAALVAISPKLLLGYPARLPKSVLELSKKMLNGFSRNPVAAIAEREAGWLLLASLLASMPKEELEDQVFDVLLLWAGPFTGNPESYLRHIQDWASELRVLSVAVEALTAFIRSFVYPSITTTDCGILLNPVLAYLGGALSLISSLRSKQVPNVRSALDLLTTRTLMAYWSLSNPVVYKTEHQQILQLCSSPFSDPSGWEESSCLKFLLDKRDASLGPWIPGRDSFEDELRAFDGGADGFLPCVWDDEISNFPQPESIRKMLVNQMLLCYGSIFACQENTVKISLLNNLDQCLKSGKKYLWFKFLITNACVALLSGLKEFLALRGAQSLPIDILSMIQSIFKAILVEPEISTAQRRAACEGLGLLARAGNDIFTARMARSLLGELVTTTDLSYTTSVAFSLGCIHRSAGGMALSTLVTPTVSSLSHLSKSSNFNLQLWSLHALLLTIEAAGLSYVSQVQGTLFLAMEILLLEENGYVDLRQGIGHLINAIVAVIGPELAPDSTFFSRCKSVIAEISSSNEMATLLESVRFSQQLVLFAPQAVPVHLHVQGLIPMLYSRQPSLRYLAVSTLHHLIERDPAAMIDENIEENLFSMLDEETDSETAMLVRATIIRLLYTSCPVCPSRWLAVLRNIVLATSIRRNTGEVLSCFGHNPPDSTSENDVYYGEDEDNMISSSKQQQIRCAGSISSQFPPRNKHLRYRTRVFAAECVSHVPIAVGAEPAHFDLLLARSAISQGTYLSNDWLVLKLQELVSLSYQISTGQFEGMQPIGVKLLCLIMDKFGKAVDPEFPGHILLEQFQAQLVSAVRMAISTASGPLLLEAGLELATRVMTSSIIGGDRLALSRLFSLITRPLSDIEGLLYPSFADWVVCKIKVRLLTAHAAVKCNTYQFLRMRENAPNEYQQLAPSLVNSSTLLGKYWIRALKDYVSISFGLHSKINYKPFLDGIQSLLVLSKVQRYLDEVWLLILKATALDAAPLDFDENNPKNLLEQTFISGHCMVKLDRTEFQFLWGLSILVLFHSCQSMKNNSLKINLDFKQDKNFGEFIVHGLDDKRPCDQVLRVLSSLTTEVFFSNNFISVDICQQLLQALTYADCSSAPIIHLFTQIIRFCPDNFFEVEAFVFSAIELLSQYLGLILQWDGSSQNNSSNTLISELSIASETMAYRIKGEYLWKLVMLVVSTSHQSFQQVSTNLCFSNIICFLQNIFPFMRKIFRERVESDGECTSPKVVFGAMVGLVGYFYVECDKKISLLENKISDSYKLLNKILLFCLGEATALAKLVPEIIYRSENVSNNDVLLWGSFRLCVQVIQGSFRSTNIQVHMLGLQVLRSYAQKELTEGSETKLDSFMMLLTELLGDLFLVMETTLKECSNKKSVSVVDECLKLVFLFHTLAQSKKYRQDATTLLLEALLMVFSLSSDTVSQELAEVNTISRKLFSHFIQIPSVAIQIKDIMLSAPAERRLQLQDMVRASVSQGQITVPVATSAHSEQNIQDSCSKNPGSTSEASDCVATHGNNDNEVVDDDWDDDWDAFQSLPAIANDGVDSGEISLTTRYNEQIPQENSSYGSCNADITARAMEDITCVDKELEEPSDLQFSSTEQQPKHDLPGSSHEGCAKLERHPSVDCKEQLADDETADELQQQVHEDTDHVNKDSEVLSAEIHGVKLDILDEDVEDDSPMNSNNLSDIAEEES

SEQ ID NO: 195680 - protein, 1731 aa, Zea Mays
MAKGVGGGDPIPLSRFGALVAQLESVVASARQKTPDALLCFDLLSELSSAIDEAPKETIQLWQRKCEDALQSLLVLGTRRPVRRLASSAMGRIIEKGDVISVYSRASNLQGWLVDVKRAEATACAGAAQCLGEIYRLFGRKITAGLIETSSIVAKLMKYHEDFVRQDALLLLENALEGSGGGGAAAAYQEAFRIIMRGVSDKSFIVRAAAARCLKAFANIGGPALGMADFDSSMSYCVKGLEDSVSSVRDSFAEALGAILALAVNPDAQVKKGGKKQTASAKKIEDGVQKHLIVPFVKANGANAKELRIGLTLSWVFFLHMIHMKYGTPDSELQNYAIQTMEILQGNDSLDPHALACVLYVLRVGVADQMTELTQRDFLLFLGRKLESLNYTAATRVATLRILCYLLRSVGEVPAEFKDVLDNTVVAALSHSSAHVRVEAALTLRALAEVDPTCVGGLVSYGLTTLQALRETVSFDKGKSLNLELDSLHGQATVLAALVAISPKLLLGYPARLPKSVLELSKKMLNGFSRNPVAAIAEREAGWLLLASLLASMPKEELEDQVFDVLLLWAGPFTGNPESYLRHIQDWASELRVLSVAVEALTAFIRSFVYPSITTTDCGILLNPVLAYLGGALSLISSLRSKQVPNVRSALDLLTTRTLMAYWSLSNPVVYKTEHQQILQLCSSPFSDPSGWEESSCLKFLLDKRDASLGPWIPGRDSFEDELRAFDGGADGFLPCVWDDEISNFPQPESIRKMLVNQMLLCYGSIFACQENTVKISLLNNLDQCLKSGKKYLWFKFLITNACVALLSGLKEFLALRGAQSLPIDILSMIQSIFKAILVEPEISTAQRRAACEGLGLLARAGNDIFTARMARSLLGELVTTTDLSYTTSVAFSLGCIHRSAGGMALSTLVTPTVSSLSHLSKSSNFNLQLWSLHALLLTIEAAGLSYVSQVQGTLFLAMEILLLEENGYVDLRQGIGHLINAIVAVIGPELAPDSTFFSRCKSVIAEISSSNEMATLLESVRFSQQLVLFAPQAVPVHLHVQGLIPMLYSRQPSLRYLAVSTLHHLIERDPAAMIDENIEENLFSMLDEETDSETAMLVRATIIRLLYTSCPVCPSRWLAVLRNIVLATSIRRNTGEVLSCFGHNPPDSTSENDVYYGEDEDNMISSSKQQQIRCAGSISSQFPPRNKHLRYRTRVFAAECVSHVPIAVGAEPAHFDLLLARSAISQGTYLSNDWLVLKLQELVSLSYQISTGQFEGMQPIGVKLLCLIMDKFGKAVDPEFPGHILLEQFQAQLVSAVRMAISTASGPLLLEAGLELATRVMTSSIIGGDRLALSRLFSLITRPLSDIEGLLYPSFADWVVCKIKVRLLTAHAAVKCNTYQFLRMRENAPNEYQQLAPSLVNSSTLLGKYWIRALKDYVSISFGLHSKINYKPFLDGIQSLLVLSKVQRYLDEVWLLILKATALDAAPLDFDENNPKNLLEQTFISGHCMVKLDRTEFQFLWGLSILVLFHSCQSMKNNSLKINLDFKQDKNFGEFIVHGLDDKRPCDQVLRVLSSLTTEVFFSNNFISVDICQQLLQALTYADCSSAPIIHLFTQIIRFCPDNFFEVEAFVFSAIELLSQYLGLILQWDGSSQNNSSNTLISELSIASETMAYRIKGEYLWKLVMLVVSTSHQSFQQVSTNLCFSNIICFLQNIFPFMRKIFRASGCAYRLFKVHFVVPTYRCTCWVCKY

SEQ ID NO: 195681 - protein, 1322 aa, Zea Mays
MAKGVGGGDPIPLSRFGALVAQLESVVASARQKTPDALLCFDLLSELSSAIDEAPKETIQLWQRKCEDALQSLLVLGTRRPVRRLASSAMGRIIEKGDVISVYSRASNLQGWLVDVKRAEATACAGAAQCLGEIYRLFGRKITAGLIETSSIVAKLMKYHEDFVRQDALLLLENALEGSGGGGAAAAYQEAFRIIMRGVSDKSFIVRAAAARCLKAFANIGGPALGMADFDSSMSYCVKGLEDSVSSVRDSFAEALGAILALAVNPDAQVKKGGKKQTASAKKIEDGVQKHLIVPFVKANGANAKELRIGLTLSWVFFLHMIHMKYGTPDSELQNYAIQTMEILQGNDSLDPHALACVLYVLRVGVADQMTELTQRDFLLFLGRKLESLNYTAATRVATLRILCYLLRSVGEVPAEFKDVLDNTVVAALSHSSAHVRVEAALTLRALAEVDPTCVGGLVSYGLTTLQALRETVSFDKGKSLNLELDSLHGQATVLAALVAISPKLLLGYPARLPKSVLELSKKMLNGFSRNPVAAIAEREAGWLLLASLLASMPKEELEDQVFDVLLLWAGPFTGNPESYLRHIQDWASELRVLSVAVEALTAFIRSFVYPSITTTDCGILLNPVLAYLGGALSLISSLRSKQVPNVRSALDLLTTRTLMAYWSLSNPVVYKTEHQQILQLCSSPFSDPSGWEESSCLKFLLDKRDASLGPWIPGRDSFEDELRAFDGGADGFLPCVWDDEISNFPQPESIRKMLVNQMLLCYGSIFACQENTVKISLLNNLDQCLKSGKKYLWFKFLITNACVALLSGLKEFLALRGAQSLPIDILSMIQSIFKAILVEPEISTAQRRAACEGLGLLARAGNDIFTARMARSLLGELVTTTDLSYTTSVAFSLGCIHRSAGGMALSTLVTPTVSSLSHLSKSSNFNLQLWSLHALLLTIEAAGLSYVSQVQGTLFLAMEILLLEENGYVDLRQGIGHLINAIVAVIGPELAPDSTFFSRCKSVIAEISSSNEMATLLESVRFSQQLVLFAPQAVPVHLHVQGLIPMLYSRQPSLRYLAVSTLHHLIERDPAAMIDENIEENLFSMLDEETDSETAMLVRATIIRLLYTSCPVCPSRWLAVLRNIVLATSIRRNTGEVLSCFGHNPPDSTSENDVYYGEDEDNMISSSKQQQIRCAGSISSQFPPRNKHLRYRTRVFAAECVSHVPIAVGAEPAHFDLLLARSAISQGTYLSNDWLVLKLQELVSLSYQISTGQFEGMQPIGVKLLCLIMDKFGKAVDPEFPGHILLEQFQAQLVSAVRMAISTASGPLLLEAGLELATRVL

SEQ ID NO: 195682 - protein, 1635 aa, Zea Mays
MAKGVGGGDPIPLSRFGALVAQLESVVASARQKTPDALLCFDLLSELSSAIDEAPKETIQLWQRKCEDALQSLLVLGTRRPVRRLASSAMGRIIEKGDVISVYSRASNLQGWLVDVKRAEATACAGAAQCLGEIYRLFGRKITAGLIETSSIVAKLMKYHEDFVRQDALLLLENALEGSGGGGAAAAYQEAFRIIMRGVSDKSFIVRAAAARCLKAFANIGGPALGMADFDSSMSYCVKGLEDSVSSVRDSFAEALGAILALAVNPDAQVKKGGKKQTASAKKIEDGVQKHLIVPFVKANGANAKELRIGLTLSWVFFLHMIHMKYGTPDSELQNYAIQTMEILQGNDSLDPHALACVLYVLRVGVADQMTELTQRDFLLFLGRKLESLNYTAATRVATLRILCYLLRSVGEVPAEFKDVLDNTVVAALSHSSAHVRVEAALTLRALAEVDPTCVGGLVSYGLTTLQALRETVSFDKGKSLNLELDSLHGQATVLAALVAISPKLLLGYPARLPKSVLELSKKMLNGFSRNPVAAIAEREAGWLLLASLLASMPKEELEDQVFDVLLLWAGPFTGNPESYLRHIQDWASELRVLSVAVEALTAFIRSFVYPSITTTDCGILLNPVLAYLGGALSLISSLRSKQVPNVRSALDLLTTRTLMAYWSLSNPVVYKTEHQQILQLCSSPFSDPSGWEESSCLKFLLDKRDASLGPWIPGRDSFEDELRAFDGGADGFLPCVWDDEISNFPQPESIRKMLVNQMLLCYGSIFACQENTVKISLLNNLDQCLKSGKKYLWFKFLITNACVALLSGLKEFLALRGAQSLPIDILSMIQSIFKAILVEPEISTAQRRAACEGLGLLARAGNDIFTARMARSLLGELVTTTDLSYTTSVAFSLGCIHRSAGGMALSTLVTPTVSSLSHLSKSSNFNLQLWSLHALLLTIEAAGLSYVSQVQGTLFLAMEILLLEENGYVDLRQGIGHLINAIVAVIGPELAPDSTFFSRCKSVIAEISSSNEMATLLESVRFSQQLVLFAPQAVPVHLHVQGLIPMLYSRQPSLRYLAVSTLHHLIERDPAAMIDENIEENLFSMLDEETDSETAMLVRATIIRLLYTSCPVCPSRWLAVLRNIVLATSIRRNTGEVLSCFGHNPPDSTSENDVYYGEDEDNMISSSKQQQIRCAGSISSQFPPRNKHLRYRTRVFAAECVSHVPIAVGAEPAHFDLLLARSAISQGTYLSNDWLVLKLQELVSLSYQISTGQFEGMQPIGVKLLCLIMDKFGKAVDPEFPGHILLEQFQAQLVSAVRMAISTASGPLLLEAGLELATRVMTSSIIGGDRLALSRLFSLITRPLSDIEGLLYPSFADWVVCKIKVRLLTAHAAVKCNTYQFLRMRENAPNEYQQLAPSLVNSSTLLGKYWIRALKDYVSISFGLHSKINYKPFLDGIQSLLVLSKVQRYLDEVWLLILKATALDAAPLDFDENNPKNLLEQTFISGHCMVKLDRTEFQFLWGLSILVLFHSCQSMKNNSLKINLDFKQDKNFGEFIVHGLDDKRPCDQVLRVLSSLTTEVFFSNNFISVDICQQLLQALTYADCSSAPIIHLFTQIIRFCPDNFFEVEAFVFSAIELLSQYLGLILQWGWEFSE

SEQ ID NO: 195683 - protein, 2024 aa, Zea Mays
MLHCDSDFVRQDALLLLENALEGSGGGGAAAAYQEAFRIIMRGVSDKSFIVRAAAARCLKAFANIGGPALGMADFDSSMSYCVKGLEDSVSSVRDSFAEALGAILALAVNPDAQVKKGGKKQTASAKKIEDGVQKHLIVPFVKANGANAKELRIGLTLSWVFFLHMIHMKYGTPDSELQNYAIQTMEILQGNDSLDPHALACVLYVLRVGVADQMTELTQRDFLLFLGRKLESLNYTAATRVATLRILCYLLRSVGEVPAEFKDVLDNTVVAALSHSSAHVRVEAALTLRALAEVDPTCVGGLVSYGLTTLQALRETVSFDKGKSLNLELDSLHGQATVLAALVAISPKLLLGYPARLPKSVLELSKKMLNGFSRNPVAAIAEREAGWLLLASLLASMPKEELEDQVFDVLLLWAGPFTGNPESYLRHIQDWASELRVLSVAVEALTAFIRSFVYPSITTTDCGILLNPVLAYLGGALSLISSLRSKQVPNVRSALDLLTTRTLMAYWSLSNPVVYKTEHQQILQLCSSPFSDPSGWEESSCLKFLLDKRDASLGPWIPGRDSFEDELRAFDGGADGFLPCVWDDEISNFPQPESIRKMLVNQMLLCYGSIFACQENTVKISLLNNLDQCLKSGKKYLWFKFLITNACVALLSGLKEFLALRGAQSLPIDILSMIQSIFKAILVEPEISTAQRRAACEGLGLLARAGNDIFTARMARSLLGELVTTTDLSYTTSVAFSLGCIHRSAGGMALSTLVTPTVSSLSHLSKSSNFNLQLWSLHALLLTIEAAGLSYVSQVQGTLFLAMEILLLEENGYVDLRQGIGHLINAIVAVIGPELAPDSTFFSRCKSVIAEISSSNEMATLLESVRFSQQLVLFAPQAVPVHLHVQGLIPMLYSRQPSLRYLAVSTLHHLIERDPAAMIDENIEENLFSMLDEETDSETAMLVRATIIRLLYTSCPVCPSRWLAVLRNIVLATSIRRNTGEVLSCFGHNPPDSTSENDVYYGEDEDNMISSSKQQQIRCAGSISSQFPPRNKHLRYRTRVFAAECVSHVPIAVGAEPAHFDLLLARSAISQGTYLSNDWLVLKLQELVSLSYQISTGQFEGMQPIGVKLLCLIMDKFGKAVDPEFPGHILLEQFQAQLVSAVRMAISTASGPLLLEAGLELATRVMTSSIIGGDRLALSRLFSLITRPLSDIEGLLYPSFADWVVCKIKVRLLTAHAAVKCNTYQFLRMRENAPNEYQQLAPSLVNSSTLLGKYWIRALKDYVSISFGLHSKINYKPFLDGIQSLLVLSKVQRYLDEVWLLILKATALDAAPLDFDENNPKNLLEQTFISGHCMVKLDRTEFQFLWGLSILVLFHSCQSMKNNSLKINLDFKQDKNFGEFIVHGLDDKRPCDQVLRVLSSLTTEVFFSNNFISVDICQQLLQALTYADCSSAPIIHLFTQIIRFCPDNFFEVEAFVFSAIELLSQYLGLILQCRDGSSQNNSSNTLISELSIASETMAYRIKGEYLWKLVMLVVSTSHQSFQQVSTNLCFSNIICFLQNIFPFMRKIFRERVESDGECTSPKVVFGAMVGLVGYFYVECDKKISLLENKISDSYKLLNKILLFCLGEATALAKLVPEIIYRSENVSNNDVLLWGSFRLCVQVIQGSFRSTNIQVHMLGLQVLRSYAQKELTEGSETKLDSFMMLLTELLGDLFLVMETTLKECSNKKSVSVVDECLKLVFLFHTLAQSKKYRQDATTLLLEALLMVFSLSSDTVSQELAEVNTISRKLFSHFIQIPSVAIQIKDIMLSAPAERRLQLQDMVRASVSQGQITVPVATSAHSEQNIQDSCSKNPGSTSEASDCVATHGNNDNEVVDDDWDDDWDAFQSLPAIANDGVDSGEISLTTRYNEQIPQENSSYGSCNADITARAMEDITCVDKELEEPSDLQFSSTEQQPKHDLPGSSHEGCAKLERHPSVDCKEQLADDETADELQQQVHEDTDHVNKDSEVLSAEIHGVKLDILDEDVEDDSPMNSNNLSDIAEEES

SEQ ID NO: 195684 - protein, 1305 aa, Zea Mays
MAKGVGGGDPIPLSRFGALVAQLESVVASARQKTPDALLCFDLLSELSSAIDEAPKETIQLWQRKCEDALQSLLVLGTRRPVRRLASSAMGRIIEKGDVISVYSRASNLQGWLVDVKRAEATACAGAAQCLGEIYRLFGRKITAGLIETSSIVAKLMKYHEDFVRQDALLLLENALEGSGGGGAAAAYQEAFRIIMRGVSDKSFIVRAAAARCLKAFANIGGPALGMADFDSSMSYCVKGLEDSVSSVRDSFAEALGAILALAVNPDAQVKKGGKKQTASAKKIEDGVQKHLIVPFVKANGANAKELRIGLTLSWVFFLHMIHMKYGTPDSELQNYAIQTMEILQGNDSLDPHALACVLYVLRVGVADQMTELTQRDFLLFLGRKLESLNYTAATRVATLRILCYLLRSVGEVPAEFKDVLDNTVVAALSHSSAHVRVEAALTLRALAEVDPTCVGGLVSYGLTTLQALRETVSFDKGKSLNLELDSLHGQATVLAALVAISPKLLLGYPARLPKSVLELSKKMLNGFSRNPVAAIAEREAGWLLLASLLASMPKEELEDQVFDVLLLWAGPFTGNPESYLRHIQDWASELRVLSVAVEALTAFIRSFVYPSITTTDCGILLNPVLAYLGGALSLISSLRSKQVPNVRSALDLLTTRTLMAYWSLSNPVVYKTEHQQILQLCSSPFSDPSGWEESSCLKFLLDKRDASLGPWIPGRDSFEDELRAFDGGADGFLPCVWDDEISNFPQPESIRKMLVNQMLLCYGSIFACQENTVKISLLNNLDQCLKSGKKYLWFKFLITNACVALLSGLKEFLALRGAQSLPIDILSMIQSIFKAILVEPEISTAQRRAACEGLGLLARAGNDIFTARMARSLLGELVTTTDLSYTTSVAFSLGCIHRSAGGMALSTLVTPTVSSLSHLSKSSNFNLQLWSLHALLLTIEAAGLSYVSQVQGTLFLAMEILLLEENGYVDLRQGIGHLINAIVAVIGPELAPDSTFFSRCKSVIAEISSSNEMATLLESVRFSQQLVLFAPQAVPVHLHVQGLIPMLYSRQPSLRYLAVSTLHHLIERDPAAMIDENIEENLFSMLDEETDSETAMLVRATIIRLLYTSCPVCPSRWLAVLRNIVLATSIRRNTGEVLSCFGHNPPDSTSENDVYYGEDEDNMISSSKQQQIRCAGSISSQFPPRNKHLRYRTRVFAAECVSHVPIAVGAEPAHFDLLLARSAISQGTYLSNDWLVLKLQELVSLSYQISTGQFEGMQPIGVKLLCLIMDKVSDMEYEQSTIILFILSCMHQSVQLKSLSSARQ

SEQ ID NO: 195685 - protein, 439 aa, Zea Mays
MDFVRQDALLLLENALEGSGGGGAAAAYQEAFRIIMRGVSDKSFIVRAAAARCLKAFANIGGPALGMADFDSSMSYCVKGLEDSVSSVRDSFAEALGAILALAVNPDAQVKKGGKKQTASAKKIEDGVQKHLIVPFVKANGANAKELRIGLTLSWVFFLHMIHMKYGTPDSELQNYAIQTMEILQGNDSLDPHALACVLYVLRVGVADQMTELTQRDFLLFLGRKNTMGNNVTWAAEIEDLDWWGPIRRWVGLGPVTEGVGDVELAPGRGVEAGEGLVEKGLGRRARLGAEESMNLAILIETKPKSPRLCSCVPAEFKDVLDNTVVAALSHSSAHDMQLLHVQEKDMPPQYKKVNFSLMLVGCSHCALMKCKHETGYMSHLFLIMLSFCCIKLVRVEAALTLRALAEVDPTCVGGLVSYGLTTLQALRETVSFDKVFCI

SEQ ID NO: 195686 - protein, 1203 aa, Zea Mays
MDFVRQDALLLLENALEGSGGGGAAAAYQEAFRIIMRGVSDKSFIVRAAAARCLKAFANIGGPALGMADFDSSMSYCVKGLEDSVSSVRDSFAEALGAILALAVNPDAQVKKGGKKQTASAKKIEDGVQKHLIVPFVKANGANAKELRIGLTLSWVFFLHMIHMKYGTPDSELQNYAIQTMEILQGNDSLDPHALACVLYVLRVGVADQMTELTQRDFLLFLGRKLESLNYTAATRVATLRILCYLLRSVGEVPAEFKDVLDNTVVAALSHSSAHVRVEAALTLRALAEVDPTCVGGLVSYGLTTLQALRETVSFDKGKSLNLELDSLHGQATVLAALVAISPKLLLGYPARLPKSVLELSKKMLNGFSRNPVAAIAEREAGWLLLASLLASMPKEELEDQVFDVLLLWAGPFTGNPESYLRHIQDWASELRVLSVAVEALTAFIRSFVYPSITTTDCGILLNPVLAYLGGALSLISSLRSKQVPNVRSALDLLTTRTLMAYWSLSNPVVYKTEHQQILQLCSSPFSDPSGWEESSCLKFLLDKRDASLGPWIPGRDSFEDELRAFDGGADGFLPCVWDDEISNFPQPESIRKMLVNQMLLCYGSIFACQENTVKISLLNNLDQCLKSGKKYLWFKFLITNACVALLSGLKEFLALRGAQSLPIDILSMIQSIFKAILVEPEISTAQRRAACEGLGLLARAGNDIFTARMARSLLGELVTTTDLSYTTSVAFSLGCIHRSAGGMALSTLVTPTVSSLSHLSKSSNFNLQLWSLHALLLTIEAAGLSYVSQVQGTLFLAMEILLLEENGYVDLRQGIGHLINAIVAVIGPELAPDSTFFSRCKSVIAEISSSNEMATLLESVRFSQQLVLFAPQAVPVHLHVQGLIPMLYSRQPSLRYLAVSTLHHLIERDPAAMIDENIEENLFSMLDEETDSETAMLVRATIIRLLYTSCPVCPSRWLAVLRNIVLATSIRRNTGEVLSCFGHNPPDSTSENDVYYGEDEDNMISSSKQQQIRCAGSISSQFPPRNKHLRYRTRVFAAECVSHVPIAVGAEPAHFDLLLARSAISQGTYLSNDWLVLKLQELVSLSYQISTGQFEGMQPIGVKLLCLIMDKFGKAVDPEFPGHILLEQFQAQLVSAVRMAISTASGPLLLEAGLELATRVMTSSIIGGDRLALSRLFSLITRPLSDIEGLLYPSFADWVVCK

SEQ ID NO: 195687 - protein, 2019 aa, Zea Mays
MDFVRQDALLLLENALEGSGGGGAAAAYQEAFRIIMRGVSDKSFIVRAAAARCLKAFANIGGPALGMADFDSSMSYCVKGLEDSVSSVRDSFAEALGAILALAVNPDAQVKKGGKKQTASAKKIEDGVQKHLIVPFVKANGANAKELRIGLTLSWVFFLHMIHMKYGTPDSELQNYAIQTMEILQGNDSLDPHALACVLYVLRVGVADQMTELTQRDFLLFLGRKLESLNYTAATRVATLRILCYLLRSVGEVPAEFKDVLDNTVVAALSHSSAHVRVEAALTLRALAEVDPTCVGGLVSYGLTTLQALRETVSFDKGKSLNLELDSLHGQATVLAALVAISPKLLLGYPARLPKSVLELSKKMLNGFSRNPVAAIAEREAGWLLLASLLASMPKEELEDQVFDVLLLWAGPFTGNPESYLRHIQDWASELRVLSVAVEALTAFIRSFVYPSITTTDCGILLNPVLAYLGGALSLISSLRSKQVPNVRSALDLLTTRTLMAYWSLSNPVVYKTEHQQILQLCSSPFSDPSGWEESSCLKFLLDKRDASLGPWIPGRDSFEDELRAFDGGADGFLPCVWDDEISNFPQPESIRKMLVNQMLLCYGSIFACQENTVKISLLNNLDQCLKSGKKYLWFKFLITNACVALLSGLKEFLALRGAQSLPIDILSMIQSIFKAILVEPEISTAQRRAACEGLGLLARAGNDIFTARMARSLLGELVTTTDLSYTTSVAFSLGCIHRSAGGMALSTLVTPTVSSLSHLSKSSNFNLQLWSLHALLLTIEAAGLSYVSQVQGTLFLAMEILLLEENGYVDLRQGIGHLINAIVAVIGPELAPDSTFFSRCKSVIAEISSSNEMATLLESVRFSQQLVLFAPQAVPVHLHVQGLIPMLYSRQPSLRYLAVSTLHHLIERDPAAMIDENIEENLFSMLDEETDSETAMLVRATIIRLLYTSCPVCPSRWLAVLRNIVLATSIRRNTGEVLSCFGHNPPDSTSENDVYYGEDEDNMISSSKQQQIRCAGSISSQFPPRNKHLRYRTRVFAAECVSHVPIAVGAEPAHFDLLLARSAISQGTYLSNDWLVLKLQELVSLSYQISTGQFEGMQPIGVKLLCLIMDKFGKAVDPEFPGHILLEQFQAQLVSAVRMAISTASGPLLLEAGLELATRVMTSSIIGGDRLALSRLFSLITRPLSDIEGLLYPSFADWVVCKIKVRLLTAHAAVKCNTYQFLRMRENAPNEYQQLAPSLVNSSTLLGKYWIRALKDYVSISFGLHSKINYKPFLDGIQSLLVLSKVQRYLDEVWLLILKATALDAAPLDFDENNPKNLLEQTFISGHCMVKLDRTEFQFLWGLSILVLFHSCQSMKNNSLKINLDFKQDKNFGEFIVHGLDDKRPCDQVLRVLSSLTTEVFFSNNFISVDICQQLLQALTYADCSSAPIIHLFTQIIRFCPDNFFEVEAFVFSAIELLSQYLGLILQCRDGSSQNNSSNTLISELSIASETMAYRIKGEYLWKLVMLVVSTSHQSFQQVSTNLCFSNIICFLQNIFPFMRKIFRERVESDGECTSPKVVFGAMVGLVGYFYVECDKKISLLENKISDSYKLLNKILLFCLGEATALAKLVPEIIYRSENVSNNDVLLWGSFRLCVQVIQGSFRSTNIQVHMLGLQVLRSYAQKELTEGSETKLDSFMMLLTELLGDLFLVMETTLKECSNKKSVSVVDECLKLVFLFHTLAQSKKYRQDATTLLLEALLMVFSLSSDTVSQELAEVNTISRKLFSHFIQIPSVAIQIKDIMLSAPAERRLQLQDMVRASVSQGQITVPVATSAHSEQNIQDSCSKNPGSTSEASDCVATHGNNDNEVVDDDWDDDWDAFQSLPAIANDGVDSGEISLTTRYNEQIPQENSSYGSCNADITARAMEDITCVDKELEEPSDLQFSSTEQQPKHDLPGSSHEGCAKLERHPSVDCKEQLADDETADELQQQVHEDTDHVNKDSEVLSAEIHGVKLDILDEDVEDDSPMNSNNLSDIAEEES

SEQ ID NO: 195688 - protein, 1426 aa, Zea Mays
MLVNQMLLCYGSIFACQENTVKISLLNNLDQCLKSGKKYLWFKFLITNACVALLSGLKEFLALRGAQSLPIDILSMIQSIFKAILVEPEISTAQRRAACEGLGLLARAGNDIFTARMARSLLGELVTTTDLSYTTSVAFSLGCIHRSAGGMALSTLVTPTVSSLSHLSKSSNFNLQLWSLHALLLTIEAAGLSYVSQVQGTLFLAMEILLLEENGYVDLRQGIGHLINAIVAVIGPELAPDSTFFSRCKSVIAEISSSNEMATLLESVRFSQQLVLFAPQAVPVHLHVQGLIPMLYSRQPSLRYLAVSTLHHLIERDPAAMIDENIEENLFSMLDEETDSETAMLVRATIIRLLYTSCPVCPSRWLAVLRNIVLATSIRRNTGEVLSCFGHNPPDSTSENDVYYGEDEDNMISSSKQQQIRCAGSISSQFPPRNKHLRYRTRVFAAECVSHVPIAVGAEPAHFDLLLARSAISQGTYLSNDWLVLKLQELVSLSYQISTGQFEGMQPIGVKLLCLIMDKFGKAVDPEFPGHILLEQFQAQLVSAVRMAISTASGPLLLEAGLELATRVMTSSIIGGDRLALSRLFSLITRPLSDIEGLLYPSFADWVVCKIKVRLLTAHAAVKCNTYQFLRMRENAPNEYQQLAPSLVNSSTLLGKYWIRALKDYVSISFGLHSKINYKPFLDGIQSLLVLSKVQRYLDEVWLLILKATALDAAPLDFDENNPKNLLEQTFISGHCMVKLDRTEFQFLWGLSILVLFHSCQSMKNNSLKINLDFKQDKNFGEFIVHGLDDKRPCDQVLRVLSSLTTEVFFSNNFISVDICQQLLQALTYADCSSAPIIHLFTQIIRFCPDNFFEVEAFVFSAIELLSQYLGLILQCRDGSSQNNSSNTLISELSIASETMAYRIKGEYLWKLVMLVVSTSHQSFQQVSTNLCFSNIICFLQNIFPFMRKIFRERVESDGECTSPKVVFGAMVGLVGYFYVECDKKISLLENKISDSYKLLNKILLFCLGEATALAKLVPEIIYRSENVSNNDVLLWGSFRLCVQVIQGSFRSTNIQVHMLGLQVLRSYAQKELTEGSETKLDSFMMLLTELLGDLFLVMETTLKECSNKKSVSVVDECLKLVFLFHTLAQSKKYRQDATTLLLEALLMVFSLSSDTVSQELAEVNTISRKLFSHFIQIPSVAIQIKDIMLSAPAERRLQLQDMVRASVSQGQITVPVATSAHSEQNIQDSCSKNPGSTSEASDCVATHGNNDNEVVDDDWDDDWDAFQSLPAIANDGVDSGEISLTTRYNEQIPQENSSYGSCNADITARAMEDITCVDKELEEPSDLQFSSTEQQPKHDLPGSSHEGCAKLERHPSVDCKEQLADDETADELQQQVHEDTDHVNKDSEVLSAEIHGVKLDILDEDVEDDSPMNSNNLSDIAEEES

SEQ ID NO: 195689 - protein, 1572 aa, Zea Mays
MDFVRQDALLLLENALEGSGGGGAAAAYQEAFRIIMRGVSDKSFIVRAAAARCLKAFANIGGPALGMADFDSSMSYCVKGLEDSVSSVRDSFAEALGAILALAVNPDAQVKKGGKKQTASAKKIEDGVQKHLIVPFVKANGANAKELRIGLTLSWVFFLHMIHMKYGTPDSELQNYAIQTMEILQGNDSLDPHALACVLYVLRVGVADQMTELTQRDFLLFLGRKLESLNYTAATRVATLRILCYLLRSVGEVPAEFKDVLDNTVVAALSHSSAHVRVEAALTLRALAEVDPTCVGGLVSYGLTTLQALRETVSFDKGKSLNLELDSLHGQATVLAALVAISPKLLLGYPARLPKSVLELSKKMLNGFSRNPVAAIAEREAGWLLLASLLASMPKEELEDQVFDVLLLWAGPFTGNPESYLRHIQDWASELRVLSVAVEALTAFIRSFVYPSITTTDCGILLNPVLAYLGGALSLISSLRSKQVPNVRSALDLLTTRTLMAYWSLSNPVVYKTEHQQILQLCSSPFSDPSGWEESSCLKFLLDKRDASLGPWIPGRDSFEDELRAFDGGADGFLPCVWDDEISNFPQPESIRKMLVNQMLLCYGSIFACQENTVKISLLNNLDQCLKSGKKYLWFKFLITNACVALLSGLKEFLALRGAQSLPIDILSMIQSIFKAILVEPEISTAQRRAACEGLGLLARAGNDIFTARMARSLLGELVTTTDLSYTTSVAFSLGCIHRSAGGMALSTLVTPTVSSLSHLSKSSNFNLQLWSLHALLLTIEAAGLSYVSQVQGTLFLAMEILLLEENGYVDLRQGIGHLINAIVAVIGPELAPDSTFFSRCKSVIAEISSSNEMATLLESVRFSQQLVLFAPQAVPVHLHVQGLIPMLYSRQPSLRYLAVSTLHHLIERDPAAMIDENIEENLFSMLDEETDSETAMLVRATIIRLLYTSCPVCPSRWLAVLRNIVLATSIRRNTGEVLSCFGHNPPDSTSENDVYYGEDEDNMISSSKQQQIRCAGSISSQFPPRNKHLRYRTRVFAAECVSHVPIAVGAEPAHFDLLLARSAISQGTYLSNDWLVLKLQELVSLSYQISTGQFEGMQPIGVKLLCLIMDKFGKAVDPEFPGHILLEQFQAQLVSAVRMAISTASGPLLLEAGLELATRVMTSSIIGGDRLALSRLFSLITRPLSDIEGLLYPSFADWVVCKIKVRLLTAHAAVKCNTYQFLRMRENAPNEYQQLAPSLVNSSTLLGKYWIRALKDYVSISFGLHSKINYKPFLDGIQSLLVLSKVQRYLDEVWLLILKATALDAAPLDFDENNPKNLLEQTFISGHCMVKLDRTEFQFLWGLSILVLFHSCQSMKNNSLKINLDFKQDKNFGEFIVHGLDDKRPCDQVLRVLSSLTTEVFFSNNFISVDICQQLLQALTYADCSSAPIIHLFTQIIRFCPDNFFEVEAFVFSAIELLSQYLGLILQCRDGSSQNNSSNTLISELSIASETMAYRIKGEYLWKLVMLVVSTSHQSFQQVSTNLCFSNIICFLQNIFPFMRKIFRASGCAYRLFKVHFVVPTYRCTCWVCKY

SEQ ID NO: 195690 - protein, 1098 aa, Zea Mays
MGRMAAVGAAGESAAHTGGVGGGWLKVVHVAAIAEREAGWLLLASLLASMPKEELEDQVFDVLLLWAGPFTGNPESYLRHIQDWASELRVLSVAVEALTAFIRSFVYPSITTTDCGILLNPVLAYLGGALSLISSLRSKQVPNVRSALDLLTTRTLMAYWSLSNPVVYKTEHQQILQLCSSPFSDPSGWEESSCLKFLLDKRDASLGPWIPGRDSFEDELRAFDGGADGFLPCVWDDEISNFPQPESIRKMLVNQMLLCYGSIFACQENTVKISLLNNLDQCLKSGKKYLWFKFLITNACVALLSGLKEFLALRGAQSLPIDILSMIQSIFKAILVEPEISTAQRRAACEGLGLLARAGNDIFTARMARSLLGELVTTTDLSYTTSVAFSLGCIHRSAGGMALSTLVTPTVSSLSHLSKSSNFNLQLWSLHALLLTIEAAGLSYVSQVQGTLFLAMEILLLEENGYVDLRQGIGHLINAIVAVIGPELAPDSTFFSRCKSVIAEISSSNEMATLLESVRFSQQLVLFAPQAVPVHLHVQGLIPMLYSRQPSLRYLAVSTLHHLIERDPAAMIDENIEENLFSMLDEETDSETAMLVRATIIRLLYTSCPVCPSRWLAVLRNIVLATSIRRNTGEVLSCFGHNPPDSTSENDVYYGEDEDNMISSSKQQQIRCAGSISSQFPPRNKHLRYRTRVFAAECVSHVPIAVGAEPAHFDLLLARSAISQGTYLSNDWLVLKLQELVSLSYQISTGQFEGMQPIGVKLLCLIMDKFGKAVDPEFPGHILLEQFQAQLVSAVRMAISTASGPLLLEAGLELATRVMTSSIIGGDRLALSRLFSLITRPLSDIEGLLYPSFADWVVCKIKVRLLTAHAAVKCNTYQFLRMRENAPNEYQQLAPSLVNSSTLLGKYWIRALKDYVSISFGLHSKINYKPFLDGIQSLLVLSKVQRYLDEVWLLILKATALDAAPLDFDENNPKNLLEQTFISGHCMVKLDRTEFQFLWGLSILVLFHSCQSMKNNSLKINLDFKQDKNFGEFIVHGLDDKRPCDQVLRVLSSLTTEVFFSNNFISVDICQQLLQALTYADCSSAPIIHLFTQVRLFQ

SEQ ID NO: 195691 - protein, 945 aa, Zea Mays
MGRMAAVGAAGESAAHTGGVGGGWLKVVHVAAIAEREAGWLLLASLLASMPKEELEDQVFDVLLLWAGPFTGNPESYLRHIQDWASELRVLSVAVEALTAFIRSFVYPSITTTDCGILLNPVLAYLGGALSLISSLRSKQVPNVRSALDLLTTRTLMAYWSLSNPVVYKTEHQQILQLCSSPFSDPSGWEESSCLKFLLDKRDASLGPWIPGRDSFEDELRAFDGGADGFLPCVWDDEISNFPQPESIRKMLVNQMLLCYGSIFACQENTVKISLLNNLDQCLKSGKKYLWFKFLITNACVALLSGLKEFLALRGAQSLPIDILSMIQSIFKAILVEPEISTAQRRAACEGLGLLARAGNDIFTARMARSLLGELVTTTDLSYTTSVAFSLGCIHRSAGGMALSTLVTPTVSSLSHLSKSSNFNLQLWSLHALLLTIEAAGLSYVSQVQGTLFLAMEILLLEENGYVDLRQGIGHLINAIVAVIGPELAPDSTFFSRCKSVIAEISSSNEMATLLESVRFSQQLVLFAPQAVPVHLHVQGLIPMLYSRQPSLRYLAVSTLHHLIERDPAAMIDENIEENLFSMLDEETDSETAMLVRATIIRLLYTSCPVCPSRWLAVLRNIVLATSIRRNTGEVLSCFGHNPPDSTSENDVYYGEDEDNMISSSKQQQIRCAGSISSQFPPRNKHLRYRTRVFAAECVSHVPIAVGAEPAHFDLLLARSAISQGTYLSNDWLVLKLQELVSLSYQISTGQFEGMQPIGVKLLCLIMDKFGKAVDPEFPGHILLEQFQAQLVSAVRMAISTASGPLLLEAGLELATRVMTSSIIGGDRLALSRLFSLITRPLSDIEGLLYPSFADWVVCKIKVRLLTAHAAVKCNTYQFLRMRENAPNEYQQLAPSLVNSSTLLGKYWIRALKDYVSISFGLHSKINVRQSNKPQQFISKDHIII

SEQ ID NO: 195692 - protein, 1434 aa, Zea Mays
MRPESIRKMLVNQMLLCYGSIFACQENTVKISLLNNLDQCLKSGKKYLWFKFLITNACVALLSGLKEFLALRGAQSLPIDILSMIQSIFKAILVEPEISTAQRRAACEGLGLLARAGNDIFTARMARSLLGELVTTTDLSYTTSVAFSLGCIHRSAGGMALSTLVTPTVSSLSHLSKSSNFNLQLWSLHALLLTIEAAGLSYVSQVQGTLFLAMEILLLEENGYVDLRQGIGHLINAIVAVIGPELAPDSTFFSRCKSVIAEISSSNEMATLLESVRFSQQLVLFAPQAVPVHLHVQGLIPMLYSRQPSLRYLAVSTLHHLIERDPAAMIDENIEENLFSMLDEETDSETAMLVRATIIRLLYTSCPVCPSRWLAVLRNIVLATSIRRNTGEVLSCFGHNPPDSTSENDVYYGEDEDNMISSSKQQQIRCAGSISSQFPPRNKHLRYRTRVFAAECVSHVPIAVGAEPAHFDLLLARSAISQGTYLSNDWLVLKLQELVSLSYQISTGQFEGMQPIGVKLLCLIMDKFGKAVDPEFPGHILLEQFQAQLVSAVRMAISTASGPLLLEAGLELATRVMTSSIIGGDRLALSRLFSLITRPLSDIEGLLYPSFADWVVCKIKVRLLTAHAAVKCNTYQFLRMRENAPNEYQQLAPSLVNSSTLLGKYWIRALKDYVSISFGLHSKINYKPFLDGIQSLLVLSKVQRYLDEVWLLILKATALDAAPLDFDENNPKNLLEQTFISGHCMVKLDRTEFQFLWGLSILVLFHSCQSMKNNSLKINLDFKQDKNFGEFIVHGLDDKRPCDQVLRVLSSLTTEVFFSNNFISVDICQQLLQALTYADCSSAPIIHLFTQIIRFCPDNFFEVEAFVFSAIELLSQYLGLILQCRDGSSQNNSSNTLISELSIASETMAYRIKGEYLWKLVMLVVSTSHQSFQQVSTNLCFSNIICFLQNIFPFMRKIFRERVESDGECTSPKVVFGAMVGLVGYFYVECDKKISLLENKISDSYKLLNKILLFCLGEATALAKLVPEIIYRSENVSNNDVLLWGSFRLCVQVIQGSFRSTNIQVHMLGLQVLRSYAQKELTEGSETKLDSFMMLLTELLGDLFLVMETTLKECSNKKSVSVVDECLKLVFLFHTLAQSKKYRQDATTLLLEALLMVFSLSSDTVSQELAEVNTISRKLFSHFIQIPSVAIQIKDIMLSAPAERRLQLQDMVRASVSQGQITVPVATSAHSEQNIQDSCSKNPGSTSEASDCVATHGNNDNEVVDDDWDDDWDAFQSLPAIANDGVDSGEISLTTRYNEQIPQENSSYGSCNADITARAMEDITCVDKELEEPSDLQFSSTEQQPKHDLPGSSHEGCAKLERHPSVDCKEQLADDETADELQQQVHEDTDHVNKDSEVLSAEIHGVKLDILDEDVEDDSPMNSNNLSDIAEEES

SEQ ID NO: 195693 - protein, 453 aa, Zea Mays
MISSSKQQQIRCAGSISSQFPPRNKHLRYRTRVFAAECVSHVPIAVGAEPAHFDLLLARSAISQGTYLSNDWLVLKLQELVSLSYQISTGQFEGMQPIGVKLLCLIMDKFGKAVDPEFPGHILLEQFQAQLVSAVRMAISTASGPLLLEAGLELATRVMTSSIIGGDRLALSRLFSLITRPLSDIEGLLYPSFADWVVCKIKVRLLTAHAAVKCNTYQFLRMRENAPNEYQQLAPSLVNSSTLLGKYWIRALKDYVSISFGLHSKINYKPFLDGIQSLLVLSKVQRYLDEVWLLILKATALDAAPLDFDENNPKNLLEQTFISGHCMVKLDRTEFQFLWGLSILVLFHSCQSMKNNSLKINLDFKQDKNFGEFIVHGLDDKRPCDQVLRVLSSLTTEVFFSNNFISVDICQQLLQRHLHMQIVQALLSSTYSPRLSDSALTIFLRLKPLSSLQ

SEQ ID NO: 195694 - protein, 712 aa, Zea Mays
MISSSKQQQIRCAGSISSQFPPRNKHLRYRTRVFAAECVSHVPIAVGAEPAHFDLLLARSAISQGTYLSNDWLVLKLQELVSLSYQISTGQFEGMQPIGVKLLCLIMDKFGKAVDPEFPGHILLEQFQAQLVSAVRMAISTASGPLLLEAGLELATRVMTSSIIGGDRLALSRLFSLITRPLSDIEGLLYPSFADWVVCKIKVRLLTAHAAVKCNTYQFLRMRENAPNEYQQLAPSLVNSSTLLGKYWIRALKDYVSISFGLHSKINYKPFLDGIQSLLVLSKVQRYLDEVWLLILKATALDAAPLDFDENNPKNLLEQTFISGHCMVKLDRTEFQFLWGLSILVLFHSCQSMKNNSLKINLDFKQDKNFGEFIVHGLDDKRPCDQVLRVLSSLTTEVFFSNNFISVDICQQLLQALTYADCSSAPIIHLFTQIIRFCPDNFFEVEAFVFSAIELLSQYLGLILQCRDGSSQNNSSNTLISELSIASETMAYRIKGEYLWKLVMLVVSTSHQSFQQVSTNLCFSNIICFLQNIFPFMRKIFRERVESDGECTSPKVVFGAMVGLVGYFYVECDKKISLLENKISDSYKLLNKILLFCLGEATALAKLVPEIIYRSENVSNNDVLLWGSFRLCVQVIQGSFRSTNIQVHMLGLQVLRSYAQKELTEGSETKLDSFMMLLTELLGDLFLVMETTLKHNQRNTDKMLQLFCWRPC

SEQ ID NO: 195695 - protein, 1016 aa, Zea Mays
MISSSKQQQIRCAGSISSQFPPRNKHLRYRTRVFAAECVSHVPIAVGAEPAHFDLLLARSAISQGTYLSNDWLVLKLQELVSLSYQISTGQFEGMQPIGVKLLCLIMDKFGKAVDPEFPGHILLEQFQAQLVSAVRMAISTASGPLLLEAGLELATRVMTSSIIGGDRLALSRLFSLITRPLSDIEGLLYPSFADWVVCKIKVRLLTAHAAVKCNTYQFLRMRENAPNEYQQLAPSLVNSSTLLGKYWIRALKDYVSISFGLHSKINYKPFLDGIQSLLVLSKVQRYLDEVWLLILKATALDAAPLDFDENNPKNLLEQTFISGHCMVKLDRTEFQFLWGLSILVLFHSCQSMKNNSLKINLDFKQDKNFGEFIVHGLDDKRPCDQVLRVLSSLTTEVFFSNNFISVDICQQLLQALTYADCSSAPIIHLFTQIIRFCPDNFFEVEAFVFSAIELLSQYLGLILQCRDGSSQNNSSNTLISELSIASETMAYRIKGEYLWKLVMLVVSTSHQSFQQVSTNLCFSNIICFLQNIFPFMRKIFRERVESDGECTSPKVVFGAMVGLVGYFYVECDKKISLLENKISDSYKLLNKILLFCLGEATALAKLVPEIIYRSENVSNNDVLLWGSFRLCVQVIQGSFRSTNIQVHMLGLQVLRSYAQKELTEGSETKLDSFMMLLTELLGDLFLVMETTLKECSNKKSVSVVDECLKLVFLFHTLAQSKKYRQDATTLLLEALLMVFSLSSDTVSQELAEVNTISRKLFSHFIQIPSVAIQIKDIMLSAPAERRLQLQDMVRASVSQGQITVPVATSAHSEQNIQDSCSKNPGSTSEASDCVATHGNNDNEVVDDDWDDDWDAFQSLPAIANDGVDSGEISLTTRYNEQIPQENSSYGSCNADITARAMEDITCVDKELEEPSDLQFSSTEQQPKHDLPGSSHEGCAKLERHPSVDCKEQLADDETADELQQQVHEDTDHVNKDSEVLSAEIHGVKLDILDEDVEDDSPMNSNNLSDIAEEES

SEQ ID NO: 195696 - protein, 879 aa, Zea Mays
MAISTASGPLLLEAGLELATRVMTSSIIGGDRLALSRLFSLITRPLSDIEGLLYPSFADWVVCKIKVRLLTAHAAVKCNTYQFLRMRENAPNEYQQLAPSLVNSSTLLGKYWIRALKDYVSISFGLHSKINYKPFLDGIQSLLVLSKVQRYLDEVWLLILKATALDAAPLDFDENNPKNLLEQTFISGHCMVKLDRTEFQFLWGLSILVLFHSCQSMKNNSLKINLDFKQDKNFGEFIVHGLDDKRPCDQVLRVLSSLTTEVFFSNNFISVDICQQLLQALTYADCSSAPIIHLFTQIIRFCPDNFFEVEAFVFSAIELLSQYLGLILQWDGSSQNNSSNTLISELSIASETMAYRIKGEYLWKLVMLVVSTSHQSFQQVSTNLCFSNIICFLQNIFPFMRKIFRERVESDGECTSPKVVFGAMVGLVGYFYVECDKKISLLENKISDSYKLLNKILLFCLGEATALAKLVPEIIYRSENVSNNDVLLWGSFRLCVQVIQGSFRSTNIQVHMLGLQVLRSYAQKELTEGSETKLDSFMMLLTELLGDLFLVMETTLKECSNKKSVSVVDECLKLVFLFHTLAQSKKYRQDATTLLLEALLMVFSLSSDTVSQELAEVNTISRKLFSHFIQIPSVAIQIKDIMLSAPAERRLQLQDMVRASVSQGQITVPVATSAHSEQNIQDSCSKNPGSTSEASDCVATHGNNDNEVVDDDWDDDWDAFQSLPAIANDGVDSGEISLTTRYNEQIPQENSSYGSCNADITARAMEDITCVDKELEEPSDLQFSSTEQQPKHDLPGSSHEGCAKLERHPSVDCKEQLADDETADELQQQVHEDTDHVNKDSEVLSAEIHGVKLDILDEDVEDDSPMNSNNLSDIAEEES

SEQ ID NO: 195697 - protein, 439 aa, Zea Mays
MAISTASGPLLLEAGLELATRVMTSSIIGGDRLALSRLFSLITRPLSDIEGLLYPSFADWVVCKIKVRLLTAHAAVKCNTYQFLRMRENAPNEYQQLAPSLVNSSTLLGKYWIRALKDYVSISFGLHSKINYKPFLDGIQSLLVLSKVQRYLDEVWLLILKATALDAAPLDFDENNPKNLLEQTFISGHCMVKLDRTEFQFLWGLSILVLFHSCQSMKNNSLKINLDFKQDKNFGEFIVHGLDDKRPCDQVLRVLSSLTTEVFFSNNFISVDICQQLLQALTYADCSSAPIIHLFTQIIRFCPDNFFEVEAFVFSAIELLSQYLGLILQCRDGSSQNNSSNTLISELSIASETMAYRIKGEYLWKLVMLVVSTSHQSFQQVSTNLCFSNIICFLQNIFPFMRKIFRERVESDASGCAYRLFKVHFVVPTYRCTCWVCKY

SEQ ID NO: 195698 - protein, 57 aa, Zea Mays
MRPLQSSTSFRKPATVSKKGNIGIPRPKSHRSMIDPRTSLYTAPLSPLPLLVKVVLH

SEQ ID NO: 195699 - protein, 79 aa, Zea Mays
MSGGRPWPQIYIPRGAQIPGQVQERPAWFLGDRGPVTTISDRDGRDEENNTEKIFGVGFCVFCPKPAPEVRDRADQRAP

SEQ ID NO: 195700 - protein, 71 aa, Zea Mays
MLNLSPDLCSSYAMSLNPLVVDTAPRASLIRQKSQAHGQHTRHAQPKSDRPGEDVGLLMMVDKCQCARPSI

SEQ ID NO: 195701 - protein, 271 aa, Zea Mays
MARAHLALVSFFAASIIGAASKSFTIANNCEHTVWPGILSSAGSAGVDTTGFALAPGESRALSVPSGWSGRLWGRTLCSTDAATGRFACVTGDCGSGRQDCGGGGAAPPATLAEFTMDGSGGMDFYDVSLVDGYNLPMLVAPQGAAAAAGGSCVPTGCMADLNGACPADLRVAASTTSSGGGGVACKSACEAFGSAQYCCNGDYGNPSTCKPSAYSQFFKNACPRAYSYAYDDATSTFTCAGDTAYAITFCPSTTRSRRPEVARRRKEPCR

SEQ ID NO: 195702 - protein, 135 aa, Zea Mays
MREIIVRSYLIYFAVFFICKSCLATISNRFVLETGPTFKLKRMTKSKWALEENAYLTNFSMTMNGTNFLLRHVNSSSKSFISKLYPCSCTDSSKVHFRTIMKARSVLVGCSAAGTGTTIPKCHHTFKHPLGHPQQ

SEQ ID NO: 195703 - protein, 257 aa, Zea Mays
MWCRYSFSCVATQRMSSEFSWHYIPGAGDDEESWARGLTPTLFWKHSYDLIDAGPDRCNQIVADIVEKDRVYRAQRGEHCPQITCKSLRSLAGAKCNDDQTTEMCAMNLDHCTSTMDAHCSNNGLLLFWIGTSNLAVSSTFHGALVGVDCILNCDSTSKLPASSSENSYLELSIVGSKDDRFSLMRNLPKAVDFAKRNLMAGRKILVCCQNGEDISICVALAILALLFDDNGKYNNVDCLVKLLHKDLRLFLICISA

SEQ ID NO: 195704 - protein, 541 aa, Zea Mays
MAAAAPEAADEVAPSATLSVYKAARCIKRRASTLYNALRSVAEDAAFVAEVAALWPSLPLVANLRCGLWYAPPRAFAATCYFKSTDGHAGNWSFSTARLNLHLALLAGERGGCIIVDSTRRGKRFPDSMSKTIPIWCSVLNRAIERHRLQAIHKSAEVNYQSSTLLNGDAENNSDLSNWDSSVHLPVWVLGTEKNAIEGRIDEWTDQFESCGADIHSLAVGLQKPLRPLWISQRTRIWLNEVPELESWDFTPIILISASDAVATQRMSSEFSWHYIPGAGDDEESWARGLTPTLFWKHSYDLIDAGPDRCNQIVADIVEKDRVYRAQRGEHCPQITCKSLRSLAGAKCNDDQTTEMCAMNLDHCTSTMDAHCSNNGLLLFWIGTSNLAVSSTFHGALVGVDCILNCDSTSKLPASSSENSYLELSIVGSKDDRFSLMRNLPKAVDFAKRNLMAGRKILVCCQNGEDISICVALAILALLFDDNGCFDYGNYFVKRDVTKLEMRRRLVFICKFAVNARPSRGNLKQVYGFLSSQKELLSCLT

SEQ ID NO: 195705 - protein, 481 aa, Zea Mays
MAGTDRLYPEIGTYDLEPPQVPASAGGSGEEEAGVCDALVMWDDESDACPSHEAAPIIFEKGTRDPPPKVFKEERLDVVHYSEFSDEMATEKEFGENNYDSFPSCEQTGIIWVPPSVPPMPKHDHDEWQKGFGYNSPCFPEEEYKWDIDEENLEMTMWDVLSEMVVAGKDKILSIASFDLGMYGTSMISDFCLEETLKDKAQTLKDVSAGSEHALLETELTKWLPDSASTSCMLCGARFHPIICARHHCRFCGGIFCGGCSKGRSLMPPKFMNSDPQRVCDVCGVRLECIQPYLMNRFSRACQLPTQDLTDLSTLRSWINTPWAVRMEYEIYKAANSIHGYCKVGELKPEKSIPDSILRQAKGLAIITEVKVGVMLTYKIGTGLVVARRGDGSWSPPSAISTCGLGYGVQAGGELADYIIVLRNKDAIKTFSGNAHMSIGAGVSASAGHFGRVAEADFRAGDGGYAACYTYSCSKAMSSWI

SEQ ID NO: 195706 - protein, 347 aa, Zea Mays
MAGTDRLYPEIGTYDLEPPQVPASAGGSGEEEAGVCDALVMWDDESDACPSHEAAPIIFEKGTRDPPPKVFKEERLDVVHYSEFSDEMATEKEFGENNYDSFPSCEQTGIIWVPPSVPPMPKHDHDEWQKGFGYNSPCFPEEEYKWDIDEENLEMTMWDVLSEMVVAGKDKILSIASFDLGMYGTSMISDFCLEETLKDKAQTLKDVSAGSEHALLETELTKWLPDSASTSCMLCGARFHPIICARHHCRFCGGIFCGGCSKGRSLMPPKFMNSDPQRVCDVCGVRLECIQPYLMNRFSRACQLPTQDLTDLSTLRSWINTPWAVRMEYEIYKAANSIHGYCGRAET

SEQ ID NO: 195707 - protein, 77 aa, Zea Mays
MQIQTQVHYLGPRIQNELIHLLASAIKSEIIKKNKECKPRGLFRVEYFVPLVDQAIASLITRFEQYKDTKKMVFYLL

SEQ ID NO: 195708 - protein, 120 aa, Zea Mays
MASEKKQSNPMREIKVQKLVLNISVGESGDRLTRAAKVLEQLSGQSPVFSKARYTVRSFGIRRNEKIACYVTVRGEKAMQLLESGLKVKEYELLRRNFSDTGCFGFGIQEHIDLGIKPVT

SEQ ID NO: 195709 - protein, 100 aa, Zea Mays
MFMDDYLKQVSFAIKRSGGKDQDGSEVFEWFERYVVPSKLDVSITQLELCSLLSQGGDVTDKHITLLMNAGLLTRQLIDPNIYWFSIPRIGPILKGLSQE

SEQ ID NO: 195710 - protein, 163 aa, Zea Mays
MTEPSSSYSLPSKKRQRSPDDNEHSLDRGRICLSLDDNLTFNDTMIALQLMRTQFPKLDKVLAQPFILQSQLYSSVKDRTQVDRDLESFKKDKVLRIFKLSSGQDDHAIMFMDDYLKQVSFAIKRSGGKDQDGSEVFEWFERYVVPSKLDVSITQLELVSIKN

SEQ ID NO: 195711 - protein, 577 aa, Zea Mays
MRLPLPLLALVCCALMARQHCAAAGKARHLRWEISNMFWSPDCEEKVVIGINGQFPGPTIRARAGDTVHVQLRNALHTEGVVIHWHGIRQIGTPWADGTAAISQCAINPEETFTYRFVVDKPGTYFYHGHYGMQRAAGLYGSLVVDVAEGEEEPFQYDGELNLLLSDWYHESIHTQMVALSSRPFRWIGEPQSLLINGRGQFNCSLAAAHTQGATNTQCAATAANTQCAPVVLPVQPNKTYRLRVASTTSLASLNLAIGLTVVEADGNYVDPFVVDDIDLYSGDSYSVLLTTDQDTSSNYWVSVGVRGRLPKTAPALAVLNYRPNRASDLPALAPPVTPAWDDYGHSKAFTYRIRARAGTPPPPPTAARRIELLNTQNRMDGRIRWSINNVSMVLPATPYLGSLKMGLKSTLAAARPAETFSREYDVTLPPPNPNTTAGDNVYVLAHNTTVDVLLQNANALSRNVSEVHPWHLHGHDFWVLGYGDGAYRGDAADEARLNLRDPPLRNTAVIFPYGWTMLRFVADNPGVWAFHCHIEPHLHMGMGVIFAEAVDLVAKVPNEAVSCGATATALMAGGHL

SEQ ID NO: 195712 - protein, 76 aa, Zea Mays
MTHGTSSSHSILHGHCFGSSLANFSTVFQQRPWTSTIAEMLPTESLIVDQCSNILASAALNKLNRLASWPFSCIYL

SEQ ID NO: 195713 - protein, 70 aa, Zea Mays
MIPEVIEVGVKPYLYDIFFKVENVDVEGWNDESVSLGKRASVDVQRARKQVIEKSGKKQKMKSMGYKKMI

SEQ ID NO: 195714 - protein, 282 aa, Zea Mays
MVAASVAERAYEAATRSALVALERNLIPDAVTRRLTRLLLAQRLRQGYLPSAPLQLQQLLQFVHSLEEMPIAIETDKAKAQHYELPTTFFKLVLGKNLKYRDNELSNIEIIVADISKFEMERSFDRIVSIEMFEHMKNYKSLLKKISRWMKEDGLLFVHLFCHKAFPYHFEDKNDDDWITRYFFTGGTMPSANLLLYFQEDVSVVDHWLVSGTHYARTSEEWLKRMDKSITSIRLIFEETYGKESTTKWIAYWRTFFISVAELFGYNNGDEWMVAHYLFRKK

SEQ ID NO: 195715 - protein, 305 aa, Zea Mays
MVAASVAERAYEAATRSALVALERNLIPDAVTRRLTRLLLAQRLRQGYLPSAPLQLQQLLQFVHSLEEMPIAIETDKAKAQHYELPTTFFKLVLGKNLKYSSCYFPGDSSTLEDAEVAMMDLYCERSKLQDGQSILDVGCGWGSLSLYIAKKYRNCSVTGICNSTTQKAFIEEQCRDNELSNIEIIVADISKFEMERSFDRIVSIEMFEHMKNYKSLLKKISRWMKEDGLLFVHLFCHKAFPYHFEDKNDDDWITRYFFTGGTMPSANLLLYFQEDVSVVDHWLVSGTHYARTRYILPNFKLSSL

SEQ ID NO: 195716 - protein, 125 aa, Zea Mays
MVVSLHHWILWIMSAPLIAYKRCGWGISPRGAGYTFGQDIAQQFNHTNGLSLISRAHQLVMEGFNWCQDKNVVTVFSAPNYCYRCGNMAAILEIGENMDQNFLQFDPAPRQIEPDMTRKTPDYFL

SEQ ID NO: 195717 - protein, 83 aa, Zea Mays
MCDLLWSDPDDRCGWGISPRGAGYTFGQDIAQQFNHTNGLSLISRAHQLVMEGFNWCQKHQMCRARLHKTLGNQTQVGCIALA

SEQ ID NO: 195718 - protein, 787 aa, Zea Mays
MNESSAAASSYLLLTLIIHLLPFVSAHDFLSAGSSLSVEHSSDVLHSQDGTFTCGFYRISPNASTFSIWFSGSSERTVVWSANPLHPVYTWGSKVELDADGSMVLKDYNGQIVWTNNASVSDAGHVQARLLGTGNLAVEGRGGAILWQSFDSPTDTLLPTQRITASTKLVSTNRLLVPGHYSFRFDDQYLLSLFDDEKNISFIYWPNPRMTIWAKGRVQFNSTMSGALDTLGHFLASDNATFTAADWGPGIMRRLTLDYDGNLRLYSLNVADRTWSVTWMAFPQLCNVHGLCGENGICVYTPVPACACAPGFEVIDPSERSKGCRPKTNISCDVEKVDFAKLPHTDFLGYDMTAHHSVSLDFCKKECLHDCNCKGFAYWEGIGDCYPKSVLVGGVTLQNFASTGTMYIKIPNGLQVLDASIPQSQPFGPKYSPDCGTTNRYFIADFLDKLKRDHSGSKYLYFYGFLSAIFLAEVVFVGLGWFILRREYRELRGVWPAEPGYEMIANHFRRYAYRELVTATRKFKDELGRGASGIVYKGVLEDKGAVAVKKLAEINQSEEEFRHELSVISMINHMNLVRVWGYCSDGPHRILVSECFENGSLDKILFGSKGSEILLGWKQRFDIALGVARGLAYLHHECSEWVIHCDVKPENILLDENLVPKIADFGLAKLLNRGRSNLNVSKIQGTRGYLAPEWVSSLPITAKVDVYSFGVVLLELLIGARVSNMGNDEDVEAEMVLGRVSRLVKEKLQSDDTEPSWIADFIDSRLNGDFNNLQARIMMRLSISCLK

SEQ ID NO: 195719 - protein, 182 aa, Zea Mays
MAAQGSLVMWRAVFAALGLLMVATLVYTLATDGSPFRLELFTPWMVATLADFYVNVIAISAWVIYKEANWVSSAVWVVLLFCFGSAVTCAYIVKKLLEVTSAGSSQDPLDLLFIRQGNLSQRKCSYVVIGRVIFSILGIFMAAVVTYTVITDGLPFRKELLTPSGLLTRNHHGYQLPFGLSC

SEQ ID NO: 195720 - protein, 248 aa, Zea Mays
MAAQGSLVMWRAVFAALGLLMVATLVYTLATDGSPFRLELFTPWMVATLADFYVNVIAISAWVIYKEANWVSSAVWVVLLFCFGSAVTCAYIVKKLLEVTSAGSSQDPLDLLFIRQGNLSQRKCSYVVIGRVIFSILGIFMAAVVTYTVITDGLPFRKELLTPWMAATLIDFYINVFAISVWVAHKESSWISTTIWIVLLICFGSITTCGYIVIQLFKVSYQDPIYHVLLNSHSKFENLLKFYVQLGW

SEQ ID NO: 195721 - protein, 252 aa, Zea Mays
MAAQGSLVMWRAVFAALGLLMVATLVYTLATDGSPFRLELFTPWMVATLADFYVNVIAISAWVIYKEANWVSSAVWVVLLFCFGSAVTCAYIVKKLLEVTSAGSSQDPLDLLFIRQGNLSQRKCSYVVIGRVIFSILGIFMAAVVTYTVITDGLPFRKELLTPWMAATLIDFYINVFAISVWVAHKESSWISTTIWIVLLICFGSITTCGYIVIQLFKVSYQDPIYHVLLNSHSNLAGNIKMFLLSICKKIE

SEQ ID NO: 195722 - protein, 102 aa, Zea Mays
MAAVVTYTVITDGLPFRKELLTPWMAATLIDFYINVFAISVWVAHKESSWISTTIWIVLLICFGSITTCGYIVIQLFKVSYQDPIYHVLLNSHSKYGIPTSL

SEQ ID NO: 195723 - protein, 630 aa, Zea Mays
MASGRRDKDASLNEYEEQRLATIAENKRRLEALNIPTLSNMKQHGRTTKRTKRIHNTSDVATEGHNLRARPQKNCVENGNEQINEDLGCESMGDFLCDNEDSRNNAEKKRKGRGITRLDEIFARKPSMPKIKVELNKYGQPIGDNCRRFSSALGCHVRRKLSVGCSDWRLVDPQKKYEVWEDMKKIYDIDDAAFGWFMDSARRKWKDFKSTLKHQFFDENISDADLKERHKGRVNDDDWKFLTEYWRSSESEANKLRRSPRRDEVYIKTHTRKNGVPSRHAEPIINKLKAIVEAHPELKQRTIQEGDAFAVACGEKEPRGRVRALGLGPTPQDVGTPGLKCYTPTRLQMEGLARKKAECEKVALQQRITELEEQMKEERMARELQDVELISHNGSNSRQNGSRRYEEHDVEAHHDAQFVEDEDCAENHINHHCDDGEQHHQNDPVGAAPIVQHHQSSPVGAAPTVQCLQNNHVRAAPTIQRHQNSPIGAVPPKQPRRCITTSLAHPVPPRNEAPSRIQHDELVGKDVILYAIIGPEQPVAKGTIISTNPNTLLGGVPLGKEYCEVIVNIVLKRDAILPCPYGYVETMADAHQMSVAWLYKRMKISKASGSPQGIGGGWHSRQAAVGQTRD

SEQ ID NO: 195724 - protein, 658 aa, Zea Mays
MDVYYQPLVDDLLDMFVNGVRTYDASKGEFFQLRAAVIWTITDFPGLGYASGSVTSGEAACPDCHYYTSSLRLGNGSKTCYMDHRRFLDENHPFRFDVNKFGCTEFRAAPTPLSGEEILECTKHLNPIFGKDPSGKKPTSKRRKKGEPLVIFKRRSIWFMLPYWKDLMLRHNFDFMHIGKNVSESLVNIFMGTDGKSKDNLNSRFDLQALGIRSDLHPIKVEDQFYLPPAPYSMSPDERKLFCQVLKGVKFPEGYASDIRHNVHVNERKIIGLKSHESHIILQHLLPLALRKILPEIVSAGVIRISNFFKKLSSPVIQISDMEKLEANIAETLSFLETVFVPSFFDIMIHLMVHLPTQARIAGPVHFRSMWPIERYLMRLKGSVHTKSHCEGSIMEWSMFTECLTFCARYLHGETQLNHQVRYEYDEVCTTTPFFHTIGQGLAGKCLVNLDHKTWLQAHRYVLFNYDNITPYLDKHAHYLSSIGHRNKRDINRLQHESFHEWFRLHVSVEEMHGEAQDEIKILAKSPMTVANKYSSYNMNGFNFHTSSYDEGRPIQNSGVVVVAESTIFDKGSNDNIIIGKKTYFGIIKEIIELNYHHKGNVVLFKCDWVDNRVQDKWVKIDRLGITTVNFKHLFNTGDKLSDEPFILASQAVQVYYV

SEQ ID NO: 195725 - protein, 51 aa, Zea Mays
MHLSPKCHARAHKKGRNSIVQTHKSPSCAHAPTGSGQKNNILRSNILNIKI

SEQ ID NO: 195726 - protein, 142 aa, Zea Mays
MLPCWTQEPSSGQMKEQFVVEMLARPSSAAGSGPGRSQQRQEDASSAQGSRPQSSAASDTPVAQQPDANSVRAKLELAKNTKLEAAKRKLQEGYQEFDNAKKQRSIQMVHPQNLPKQANNTQNFQPSGPAASQGMAATGIED

SEQ ID NO: 195727 - protein, 300 aa, Zea Mays
MVAPSRRSLCSLPWRLPLLGFQRPDLLSPMALGPARRPVSLPPLTPASWPRFLPSPKLPPPAASSPCSAFVPMAASPPRALSPWILPAWTPAEPPASRLVPRARSSCSTPARGAPFPASMAAIAVEFPGRRAPWWVSWPSSLSRSALASIRAHPGLIEVPASSTSLTQAVMCLWSLLFAFDSMAVVLISLAVELLRAHLCSASARCPVRRFCSLAMVTQPSHACSLPVLAPAPAFPLVAHGTDLSALPSLSSCVPCVFSLLGVLPRWWSSSSLMVPSSYSLAGGRAAHSWCPVRVHLLCY

SEQ ID NO: 195728 - protein, 117 aa, Zea Mays
MGISNHTTYVALNPCICQPFPRILHYMNWSTLPGSTLPYHPASCQEDNCYSHHLPRPVRGCPFTYGIDGFRLIHYEVQVNHPTSSDDGFRPCLDNEFLTVDDAFIIPIKFSFGSYES

SEQ ID NO: 195729 - protein, 242 aa, Zea Mays
MRFFKGSKVEVLQEAEVPFGSWRPGEIISGNGHTYLVRYDESPVDSSVAVERMPRRLIRPSPPTDDPVRWSLGSILEAFDSYSWKVAEVVRVLRKNQYLVRLLGSSLELSAHASDLRLRKLWLDDRWIVTQKYSARCLDGAFRGQSEDGNLDCNLRKDSHIQLENRNAFEGDTSRGMKRKSSAISTHPHCSDISKRLQCSDATKRFWTLNRDGRHTKLVDRGFFPLAEKGQECGSRLVLVAG

SEQ ID NO: 195730 - protein, 283 aa, Zea Mays
MRFFKGSKVEVLQEAEVPFGSWRPGEIISGNGHTYLVRYDESPVDSSVAVERMPRRLIRPSPPTDDPVRWSLGSILEAFDSYSWKVAEVVRVLRKNQYLVRLLGSSLELSAHASDLRLRKLWLDDRWIVTQKYSARCLDGAFRGQSEDGNLDCNLRKDSHIQLENRNAFEGDTSRGMKRKSSAISTHPHCSDISKRLQCSDATKRFWTLNRDGRHTKLVDRGFFPLAEKGQGWRLVKHPSIGSYKWRSLPHVLQCDKCDNISIELPLVKQGQECGSRLVLVAG

SEQ ID NO: 195731 - protein, 245 aa, Zea Mays
MRFFKGSKVEVLQEAEVPFGSWRPGEIISGNGHTYLVRYDESPVDSSVAVERMPRRLIRPSPPTDDPVRWSLGSILEAFDSYSWKVAEVVRVLRKNQYLVRLLGSSLELSAHASDLRLRKLWLDDRWIVTQKYSARCLDGAFRGQSEDGNLDCNLRKDSHIQLENRNAFEGDTSRGMKRKSSAISTHPHCSDISKRLQCSDATKRFWTLNRDGRHTKLVDRGFFPLAEKVKQGQECGSRLVLVAG

SEQ ID NO: 195732 - protein, 360 aa, Zea Mays
MRFFKGSKVEVLQEAEVPFGSWRPGEIISGNGHTYLVRYDESPVDSSVAVERMPRRLIRPSPPTDDPVRWSLGSILEAFDSYSWKVAEVVRVLRKNQYLVRLLGSSLELSAHASDLRLRKLWLDDRWIVTQKYSARCLDGAFRGQSEDGNLDCNLRKDSHIQLENRNAFEGDTSRGMKRKSSAISTHPHCSDISKRLQCSDATKRFWTLNRDGRHTKLVDRGFFPLAEKVDAVDSPCLMLRGKYMHASHKGHTRTTEEFSDTESTSSSVGSSSPNSTPHRSQYYNLVNQSGDICSRTDGDEAFTFERETSEHGNDGSRGETHLLELHAYRATMLALYACGSISWEQEALLTNLRAKVGGL

SEQ ID NO: 195733 - protein, 94 aa, Zea Mays
MMIQQDFFPSPLPISRVAARPFLPSAGRTGSARTCTQPPRHCFCPRSFFARHDVSQPSPKASLSSTCLLLRVELPIRACLYSLIAVDAEHSLRL

SEQ ID NO: 195734 - protein, 850 aa, Zea Mays
MLEVLDMAPPPPPPPPPPHARHHQGAAKGGHAERRKQPLQSSVTQPKAEPAAAAAAAVLPEGGKRCGGGGGRRRGGRGRAKAPPGEPRVALALAPPPRTVIGPPVPSKGLSFCRRPGFGTVGARCVVKANHFLAELPDKDLIQYDVKITPEVSSRTVNRAIMAELVRLYRSSDLGMRLPAYDGRKNLYTAGTLPFDAREFVVRLTDEDDGTGVPPREREYRVAIKFAARADLHHLRQFIAGRQADAPQEALQVLDIVLRELANQRYVSIGRSFYSPDIRKPQRLGDGLQSWCGFYQSIRPTQMGLSLNIGELCGLGNISCPHACDSFLFCPVAAAYMAMLTADMSSTAFIEPLPVIEFVAQILGKDVISRPLADANRIKIKKALRGVKVEVTHRGNVRRKYRISGLTTQPTHELIFPIDEQMNMKSVVEYFKEMYGFTIQHPHLPCLQVGNQKKANYLPMEACKIVEGQRYTKRLNEKQITSLLKVTCQRPREQEMDILQTVHQNGYEQDPYAKEFGINISEKLTYVEARVLPAPWLKYHDTGKEKECLPQVGQWNMVNKKVINGCKVSHWACINFSRSVPEATARGFCQELAQMCQISGMEFNSEPVMPIYSARPDQVVKALKSVYNIALNKLKGKELELLLAILPDNNGPLYGDIKRICETDLGLISQCCLTKHVFKISKQYLANVSLKINVKMGGRNTVLLDAISWSIPLVSDIPTIIFGADVTHPETGEDSSPSIAAVVASQDWPEVTKYAGLVCAQAHRQELIQDLYKTWHDPQRGTVTGGMIRELLISFRKATGQKPLRIIFYRDGVSEGMRIPRTKLPASCNICGGSKTSSYETIYKQSQRQK

SEQ ID NO: 195735 - protein, 68 aa, Zea Mays
MGPAHSLCYCRSYFESDETPILSLVLVCASTSSGLFCTCCHDPRLNNIPDTTERAIGQPHEHAPTPFQ

SEQ ID NO: 195736 - protein, 604 aa, Zea Mays
MVWVLPEHPADPDGIVTQHRFPIDEQMNMKSVVEYFKEMYGFTIQHPHLPCLQVGNQKKANYLPMEACKIVEGQRYTKRLNEKQITSLLKVTCQRPREQEMDILQTVHQNGYEQDPYAKEFGINISEKLTYVEARVLPAPWLKYHDTGKEKECLPQVGQWNMVNKKVINGCKVSHWACINFSRSVPEATARGFCQELAQMCQISGMEFNSEPVMPIYSARPDQVVKALKSVYNIALNKLKGKELELLLAILPDNNGPLYGDIKRICETDLGLISQCCLTKHVFKISKQYLANVSLKINVKMGGRNTVLLDAISWSIPLVSDIPTIIFGADVTHPETGEDSSPSIAAVVASQDWPEVTKYAGLVCAQAHRQELIQDLYKTWHDPQRGTVTGGMIRELLISFRKATGQKPLRIIFYRDGVSEGQFYQVLLYELDAIRKACASLEPNYQPPVTFVVVQKRHHTRLFTNNHKDRSSMDKSGNILPGTVVDSKICHPTEFDFYLCSHAGIQGTSRPAHYHVLWDENNFTADEMQTLTNNLCYTYARCTRSVSVVPPAYYAHLAAFRARFYMEPEMSENQTSKSSNGTNGGLVKPLPAVKEKVKRVMFYC

SEQ ID NO: 195737 - protein, 960 aa, Zea Mays
MAPPPPPPPPPPHARHHQGAAKGGHAERRKQPLQSSVTQPKAEPAAAAAAAVLPEGGKRCGGGGGRRRGGRGRAKAPPGEPRVALALAPPPRTVIGPPVPSKGLSFCRRPGFGTVGARCVVKANHFLAELPDKDLIQYDVKITPEVSSRTVNRAIMAELVRLYRSSDLGMRLPAYDGRKNLYTAGTLPFDAREFVVRLTDEDDGTGVPPREREYRVAIKFAARADLHHLRQFIAGRQADAPQEALQVLDIVLRELANQRYVSIGRSFYSPDIRKPQRLGDGLQSWCGFYQSIRPTQMGLSLNIDMSSTAFIEPLPVIEFVAQILGKDVISRPLADANRIKIKKALRGVKVEVTHRGNVRRKYRISGLTTQPTHELIFPIDEQMNMKSVVEYFKEMYGFTIQHPHLPCLQVGNQKKANYLPMEACKIVEGQRYTKRLNEKQITSLLKVTCQRPREQEMDILQTVHQNGYEQDPYAKEFGINISEKLTYVEARVLPAPWLKYHDTGKEKECLPQVGQWNMVNKKVINGCKVSHWACINFSRSVPEATARGFCQELAQMCQISGMEFNSEPVMPIYSARPDQVVKALKSVYNIALNKLKGKELELLLAILPDNNGPLYGDIKRICETDLGLISQCCLTKHVFKISKQYLANVSLKINVKMGGRNTVLLDAISWSIPLVSDIPTIIFGADVTHPETGEDSSPSIAAVVASQDWPEVTKYAGLVCAQAHRQELIQDLYKTWHDPQRGTVTGGMIRELLISFRKATGQKPLRIIFYRDGVSEGQFYQVLLYELDAIRKACASLEPNYQPPVTFVVVQKRHHTRLFTNNHKDRSSMDKSGNILPGTVVDSKICHPTEFDFYLCSHAGIQGTSRPAHYHVLWDENNFTADEMQTLTNNLCYTYARCTRSVSVVPPAYYAHLAAFRARFYMEPEMSENQTSKSSNGTNGGLVKPLPAVKEKVKRVMFYC

SEQ ID NO: 195738 - protein, 340 aa, Zea Mays
MEYSSSEDEGLVGDFIDAEDNTFTKNIDQGTGVMASQIHGDDPSVGSMPPVIGNELLMAADVLAKNDEPRMGMEFDSDAAARAFYNAYALCFGFGIRVARSRSERRKGVEVLVMKRFVCLKEGHHRKKKPVEPSNKKKRKRLSIRDGCPAMMEVVRRGPDRWVITKLVLEHTHVIVSADRAREVQLHRLSGKFQEHENQLQEVRRNVFGDTNAQGLFNYFKKMQSDNSSFFFSIQVDSKNYVSNAVWVDARARMAYTYFGDAVYFDTTCSQNENMLPFAAFTGVNHHGDTVVFGCALILDRTESSYGWIFETWLTAMDSRLPFSLTTDEDGASCLDARRD

SEQ ID NO: 195739 - protein, 333 aa, Zea Mays
MAAAMANTTCLRSRLLVLPPPPAPRTVVSFRLRPCATTISSSSRKRRPRLAARAAPPGGAVAPASAASKEDDQGEMGSGGGLSADDAERLCQFLRADLPHLFDDVGIDRSAYDDRVRFRDPITRHDTIDGYLFNIRLLKLLFRPDFYLHAVKQTGPYELTTRWTMVMKFMLLPWKPELVFTGLSIMGVNPKNLKFNSHVDLWDSIQNNEYFSSEGLWDVFKQLRIYKTPDIETPNYLILKRTAHYEVRSYAPFLVVEAKGDKLTGSSGFNNVTGCIHPDSSANEQRLGQFTSSKYSSYFAEGRRRHCCSEKIQWTTKRRNCAPEGEGSALPVT

SEQ ID NO: 195740 - protein, 232 aa, Zea Mays
MAAAMANTTCLRSRLLVLPPPPAPRTVVSFRLRPCATTISSSSRKRRPRLAARAAPPGGAVAPASAASKEDDQGEMGSGGGLSADDAERLCQFLRADLPHLFDDVGIDRSAYDDRVRFRDPITRHDTIDGYLFNIRLLKLLFRPDFYLHAVKQTGPYELTTRWTMVMKFMLLPWKPELVFTGLSIMGVNPKNLKFNSHVCRIFGIRYKTTSTSLLKDYGMFSNSYGFTRPLT

SEQ ID NO: 195741 - protein, 542 aa, Zea Mays
METSAPPNAPAPPAQPRRRLPDFQQSVRLKYVKLGYHYLISHGMYLLLSPLMALVAVQLSTVSPHDLADLWEQLRFNLLSVVACSTLLVFLSTVYFLTRPRPVYLLDFACYKPESERKCTRETFMHCSKLTGSFTDENLEFQRKILERSGLGEDTYLPPAVLRVPPNPCMDEARKEARAVMFGAIDQLLEKTGVRPKDIGVLVVNCSLFNPTPSLSAMVVNHYKLRGNIVSYNLGGMGCSAGLLSIDLAKDLLQVHPNSYALVISMENITLNWYFGNNRSMLVSNCLFRMGGAAILLSNRRSDRRRSKYELVHTVRTHKGANDKCFGCVTQEEDEIGKIGVSLSKDLMAVAGDALKTNITTLGPLVLPLSEQLLFMGTLIAKKVLKMKIKPYIPDFKLAFEHFCIHAGGRAVLDELEKNLELTDWHMEPSRMTLYRFGNTSSSSLWYELAYTEAKGRIRKRDRIWQIAFGSGFKCNSAVWKALRTVNPAKEKSPWMDEIDNFPVDVPKISKCCAGALERSQHKTAFFHFPVAGRHAEAYNVL

SEQ ID NO: 195742 - protein, 228 aa, Zea Mays
MAGVPLPSSPCSSARSRIPLPTVYLPTRSSPSFFSGSDAAQRYCFSLLQLGTHLSVRPAALLPQSRLVYVVARRRSVRLHRVVVRARLLAVNPARISLGHDPSTFRRRWSSTMSSSMTPSTGVSPSVCCWIPASPSTLMSRRSCVVLVMRQPLNKICCWIPRRALYRHGADARILHLRVFWMSARPLRVVGLIGTLLVHTSRVRDVVTCLLASSERPGEEIPEGLYGR

SEQ ID NO: 195743 - protein, 108 aa, Zea Mays
MRRAQQRSCKLEIPRPPKCKGLHTLFQATRQCPPFASFLPLYKKHFLILSMASNSPMGKVDRHCSKDCHSRKNMLHKHFSASPIHQISLPAWETICNLFHQRKELLFG

SEQ ID NO: 195744 - protein, 155 aa, Zea Mays
MPPGSTTRRWLLSSRACDKSSNKGRRRTTNPAPRGFATDVVSPVILLLNVHIQVIVTGTMTRKRRRRWRRKGITTRRRVARRTWGGDGTPTRDPPTPAPTRTSPTSPSTKALSSQMSTTNVSWPRTAKRRRYNLEIPQNTLLLMMRVALVKMMMI

SEQ ID NO: 195745 - protein, 137 aa, Zea Mays
MQSLQDKASEWSGVAAADAFAIDDVNIFEYLGGTPQPFVDLSTNFYTRVYEDEEEWFREIFGGSKKEDAIQNQYEFLIQRMGGPPLFSQRRDGLPKMIEETSIFMTPCPYRTTPTILGYPPSCRAVATPHATSFGRN

SEQ ID NO: 195746 - protein, 400 aa, Zea Mays
MTPRPRRPPTRTGSLPPLSPTRRRSSSGELPSSVHTHTKIATDSRFMPFFQNCIGAIDGTHIPITIAEHRAPPYRNRKGTLSHNVMVAWDFDLNFTFVSCGWEGSASDAGVPRSAISKGFSVPEGKFYLVDGGYANTSSFIAPYRGVRYHLNEFRRRRSSQSGYANYRELFNHRHAILRNHIERAIGVLKKRFPILKVGTFHPIENQIKITAATVAFHNIIRGQNGDERWLDNQPNYISPSQYVDVPEGDTNYLNDTESRMIWNNVYEKGLVDVMHDHKDNPKFKGQNGWNRDGWNSITTKFNEKFPLAHFSKQQLQEKERELKGYYKAIRDSRKESGVGWNDTLCMVLAEPEVWPRLIRVSKLSLYNSIFVHSICSLLLLIIYFMLHLIGSPKGIKVSQ

SEQ ID NO: 195747 - protein, 619 aa, Zea Mays
MFCIISMFCMIKILIRAISTSLDMGSWEKQVRQFLLDEEEDDDELFFVILPAIIPYLSEEKEPIHTSSLTGAKKLPSSVHTHTKIATDSRFMPFFQNCIGAIDGTHIPITIAEHRAPPYRNRKGTLSHNVMVAWDFDLNFTFVSCGWEGSASDAGVPRSAISKGFSVPEGKFYLVDGGYANTSSFIAPYRGVRYHLNEFRRRRSSQSGYANYRELFNHRHAILRNHIERAIGVLKKRFPILKVGTFHPIENQIKITAATVAFHNIIRGQNGDERWLDNQPNYISPSQYVDVPEGDTNYLNDTESRMIWNNVYEKGLVDVMHDHKDNPKFKGQNGWNRDGWNSITTKFNEKFPLAHFSKQQLQEKERELKGYYKAIRDSRKESGVGWNDTLCMVLAEPEVWPRLIRVSKFRNRPFPLFYSLEGLYEGSVATGELNFTSTAVDLPPPSAPSRSVSGQSLSPLSTNSLDLDGQETTSVFNLSCDAQSVRVNTNEPTEAQFVPSNQESSQREGGSGRKRKQSHVGLALESYVEFKKIQNTETLETLKEHKRQEDQFSISKCQAELKGMDGLTAVDKSYALELFVSVTNREIFLTTTEHDVREIWLKRKIRLLRGSDAWPEQMI

SEQ ID NO: 195748 - protein, 324 aa, Zea Mays
MFCIISMFCMIKILIRAISTSLDMGSWEKQVRQFLLDEEEDDDELFFVILPAIIPYLSEEKEPIHTSSLTGAKKLPSSVHTHTKIATDSRFMPFFQNCIGAIDGTHIPITIAEHRAPPYRNRKGTLSHNVMVAWDFDLNFTFVSCGWEGSASDAGVPRSAISKGFSVPEGKFYLVDGGYANTSSFIAPYRGVRYHLNEFRRRRSSQSGYANYRELFNHRHAILRNHIERAIGVLKKRFPILKVGTFHPIENQIKITAATVAFHNIIRGQNGDERWLDNQPNYISPSQYVDVPEGDTNYLNDTESSDGSALRDQIALQMWASYNI

SEQ ID NO: 195749 - protein, 332 aa, Zea Mays
MRVGANPSLEWSQQYSKPYQIFLEETIYCETHKQLGMFMYMISHNASNQMLQKAFQHSGETIHRKISEVFDLVPTLTQCFVKLPSSVHTHTKIATDSRFMPFFQNCIGAIDGTHIPITIAEHRAPPYRNRKGTLSHNVMVAWDFDLNFTFVSCGWEGSASDAGVPRSAISKGFSVPEGKFYLVDGGYANTSSFIAPYRGVRYHLNEFRRRRSSQSGYANYRELFNHRHAILRNHIERAIGVLKKRFPILKVGTFHPIENQIKITAATVAFHNIIRGQNGDERWLDNQPNYISPSQYVDVPEGDTNYLNDTESSDGSALRDQIALQMWASYNI

SEQ ID NO: 195750 - protein, 281 aa, Zea Mays
MTPRPRRPPTRTGSLPPLSPTRRRSSSGEVKLPSSVHTHTKIATDSRFMPFFQNCIGAIDGTHIPITIAEHRAPPYRNRKGTLSHNVMVAWDFDLNFTFVSCGWEGSASDAGVPRSAISKGFSVPEGKFYLVDGGYANTSSFIAPYRGVRYHLNEFRRRRSSQSGYANYRELFNHRHAILRNHIERAIGVLKKRFPILKVGTFHPIENQIKITAATVAFHNIIRGQNGDERWLDNQPNYISPSQYVDVPEGDTNYLNDTESSDGSALRDQIALQMWASYNI

SEQ ID NO: 195751 - protein, 217 aa, Zea Mays
MVQSKKKFRGVRQRHWGSWVSEIRHPLLKRRVWLGTFETAEEAARAYDEAAVLMSGRNAKTNFPVPRSGTGELLAPAVPAAREARGGGGGGTSLSQILSAKLRRCCKTPSPSLTCLRLDPEKSHIGVWQKRAGARADSSWVMTVELSKDAPPPPSSGEEPAPSYGGAATTPTSSTVTAGSPPPEMMDDEESVALQMIEELLGSHGMMLQGAAGSLVI

SEQ ID NO: 195752 - protein, 556 aa, Zea Mays
MAMIDEPLYPIAVLIDELKNEDIQLRLNSIKKLSTIARALGEERTRKELIPFLSENNDDEDEVLLAMAEELGVFIPYVGGVEHAHVLLPPLETLCTVEETCVRDKAVESLCQIGAQMKENDIVDWFAHVVKRLAVGEWFTARVSSCGLFHIAYPSAPEQLKAELRTIYGQLCQDDMPMVRRAAASNLGKFAATVEQSHLKTEIMSMFDDLTQDDQDSVRLLAVEGCAALGKLLEPQDCAAHILPVIVNFSQDKSWRVRYMVANQLYELCEAVGTEPTRGDLVSAYVRLLCDNEAEVRIAAAGKVTKFCKILNPQIAIEHILPCIKELSSDSSQHVRSALASVIMGMAPVLGKDATLEQLLPIFLSLLKDEFPDVRLNIISKLDQVNQVIGIDLLSQSLLPAIVELSEDRHWRVRLAIIEYIPLLASQLGVGFFDDKLGALCMQWLEDKVLEKINNPHYLYRMTTLQAISLLAPVMGPDITCQQLLPVVIASSKDRVPNMKFNVAKVLQSLVPILDQSVVEKTVKPCLVELSEDPDVDVRYYAHQALRACDQMVISS

SEQ ID NO: 195753 - protein, 256 aa, Zea Mays
MQVQTTRTSVMHAIKDIWTKGGMLGFFRGNGLNVVKVAPESAIRFYAYEMLKEYIMKRKGENKSEVGASERLIAGGLAGAVAQTAIYPIELVKTRLQTYSGEVGYVPRIGQLSRDILVHEGPRAFYRGLVPSLLGIVPYAGIDLAVYETLKDVSKTYILKDSDPGPLVQLGCGTVSGALGATCVYPLQVIRTRLQAQQANSESAYRGMSDVFWRTLHHEGVSGFYKGILPNLLKVVPAASITYLVYEAMKKNLSLD

SEQ ID NO: 195754 - protein, 178 aa, Zea Mays
MLLSCRTLSTWVRRLVACMGGCFGCCAKPTPIIAVDEPSKRLRIQGRSVRKASLSEDFWSTSAHEMENSGIQSQRSMSSISTLAQSSDQHTAGSSSNPNEFMNQGLMLWNQTRQQWVGSKKRHSRSQQPREPKLSWNTTYESLLGSNKPFSQPIPLGICLWTLGSKKAFMIRPVEFII

SEQ ID NO: 195755 - protein, 292 aa, Zea Mays
MDASTEVTDAIGAVGFDNGAAGKLPPSDSVEGHAEEHDVLADGAHSGESEVINPSEEVEMEATSQSQDIKPRVPEGVQGHSMKVGTKSQRQSPRGGDKSQTRKSSFSPSYPKAPIARVSDPDLVDCSLSNGDAGSSKKKAEKSSFRPVAKETPSLEDSNEKKKTQKASNQHSVKKDIEEESNESVKPQRVGSTPSYGFSFKCDERAEKRREFYSKLEEKIHAQELEKSNLQAKSKETEEAELKMLRKSLNFKATPMPSFYKEPPPPKVELKKCGAPAANLQTHRAHTPQPWC

SEQ ID NO: 195756 - protein, 315 aa, Zea Mays
MDASTEVTDAIGAVGFDNGAAGKLPPSDSVEGHAEEHDVLADGAHSGESEVINPSEEVEMEATSQSQDIKPRVPEGVQGHSMKVGTKSQRQSPRGGDKSQTRKSSFSPSYPKAPIARVSDPDLVDCSLSNGDAGSSKKKAEKSSFRPVAKETPSLEDSNEKKKTQKASNQHSVKKDIEEESNESVKPQRVGSTPSYGFSFKCDERAEKRREFYSKLEEKIHAQELEKSNLQAKSKETEEAELKMLRKSLNFKATPMPSFYKEPPPPKVELKKCGAPAANLQTHRAHTPQPWCRQPPAAVDRPPPPSWSRTPGATA

SEQ ID NO: 195757 - protein, 501 aa, Zea Mays
MNPSHGNGLAEIENIINQRYFSRDETLRLIEIMRSRTSDFTVEDQRPPVSTAKGFETKFFTPAKLIEAQPSWRTDIVPSSNVHDIGSSPVEIAKAFMEAQTSASVHESKKRKFRALSHGVAVDNSTSEVFPTITTDSSVRWPDSVVQGGPNYLTPQSNKGRTLSQPLSRTPYNSSVIRRYIKNSRHGDMHNNGQTQFPTPFSIGSKRILEDTHVSASGGIAQPSSSRGQIDVFGSILREGSTAINNVAFNLQESDGKSMTESRTTFGRASGVDNISRVASVSVHPKSSETAFKILKQLDRTIPSPTSKPLGLRQTLAKKNTFSVATYRQIKEPDIIIGNDNKQSSINESGSASSETTYGKKVQQPQSSPISGESSEKVQRSGANSDVYEAGTSQRPLKSNLTPTSVAEVLDNNNTSKGFSFTFPIPKAPSSLLEPPPTPTMASPPRTLPITNEDVPKFTFGSSSMANKLVFSFNSTSSSPGAGGTDPTFKFGSDNKRELVF

SEQ ID NO: 195758 - protein, 283 aa, Zea Mays
MVICTIMDRHNFPLHFLLERILEDTHVSASGGIAQPSSSRGQIDVFGSILREGVDNISRVASVSVHPKSSETAFKILKQLDRTIPSPTSKPLGLRQTLAKKNTFSVATYRQIKEPDIIIGNDNKQSSINESGSASSETTYGKKVQQPQSSPISGESSEKVQRSGANSDVYEAGTSQRPLKSNLTPTSVAEVLDNNNTSKGFSFTFPIPKAPSSLLEPPPTPTMASPPRTLPITNEDVPKFTFGSSSMANKLVFSFNSTSSSPGAGGTDPTFKFGSDNKRELVF

SEQ ID NO: 195759 - protein, 326 aa, Zea Mays
MKNSALHFLREKKQSLCSASAFWKNRVHLRKKKKKASRRRRRRGRLRKRMAEGGEEARRRAAIAEYRKKLLTCRELEARVKTGRENLKNAKKNLEKTEEDLKSLQSVGQIIGEVLRPLDKERFIVKASSGPRYVVACRSKVDKEKLIAGTRVVLDMTTLTIMRILPREVDPVVYNMLHEDPGNVSYSAVGGLSDQIRELRESIELPLMNPELFLRVGIKPPKGVLLYGPPGTGKTLLARAIASNIDANFLKVVSSAIIDKYIGESARLIREMFNYAREHQPCIIFMDEIDAIGGRRFSEGTSADREIQRTLMELLNQLDGFDELGK

SEQ ID NO: 195760 - protein, 379 aa, Zea Mays
MKNSALHFLREKKQSLCSASAFWKNRVHLRKKKKKASRRRRRRGRLRKRMAEGGEEARRRAAIAEYRKKLLTCRELEARVKTGRENLKNAKKNLEKTEEDLKSLQSVGQIIGEVLRPLDKERFIVKASSGPRYVVACRSKVDKEKLIAGTRVVLDMTTLTIMRILPREVDPVVYNMLHEDPGNVVSSAIIDKYIGESARLIREMFNYAREHQPCIIFMDEIDAIGGRRFSEGTSADREIQRTLMELLNQLDGFDELGKVKMIMATNRPDVLDPALLRPGRLDRKIEIPLPNEQGRMEVLKIHAAGIAKHGEIDYEAVVKLAEGFNGADMRNLCTEAGMAAIRAERDYVIHEDFMKAVRKLNDAKKLESSAHYSADFGKD

SEQ ID NO: 195761 - protein, 408 aa, Zea Mays
MKNSALHFLREKKQSLCSASAFWKNRVHLRKKKKKASRRRRRRGRLRKRMAEGGEEARRRAAIAEYRKKLLTCRELEARVKTGRENLKNAKKNLEKTEEDLKSLQSVGQIIGEVLRPLDKERFIVKASSGPRYVVACRSKVDKEKLIAGTRVVLDMTTLTIMRILPREVDPVVYNMLHEDPGNGVLLYGPPGTGKTLLARAIASNIDANFLKVVSSAIIDKYIGESARLIREMFNYAREHQPCIIFMDEIDAIGGRRFSEGTSADREIQRTLMELLNQLDGFDELGKVKMIMATNRPDVLDPALLRPGRLDRKIEIPLPNEQGRMEVLKIHAAGIAKHGEIDYEAVVKLAEGFNGADMRNLCTEAGMAAIRAERDYVIHEDFMKAVRKLNDAKKLESSAHYSADFGKD

SEQ ID NO: 195762 - protein, 180 aa, Zea Mays
MLHEDPGNVSYSAVGGLSDQIRELRESIELPLMNPELFLRVGIKPPKGVLLYGPPGTGKTLLARAIASNIDANFLKVVSSAIIDKYIGESARLIREMFNYAREHQPCIIFMDEIDAIGGRRFSEGTSADREIQRTLMELLNQLDGFDELGKGWCKKVPSALGQGFGLGCLGENDHGNQPA

SEQ ID NO: 195763 - protein, 204 aa, Zea Mays
MLHEDPGNVVSSAIIDKYIGESARLIREMFNYAREHQPCIIFMDEIDAIGGRRFSEGTSADREIQRTLMELLNQLDGFDELGKVKMIMATNRPDVLDPALLRPGRLDRKIEIPLPNEQGRMEVLKIHAAGIAKHGEIDYEAVVKLAEGFNGADMRNLCTEAGMAAIRAERDYVIHEDFMKAVRKLNDAKKLESSAHYSADFGKD

SEQ ID NO: 195764 - protein, 162 aa, Zea Mays
MDEIDAIGGRRFSEGTSADREIQRTLMELLNQLDGFDELGKVKMIMATNRPDVLDPALLRPGRLDRKIEIPLPNEQGRMEVLKIHAAGIAKHGEIDYEAVVKLAEGFNGADMRNLCTEAGMAAIRAERDYVIHEDFMKAVRKLNDAKKLESSAHYSADFGKD

SEQ ID NO: 195765 - protein, 188 aa, Zea Mays
MVEGLRKISKSYPLAITKVEESGEHTILGTGELYLDSIMKDLRELYSEVEVKVADPVVTFCETVVDTSSMKCFAETPNKRNKITMLAEPLEKGLAEDIENGLVSLDSRQKEITDFFRQRYQWDVLAARSIWAFGPDKQGPNILLDDTLSIEVDKNLLNAVKDSIVQGSKHQLIVSLQFIRCYPGGVVM

SEQ ID NO: 195766 - protein, 203 aa, Zea Mays
MQAWFSSGSGPSSSSAASSSQPSLLAEWNSYAAARSAEDAGDGFGIDIEAAVRSANDRVAGTFGVVSKGVKGFPGSFKSTTSSVPSGRSLMYFGLFLGSGVFLVFIAFTIFLPVMVIMPQKFAICFTVGCAFIIGSFFALKGPKNQLYHMISKERLPFTMGFVGSMVATIYVSMVLHSYILSVFFSVLQHIMPSHTSLVDLLE

SEQ ID NO: 195767 - protein, 346 aa, Zea Mays
MSAFVGKYTDELIKTAKCLATPGKGILASDESTGTIGKRLSSINLENVESNRQALRELLFTAPGVFDYLSGVILFEETLYQKTSDGKPFVDVLIAGGVVPGIKVDKGTVEIAGTDGETTTQGLDSLGARCAKYYEAGARFAKWRAVLKVGPAGQGQPSELAVRQNVEGLARYALICQENGLVPIVEPEILTDGGHDIGTCAAATERVLAALYKSLSDHKVLLEATLLKTNMVTPGSDSPKVSAEVIAEYTVAALRRTVPPAVPGVVFLSGGQSEEEATQNLDAMNKLEVLKPWTLSFSFGRALQQSTLKKWVGKKENVAAALGKYAGSGAGDAAASESLYVKGYKY

SEQ ID NO: 195768 - protein, 200 aa, Zea Mays
MSISIGIRSKSAPLMCALLVSFLLGSAYSIDVPLLRWKRHAFLAAFCIIFVRAVVVQLAFFAHMQQHVLKRPLAPTRSVVFATFFMCCFAAVIALFKDIPDVDGDRDFGIQSMTVRLGQQRVHRLCINILMTAYAAAILVGASSTNLYQKIVIVSGHVLLASTLWQRAQQFDIENKDCITQFYMFIWKLFYAEYFLIPFV

SEQ ID NO: 195769 - protein, 244 aa, Zea Mays
MTAADGESCAVVATAADIICSLRGADLAGWTPPWRKHEAACDGVREEEGGGGDEARDLAWPAVARGKRSRSRRESPSASGSAASADAKKKKKARRGVRGSPASPLDYSGVSGSGASTSGGEDGAFCFQPEPAFPPAAACQLAEPAVLPPPPPPPSEVGGLAGRRTILPVPPPRPAGQRARKKMRLPEIQQMVRSLSVENDALRKTMKELQRACTALSQENGKLEVRWSLDLHEADFPFAFRRKL

SEQ ID NO: 195770 - protein, 304 aa, Zea Mays
MAFNYHDHALAMDPAAAAAVGAAANPSFVSGGGMAGGPGWEREKAAIAAHPLYERLLEAHVACLRVATPVDQLPRIDAQIAARPPPMEAAAAAAAAGGAHSGGEELDLFMTHYVLLLCSFKEQLQQHVRVHAMEAVMACWELEQTLQSLTGASPGEGTGATMSDDEDNQVDSESNMFDGNEGSDGMGFGPLMLTEGERSLVERVRQELKHELKQGYRDKLVDIREEILRKRRAGKLPGDTASTLKAWWQAHSKWPYPTEEDKARLVQETGLQLKQINNWFINQRKRNWHNNSASSSSDKSKRKR

SEQ ID NO: 195771 - protein, 1794 aa, Zea Mays
MDDSELHEEENPTNSAVDDDDDEDYEEPGGGNHLLGFMFGNVDDSGDLDADYLDEDAKEHLFALADKLGPSLKDIDLMKSSPAPTDPSEQDYDEKAEDAVDYEDIDEEYDGPEVEATTEEDNVLSKKDYFSSSTVYASVNSTVSVFDDENYDEEEEPPNDNEPPGDSAAQNLSSVSIEQADTTTSSDNLAMEKIGLLSHPEENMDFEYEDLENEKGTGEGQLEPESATSLPVLCIEDGNAILRFSEIFGIQEPVRKVKTDHHKRPVDKELQIANVADNVEEDEELILRSTMQNFSTLKHIHVNEDFVESDSDESISDVTLRLKDSCLSEQPMKDVHMDIRIVQRSPTCPDFYPLEHYDWESDIIWNNSPATDQQAYAKICESEESEDTHGEDQGKDYGQASRCWDVQSKTNGSPVIKETFCCTEMPAPANYCPPGKSYPPLTNEDNLDHIMPNNLDDAVKIDTMVRLNNLSVLNRELLEGSWLDNIIWDPNEVTPKPKLIFDLKDDHMLFEILDEKNVDHLQSHARAMIVSQSTKTSTPTVDNFGDQPKPLSGRFNISNDKFYSNRKTPQQAKSHTKKRALMGIKVVHSAPAHKLQTMKPVLSNKEIANFHRPRAKWYPHENKIASQLQGPACSHGRMAVLLMSLGGKGVKILVNAEDTPVSVKLKASKKFELKPSEKIKLFCSGKELQDDISLAMQNVRPNSIVHAVRTEVYLWPKAQKLPGEDKPLRPPGAFRKKTDLSIKDGHVFLMEYCEERPLLLSNAGMGARLCTYYQKTTPTDQTAASLRNNSDGLGTVLAIDPADKSPFLGEIHSGSHQSCLETNMYRSPVFPHKVAPTDYLLVRSAKGALSLRRIDKLYVVGQQEPHMEVFSPGTKNMQNYLLNRVLAYVYREFRARERPDAIPQIRADELPIQSPLTEAIVKKRLKHCADLKKGPKGHFFWTQRPDFRVPSEEELRRLLTPESVCCYESMQAGLYRLKRLGILKLTQPVGLASAMNQLPDEAIELAAASHIERELQITSWNLTSNFVACTNQDRENIERLEITGVGDPSGRGLGFSYVRVAPKAPASNSVLKKKSAAAKGTTVTGTDADLRRLSMDAARELLLKFGVPEEQIDKLTRWHRIAMVRKLSSEQAASGITIDEIPVSKFARGQRMSFLQLQQQTREKCQEIWDRQVQSLSALDGDDNASDTEAHSDLDSFAGDLENLLDAEEFDDEDTSTADLRIDKADGMRGLKMRRCSTQAQINKEIEDDETEASLAKKLLEDDGNDVKRKKQPVELTNCGTSLVANKMKQSKTGQTIKSSGYAGALTPKENTPREGKEVENSFVEGGLSSKLKPKMALDVNETVLVKKKSVPGKDGPKEKKQGARGDSLVCGACSQVGHMRTNKLCPKYREDPEMSEMDANSVKPNSMDINHLQAKTPKRLITKVSSEVTETEGPEGIEKTKSVPVKFKVGAPDKSLERNMSVSVSLVSDKRVMDVTDSRSTGKVNKIVIPNKMKSDDFPPDTPKPSVVFRPPAEEKDVPRKKITIKQPKGIDQQRHVESRSVQEPTRKTRKIVELSSFEDKSREDDHWVGGEPSQVNSSHGRRLGLEGKISKATMENERSWRDFEERREMPQARLFDATIYASREEDHLKAKKKNKKKKKHEFKDDDLLDHRPYRNDRRVPERHRALKRSSPAPVVGYASSAKRRRGGEVELSNILEKVVDHLRGLSGSLLFLKPVTKKEASDYLDIIRYPMDLGTIRDKVRKMVYRNRDEFRHDVAQIQLNAHIYNDTRYPHIPPLADELMEEGKRLYIFWA

SEQ ID NO: 195772 - protein, 1795 aa, Zea Mays
MDDSELHEEENPTNSAVDDDDDEDYEEPGGGNHLLGFMFGNVDDSGDLDADYLDEDAKEHLFALADKLGPSLKDIDLMKSSPAPTDPSEQDYDEKAEDAVDYEDIDEEYDGPEVEATTEEDNVLSKKDYFSSSTVYASVNSTVSVFDDENYDEEEEPPNDNEPPVSIEQADTTTSSDNLAMEKIGLLSHPEENMDFEYEDLENEKGTGEGQLEPESATSLPVLCIEDGNAILRFSEIFGIQEPVRKVKTDHHKRPVDKELQIANVADNVEEDEELILRSTMQNFSTLKHIHVNEDFVESDSDESISDVTLRLKDSCLSEQPMKDVHMDIRIVQRSPTCPDFYPLEHYDWESDIIWNNSPATDQQAYAKICESEESEDTHGEDQGKDYGQASRCWDVQSKTNGSPVIKETFCCTEMPAPANYCPPGKSYPPLTNEDNLDHIMPNNLDDAVKIDTMVRLNNLSVLNRELLEGSWLDNIIWDPNEVTPKPKLIFDLKDDHMLFEILDEKNVDHLQSHARAMIVSQSTKTSTPTVDNFGDQPKPLSGRFNISNDKFYSNRKTPQQAKSHTKKRALMGIKVVHSAPAHKLQTMKPVLSNKEIANFHRPRAKWYPHENKIASQLQGPACSHGRMAVLLMSLGGKGVKILVNAEDTPVSVKLKASKKFELKPSEKIKLFCSGKELQDDISLAMQNVRPNSIVHAVRTEVYLWPKAQKLPGEDKPLRPPGAFRKKTDLSIKDGHVFLMEYCEERPLLLSNAGMGARLCTYYQKTTPTDQTAASLRNNSDGLGTVLAIDPADKSPFLGEIHSGSHQSCLETNMYRSPVFPHKVAPTDYLLVRSAKGALSLRRIDKLYVVGQQEPHMEVFSPGTKNMQNYLLNRVLAYVYREFRARERPDAIPQIRADELPIQSPLTEAIVKKRLKHCADLKKGPKGHFFWTQRPDFRVPSEEELRRLLTPESVCCYESMQAGLYRLKRLGILKLTQPVGLASAMNQLPDEAIELAAASHIERELQITSWNLTSNFVACTNQDRENIERLEITGVGDPSGRGLGFSYVRVAPKAPASNSVLKKKSAAAKGTTVTGTDADLRRLSMDAARELLLKFGVPEEQIDKLTRWHRIAMVRKLSSEQAASGITIDEIPVSKFARGQRMSFLQLQQQTREKCQEIWDRQVQSLSALDGDDNASDTEAHSDLDSFAGDLENLLDAEEFDDEDTSTADLRIDKADGMRGLKMRRCSTQAQINKEIEDDETEASLAKKLLEDDGNDVKRKKQPVELTNCGTSLVANKMKQSKTGQTIKSSGYAGALTPKENTPREGKEVENSFVEGGLSSKLKPKMALDVNETVLVKKKSVPGKDGPKEKKQGARGDSLVCGACSQVGHMRTNKLCPKYREDPEMSEMDANSVKPNSMDINHLQAKTPKRLITKVSSEVTETEGPEGIEKTKSVPVKFKVGAPDKSLERNMSVSVSLVSDKRVMDVTDSRSTGKVNKIVIPNKMKSDDFPPDTPKPSVVFRPPAEEKDVPRKKITIKQPKGIDQQRHVESRSVQEPTRKTRKIVELSSFEDKSREDDHWVGGEPSQVNSSHGRRLGLEGKISKATMENERSWRDFEERREMPQARLFDATIYASREEDHLKAKKKNKKKKKHEFKDDDLLDHRPYRNDRRVPERHRALKRSSPAPVVGYASSAKRRRGGEVELSNILEKVVDHLRGLSGSLLFLKPVTKKEASDYLDIIRYPMDLGTIRDKVRKMVYRNRDEFRHDVAQIQLNAHIYNDTRYPHIPPLADELMEVCDHLLYENADLLTEAEDAIE

SEQ ID NO: 195773 - protein, 598 aa, Zea Mays
MDDSELHEEENPTNSAVDDDDDEDYEEPGGGNHLLGFMFGNVDDSGDLDADYLDEDAKEHLFALADKLGPSLKDIDLMKSSPAPTDPSEQDYDEKAEDAVDYEDIDEEYDGPEVEATTEEDNVLSKKDYFSSSTVYASVNSTVSVFDDENYDEEEEPPNDNEPPVSIEQADTTTSSDNLAMEKIGLLSHPEENMDFEYEDLENEKGTGEGQLEPESATSLPVLCIEDGNAILRFSEIFGIQEPVRKVKTDHHKRPVDKELQIANVADNVEEDEELILRSTMQNFSTLKHIHVNEDFVESDSDESISDVTLRLKDSCLSEQPMKDVHMDIRIVQRSPTCPDFYPLEHYDWESDIIWNNSPATDQQAYAKICESEESEDTHGEDQGKDYGQASRCWDVQSKTNGSPVIKETFCCTEMPAPANYCPPGKSYPPLTNEDNLDHIMPNNLDDAVKIDTMVRLNNLSVLNRELLEGSWLDNIIWDPNEVTPKPKLIFDLKDDHMLFEILDEKNVDHLQSHARAMIVSQSTKTSTPTVDNFGDQPKPLSGRFNISNDKFYSNRKTPQQAKSHTKKRALMGIKVVHSAPAHKLQTMKPVLSNEENN

SEQ ID NO: 195774 - protein, 929 aa, Zea Mays
MQNYLLNRVLAYVYREFRARERPDAIPQIRADELPIQSPLTEAIVKKRLKHCADLKKGPKGHFFWTQRPDFRVPSEEELRRLLTPESVCCYESMQAGLYRLKRLGILKLTQPVGLASAMNQLPDEAIELAAASHIERELQITSWNLTSNFVACTNQDRENIERLEITGVGDPSGRGLGFSYVRVAPKAPASNSVLKKKSAAAKGTTVTGTDADLRRLSMDAARELLLKFGVPEEQIDKLTRWHRIAMVRKLSSEQAASGITIDEIPVSKFARGQRMSFLQLQQQTREKCQEIWDRQVQSLSALDGDDNASDTEAHSDLDSFAGDLENLLDAEEFDDEDTSTADLRIDKADGMRGLKMRRCSTQAQINKEIEDDETEASLAKKLLEDDGNDVKRKKQPVELTNCGTSLVANKMKQSKTGQTIKSSGYAGALTPKENTPREGKEVENSFVEGGLSSKLKPKMALDVNETVLVKKKSVPGKDGPKEKKQGARGDSLVCGACSQVGHMRTNKLCPKYREDPEMSEMDANSVKPNSMDINHLQAKTPKRLITKVSSEVTETEGPEGIEKTKSVPVKFKVGAPDKSLERNMSVSVSLVSDKRVMDVTDSRSTGKVNKIVIPNKMKSDDFPPDTPKPSVVFRPPAEEKDVPRKKITIKQPKGIDQQRHVESRSVQEPTRKTRKIVELSSFEDKSREDDHWVGGEPSQVNSSHGRRLGLEGKISKATMENERSWRDFEERREMPQARLFDATIYASREEDHLKAKKKNKKKKKHEFKDDDLLDHRPYRNDRRVPERHRALKRSSPAPVVGYASSAKRRRGGEVELSNILEKVVDHLRGLSGSLLFLKPVTKKEASDYLDIIRYPMDLGTIRDKVRKMVYRNRDEFRHDVAQIQLNAHIYNDTRYPHIPPLADELMEVCDHLLYENADLLTEAEDAIE

SEQ ID NO: 195775 - protein, 292 aa, Zea Mays
MDDSELHEEENPTNSAVDDDDDEDYEEPGGGNHLLGFMFGNVDDSGDLDADYLDEDAKEHLFALADKLGPSLKDIDLMKSSPAPTDPSEQDYDEKAEDAVDYEDIDEEYDGPEVEATTEEDNVLSKKDYFSSSTVYASVNSTVSVFDDENYDEEEEPPNDNEPPGDSAAQNLSSVSIEQADTTTSSDNLAMEKIGLLSHPEENMDFEYEDLENEKGTGEGQLEPESATSLPVLCIEDGNAILRFSEIFGIQEPVRKVKTDHHKRPVDKGIVHVATKRSKKHHPPPCMQDIDR

SEQ ID NO: 195776 - protein, 543 aa, Zea Mays
MEVFSPGTKNMQNYLLNRVLAYVYREFRARERPDAIPQIRADELPIQSPLTEAIVKKRLKHCADLKKGPKGHFFWTQRPDFRVPSEEELRRLLTPESVCCYESMQAGLYRLKRLGILKLTQPVGLASAMNQLPDEAIELAAASHIERELQITSWNLTSNFVACTNQDRENIERLEITGVGDPSGRGLGFSYVRVAPKAPASNSVLKKKSAAAKGTTVTGTDADLRRLSMDAARELLLKFGVPEEQIDKLTRWHRIAMVRKLSSEQAASGITIDEIPVSKFARGQRMSFLQLQQQTREKCQEIWDRQVQSLSALDGDDNASDTEAHSDLDSFAGDLENLLDAEEFDDEDTSTADLRIDKADGMRGLKMRRCSTQAQINKEIEDDETEASLAKKLLEDDGNDVKRKKQPVELTNCGTSLVANKMKQSKTGQTIKSSGYAGALTPKENTPREGKEVENSFVEGGLSSKLKPKMALDVNETVLVKKKSVPGKDGPKKRNRVQEGIVLFVEPVVRLGICGLTNCALSIGRIQKCQKWMLIQLSPTLWI

SEQ ID NO: 195777 - protein, 111 aa, Zea Mays
MPAPSPLSSRDVPATLRPHLTRCQCPRPRSLLPPPSHSRESTCEVVLAPRSIVADHAQHCRQEHDSPRCTALSRGPRLALPPGSRRRGVVLPHPHLSDDPGATRGCQSRDQ

SEQ ID NO: 195778 - protein, 69 aa, Zea Mays
MHLLVCSGPCLNCCSGPYLPLLVCAFVNCHYLLDMLFYPLRHLATYVKTDSFLCTNTICCQSKVKWYIL

SEQ ID NO: 195779 - protein, 977 aa, Zea Mays
MYGNDNWINSYLDAILDAGKGVAAAAAGAVRGRGGGWGGDRPSLLLRERGHFSPARYFVEEVITGYDETDLYKTWLRANAMRSPQEKNTRLENMTWRIWNLARKKKEFEKEEAIRLSKHRLETKKPRNDATAEMSEDLFEGVKGEDAGDPSVAYGDSTTGNTPRTSLFDKLYIVLISLHGLIRGENMELGRDSDTGGQVKYVVELAKALSSCPGVYRVDLLTRQILAPNFDRGYGELDELLASTSFKNFRCERGENSGAHIIRIPFGPKDKHLAKENIWPFIQEFVDGALGHIVRMSKTIGEETGSVCPVWPTVIHGHYASAGVAAALLSGALNVPMLFTGHFLGKDKLEELLKQGRQTREQINVTYKIMRRIEAEELSLDASEIIIASTRQEIEEQWNLYDGFEVMLARKLRALVKRGANCYGRYMPRMVIIPPGVEFGQLIHDFDMYGDEDNQSPALDPSIWFEIMRFFTNPRKPMILAIARPYSEKNIATLVKAFGECHPLRELANLTLIMGNREAISKMNKISAAVLTSVLTLIDEYDLYGQVAYPKLHKHSEVPDIYRLAARTKGAFVNVAYFEQFGVTLIEAAMHGLPVIATKNGAPVEIYQVLENGLLVDPHDQHAIADALYKMLSEKQFWSRCRENGLKNIHQFSWPEHCKNYLSRISSLGPRHPAFACKEDHKVPVKCRKHISIIAVDSVNKEDLIQIIRNSVEATRTGTMSGSTGFVLSTSLTIAELQSVIVRTGMLPTDFDAFICNSGSDIYYPLQSSDVPSNSRVTFALDHNYRSHIEYRWGGEGLRKYLVKWASSVVERRGRTEKQVIFEDSEHSSTYCLAFRVVNPNHLPPLKELQKLMRIQSLRCHALYNHGATRLSVIPMHASRSQALRYLSIRWGIELPNAVVIVGETGDSDYEELFGGLHKTVILKGGFNTPANRIHTVRRYPLQDVVALDSSNIIGIEGFSTGDIRSAMQQQLGIPTQ

SEQ ID NO: 195780 - protein, 786 aa, Zea Mays
MSEDLFEGVKGEDAGDPSVAYGDSTTGNTPRTSLFDKLYIVLISLHGLIRGENMELGRDSDTGGQVKYVVELAKALSSCPGVYRVDLLTRQILAPNFDRGYGELDELLASTSFKNFRCERGENSGAHIIRIPFGPKDKHLAKENIWPFIQEFVDGALGHIVRMSKTIGEETGSVCPVWPTVIHGHYASAGVAAALLSGALNVPMLFTGHFLGKDKLEELLKQGRQTREQINVTYKIMRRIEAEELSLDASEIIIASTRQEIEEQWNLYDGFEVMLARKLRALVKRGANCYGRYMPRMVIIPPGVEFGQLIHDFDMYGDEDNQSPALDPSIWFEIMRFFTNPRKPMILAIARPYSEKNIATLVKAFGECHPLRELANLTLIMGNREAISKMNKISAAVLTSVLTLIDEYDLYGQVAYPKLHKHSEVPDIYRLAARTKGAFVNVAYFEQFGVTLIEVRTIEIRNSFMYLTIFMPLLPICSFCEQAAMHGLPVIATKNGAPVEIYQVLENGLLVDPHDQHAIADALYKMLSEKQFWSRCRENGLKNIHQFSWPEHCKNYLSRISSLGPRHPAFACKEDHKVPVKCRKHISIIAVDSVNKEDLIQIIRNSVEATRTGTMSGSTGFVLSTSLTIAELQSVIVRTGMLPTDFDAFICNSGSDIYYPLQSSDVPSNSRVTFALDHNYRSHIEYRWGGEGLRKYLVKWASSVVERRGRTEKQVIFEDSEHSSTYCLAFRVVNPNHLPPLKELQKLMRIQSLRCHALYNHGATRLSVIPMHASRSQALSIRAWSI

SEQ ID NO: 195781 - protein, 844 aa, Zea Mays
MSEDLFEGVKGEDAGDPSVAYGDSTTGNTPRTSLFDKLYIVLISLHGLIRGENMELGRDSDTGGQVKYVVELAKALSSCPGVYRVDLLTRQILAPNFDRGYGELDELLASTSFKNFRCERGENSGAHIIRIPFGPKDKHLAKENIWPFIQEFVDGALGHIVRMSKTIGEETGSVCPVWPTVIHGHYASAGVAAALLSGALNVPMLFTGHFLGKDKLEELLKQGRQTREQINVTYKIMRRIEAEELSLDASEIIIASTRQEIEEQWNLYDGFEVMLARKLRALVKRGANCYGRYMPRMVIIPPGVEFGQLIHDFDMYGDEDNQSPALDPSIWFEIMRFFTNPRKPMILAIARPYSEKNIATLVKAFGECHPLRELANLTLIMGNREAISKMNKISAAVLTSVLTLIDEYDLYGQVAYPKLHKHSEVPDIYRLAARTKGAFVNVAYFEQFGVTLIEAAMHGLPVIATKNGAPVEIYQVLENGLLVDPHDQHAIADALYKMLSEKQFWSRCRENGLKNIHQFSWPEHCKNYLSRISSLGPRHPAFACKEDHKVPVKCRKHISIIAVDSVNKEDLIQIIRNSVEATRTGTMSGSTGFVLSTSLTIAELQSVIVRTGMLPTDFDAFICNSGSDIYYPLQSSDVPSNSRVTFALDHNYRSHIEYRWGGEGLRKYLVKWASSVVERRGRTEKQVIFEDSEHSSTYCLAFRVVNPNHLPPLKELQKLMRIQSLRCHALYNHGATRLSVIPMHASRSQALRYLSIRWGIELPNAVVIVGETGDSDYEELFGGLHKTVILKGGFNTPANRIHTVRRYPLQDVVALDSSNIIGIEGFSTGDIRSAMQQQLGIPTQ

SEQ ID NO: 195782 - protein, 925 aa, Zea Mays
MYGNDNWINSYLDAILDAGKGVAAAAAGAVRGRGGGWGGDRPSLLLRERGHFSPARYFVEEVITGYDETDLYKTWLRANAMRSPQEKNTRLENMTWRIWNLARKKKENINLNCIYVLLSSWIPREELNCIVFLCYVNFDIQFEKEEAIRLSKHRLETKKPRNDATAEMSEDLFEGVKGEDAGDPSVAYGDSTTGNTPRTSLFDKLYIVLISLHGLIRGENMELGRDSDTGGQVKYVVELAKALSSCPGVYRVDLLTRQILAPNFDRGYGELDELLASTSFKNFRCERGENSGAHIIRIPFGPKDKHLAKENIWPFIQEFVDGALGHIVRMSKTIGEETGSVCPVWPTVIHGHYASAGVAAALLSGALNVPMLFTGHFLGKDKLEELLKQGRQTREQINVTYKIMRRIEAEELSLDASEIIIASTRQEIEEQWNLYDGFEVMLARKLRALVKRGANCYGRYMPRMVIIPPGVEFGQLIHDFDMYGDEDNQSPALDPSIWFEIMRFFTNPRKPMILAIARPYSEKNIATLVKAFGECHPLRELANLTLIMGNREAISKMNKISAAVLTSVLTLIDEYDLYGQVAYPKLHKHSEVPDIYRLAARTKGAFVNVAYFEQFGVTLIEAAMHGLPVIATKNGAPVEIYQVLENGLLVDPHDQHAIADALYKMLSEKQFWSRCRENGLKNIHQFSWPEHCKNYLSRISSLGPRHPAFACKEDHKVPVKCRKHISIIAVDSVNKEDLIQIIRNSVEATRTGTMSGSTGFVLSTSLTIAELQSVIVRTGMLPTDFDAFICNSGSDIYYPLQSSDVPSNSRVTFALDHNYRSHIEYRWGGEGLRKYLVKWASSVVERRGRTEKQVIFEDSEHSSTYCLAFRVVNPNHLPPLKELQKLMRIQSLRCHALYNHGATRLSVIPMHASRSQALSIRAWSI

SEQ ID NO: 195783 - protein, 626 aa, Zea Mays
MYGNDNWINSYLDAILDAGKGVAAAAAGAVRGRGGGWGGDRPSLLLRERGHFSPARYFVEEVITGYDETDLYKTWLRANAMRSPQEKNTRLENMTWRIWNLARKKKEFEKEEAIRLSKHRLETKKPRNDATAEMSEDLFEGVKGEDAGDPSVAYGDSTTGNTPRTSLFDKLYIVLISLHGLIRGENMELGRDSDTGGQVKYVVELAKALSSCPGVYRVDLLTRQILAPNFDRGYGELDELLASTSFKNFRCERGENSGAHIIRIPFGPKDKHLAKENIWPFIQEFVDGALGHIVRMSKTIGEETGSVCPVWPTVIHGHYASAGVAAALLSGALNVPMLFTGHFLGKDKLEELLKQGRQTREQINVTYKIMRRIEAEELSLDASEIIIASTRQEIEEQWNLYDGFEVMLARKLRALVKRGANCYGRYMPRMVIIPPGVEFGQLIHDFDMYGDEDNQSPALDPSIWFEIMRFFTNPRKPMILAIARPYSEKNIATLVKAFGECHPLRELANLTLIMGNREAISKMNKISAAVLTSVLTLIDEYDLYGQVAYPKLHKHSEVPDIYRLAARTKGAFVNVAYFEQFGVTLIEAAMHGLPVIATKNGAPVEIYQIGSFLVDVDAGSGKWSPC

SEQ ID NO: 195784 - protein, 244 aa, Zea Mays
MISPPGHRRRQSLLPQFPSDPRRRRIHPNPPPRPRRRRSLGHIFEYNGSAVVAMVGKNCFAIASDRRLGVQLQTIATDFQRVFKVHDKLYIGLSGLATDAQTLYQRLVFRHKLYQLREERDMKPETFASLVSALLYEKRFGPYFCQPVIAGLGDDNVPFICTMDCLGAKELAKDFVVSGTASESLYGACESMYKPNMEPDELFETVSQALNSSIDRDCLSGWGGYVLIVTPTEVREHVIKSRMD

SEQ ID NO: 195785 - protein, 123 aa, Zea Mays
MKPETFASLVSALLYEKRFGPYFCQPVIAGLGDDNVPFICTMDCLGAKELAKDFVVSGTASESLYGACESMYKPNMEPDELFETVSQALNSSIDRDCLSGWGGYVLIVTPTEVREHVIKSRMD

SEQ ID NO: 195786 - protein, 549 aa, Zea Mays
MQKLLSDIDLSRSAPVAAFLELEAAARSYFQERNGRPSEVGPSAKSSTKSSSHSDGPASGSLAESNEINQGLTRGSSLTGATGNGVLGEAILDQSDEHVSSALNHRKGNLVLEHDGRNGSVASYRGVLSEEDRDSYPGHARKDSAESIGSDLSSLRGSELSVPGASNSLWDGAVVDGHVSQTEHLTGLDMHLLYDMDAQVILPNDKKQKLTRLLITMQRRIGTAKTDMEDLIARLNQEGAVKEYLTTKVKDLEVELEATKQKGRETLQQAILAERERITQMQWDMDELRRKYSEMESNLKTEHNEKTRAESERTTASGENETLLEELEIKQKEVESLKQQLVEAEAKSKADKKVLVKEVKSLRNSQTEMKKVLNQYLEEKTDLERVINRDKQRSARTKLSRVKILHECRLLRERLQDCSAKFLAEEQDNFTIDPSSLPDALDLLATSDNRIRLLVAEAQLLARDDEQGSSDGGDDSDSRSSLTMSSEDAKVTDEDTTKMLSDLLIDNAQLRLRLNAVIRNAVNTSVKPEKEGSGEVLPKKTVLNWLLDR

SEQ ID NO: 195787 - protein, 364 aa, Zea Mays
MYLKTQCTFVSFPPFPCVNWMLYVKQYTISCSASRICLKLLWLQRRHALEEWMQKLLSDIDLSRSAPVAAFLELEAAARSYFQERNGRPSEVGPSAKSSTKSSSHSDGPASGSLAESNEINQGLTRGSSLTGATGNGVLGEAILDQSDEHVSSALNHRKGNLVLEHDGRNGSVASYRGVLSEEDRDSYPGHARKDSAESIGSDLSSLRGSELSVPGASNSLWDGAVVDGHVSQTEHLTGLDMHLLYDMDAQVILPNDKKQKLTRLLITMQRRIGTAKTDMEDLIARLNQEGAVKEYLTTKVKDLEVELEATKQKGRETLQQAILAERERITQMQWDMDELRRKYSEMESNLKTEHVCFPTVLVA

SEQ ID NO: 195788 - protein, 517 aa, Zea Mays
MHWRSGCRSYFLTLTCQEVLLLLLFLSLKLLRVHISKNGMGVLLNLTGATGNGVLGEAILDQSDEHVSSALNHRKGNLVLEHDGRNGSVASYRGVLSEEDRDSYPGHARKDSAESIGSDLSSLRGSELSVPGASNSLWDGAVVDGHVSQTEHLTGLDMHLLYDMDAQVILPNDKKQKLTRLLITMQRRIGTAKTDMEDLIARLNQEGAVKEYLTTKVKDLEVELEATKQKGRETLQQAILAERERITQMQWDMDELRRKYSEMESNLKTEHNEKTRAESERTTASGENETLLEELEIKQKEVESLKQQLVEAEAKSKADKKVLVKEVKSLRNSQTEMKKVLNQYLEEKTDLERVINRDKQRSARTKLSRVKILHECRLLRERLQDCSAKFLAEEQDNFTIDPSSLPDALDLLATSDNRIRLLVAEAQLLARDDEQGSSDGGDDSDSRSSLTMSSEDAKVTDEDTTKMLSDLLIDNAQLRLRLNAVIRNAVNTSVKPEKEGSGEVLPKKTVLNWLLDR

SEQ ID NO: 195789 - protein, 674 aa, Zea Mays
MGSLLIDCIQEGRNTIWPHNPQTGWSYCVMMPSWITQTPETGVTADSFLKSVVFYRIHVGIQSSEGFSSIHGILRRFSDFLKLSSDLKSAFPRKDVPSAPPKHAFLRINSSRLLLEERRHALEEWMQKLLSDIDLSRSAPVAAFLELEAAARSYFQERNGRPSEVGPSAKSSTKSSSHSDGPASGSLAESNEINQGLTRGSSLTGATGNGVLGEAILDQSDEHVSSALNHRKGNLVLEHDGRNGSVASYRGVLSEEDRDSYPGHARKDSAESIGSDLSSLRGSELSVPGASNSLWDGAVVDGHVSQTEHLTGLDMHLLYDMDAQVILPNDKKQKLTRLLITMQRRIGTAKTDMEDLIARLNQEGAVKEYLTTKVKDLEVELEATKQKGRETLQQAILAERERITQMQWDMDELRRKYSEMESNLKTEHNEKTRAESERTTASGENETLLEELEIKQKEVESLKQQLVEAEAKSKADKKVLVKEVKSLRNSQTEMKKVLNQYLEEKTDLERVINRDKQRSARTKLSRVKILHECRLLRERLQDCSAKFLAEEQDNFTIDPSSLPDALDLLATSDNRIRLLVAEAQLLARDDEQGSSDGGDDSDSRSSLTMSSEDAKVTDEDTTKMLSDLLIDNAQLRLRLNAVIRNAVNTSVKPEKEGSGEVLPKKTVLNWLLDR

SEQ ID NO: 195790 - protein, 177 aa, Zea Mays
MICAISGEVPDEPVVSKKSGLLFERRLIERYIEDHGKCPITKEELTMDDIVSVKDQQGFPRQPSYTTGFGTALNIETLIAAAEQRDTPTETPPPEVQDKILFMINNISISNMEAKAKEFNKVIQEQYYPWFAQYMVMKRASIEPNFHDLYLKFFDKVNSKSLNKEILKATYENCKVL

SEQ ID NO: 195791 - protein, 174 aa, Zea Mays
MAAAGGRTLGRSSFSRATSNLVASSSGASGVKIGPNGASFVSSGIPDLDRILGGGFLLGSVVMIMEDTDAPHHLLLLRCFMSQGVVHKQPLLFSGAMKEPVLFLGTLPAPVSSSKEDGRHRAMGPAASSDGRANDEGLRIAWQYKKYFGDDKTSRAEHKALLQTINRNSAMILI

SEQ ID NO: 195792 - protein, 295 aa, Zea Mays
MAAAGGRTLGRSSFSRATSNLVASSSGASGVKIGPNGASFVSSGIPDLDRILGGGFLLGSVVMIMEDTDAPHHLLLLRCFMSQGVVHKQPLLFSGAMKEPVLFLGTLPAPVSSSKEDGRHRAMGPAASSDGRANDEGLRIAWQYKKYFGDDKTSRAEHKDNKQEFSNDFDLRKPLERHLLNGQNIECVSTQDADTLSSLQDCCSAFVSKLPRKDGGSSTAGRIAIQSLCAPQCRYFEKFCQIRSVRDGSTWRIHCCPSKQFQMRTKTWQNSSQDIKIWLVFCMSTRWHNLTVRSL

SEQ ID NO: 195793 - protein, 134 aa, Zea Mays
MVSFIRSLKAMVRSSNSVAVVTFPSTVLSNSFCKRWQHLADTLLSIKAIPDEDKDLAKLLTGYQDMVGFLHVHKVAQPNSQVPVILEASTLSLKLRKRRSLVLERLNQAPVDGSSGPSSAASSSCSSQGSQLDF

SEQ ID NO: 195794 - protein, 250 aa, Zea Mays
MKKMKDLSKEEFVLVLRRQGAGFVRGSSRFRGVTQHKCGKWEARIGQLMGKKYVYLGLYDTETEAAQAYDKAAIKCYGKEAVTNFDAQSYDKELQSQPWDGELDLELGLGCASSDPSTVAVEAFSPATSSSSRKQRTMTLTLGLPEEEEETGAGYPHSSSSRRPPAPAAGMFGRPADDHVHVAPPSHRQWQQQGRHAAPDAAPPLQHHQDSHCGSWVRRRPGPAGPAAEPFLSSRASNSDAAGPRTDGDW

SEQ ID NO: 195795 - protein, 295 aa, Zea Mays
MSIHGLILEVRVTGCRKLRDTEFFTRQDPYVVVEYATTKLRTRTCTDGGRNPTFDEKFHIPLIEGLRELNVIVWNSNTLTHDDFIGSGRVYLHKVLTNGYDDSSWPLQTRHMRSAGEVKLIMHVDVSAMNKMGRSVAASSAHPVPALSMPAPSPTPAPAPSPASAATPAPAPALASAIPYTGVSPSYPPVSAYPGATAYPAYPTSSHAPYTTAEYPPPPQQPYQPPPAGYPPSYPPQPYEQSYPPQPYEGSYPPQPYERSYPPQPYGQQPYPPPPAAESPYPPAPYPGTYPPRPY

SEQ ID NO: 195796 - protein, 245 aa, Zea Mays
MNFISDPAVEGGGVLQGVQAAAPATRGARRCPSHRLRRAVRGERRHQRLPGELLPAGDGAVRGVHGGRVRGLPGGAGGVVPGRDPPAGRAAGRLRGAQPHRLPAPGAHAQHAPRRLRRGVQPGGPGLQRQGARHAPPAHGGAAGAEGRLHRRVPEHAGPHHRPFHAGAGERGGGVLRHGEGGDVVPVQREEPRHMRRRGQVLLLGLLPPHPEGEPVLRQEDAGPVLRPAPAVMLMMRPRAQCGYV

SEQ ID NO: 195797 - protein, 402 aa, Zea Mays
MHQIGSGMYVSGPAPDRKRERRLSSGSAATPPYTGGDVARSGELGRMFDIAASQSQAPSPASSRRSSGPLPRPSPSPASGPLSQLSHPGLLVGPSPSPAPSPSPAVGSSRKGSGRRRGAGNEAGAAVAARGTARLGVPFACYVLVAVAAAAAVGAGAFCLVSWRRWEVLAAAGGAVAAVAAVFASNACRTAAEAERFFRRFPDTVFDDHGGDMPIGELVKITGQVTCGRRPLGANFHDAARCVLTSVQLFERRRWGWCCSRRRWRLRHSEARVTNFYISDRNSGKRFYVRAGESALITPMIKQKTISFDGDKKDASQNLKRLLATNELSCNGDLTVKEGLIREGDTASVIGILKKHHACDIVDAPAGVVTTGCQLIRCMFPVFVEGLILIGDEDPDEAVYMV

SEQ ID NO: 195798 - protein, 103 aa, Zea Mays
MIKQKTISFDGDKKDASQNLKRLLATNELSCNGDLTVKEGLIREGDTASVIGILKKHHACDIVDAPAGVVTTGCQLIRCMFPVFVEGLILIGDEDPDEAVYMV

SEQ ID NO: 195799 - protein, 489 aa, Zea Mays
MGRRLSATAAAAAASAEPLLPPALKRGVLIERCASHADDELQWFRSCLRWVCMDHSGPGQAALSWLLFLVLAAIVPAAAHFLLAFRASRRPFSAVVQLSLSAASAAGFLCLSSSFRRVGLRRLLHLDKLRSKSDRVRASYTARLAFSFRLLASLVAPCFAAEAAYKAWWYATSADRVPFFANDVLSDVLVCSLEMASWMYRSAIYLLTCVLFRLICHLQGLRLEDFAGSLLEEVEEGRAGVDAVLREHLDIRKQLKVISHRFRKFIVAALLIATASQFASVLLTTRRDSVDDLLNTGELALEAFWTCHGRRVGFLVLASLHTRQRFQPVVLKDPFQFQSQTAIMLCSVVLMSGLIIILSSAAKITHQAQALTGHTTKWHACCTIEPVLEEGEPGSNQNSMIDQEPESDSDTEDSEETGDEDLLENTKIHMPHAHVISFQKRQALVTYLENNRAGITVFGFTLDRSYLHTIFMLEWTLFLWLLGKTIGFS

SEQ ID NO: 195800 - protein, 430 aa, Zea Mays
MAAGDAGRAPTAAAAQSLVESFCGVTSATPQEAAFYLESHNWALESAVRSYYDSVDGEADAVAADPVPPPPAAPAGGGEDTEDEDCVVGGGGGGDDDEDDEDYVDGDGSDDEDAALAAEAAEEEERRRPFKRLKRTHDARGGSGSSAKARGNVRTLADLDSGKGTAGSDENSEDDDEWTPPPEYETRDRSRRKNNTDEIFKQAKKKGAKQGPFEARPRSSSRNFTGTGRLLTGETVERNASQPPEEITHNIHFWRNGFTVNDGPLRSFDDPANAPFLKDSDCPTELVPADEKSIVNVNLVRTEEEFTEPVKRAAPFEGERRNLMEPSDNNTSNAAAAAAASSSATASRTITVDDSLPSTSLQIRFADGSRLVARFNTSHRISDVRAFIDATRPGASDYTLQAGFPPKPLEDTAKTIEEAGVANSVIIQSV

SEQ ID NO: 195801 - protein, 379 aa, Zea Mays
MAAGDAGRAPTAAAAQSLVESFCGVTSATPQEAAFYLESHNWALESAVRSYYDSVDGEADAVAADPVPPPPAAPAGGGEDTEDEDCVVGGGGGGDDDEDDEDYVDGDGSDDEDAALAAEAAEEEERRRPFKRLKRTHDARGGSGSSAKARGNVRTLADLDSGKGTAGSDENSEDDDEWTPPPEYETRDRSRRKNNTDEIFKQAKKKGAKQERNASQPPEEITHNIHFWRNGFTVNDGPLRSFDDPANAPFLKSIKDSDCPTELVPADEKSIVNVNLVRTEEEFTEPVKRAAPFEGERRNLMEPSDNNTSNAAAAAAASSSATASRTITVDDSLPSTSLQIRPGASDYTLQAGFPPKPLEDTAKTIEEAGVANSVIIQSV

SEQ ID NO: 195802 - protein, 522 aa, Zea Mays
MRKVAGNSFVNMPASPPQALTPPPNPRGRPDDRRGPTSAPTVPETPIDPDDKKMQTGPLVGIAVGSIAAASCVLFALVLCLHNARKKPDDGSSEAKASSREVMDSSHDNAAVATSDLQLIQPAGKMTPDDRAHGPNGCTAKRPKQQVTVTTVSSYTVAALQVATNSFCQDSLLGEGSLGRVYKAVFPNGKVLAVKKIDSASLSLYEEDNFLAVVSNVSRLRHPNIVPLAGYCVEHGQRLLAYEYVGNGTLHDMLHFSDDDGMTMPGKTTRLAWNTRARIALGTARALEYLHEVCLPPVVHRAFKSSNILLDDEYSPRLSDCGLAALSPNPETEREAFAGVVGSFGYSAPEFAMSGTYTAKSDVYSFGVVMLELLTGRKPLDSSRERSEQSLVRWATPQLHDIDLLAKMVDPALDGLYPAKSLSRFADIIAICVQSEPEFRPPMSEVVQQLVRLMQRASIVRRQSDDQLGYSYRVPERDGGDQSWRTLLLLHKALHSLYIFINKRASKRKEKQLDMDGSFTFC

SEQ ID NO: 195803 - protein, 398 aa, Zea Mays
MRKVAGNSFVNMPASPPQALTPPPNPRGRPDDRRGPTSAPTVPETPIDPDDKKMQTGPLVGIAVGSIAAASCVLFALVLCLHNARKKPDDGSSEAKGIAGSHLVVTTSSREVMDSSHDNAAVATSDLQLIQPAGKMTPDDRAHGPNGCTAKRPKQQVTVTTVSSYTVAALQVATNSFCQDSLLGEGSLGRVYKAVFPNGKVLAVKKIDSASLSLYEEDNFLAVVSNVSRLRHPNIVPLAGYCVEHGQRLLAYEYVGNGTLHDMLHFSDDDGMTMPGKTTRLAWNTRARIALGTARALEYLHEVCLPPVVHRAFKSSNILLDDEYSPRLSDCGLAALSPNPETEREAFAGVVGSFGYSAPEFAMSGTYTAKSDVYSFGVVMLELLTGRKPLDSCTRARV

SEQ ID NO: 195804 - protein, 536 aa, Zea Mays
MKPRTATLAAGLLQLVALAAVAEADTDAGDVAALGNLYSSWNSPARLAGWSASGGDPCGAAWTGVSCSGSAVTSIKLSGMELNGTLGYQLSSLQALKTMDLSNNYLHDSIPYQLPSNLTYLNLAKNNFSGNLPYSISNLVSLEYLNLSHNSLFQEIGELFGSLSSLSELDISFNNLTGNLPFSMGSLSKLSSLYMQNNQLSGTVDVISNISLATLDIASNNFSGMIPQEFSSIPNLIVAGNSFVNMPASPPQALTPPPNPRGRPDDRRGPTSAPTVPETPIDPDDKKMQTGPLVGIAVGSIAAASCVLFALVLCLHNARKKPDDGSSEAKGIAGSHLVVTTSSREVMDSSHDNAAVATSDLQLIQPAGKMTPDDRAHGPNGCTAKRPKQQVTVTTVSSYTVAALQVATNSFCQDSLLGEGSLGRVYKAVFPNGKVLAVKKIDSASLSLYEEDNFLAVVSNVSRLRHPNIVPLAGYCVEHGQRLLAYEYVGNGTLHDMLHFSDDDGMTMPGKTTRLAWNTRARIALGTARALEYVPA

SEQ ID NO: 195805 - protein, 707 aa, Zea Mays
MILTTHCFFMRAMMRAMATHCVLQLRKLSGMELNGTLGYQLSSLQALKTMDLSNNYLHDSIPYQLPSNLTYLNLAKNNFSGNLPYSISNLVSLEYLNLSHNSLFQEIGELFGSLSSLSELDISFNNLTGNLPFSMGSLSKLSSLYMQNNQLSGTVDVISNISLATLDIASNNFSGMIPQEFSSIPNLIVAGNSFVNMPASPPQALTPPPNPRGRPDDRRGPTSAPTVPETPIDPDDKKMQTGPLVGIAVGSIAAASCVLFALVLCLHNARKKPDDGSSEAKASSREVMDSSHDNAAVATSDLQLIQPAGKMTPDDRAHGPNGCTAKRPKQQVTVTTVSSYTVAALQVATNSFCQDSLLGEGSLGRVYKAVFPNGKVLAVKKIDSASLSLYEEDNFLAVVSNVSRLRHPNIVPLAGYCVEHGQRLLAYEYVGNGTLHDMLHFSDDDGMTMPGKTTRLAWNTRARIALGTARALEYLHEVCLPPVVHRAFKSSNILLDDEYSPRLSDCGLAALSPNPETEREAFAGVVGSFGYSAPEFAMSGTYTAKSDVYSFGVVMLELLTGRKPLDSSRERSEQSLVRWATPQLHDIDLLAKMVDPALDGLYPAKSLSRFADIIAICVQSEPEFRPPMSEVVQQLVRLMQRASIVRRQSDDQLGYSYRVPERDGGDQSWRTLLLLHKALHSLYIFINKRASKRKEKQLDMDGSFTFC

SEQ ID NO: 195806 - protein, 447 aa, Zea Mays
MELNGTLGYQLSSLQALKTMDLSNNYLHDSIPYQLPSNLTYLNLAKNNFSGNLPYSISNLVSLEYLNLSHNSLFQEIGELFGSLSSLSELDISFNNLTGNLPFSMGSLSKLSSLYMQNNQLSGTVDVISNISLATLDIASNNFSGMIPQEFSSIPNLIVAGNSFVNMPASPPQALTPPPNPRGRPDDRRGPTSAPTVPETPIDPDDKKMQTGPLVGIAVGSIAAASCVLFALVLCLHNARKKPDDGSSEAKASSREVMDSSHDNAAVATSDLQLIQPAGKMTPDDRAHGPNGCTAKRPKQQVTVTTVSSYTVAALQVATNSFCQDSLLGEGSLGRVYKAVFPNGKVLAVKKIDSASLSLYEEDNFLAVVSNVSRLRHPNIVPLAGYCVEHGQRLLAYEYVGNGTLHDMLHFSDDDGMTMPGKTTRLAWNTRARIALGTARALEYVPA

SEQ ID NO: 195807 - protein, 227 aa, Zea Mays
MEGAGNKRCLDQTAHHPFQPYSTSCRGFWYHHAEETYLMLAYWLPNTTHTLPVNATHRVSVGAFIMNDKREVLAVQEKSGVLRGLGVWKFPTGVVEPGEDINVGAVREVKEETGIDAEFVEVLAFRQSHKSFFDKSDLFFVCLLRPLSYDITKQDSEIEACQWMPVEEFAAQPFVQKHELVKYILEVGLAKVDKEYAGFSPISIKSAFTDKLSLFYMNRRDLDRASG

SEQ ID NO: 195808 - protein, 232 aa, Zea Mays
MLCEMGEQGIRGVWIKLPITLSNLIPPVVEEGFWYHHAEETYLMLAYWLPNTTHTLPVNATHRVSVGAFIMNDKREVLAVQEKSGVLRGLGVWKFPTGVVEPGEDINVGAVREVKEETGIDAEFVEVLAFRQSHKSFFDKSDLFFVCLLRPLSYDITKQDSEIEACQWMPVEEFAAQPFVQKHELVKYILEVGLAKVDKEYAGFSPISIKSAFTDKLSLFYMNRRDLDRASG

SEQ ID NO: 195809 - protein, 776 aa, Zea Mays
MSILASGRARLLRGLSSHCTQRPQQQGYYVACVRRYRSRHMSLDGVEDAAEQAVEPPPVSLAKSLASLAEEAAAVQRQRKPLTRMERKRLAELHIKKRVKEQYLNGKFYRLMDKVVANAETLEDAYDIVRLNSNVDLASSKDDVCFATLAEELRNGAFDVRANAFSVVAKRKRGHLVLPRLNLKVVQEAIRVVLEVVYRPQFSKISHGCRSGRGYHSVFRFISDEIGIPDWFFTVPLHKAVDSNVTSKLMSLIQEKIDDAQLVAFMQNMFDAKVINLVFGGYPKGHGLPQEGVLAPILMNIYLDSFDHEIFRICLKHEGLGSEATDVSEDRGSNLRRWFRSQLKGKDESSENQTDCLIKIKLYACRYMDEIFVAVSGSRDVAEDMKSEMVAYLNKSLYLEVDDKIHLVPIRRNPRGLQFAGFVVRVETKENAKLKAVHKLKQKIGLFASQKQEIWDAMNLRVGKKWLAYGLRRIKESEIKSLGLSTPLLDHIAQFRKEGMKTDHWFKTLLKVWMQDVNAKNELNEDVLLSKYIAEPALAQDLRDAFYNFQKQAKDYISSETAATEALLSDLKSTCTDGSVIKIHAPLNYIQKCLHRYGIIHRWIRWFSEVDNFKELQLMFVECVRKSCIRTLSAKYRMYERLTEKRFELDDHGIPMVEDFEAIIKPLESSYSVASTDEALVYGISASGVVVLTLSRVRVPTRQFNCFVMGCQSASPSMYVLHVKEKQRFPGWRTGFSSSIDGILDGKRIGLCTKHVKDIYLGHISLQSVDFGSLIR

SEQ ID NO: 195810 - protein, 352 aa, Zea Mays
MADFGDELFLDVGDDGFGDLSYVSFSESIELDLACPRDVFSAGFDPETLTHIPGSPISFDSDPDLRHLSPSLTCSPPFWGCLDDAASFEWEEIADAALGVGGGAGGAGGGGQGLEGDADADADVFGFLDEREMLGVMEGIDSGDDDSIFSDEPPFDFGDGDTELEGIFRSGVGWELLPVPLDEDEFEVLPGHVVEVGGAPPAALAVVERLQVVAVRGEEVVQECAVCKEGMEQGELTTGLPCGHFYHGACIGPWLAIRNTCPVCRYELPTDDPEYEKRRTRRHSAGGSTPQLGAPMQVPMQHGMISCRKRNTTNFVCLGQRLEVVASRNGLFVLSRVFQRRKIYHCSMVQRL

SEQ ID NO: 195811 - protein, 92 aa, Zea Mays
MDGLIERPTERPKISHGDTIGAACMHMDTCRASSTDLAAGGGGMEPGDERRRLHVDVALANVPQAILVTRPHLPGRPPRLLVPRLVGVVPAS

SEQ ID NO: 195812 - protein, 106 aa, Zea Mays
MAADAAAAATLRTALSQATGQEQRASLLCTPKHRVAASRRSLRFTTRASSNAGASVSIPKQWYNLIADLPVKPPPPLHPQTHQPLNPSDLSPLFPDELIRQDVSGR

SEQ ID NO: 195813 - protein, 279 aa, Zea Mays
MMETWGAKVHPSPSTATEAGKRILEADPSSPGSLGIAISEAVEVAATSADTKYCLGSVLNHVLLHQTVIGEECLEQLAALGETPDVVIGCTGGGSNFGGLAFPFLREKLRGKMSPAFRAVEPAACPTLTKGVYAYDFGDTAGLTPLMKMHTLGHGFVPDPIHAGGLRYHGMAPLISHVYELGFMDAVAIQQTECFQAALQFARTEGIIPAPEPTHAIAAAIREALECKRTGEEKVILMAMCGHGHFDLAAYEKYLRGDMVDLSHPADKLEASLAAVPKV

SEQ ID NO: 195814 - protein, 540 aa, Zea Mays
MWNFLLPVSYWFACLHCNTMFLRKTQRGGWMSLGGILLCVTGSEAMFADLGHFNQLSIQIAFTCMVYPALILAYMGQAAYLCKHHTMESDYRIGFYVSVPEKIRWPVMAIAILAAVVGSQAVITGTFSMIKQCTSLGCFPRVKIIHTSAKVHGQIYIPEINWILMILCLAVTIGFRNTKHLGNASGLAVITVMLVTTCLMSLVIVLCWHKSIFLAIGFIVFFGTIEALYFSAALIKFREGAWVPIVLAFIFILIMCIWHYGTIKRYEFDVQSKVSINWLLGLSPNLGIVRVRGIGLIHTELETGVPAIFSHFVTNLPAFHQVLIFMCIKNVPIPHVRPEERFLVGRIGPKQYRMYRCIVRYGYHDFHKDDIEFEKELVCSVAEFIRSGSSKLNGMPEEFDEEEQRMAVVRSNSIRMLEEEATVEKTVGPSQASREIRSPSPTPPPVVGPKKRVRFVLPAASPKPNAGVQEELQELSDAREAGMAFILGHSHVKAKSGSSFLRRFVINFCYDFLRRNSRGPNYAVSIPHASTLEVGMMYYI

SEQ ID NO: 195815 - protein, 466 aa, Zea Mays
MGQAAYLCKHHTMESDYRIGFYVSVPEKIRWPVMAIAILAAVVGSQAVITGTFSMIKQCTSLGCFPRVKIIHTSAKVHGQIYIPEINWILMILCLAVTIGFRNTKHLGNASGLAVITVMLVTTCLMSLVIVLCWHKSIFLAIGFIVFFGTIEALYFSAALIKFREGAWVPIVLAFIFILIMCIWHYGTIKRYEFDVQSKVSINWLLGLSPNLGIVRVRGIGLIHTELETGVPAIFSHFVTNLPAFHQVLIFMCIKNVPIPHVRPEERFLVGRIGPKQYRMYRCIVRYGYHDFHKDDIEFEKELVCSVAEFIRSGSSKLNGMPEEFDEEEQRMAVVRSNSIRMLEEEATVEKTVGPSQASREIRSPSPTPPPVVGPKKRVRFVLPAASPKPNAGVQEELQELSDAREAGMAFILGHSHVKAKSGSSFLRRFVINFCYDFLRRNSRGPNYAVSIPHASTLEVGMMYYI

SEQ ID NO: 195816 - protein, 523 aa, Zea Mays
MYKFLRKTQRGGWMSLGGILLCVTGSEAMFADLGHFNQLSIQIAFTCMVYPALILAYMGQAAYLCKHHTMESDYRIGFYVSVPEKIRWPVMAIAILAAVVGSQAVITGTFSMIKQCTSLGCFPRVKIIHTSAKVHGQIYIPEINWILMILCLAVTIGFRNTKHLGNASGLAVITVMLVTTCLMSLVIVLCWHKSIFLAIGFIVFFGTIEALYFSAALIKFREGAWVPIVLAFIFILIMCIWHYGTIKRYEFDVQSKVSINWLLGLSPNLGIVRVRGIGLIHTELETGVPAIFSHFVTNLPAFHQVLIFMCIKNVPIPHVRPEERFLVGRIGPKQYRMYRCIVRYGYHDFHKDDIEFEKELVCSVAEFIRSGSSKLNGMPEEFDEEEQRMAVVRSNSIRMLEEEATVEKTVGPSQASREIRSPSPTPPPVVGPKKRVRFVLPAASPKPNAGVQEELQELSDAREAGMAFILGHSHVKAKSGSSFLRRFVINFCYDFLRRNSRGPNYAVSIPHASTLEVGMMYYI

SEQ ID NO: 195817 - protein, 1125 aa, Zea Mays
MASAPFPPVAASAASAPPRLAPRHPFAAAAAARRSSLSFRPAARRPVLPLRSSAVAANTLRCTHRRAVSSRSRRRAQELGAAPALAASTWGVGEEKGGCLSCFPKSRRGRSGLARFAPCALPHASGLSFRSRLSGSKVKPSHILHAAGPDEPHVASPTWSDTSLDTRDMDHAISKEELEDVLNTPLPEHPKLIRGQLKNGLRYLILPNKVPANRFEAHMEVHVGSIDEEEDEQGIAHMIEHVAFLGSKKREKLLGTGARSNAYTDFHHTVFHIHSPTKTKEYGEDLLPSVLDALNEIAFHPKFSSSRVEKERRAILSELQMMNTIEYRVDCQLLQHLHSENKLSNRFPIGLEEQIQKWDPEKIRRFHERWYYPANATLYLVGEIDDIPRAVREIEAVFEHTLSENEGNPVPSTSPFGAMASLFAPKLPSGFTTNLTGEKSPATDKIKPVKRERQAVRPPVEHKWSLPEVAQDAKPPAIFQHELIQSFSINMFCKIPVSKVQTYKDLRSVLMKRIFLSALHFRINTRYKSSNPPFTSVELDHSDSGREGCTVTTLTVTAEPQNWRSAIKVAVHEVRRLKEFGVTMGEMTRYMDALIKDSEQLAMMIDSVPSVDNLDFIMESDALGHTVMDQLQGHESLLAVAETVTLEEVNTVGAEVLEFISDFGKPNAPLPAAIVACVPKKVHVDDIGETEFEIYPEEITEAIKAGLEEPIYPEPELEVPKELITQSKLDELKLQHNPSFVPLTKEENAVKVFDSETGISQRRLSNGISINYKITQNEARVGVMRLIVGGGRATEDSESKGSVIVGVRSLSEGGCVGNFSREQVELFCVNNLINCSLESNEEFIFMEFRFALRDNGMRAAFQLLHMVLEHNVWLEDAFDRAIQLYLSYYRSIPKSLERSTAHKLMLAMLNHDERFVEPSPHSLQKLTLQSVKDAVMNQFVGSNMEVSIVGDFTEEEVESCVLDYLGTVRASSSPTIEERIEKISFRPFPSDVHFQQVYIKDTDERACAYIAGPAPNRWGFATEGNDLFNVIQRSDADAEISEPVSLDLTGKRHINVRSHPLFFGITLSLLAEIINSRLFTTVRDSMGLTYDVSFELNLFDKLDLGWYVIAVTSTPSKLLMPAKVF

SEQ ID NO: 195818 - protein, 70 aa, Zea Mays
MYTENAIRSSGKSSDLWPYQVSLYSLLCLSQYLQQSAAALPSSPFSISLLLINIKHRFTKTYANQIENVE

SEQ ID NO: 195819 - protein, 54 aa, Zea Mays
MARVAWQPDKKTNSDTPLLLPLLPFVSDEHTPFPPSPCTVPWFGSVRLTQRWHL

SEQ ID NO: 195820 - protein, 347 aa, Zea Mays
MDPVRKSVCVTGAGGFVASELVKLLLSRGQYAVRGTVRDPDADRETWECGTAFFLEVERSSRFFIKKGASKNAHLKVLEGAEERLQLLKADLMDYDSIASAVAGCEGVFHVASPVLSHRPSNPEVEVIAPAVIGTTNVLKACYEAKVRRVVVVSSCGAVYANPIYPKGKVFDEDCWSDEDYCRKKEDWYLVSKTLSEREALAFAAKTGLDVVTVCPSLVFGPLMQPTVNLSSEMILKYFKADLETVENVLSNMVDIRDVADALLLTYEKPEASGRYICSSHAIKISDMINILKTMYPSYPYPKNFVEDDVNSVYSSEKLQKLGWSFKPIEESLRDTVESYKAFGILN

SEQ ID NO: 195821 - protein, 124 aa, Zea Mays
MQPTVNSSSKIILKYFTGDRETVENILRNMVDVRDVADALLLAYEKPEASGRYICSSHAIKVADMINILKTLYPSYPYPKNFVEDDDNSVYSSEKLQKLGWSFKPIEESLRDTVESYKAFGILN

SEQ ID NO: 195822 - protein, 230 aa, Zea Mays
MLLVHLRAADRWERVAAVLPGRTVADVTAHYDDLEVAVGSIEAGFVPFPATAAAAVARRSGPPGSRSSGTATPAGRALSAPATWLAAASASAGQTTSARRASPGRRRSTSIIADSSLSNHHEDSLGSGLPSISTGKPFDSDEVPPGVTLTAQFPYHLANKVIGKLMMDMSSLYDVGRNKRSAGLLIVDHIVDLLTPCFHGDSFLDRMLSLLPHKENMRSNSAAKNPQTPS

SEQ ID NO: 195823 - protein, 173 aa, Zea Mays
MEAAAGEGPTTTMKTVCVTGAGGFVASWLVERLLAGGRYKIHGTVRDPGDAKNAHLLGLDGAAERLRLFKADLLDFGSLAAAIAGCDGVFHVACPVPDYTLTDPETELLAPAVTGTMNILRACSDAHVRRVVVVSSLSAVMINPDWGECKVMDEGCWSDVDLCRTTKVYGGTT

SEQ ID NO: 195824 - protein, 261 aa, Zea Mays
MTPQRSPMGTGGGGSSGGGGGGPPALHYLSGPYGDTTFTKVFVGGLAWETRSEGLRAHFEVYGDILEAVVITDRATGRSKGYGFVTFRDPESARMACMDPYPVIDGRRANCNLAILGRPGPAVPFVAPTRPVIPYNGGVAVPGGMPSAYGPEYLYQQNAYGPYVGQQYVPVYGGPRTVGPAVYPYGQFGQPVPSDHAYSPGYAPSHVLPLSNQNVSAANVVRIPPVQQQLPPGAPRPQQQLLVPARAPPFPQNNISEQATG

SEQ ID NO: 195825 - protein, 714 aa, Zea Mays
MRFLSENKRAAIARCGSSTFHILAPEPDECSSFPHAVLLYECGQNGPGDCKHMAGTSGKRVNSNVMNASKRPFKSDFQYGSRNSKPPHFKEEVCDSLLKPKKMETSPKHYDPFVTEHHRLVLESSPCESVEDSPRVLNPVVKKRMASPTKNFIVADPSYLRTLSQTHASWIFGAIAELIDNSRDAGASRLSISIEHLFSKKAQKKIPVLSVIDDGHGMTYPDIMRMISFGHKRPNGHREDQIGRFGIGFKTGAMKLGKDAIVLTQTKSSRSVAFLSQSFNEEKDNLEIPVVAYRKEGQYMEVDLSVQSDATAEYNLNAIKNFSSFNEYFIGEKLGLFGEDTGTQIYIWNLDTWGTDYTLEWNSGKSSENPVHHGRGDILIRSRRVRSRPGQTSNKVLLDYSLQSYLEVMFLNPRMKISVQGSLVKSRPLAKTLNKTSVVSGEIMERTIILTLGRSKVEWDRTNCGIFLYWHGRLIESYKRVGGQKHSTDMGRGVIGVADITNLIDDEDGNSWVLNNKQGFQDCEMYAKLEEWLGRKVDEYWDTKFDSLTLRKGDEHHNTDSDWVQCYSCRKWRMLNAGFNVDNLPEEWFCYMPPFNGKCEIPEQQAGPDIIVIGEKRSGHDEQKKAALQGGTPEEEMRHENHEIQMITQDEFVKNVQDMPEVVHKRKKISSGTPSKPQKNRDDDLEGVSSQTEDDVPLTRLKRLRRGPARTNKR

SEQ ID NO: 195826 - protein, 461 aa, Zea Mays
MKLGKDAIVLTQTKSSRSVAFLSQSFNEEKDNLEIPVVAYRKEGQYMEVDLSVQSDATAEYNLNAIKNFSSFNEYFIGEKLGLFGEDTGTQIYIWNLDTWGTDYTLEWNSGKSSENPVHHGRGDILIRSRRVRSRPGQTSNKVLLDYSLQSYLEVMFLNPRMKISVQGSLVKSRPLAKTLNKTSVVSGEIMERTIILTLGRSKVEWDRTNCGIFLYWHGRLIESYKRVGGQKHSTDMGRGVIGVADITNLIDDEDGNSWVLNNKQGFQDCEMYAKLEEWLGRKVDEYWDTKFDSLTLRKGDEHHNTDSDWVQCYSCRKWRMLNAGFNVDNLPEEWFCYMPPFNGKCEIPEQQAGPDIIVIGEKRSGHDEQKKAALQGGTPEEEMRHENHEIQMITQDEFVKNVQDMPEVVHKRKKISSGTPSKPQKNRDDDLEGVSSQTEDDVPLTRLKRLRRGPARTNKR

SEQ ID NO: 195827 - protein, 441 aa, Zea Mays
MKLGKDAIVLTQTKSSRSVAFLSQSFNEEKDNLEIPVVAYRKEGQYMEVDLSVQSDATAEYNLNAIKNFSSFNEYFIGEKLGLFGEDTGTQIYIWNLDTWGTDYTLEWNSGKSSENPVHHGRGDILIRSRRVRSRPGQTSNKVLLDYSLQSYLEVMFLNPRMKISVQGSLVKSRPLAKTLNKTSVVSGEIMERTIILTLGRSKSYKRVGGQKHSTDMGRGVIGVADITNLIDDEDGNSWVLNNKQGFQDCEMYAKLEEWLGRKVDEYWDTKFDSLTLRKGDEHHNTDSDWVQCYSCRKWRMLNAGFNVDNLPEEWFCYMPPFNGKCEIPEQQAGPDIIVIGEKRSGHDEQKKAALQGGTPEEEMRHENHEIQMITQDEFVKNVQDMPEVVHKRKKISSGTPSKPQKNRDDDLEGVSSQTEDDVPLTRLKRLRRGPARTNKR

SEQ ID NO: 195828 - protein, 169 aa, Zea Mays
MDNSMGAPPMGPGPNGHFMPPPMPIPDMVPHSTFGASATAKISVDASLAGAIIGKSGINTKHISRVTGAKLAIRDNEADPNHKNIELEGTFDQIKHASAMVTELIVRISGKVPPQAKNNPGRGPGSHAGGPASNFKTKLCENFNKGSCTFGDRCHFAHGESELRKPAAA

SEQ ID NO: 195829 - protein, 50 aa, Zea Mays
MATVAAAIPHRRGHGVVVPLRAVDWVSYVSIPGHESPEEQVGTCKLKCQA

SEQ ID NO: 195830 - protein, 626 aa, Zea Mays
MMQRPPLRPEEYSLKETTPHLGGAAAGDKLTTTYDLVEQMQYLYVRVVKAKELPNKDITGSCDPYVEVKLGNYKGQTGHFEKKNNPEWNQVFAFAKERIQSSVVEILVKDKDLVKDDFIGRVIFDLNEVPKRVPPDSPLAPQWYRLEDRNGHKVKGELMLAVWMGTQADEAFPEAWHSDAASVPGDGLASIRSKVYLTPKLWYLRVNVIEAQDLIPNDKTRFPEVYVKAMLGNQVQRTRALASRTLNPLWNEDLMFVAAEPFEEHLVLSVEDRVAPGKDEVIGRTIIALQHVPRRLDHRLLTSQWYNLEKHVIIDGEQKKETKFSSRIHLRICLEGGYHVLDESTHYSSDLRPTAKPLWKPSIGILELGILTAQGLLPMKTKDGRGTTDAYCVAKYGQKWVRTRTIIDSFTPKWNEQYTWEVYDPCTVVTIGVFDNCHLNGGEKANGARDTRIGKVRIRLSTLETDRVYTHSYPLIVLTPGGVKKMGEVQLAVRFTCSSLLNMMHLYSQPLLPKMHYVHPLSVIQVDNLRRQATSIVSTRLGRAEPPLRKEIVEYMLDVDSHMWSMRKSKANFFRITGVLSPLFAVARWFDQICHWKNPLTTVAAEAATAHGHPPLPRRDRPPGRA

SEQ ID NO: 195831 - protein, 115 aa, Zea Mays
MRLAAVNPRVDFGGLDSFLTTECGRIAGFNCKNGIDLEQVTWPEMGVHGARQLMQLQQQFWHGDLTHPHQVASQWEKRGDGHPPVFSNSSPSLFGYDLTSSGAQQTPASKLKTEL

SEQ ID NO: 195832 - protein, 438 aa, Zea Mays
MFVGSSLLDMYARSENIQEARRVFDMLPARDVVSYTTILSGYTRLGLDEEALNLFRQLYNEGMQCNQVTFSVLLNALSGLSSMDYGKQVHGLILRRELPFFMALQNSLIDMYSKCGKLLYSRRVFDNMPERSVVSWNAMLMGYGRHGMAYEVVQLFRFMCDKVKPDSVTLLAVLLGYSHGGLVDEGLDMFDHIVKEQSTLLNTQHYGCVIDLLGRSGQLEKALLLIQKMPFQPTRAIWGSLLGACRVHANVHVGEFVAQKLFDIEPENAGNYVILSNIYAAARMWKDVFRLRKLMLKKTVIKEPGRSWMILDKVIHTFHSSERFHPRKEDINVKINEIYAAIKAAGFVPDLSCVLHDVDDEQKERMLLGHSEKLAITFGLMSTPSDLTIQVMKNLRICVDCHNFAKFVSKVYGREISLRDKNRFHLITEGACTCGDYW

SEQ ID NO: 195833 - protein, 899 aa, Zea Mays
MSRARPALAMAAEAEAALLLLLLLCAAAFVERGAALHLCTDRLFNDTKGRHDDGLPHLTPTEEATWMSLLPRRLRGGGRAEFDWLALYRSLTRGDGPDGGAGKAAGPEGLLSPASLHDVRLHGDGSLSSMYWRAQQTNLEYLLYLDPDRLTWTFRQQAGLPTVGDPYGGWEAPDGQLRGHFVGHYLSASAHAWAATHNGTLRERMARVVDILHACQKKMGTGYLSAYPETMFDLYEQLDEAWSPYYTTHKGLLDQYTLASNEKGLDVVLRMADYFSNRVKNLVQIHTIQRHWEAMNEETGGFNDVMYQLYTITRDQKHLTMAHLFDKPCFLGPLGLHKDDISGLHVNTHLPVLVGAQKRYEVVGDRLYKDISTYLFDVVNSSHTFATGGTSTMEHWHDPKRLVDEIKISSNEETCATYNFLKVSRNLFRWTKEAKYADHYERLLINGIMGNQRGTQPGVMLYFLPMGPGRSKSVSGQSPSGLPPKNPGGWGGPNDTFWCCYGTGIESFSKLGDSIYFLEEGDTPGLYIIQYIPSTFDWKATGLTVNQRAKPLLSTDPFFKVSLTISAKRGARQAKVSVRIPSWTTTDGATAILNGQKLNLTPTGNSTNGGFLTITKLWANDTLTLHFPITLRTEAIKDDRPEYASIQAVLFGPHLLAGLTHGKLPVTDSSHSNDGLTAGIWEVDATGAASVAGWVTPLHSETLNSQLVTLKQSIGGRTLVLSVSIADAKLEMQEQPAPGTDACVHATFRAYGQAGGSSQLLRGPNVTIEPFDRPGMAVTNGLAVGCRGGRDTLFNAVPGLDGAPGSVSLELATRPGWFVATAPTAMHANATTQVVCRANKGGAAFRRAASFARAPPLRRYHPLSFAARGTARNFLLEPLRSLQDEFYTVYFSLVSDGES

SEQ ID NO: 195834 - protein, 590 aa, Zea Mays
MAALVALTLALALTAAVTATAKECTNIPTELSSHTVRARLQAAPGGAAEWRWRELFHEHLNPTDEAAWMDLMPPPGAAAAAQHQQHHRQEELDWVMLYRSLKGQQQQQPVGGGTAAAGSTPFLEEVSLHDVRLDPDGDVAYGRAQQTNLEYLLLLDVDRLVWSFRSQAGLPAPGTPYGGWEKPDSELRGHFVGHYLSATAKMWASTHNGTLAGRMSAVVDALDECQRAGGTGYLSAFPAEFFDRFEAIKPVWAPYYTIHKIMQGLLDQHVVAGNGKALRMLVAMADYFAGRVRNVIQRYSIERHWTSLNEETGGMNDVLYQLYTITHDQRHLVLAHLFDKPCFLGLLAVQADSLSNFHANTHIPVVIGGQMRYEVTGDPLYKEIATFFMDTVNSSHAYATGGTSVSEFWSNPKRLAEALTTETEESCTTYNMLKVSRHLFRWTKEIAYADYYERALINGVLSIQRGRDPGVMIYMLPQGPGRSKAKSYHGWGTQYESFWCCYGTGIESFSKLGDSIYFEERADAPQLVGSVPSGLVLRICQDDKRSVCDVERENTIVDIFEWRKGNTEWQASGISISRDISHYQQAVGQR

SEQ ID NO: 195835 - protein, 400 aa, Zea Mays
MAALVALTLALALTAAVTATAKECTNIPTELSSHTVRARLQAAPGGAAEWRWRELFHEHLNPTDEAAWMDLMPPPGAAAAAQHQQHHRQEELDWVMLYRSLKGQQQQQPVGGGTAAAGSTPFLEEVSLHDVRLDPDGDVAYGRAQQTNLEYLLLLDVDRLVWSFRSQAGLPAPGTPYGGWEKPDSELRGHFVGHYLSATAKMWASTHNGTLAGRMSAVVDALDECQRAGGTGYLSAFPAEFFDRFEAIKPVWAPYYTIHKIMQGLLDQHVVAGNGKALRMLVAMADYFAGRVRNVIQRYSIERHWTSLNEETGGMNDVLYQLYTITHDQRHLVLAHLFDKPCFLGLLAVQADSLSNFHANTHIPVVIGGQMRYEVTGNCDVLHGHSELLSRIRDWWYICQ

SEQ ID NO: 195836 - protein, 636 aa, Zea Mays
MAALVALTLALALTAAVTATAKECTNIPTELSSHTVRARLQAAPGGAAEWRWRELFHEHLNPTDEAAWMDLMPPPGAAAAAQHQQHHRQEELDWVMLYRSLKGQQQQQPVGGGTAAAGSTPFLEEVSLHDVRLDPDGDVAYGRAQQTNLEYLLLLDVDRLVWSFRSQAGLPAPGTPYGGWEKPDSELRGHFVGHYLSATAKMWASTHNGTLAGRMSAVVDALDECQRAGGTGYLSAFPAEFFDRFEAIKPVWAPYYTIHKIMQGLLDQHVVAGNGKALRMLVAMADYFAGRVRNVIQRYSIERHWTSLNEETGGMNDVLYQLYTITHDQRHLVLAHLFDKPCFLGLLAVQADSLSNFHANTHIPVVIGGQMRYEVTGDPLYKEIATFFMDTVNSSHAYATGGTSVSEFWSNPKRLAEALTTETEESCTTYNMLKVSRHLFRWTKEIAYADYYERALINGVLSIQRGRDPGVMIYMLPQGPGRSKAKSYHGWGTQYESFWCCYGTGIESFSKLGDSIYFEERGERPALYVVQFIPSTFSWRTAGLTVAQQLMPLSSSDQYLQVSFSVSAKTTNGQFATLNVRIPSWTSLNGAKATLNGKHLELASPGTFLTISKQWGSGDQLSLQLPIHLRTEAIKV

SEQ ID NO: 195837 - protein, 407 aa, Zea Mays
MGLAGGIVRRVFSKSPCSSAGSRGHSTDACMSTADSQEKGSAEHRRRWGSLRLYLCGEEMNAAAEEEEDGDGDTVSVKSFETCCVMPEEAHVVVPVHHRLMSAAHDGNDQSRVPGGADEEGAATLIQSAFRGFMSRRQLQEARARTRTRTRGREPEPDGAKDQEPSSPTWGPSVATSVLVQQRSSSQRSSSRPPPAFRVKEEWDDSTVSSNVSRMRIQNRIEATTRRERALAYAFSQQLRSCGGGTSKKRSSARAEGQGEFNVGWSWLERWMATRQAEPADDCASRNADTGSATGRRVVVVRRRSDLAVEEKESCASNDVSVVSFDASSGLACHRPTGNKSRLKGGRSLPRRKQVAASASASDHRFQERSHKVSKKGHQRVEQEPHKDRFDAVAALDDDACQPPTDY

SEQ ID NO: 195838 - protein, 61 aa, Zea Mays
MGLAGGIVRRVFSKSPCSSAGSRGHSVSKKGHQRVEQEPHKDRFDAVAALDDDACQPPTDY

SEQ ID NO: 195839 - protein, 405 aa, Zea Mays
MGKEATLAFTPTWVVAIVCLVIVSISLAAERSLHYLGKYLECKKQKALFSALQRLKEELMLLGFISFVLSLSQVQQEKNEGQGSSLSIVVLHREHQDEFVHKRTKGFWMKLAVASWITAFLKQFQDSVSKSDYEALRSAFVVEHYPEKPDIDFHKYMTRAVEYEFKRVVGISWYLWLFVILFLLLNINGWHTYFWLAFLPLFLLLIVGAKLEHIITRLAQEAAISLSNNTEEVPKIKPCKDHFWFHKPELVLHLIHFILFQNSFEISFFFWILVSEGFGSCMMERKPYVISRLVIGVIIEVICSYITLPLYAIVTHMTGQIKLHGFGSRVHESVHGWIGLRKKPFSFWKIPGGDPNADSGREADVTRRVAKERSGSSRSMPMAPADEIVTVDDVAVAAAAVGQGP

SEQ ID NO: 195840 - protein, 187 aa, Zea Mays
MHALVRPWDTLPVLLLSRLCMVLLDALRAGWLGSVDEDEEDFSYRRNAGNGPARWGLIRREWATCNVGLLQSPIGLSDTLAGLADRSGRLGRSYRPAAASLVNRGHSIMVRFNSNPGGVVIDGVAYRLRQMHWHAPSEHAINGRSSTGSRGGVLTGPFTGWSGTSGGSRGGRTTRSSSTRRWTRGGR

SEQ ID NO: 195841 - protein, 197 aa, Zea Mays
MYAAAPSSSRVAAAAAAFFIVISLSPQLLVRPFGASTTVHWAAAQELDEEDFSYRRNAGNGPARWGLIRREWATCNVGLLQSPIGLSDTLAGLADRSGRLGRSYRPAAASLVNRGHSIMVRFNSNPGGVVIDGVAYRLRQMHWHAPSEHAINGRSSTGSRGGVLTGPFTGWSGTSGGSRGGRTTRSSSTRRWTRGGR

SEQ ID NO: 195842 - protein, 461 aa, Zea Mays
MEDEEMEKKVQQYLQRKGFRLTELALQEERNRLSTSAISDVALARSDNDPARYYDGYSRLRTWAYSSLDQYKHELLRVLYPVFIHSFMDLVAEGHMQEARSFFHTFREDHEVMHSRDLQKLEGVLSPSHLEEMELARSFRKNKFKIKLCEYSYELLLQYLQKTQALVVLGVINEHITFEVSPGQPSLISDDADVVALIGTSKDLAKQINQKEVHWGLLEDSVEERMEKALAESDKIEAESKDADAEDNKKRNAEGGKQGASLKKAKKDKLVGATGKSVRTETSMVSVAPRVKPELTLPATPVEVEQSILEDLRNRAQLNSVALPSVSFYTFLNTHNGLNCSSISHDGSLVVGGFSDSSVKVWDMSKMGQPAKISRSQGENGPSQGERISTLDEGKRTYTLFQGHSGPVYSAAFSPFGDFLLSSSSDSTIRLWSTKLNANLVCYKGHNYPVWDVQSSWPLLC

SEQ ID NO: 195843 - protein, 625 aa, Zea Mays
MDLVAEGHMQEARSFFHTFREDHEVMHSRDLQKLEGVLSPSHLEEMELARSFRKNKFKIKLCEYSYELLLQYLQKTQALVVLGVINEHITFEVSPGQPSLISDDADVVALIGTSKDLAKQINQKEVHWGLLEDSVEERMEKALAESDKIEAESKDADAEDNKKRNAEGGKQGASLKKAKKDKLVGATGKSVRTETSMVSVAPRVKPELTLPATPVEVEQSILEDLRNRAQLNSVALPSVSFYTFLNTHNGLNCSSISHDGSLVVGGFSDSSVKVWDMSKMGQPAKISRSQGENGPSQGERISTLDEGKRTYTLFQGHSGPVYSAAFSPFGDFLLSSSSDSTIRLWSTKLNANLVCYKGHNYPVWDVQFSPVGHYFASASHDRTARIWSMDKIQPLRIMAGHLSDVDCVQWHVNCNYIATGSSDKTVRLWDVQTGECIRMFIGHRSMVLSLAMSPDGRYMASGDEDGTIMIWDLSTGRCVSPLLGHSSCVWTLAFSCEGALLASGSADCTVKLWDVASSTKTLKTEDTKGSSANRLRLLKALPTKSTPVYSLRKTRTGPVLTLSSEAGISETAYCTANIFISNSNELSMYCRIEHRRFVVAGCDIVTILLGCDLMNATKCTSADRR

SEQ ID NO: 195844 - protein, 503 aa, Zea Mays
MDLVAEGHMQEARSFFHTFREDHEVMHSRDLQKLEGVLSPSHLEEMELARSFRKNKFKIKLCEYSYELLLQYLQKTQALVVLGVINEHITFEVSPGQPSLISDDADVVALIGTSKDLAKQINQKEVHWGLLEDSVEERMEKALAESDKIEAESKDADAEDNKKRNAEGGKQGASLKKAKKDKLVGATGKSVRTETSMVSVAPRVKPELTLPATPVEVEQSILEDLRNRAQLNSVALPSVSFYTFLNTHNGLNCSSISHDGSLVVGGFSDSSVKVWDMSKMGQPAKISRSQGENGPSQGERISTLDEGKRTYTLFQGHSGPVYSAAFSPFGDFLLSSSSDSTIRLWSTKLNANLVCYKGHNYPVWDVQFSPVGHYFASASHDRTARIWSMDKIQPLRIMAGHLSDVDCVQWHVNCNYIATGSSDKTVRLWDVQTGECIRMFIGHRSMVLSLAMSPDGRYMASGDEDGTIMIWDLSTGRCVSPLLGHSSCVWTLAFRSIACIGIG

SEQ ID NO: 195845 - protein, 237 aa, Zea Mays
MDKIQPLRIMAGHLSDVDCVQWHVNCNYIATGSSDKTVRLWDVQTGECIRMFIGHRSMVLSLAMSPDGRYMASGDEDGTIMIWDLSTGRCVSPLLGHSSCVWTLAFSCEGALLASGSADCTVKLWDVASSTKTLKTEDTKGSSANRLRLLKALPTKSTPVYSLRKTRTGPVLTLSSEAGISETAYCTANIFISNSNELSMYCRIEHRRFVVAGCDIVTILLGCDLMNATKCTSADRR

SEQ ID NO: 195846 - protein, 113 aa, Zea Mays
MDKIQPLRIMAGHLSDVDCVQWHVNCNYIATGSSDKTVRLWDVQTGECIRMFIGHRSMVLSLAMSPDGRYMASGDEDGTIMIWDLSTGRCVSPLLGHSSCVWTLAFRFEDHVI

SEQ ID NO: 195847 - protein, 359 aa, Zea Mays
MNSSSSEVQVCVTGGAGFIGSYLVKKLLEKGYTVHATLRNTGEDRAAAAAGPRRGGASAVVPLFEADLFDAATFAPAIAGCQFVFLVATPYGLEAAGSKYKSTAEAAVAAVRVILRQCEESKTVKRVIHTASISTASPLKDKEAEGSGDGYKDFISESCWTPLNVDYHLRSAHFDKYILAKLRSEQELLSYNGGESPAFEVVTLPLGLVAGDTVLGHAPETLEHAVSPVSREELSFKFLRLLQSLLGSEPLVHVDDACEALLFCMERPSIAGRFFCAAAYPSIHDITDHYASKFPHLDVLRATEAVAVAVQPEVDRLGELGFRYKYGMEEILDSSVACAARLGSLDAAKLNVPDTVSSK

SEQ ID NO: 195848 - protein, 250 aa, Zea Mays
MAAELEIEAYPLLDELTSKISTLNLERARRLKSRLVALTRRVQKVRDEIEQLMDDDGDMAEMYLTEKKMRMESSVFGDQSLLGYNSAGAVGASVSAPVSPVSSPTESRKLEKSFSLCRSRHDSTKGSDNTMTEHIQELEMLLEAYFVVIDSTLNKLTSLKEYIDDTEDFINIQLDNVRNQLIQFELLLTTATFVVAIFGVVAGIFGMNFETSVFEIENAFQWVLVITSVTGVFIFCSFLWFFKYKRLMPL

SEQ ID NO: 195849 - protein, 927 aa, Zea Mays
MPLLLYPFSACVPPPRALLRRLSPPPPMAVVAPLPSAVRIIPSVGTLDLPALPPPPTDDFHWLDLFAFLNSPADTYHQIPAQGEEELEAGLELELELELEKHAEVERQRGRARRAQLRRLRQRQVKAETEAWARAAEEYREIEREMLDRRLAPALPYVKALFVGWFEPLRDAIARDQDVQRRKRVKHVYAKYLLLLPADKVAVIVMHKMMGLLMSSKDGTGSVRVVQAAHCIGEAVEREFKVQSFFQKSRKKKIQGENDPALEKEQAKCRKRVKSLVKRRKMSEAQRLVQQELELEEWGTEAQVKLGSRLIELLLDSAFVQPPADQTPDSSPDIRPAFKHVLRQPIIENGRLKKKHWVIECDHLVHEGFESTARHVDIPYLPMLVPPKKWKGYDKGGHLFLPSYIMRTHGVKDQKDAINSVPRKQLRKVFEALDILGSTKWRVNRRVHDVVETIWSQGGGIAGLVDKANIPLPERPESEDPDEMQKWKWSLKKAKKTNRELHAERCDTELKLSVARKMREEDGFYYPHNLDFRGRAYPMHPHLSHLGSDLCRGVLEYAEGRPLGKSGLCWLKIHLANKYGGGIEKLSHEGKLAFVENQLFDIFDSAANPVDGNCWWTNAEDPFQCLAACMDLSDALRSPSPYHAVSHLPIHQDGSCNGLQHYAALGRDYMGAVAVNLVPGEKPADIYSEIASRVLNVVCEDSMKDPATNPTASLARVLVDQITKRLQEKGLITDDKLLYDVSCYATRVTLDALGQMFQSARGIMAWLGDCAKMIASKNQPVKWTSPVGLPVVQPYKKYKNYMIRTSLQCLALRREGDAIAIQRQKAAFPPNFVHSLDSSHMMMTAIACKESGLHFAGVHDSFWVHACDVDQMNQILRQQFVELYSMPILENLLEEFQTSFPTLEFPPCPPQGNFDVREVLTSTYFFN

SEQ ID NO: 195850 - protein, 936 aa, Zea Mays
MPLLLYPFSACVPPPRALLRRLSPPPPMAVVAPLPSAVRIIPSVGTLDLPALPPPPTDDFHWLDLFAFLNSPADTYHQIPAQGEEELEAGLELELELELEKHAEVERQRGRARRAQLRRLRQRQVKAETEAWARAAEEYREIEREMLDRRLAPALPYVKALFVGWFEPLRDAIARDQDVQRRKRVKHVYAKYLLLLPADKVAVIVMHKMMGLLMSSKDGTGSVRVVQAAHCIGEAVEREFKVQSFFQKSRKKKIQGENDPALEKEQAKCRKRVKSLVKRRKMSEAQRLVQQELELEEWGTEAQVKPPADQTPDSSPDIRPAFKHVLRQPIIENGRLKKKHWVIECDHLVHEGFESTARHVDIPYLPMLVPPKKWKGYDKGGHLFLPSYIMRTHGVKDQKDAINSVPRKQLRKVFEALDILGSTKWRVNRRVHDVVETIWSQGGGIAGLVDKANIPLPERPESEDPDEMQKWKWSLKKAKKTNRELHAERCDTELKLSVARKMREEDGFYYPHNLDFRGRAYPMHPHLSHLGSDLCRGVLEYAEGRPLGKSGLCWLKIHLANKYGGGIEKLSHEGKLAFVENQLFDIFDSAANPVDGNCWWTNAEDPFQCLAACMDLSDALRSPSPYHAVSHLPIHQDGSCNGLQHYAALGRDYMGAVAVNLVPGEKPADIYSEIASRVLNVVCEDSMKDPATNPTASLARVLVDQVDRKLVKQTVMTSVYGVTYIGARQQITKRLQEKGLITDDKLLYDVSCYATRVTLDALGQMFQSARGIMAWLGDCAKMIASKNQPVKWTSPVGLPVVQPYKKYKNYMIRTSLQCLALRREGDAIAIQRQKAAFPPNFVHSLDSSHMMMTAIACKESGLHFAGVHDSFWVHACDVDQMNQILRQQFVELYSMPILENLLEEFQTSFPTLEFPPCPPQGNFDVREVLTSTYFFN

SEQ ID NO: 195851 - protein, 725 aa, Zea Mays
MPLLLYPFSACVPPPRALLRRLSPPPPMAVVAPLPSAVRIIPSVGTLDLPALPPPPTDDFHWLDLFAFLNSPADTYHQIPAQGEEELEAGLELELELELEKHAEVERQRGRARRAQLRRLRQRQVKAETEAWARAAEEYREIEREMLDRRLAPALPYVKALFVGWFEPLRDAIARDQDVQRRKRVKHVYAKYLLLLPADKVAVIVMHKMMGLLMSSKDGTGSVRVVQAAHCIGEAVEREFKVQSFFQKSRKKKIQGENDPALEKEQAKCRKRVKSLVKRRKMSEAQRLVQQELELEEWGTEAQVKLGSRLIELLLDSAFVQPPADQTPDSSPDIRPAFKHVLRQPIIENGRLKKKHWVIECDHLVHEGFESTARHVDIPYLPMLVPPKKWKGYDKGGHLFLPSYIMRTHGVKDQKDAINSVPRKQLRKVFEALDILGSTKWRVNRRVHDVVETIWSQGGGIAGLVDKANIPLPERPESEDPDEMQKWKWSLKKAKKTNRELHAERCDTELKLSVARKMREEDGFYYPHNLDFRGRAYPMHPHLSHLGSDLCRGVLEYAEGRPLGKSGLCWLKIHLANKYGGGIEKLSHEGKLAFVENQLFDIFDSAANPVDGNCWWTNAEDPFQCLAACMDLSDALRSPSPYHAVSHLPIHQDGSCNGLQHYAALGRDYMGAVAVNLVPGEKPADIYSEIASRVLNVVCEDSMKDPATNPTASLARVLVDQLTGG

SEQ ID NO: 195852 - protein, 469 aa, Zea Mays
MQKWKWSLKKAKKTNRELHAERCDTELKLSVARKMREEDGFYYPHNLDFRGRAYPMHPHLSHLGSDLCRGVLEYAEGRPLGKSGLCWLKIHLANKYGGGIEKLSHEGKLAFVENQLFDIFDSAANPVDGNCWWTNAEDPFQCLAACMDLSDALRSPSPYHAVSHLPIHQDGSCNGLQHYAALGRDYMGAVAVNLVPGEKPADIYSEIASRVLNVVCEDSMKDPATNPTASLARVLVDQVDRKLVKQTVMTSVYGVTYIGARQQITKRLQEKGLITDDKLLYDVSCYATRVTLDALGQMFQSARGIMAWLGDCAKMIASKNQPVKWTSPVGLPVVQPYKKYKNYMIRTSLQCLALRREGDAIAIQRQKAAFPPNFVHSLDSSHMMMTAIACKESGLHFAGVHDSFWVHACDVDQMNQILRQQFVELYSMPILENLLEEFQTSFPTLEFPPCPPQGNFDVREVLTSTYFFN

SEQ ID NO: 195853 - protein, 842 aa, Zea Mays
MPLLLYPFSACVPPPRALLRRLSPPPPMAVVAPLPSAVRIIPSVGTLDLPALPPPPTDDFHWLDLFAFLNSPADTYHQIPAQGEEELEAGLELELELELEKHAEVERQRGRARRAQLRRLRQRQVKAETEAWARAAEEYREIEREMLDRRLAPALPYVKALFVGWFEPLRDAIARDQDVQRRKRVKHVYAKYLLLLPADKVAVIVMHKMMGLLMSSKDGTGSVRVVQAAHCIGEAVEREFKVQSFFQKSRKKKIQGENDPALEKEQAKCRKRVKSLVKRRKMSEAQRLVQQELELEEWGTEAQVKLGSRLIELLLDSAFVQPPADQTPDSSPDIRPAFKHVLRQPIIENGRLKKKHWVIECDHLVHEGFESTARHVDIPYLPMLVPPKKWKGYDKGGHLFLPSYIMRTHGVKDQKDAINSVPRKQLRKVFEALDILGSTKWRVNRRVHDVVETIWSQGGGIAGLVDKANIPLPERPESEDPDEMQKWKWSLKKAKKTNRELHAERCDTELKLSVARKMREEDGFYYPHNLDFRGRAYPMHPHLSHLGSDLCRGVLEYAEGRPLGKSGLCWLKIHLANKYGGGIEKLSHEGKLAFVENQLFDIFDSAANPVDGNCWWTNAEDPFQCLAACMDLSDALRSPSPYHAVSHLPIHQDGSCNGLQHYAALGRDYMGAVAVNLVPGEKPADIYSEIASRVLNVVCEDSMKDPATNPTASLARVLVDQVDRKLVKQTVMTSVYGVTYIGARQQITKRLQEKGLITDDKLLYDVSCYATRVTLDALGQMFQSARGIMAWLGDCAKMIASKNQPVKWTSPVGLPVVQPYKKYKNYMEFMTHFGCMRVMLIK

SEQ ID NO: 195854 - protein, 570 aa, Zea Mays
MLVPPKKWKGYDKGGHLFLPSYIMRTHGVKDQKDAINSVPRKQLRKVFEALDILGSTKWRVNRRVHDVVETIWSQGGGIAGLVDKANIPLPERPESEDPDEMQKWKWSLKKAKKTNRELHAERCDTELKLSVARKMREEDGFYYPHNLDFRGRAYPMHPHLSHLGSDLCRGVLEYAEGRPLGKSGLCWLKIHLANKYGGGIEKLSHEGKLAFVENQLFDIFDSAANPVDGNCWWTNAEDPFQCLAACMDLSDALRSPSPYHAVSHLPIHQDGSCNGLQHYAALGRDYMGAVAVNLVPGEKPADIYSEIASRVLNVVCEDSMKDPATNPTASLARVLVDQVDRKLVKQTVMTSVYGVTYIGARQQITKRLQEKGLITDDKLLYDVSCYATRVTLDALGQMFQSARGIMAWLGDCAKMIASKNQPVKWTSPVGLPVVQPYKKYKNYMIRTSLQCLALRREGDAIAIQRQKAAFPPNFVHSLDSSHMMMTAIACKESGLHFAGVHDSFWVHACDVDQMNQILRQQFVELYSMPILENLLEEFQTSFPTLEFPPCPPQGNFDVREVLTSTYFFN

SEQ ID NO: 195855 - protein, 148 aa, Zea Mays
MYRPNPEMMDTKPGPDGQDTDGVYRPPKFMPTSMDDEEKRHKKDSRRDKAIARVATENPYIKEIIDDAADRPEEWKETVGDESREFGRYMRQREEQEKQEEELFTRAPVTKRDKQMEKRIRRQLHGLGGLTDGFDPWDEHAVGRRQGR

SEQ ID NO: 195856 - protein, 119 aa, Zea Mays
MPTSMDDEEKRHKKDSRRDKAIARVATENPYIKEIIDDAADRPEEWKETVGDESREFGRYMRQREEQEKQEEELFTRAPVTKRDKQMEKRIRRQLHGLGGLTDGFDPWDEHAVGRRQGR

SEQ ID NO: 195857 - protein, 905 aa, Zea Mays
MMATLGRKKRQAATTFIVLCILSSFYICKAQFTPADSYLVDCGSSKSTMVGQRTFTADGASPVKVSTSQDILAGTSANGVASFDNSALYQTARIFTGPSSYTFPIQKQGRHFVRFYFFPFTYQSYDLSLAKFTVSTQDVLLLSDFQQPDKTAPLFKEYSLNITRDTLVISFKPSNGIAFVNAIEVVSVPDDLITDDAQMVNPVQQYSGLSTQPLETVYRVNMGGPKVTPDNDTLSRTWVTDLKYLLNPSVTKQVNYGKRVNYKKGGGGATQLSAPDIVYGTATELAATNTSNALFNMTWQFDVDAGFSYLVRFHFCDIVSKALNQLYFNAYVGGFYAQNNLDLSAMSDSQLATPIYIDVVLSSNDASSKLSISIGPSVLNNVLPDGILNGLEVMKISTGGSAFTVGSGSGNKKWGVILGAALGGVGLFIIVVVLVLLCRRKKTLEKQHSKTWMPFSINGLTSLSTGSRTSYGTTLTSGLNGSYGYRFAFSVLQEATNNFDENWVIGVGGFGKVYKGVMRDESKVAVKRGNPKSQQGLNEFRTEIELLSRLRHRHLVSLIGYCDERNEMILVYEYMEKGTLKSHLYGSDNPSLNWKQRLEVCIGAARGLHYLHTGSAKAIIHRDVKSANILLDENLLAKVADFGLSKTGPELDQTHVSTAVKGSFGYLDPEYFRRQQLTEKSDVYSFGVVLLEVLCARPVIDPTLPREMVNLAEWGMKWQKRGELHQIIDQRISGTIRPDSLRKFGETVEKCLADYGVERPSMGDVLWNLEYVLQLQDADSTVSDVNSMNRIVELPSQVQNVGALESISVTMAEAGASNEPDHDLSDVSMSRVFSQLIKAEGRGKRVQRQQGAPGRRTRRRRRRQHVQRAARAGGQDSSVFWQLSVVACACPFPPTHHLLEYNGYR

SEQ ID NO: 195858 - protein, 699 aa, Zea Mays
MTMPGSPARPSFSALRGARWRAYLGVIPGFAAVSTDELRRAAADSRRRYANLRRRLLIDPHLSKDEEGAPDLIVENPLSQSPGSTWGQYFRNAELEKMLNQDLSRLYPELGDFFQTSTCQSMLGRVLLVWSLRYPEFGYRQDRSKLNRSDRKNSVEGRTGKIRSLADLDPDTRDLFLINDAYGAEGELGIILSEKFMEHDAYSMFENLMNGAQGVVAITDFYSLSSAPESSMGLTPVREASSAIYHLLASVDSSLHSHLVELGVEPQYFALRWLRVLFGREFSLDSLLFIWDEIFSSPNHSYCTDIRSRADYQFKVLCSPRGALILSMAVSMMLHLRSSLLGSEHATSCLVRLLNFPEDIDLKSLIEKAKLLQSFALEANLPSSSSRGNSLLSTPNYWEETWKILQPSMDQKGGGVLKMKGRGFLRRSLSSTESNVSRSKAANFENNDMTSTRQSTTDEFHNADVVPAELITSVPHMLIEKQKHHVGKGTAETIGSNSKNGCETGQHDGYCSTSGEIRDPLGAASGYLSRSSSITLSCGTEYDHDTHHLEEPCDPCDDRVVNEPDPLSVHNTGTDEAATTDRTSGIVDTYPVRQRRLCSVDGKLKIKTRNATSAKGDEKETLAICSISNVADKELSRTLRSLGESMVENIQDIELLLKPNSLSTSVEKLEEAIPGSTEQAKAVAALKELRKISDLLRQI

SEQ ID NO: 195859 - protein, 472 aa, Zea Mays
MEHDAYSMFENLMNGAQGVVAITDFYSLSSAPESSMGLTPVREASSAIYHLLASVDSSLHSHLVELGVEPQYFALRWLRVLFGREFSLDSLLFIWDEIFSSPNHSYCTDIRSRADYQFKVLCSPRGALILSMAVSMMLHLRSSLLGSEHATSCLVRLLNFPEDIDLKSLIEKAKLLQSFALEANLPSSSSRGNSLLSTPNYWEETWKILQPSMDQKGGGVLKMKGRGFLRRSLSSTESNVSRSKAANFENNDMTSTRQSTTDEFHNADVVPAELITSVPHMLIEKQKHHVGKGTAETIGSNSKNGCETGQHDGYCSTSGEIRDPLGAASGYLSRSSSITLSCGTEYDHDTHHLEEPCDPCDDRVVNEPDPLSVHNTGTDEAATTDRTSGIVDTYPVRQRRLCSVDGKLKIKTRNATSAKGDEKETLAICSISNVADKELSRTLRSLGESMVENIQWRNLRKQFLEAQSKLRQ

SEQ ID NO: 195860 - protein, 115 aa, Zea Mays
MPGGQATPIMESTKATRSKCREAMRGGGVVVCCLDCFLEGDNLCLFAYSVSMAFAALSNIGAQDTCSVVDEDPPDTVLRRANDFLDYGGFRSYNVAGTPTFPGMYNPLELLWMVG

SEQ ID NO: 195861 - protein, 113 aa, Zea Mays
MRGGGVVVCCLDCFLEGDNLCLFAYSVSMAFAALSNIGAQDTCSVVDEDPPDTVLRRANDFLDYGGFRSYNVAGNNCFHFAYYCKTGREYLSPVRMIADPSQEHQRSPACTIL

SEQ ID NO: 195862 - protein, 387 aa, Zea Mays
MKLNVKTLKGTNFEIEASPDASVADVKRIIETTQGQSTYRADQQMLIYQGKILKDETTLESNGVAENSFLVIMLSKAKASSSGASTATTAKAPATLAQPAAPVAPAASVARTPTQAPVATAETAPPSVQPQAAPAATVAATDDADVYSQAASNLVSGNNLEQTIQQILDMGGGTWERDTVVRALRAAYNNPERAIDYLYSGIPENVEAQPVARAPAAGQQTNQQAASPAQPAVALPVQPSPASAGPNANPLNLFPQGVPSGGSNPGVVPGAGSGALDALRQLPQFQALLQLVQANPQILQENQAEFLRLVNESPEGGPGGNILGQLAAAVPQTLTVTPEEREAIQRLEGMGFNRELVLEVFFACNKDEELTANYLLDHGHEFDEQQQ

SEQ ID NO: 195863 - protein, 89 aa, Zea Mays
MYLFPFSSSGWEVPSRRPELKLYSSFTVYKIINCSPDWMTVPTRTISREPGQPRTSVLDVRVDAANITYFASVHAACASHVQPTKHKLR

SEQ ID NO: 195864 - protein, 51 aa, Zea Mays
MLMLLDDTRLTTISRPSTRSNHPSLGSSTSITLRSIRFLSSTSRDQLVYHN

SEQ ID NO: 195865 - protein, 310 aa, Zea Mays
MQEEGWSENNALHLRKRGGGEARRGGFLDQHADVPDHSAAHAAGEGRHHAHQLRRHLRRDAPHRCLPRRRLHRPVLDHRRRVRRLPSRHGAPDGVSGAAAVPAGAVQARRRGGMPGGRAVAAGGAVRVPAPERGGRGRVPPLHRGVRGGPVRRVAGGGARAELGLLQLVLLLQRRVHAAGRHGGGVRAGQRGLGLGPRRAGLLHGRLRRRLRGRVPDVPEAGARGEPVHAARAGCRRRCQEAAAAGGGRRPRVAVRGRRARRAHLHCTALVRIGAHFLWWFDWMDCRQPTTHKKLPRKDHGQGRSNHKAM

SEQ ID NO: 195866 - protein, 251 aa, Zea Mays
MDVPYFGSQNSMDDALPFIIFIHPNKMLNGTHKFVLGNIHVLFNPKRGDVKLGQIRMLLENANALAEKWDKIPIVLAGDFNSTPDSAIYKFLSTMKLNISLHDRRHLSGLDSTEFGYELCSLLKYQWTDEEVRNATGYSNVMVAEHPLKLSSSYAMLKGNSNNRGLHGEPLATSYHRKFLGTVDYLWHTHGIECSRVLDTLPISVLKRTRGLPTREIGSDHLPIVAEFAFTESVEDDSDEDDESEQDDESE

SEQ ID NO: 195867 - protein, 395 aa, Zea Mays
MSRRGAMPSTAPRARLSPPAPASHPPRKRGRSPSAPGSTASWRASAENTVPLYHRRRWHNPERAPGRVWQRFRAPQPALLSSRLWICSEDASTSSSGDACTIMSYNILADYNARNHPDLYLDAPWDAMRWDSRRRLIIREIRHWDPDVVCLQEVDRFQDIAAGMKSRGYEGIFQRRTGDTRDGCAIFWKSKQLHLVEEDSIDFSEFNLRNNVAQICVFELNGTHKFVLGNIHVLFNPKRGDVKLGQIRMLLENANALAEKWDKIPIVLAGDFNSTPDSAIYKFLSTMKLNISLHDRRHLSGLDSTEFGYELCSLLKYQWTDEEVRNATGYSNVMVAEHPLKLSSSYAMLKGNSNNRGLHGEPLATSYHRKFLGTVDYLWYASKCLPACCMYTQRD

SEQ ID NO: 195868 - protein, 280 aa, Zea Mays
MKSRGYEGIFQRRTGDTRDGCAIFWKSKQLHLVEEDSIDFSEFNLRNNVAQICVFELNGTHKFVLGNIHVLFNPKRGDVKLGQIRMLLENANALAEKWDKIPIVLAGDFNSTPDSAIYKFLSTMKLNISLHDRRHLSGLDSTEFGYELCSLLKYQWTDEEVRNATGYSNVMVAEHPLKLSSSYAMLKGNSNNRGLHGEPLATSYHRKFLGTVDYLWHTHGIECSRVLDTLPISVLKRTRGLPTREIGSDHLPIVAEFAFTESVEDDSDEDDESEQDDESE

SEQ ID NO: 195869 - protein, 194 aa, Zea Mays
MLNGTHKFVLGNIHVLFNPKRGDVKLGQSAIYKFLSTMKLNISLHDRRHLSGLDSTEFGYELCSLLKYQWTDEEVRNATGYSNVMVAEHPLKLSSSYAMLKGNSNNRGLHGEPLATSYHRKFLGTVDYLWHTHGIECSRVLDTLPISVLKRTRGLPTREIGSDHLPIVAEFAFTESVEDDSDEDDESEQDDESE

SEQ ID NO: 195870 - protein, 231 aa, Zea Mays
MDMDMSSAYPHHWLSFSLSNNYHHGLLEAFSNSSGTPLGDEQGAVEESPRTVEDFLGGVGGAGAPPQPAAAADQDHQLVCGELGSITARFLRHYPAAPAGTTVENPGAVTVAAMSSTDVAGAESDQARRPAETFGQRTSIYRGVTRHRWTGRYEAHLWDNSCRREGQSRKGRQVYLGGYDKEEKAARAYDLAALKYWGPTTTTNFPVSNYEKELEEMKSMTRQEFIASLRR

SEQ ID NO: 195871 - protein, 482 aa, Zea Mays
MDMDMSSAYPHHWLSFSLSNNYHHGLLEAFSNSSGTPLGDEQGAVEESPRTVEDFLGGVGGAGAPPQPAAAADQDHQLVCGELGSITARFLRHYPAAPAGTTVENPGAVTVAAMSSTDVAGAESDQARRPAETFGQRTSIYRGVTRHRWTGRYEAHLWDNSCRREGQSRKGRQVYLGGYDKEEKAARAYDLAALKYWGPTTTTNFPELEEMKSMTRQEFIASLRRKSSGFSRGASIYRGVTRHHQHGRWQARIGRVAGNKDLYLGTFSTQEEAAEAYDIAAIKFRGLNAVTNFDMSRYDVESILSSDLPVGGGASGRAPAKFPLDSLQPGSAAAMMLAGAAAASQATMPPSEKDYWSLLALHYQQQQEQERQFPASAYEAYGSGGVNVDFTMGTSSGNNNNNTGSGVMWGATTGAVVVGQQDSSGKQGNGYASNIPYAAAAMVSGSAGYEGSTGDNGTWVTTTTSSNTGTAPHYYNYLFGME

SEQ ID NO: 195872 - protein, 519 aa, Zea Mays
MPAVDTLELVTGSPTDIAAPSVICPPPTLPPRRGGIITRLPPQFRHSSAQASSGAEQSLEIPPTICPPADAEPIASPAARTMGSVAEDSTAAAAAAASVVFRSKLPDIEIPRNLSLQAYCFERLPEVSSRPCLIDGQTGAVHTYAEVDRLSRSAAAALRGLGVGRGDVVMALLRNCPEFALVFLGAARLGAATTTANPFYTPHEIHRQAAAAGARVVVTEACAVDKVRGFAAERGVPVVAVDGAFDGCLELRALVDAAEPLAADEEVGPDDVVALPYSSGTTGMPKGVMLTHRSLVTSVAQQVDGENPNLYFSKDDVVLCVLPLFHIYSLNSVLLAGLRAGCAIVIMRKFEIGALVELVRAHGVTVAPFVPPIVVEIAKSPRVGAADLASIRMVMSGAAPMGKDLQDAFMAKIPNAVLGQGYGMTEAGPVLAMCLAFAKEPFEVKSGSCGTVVRNAELKIVDPDTSASLGRNQPGEICIRGEQIMKEKNRALSTSCGRSAHAKSTSSPRSLQARSRLSE

SEQ ID NO: 195873 - protein, 102 aa, Zea Mays
MRRRPGQVSHGSRPLVPDVHRLLALKPNHPLKCTIFSTLFFYSLFSFPYSRSLPLLYSSTVHRRPASSFGCPRQAMRKYLKPIRHKVVCRELSDSTSTISPS

SEQ ID NO: 195874 - protein, 53 aa, Zea Mays
MPGMMESGFHVVKATARNIDSKHVHCYLFSETVKELFIYDAYLDSSALVGART

SEQ ID NO: 195875 - protein, 92 aa, Zea Mays
MAIVISTSVSRPHTTTALDGDVVHVALVVELCLGHEPPLPKYVSLSCHRKCLCLAVADNLSMFLHSYCFSYSYSMTQASTILNNLNVMQEAT

SEQ ID NO: 195876 - protein, 95 aa, Zea Mays
MDAQAQRPFFPIVHRPLLLVKASNIQHHCNTMRGGSMALLWCQILDWIEWFTVFWSGTVSDLEPSRQPNTGTPHPGDDMATMVTPSAMEIEVLFT

SEQ ID NO: 195877 - protein, 302 aa, Zea Mays
MELHKYWGVGGRRCGSCEGAPAAVHCRTCVGGSFLCTTCDARPAHARLGHERVWMCEVCELAPAAVTCKADHAHAHAHALNLNVEAKDMKLDYLFSELDPYLSVEIPRFQHADSVVPNGAGAAVELDFTCGIGVKHSSYSSYTATSLAHSGSSSEVGVVPEAFGGSGSGGGSFELDFTRPKPQAYMPYTGTPQSHSVPSADVEVVPERGDLAAVRPVPLMGESREARLMRYREKRKNRRFEKTIRYASRKAYAETRPRIKGRFAKRADHDGDADADDAEAEAEAAVPMSYVLDFGYGVVPSF

SEQ ID NO: 195878 - protein, 214 aa, Zea Mays
MKLDYLFSELDPYLSVEIPRFQHADSVVPNGAGAAVELDFTCGIGVKHSSYSSYTATSLAHSGSSSEVGVVPEAFGGSGSGGGSFELDFTRPKPQAYMPYTGTPQSHSVPSADVEVVPERGDLAAVRPVPLMGESREARLMRYREKRKNRRFEKTIRYASRKAYAETRPRIKGRFAKRADHDGDADADDAEAEAEAAVPMSYVLDFGYGVVPSF

SEQ ID NO: 195879 - protein, 903 aa, Zea Mays
MGDDYLAEPEDEVAQSMWPENIGDKHQRQFRMEKFRKDQDAFKDVKFDEKPVHVDFQRLMEMANSEKGVSQMQYFMKHWEYKRANAARLLEEELGLLCQQRKEIEQNKQQILEEQRFQDESYYAVKRHVPILDEVYEDEWKRPSKKNDDLSRSRETNIDADHDSVSYWKERATKLEEKLEESIQRERSLVEKLEENIKNLQSHTPAEEFSGMLKRADYFLHLVLQSAPIVIAHQDADLRYRFIFNHYPTLADEDVIGKTDYEILSGEGIEEMNSVKREVMASGIATKREFAFNTPMFGAKTFVTYIEPVFSKGGEAIGVNYVAMDITDQVKRREKMADIRVREAVQNAKETELSRSLHITEETMRAKQMLATMSHEIRSPLSGVLSMAEILATTKLDKEQHQLLEVMLSSGDLVLQLINDILDLSKVESGAMKLESTTFRPREVVKHVLQTAAASLKKELTLVGCIGDDVPVEVIGDVLRIRQILTNLISNAVKFTHEGKVGINLQVVHEKQLGCKIEIGKIHKRAYSGTAITAAETAAVSTRNCDKDTLHCSKHEDAFQNGVPTCENFKEDIEGEEVVWLRCDVYDTGIGIPEKSLPLLFKRYMQASADHARKYGGTGLGLAICKQLVELMGGTLTVVSKENEGSTFTFVLPCKIPVKDEHSDDPDEMHSSQNDSANSDIEGSFFFKPQMRASLLSPGVSIMNNTKLIGAKLMCYDPPDISHDRKLFSNGFSSTEHNFTNTCTAHQPNGASVRSTAEEPDNAMVLELNSQAERVSSSRGDLVSVSGAAACKVLEEQSLHKKPKCSPIGNKAKILLVEDNKVNIIVAKSMLEQLGHGIDIVNNGMQAIRAVQQHQYDLILMMTANSFAESSEECLAAGMDSYISKPVNFQNIKECLQRYLMSQ

SEQ ID NO: 195880 - protein, 501 aa, Zea Mays
MTSLIFPKWSQVIGDVLRIRQILTNLISNAVKFTHEGKVGINLQVVHEKQLGCKIEIGKIHKRAYSGTAITAAETAAVSTRNCDKDTLHCSKHEDAFQNGVPTCENFKEDIEGEEVVWLRCDVYDTGIGIPEKSLPLLFKRYMQASADHARKYGGTGLGLAICKQLVELMGGTLTVVSKENEGSTFTFVLPCKIPVKDEHSDDPDEMHSSQNDSANSDIEGSFFFKPQMRASLLSPGVSIMNNTKLIGAKLMCYDPPDISHDRKLFSNGFSSTEHNFTNTCTAHQPNGASVRSTAEEPDNAMVLELNSQAERVSSSRGDLVSVSGAAACKVLEEQSLHKKPKCSPIGNKAKILLVEDNKVNIIVAKSMLEQLGHGIDIVNNGMQAIRAVQQHQYDLILMDVHMPEMDGLQATKHIRYFENTGCWDVSVKPEDNRMITGSVISSDCAHAKKQGQRVPIIAMTANSFAESSEECLAAGMDSYISKPVNFQNIKECLQRYLMSQ

SEQ ID NO: 195881 - protein, 692 aa, Zea Mays
MNSVKREVMASGIATKREFAFNTPMFGAKTFVTYIEPVFSKGGEAIGVNYVAMDITDQVKRREKMADIRVREAVQNAKETELSRSLHITEETMRAKQMLATMSHEIRSPLSGVLSMAEILATTKLDKEQHQLLEVMLSSGDLVLQLINDILDLSKVESGAMKLESTTFRPREVVKHVLQTAAASLKKELTLVGCIGDDVPVEVIGDVLRIRQILTNLISNAVKFTHEGKVGINLQVVHEKQLGCKIEIGKIHKRAYSGTAITAAETAAVSTRNCDKDTLHCSKHEDAFQNGVPTCENFKEDIEGEEVVWLRCDVYDTGIGIPEKSLPLLFKRYMQASADHARKYGGTGLGLAICKQLVELMGGTLTVVSKENEGSTFTFVLPCKIPVKDEHSDDPDEMHSSQNDSANSDIEGSFFFKPQMRASLLSPGVSIMNNTKLIGAKLMCYDPPDISHDRKLFSNGFSSTEHNFTNTCTAHQPNGASVRSTAEEPDNAMVLELNSQAERVSSSRGDLVSVSGAAACKVLEEQSLHKKPKCSPIGNKAKILLVEDNKVNIIVAKSMLEQLGHGIDIVNNGMQAIRAVQQHQYDLILMDVHMPEMDGLQATKHIRYFENTGCWDVSVKPEDNRMITGSVISSDCAHAKKQGQRVPIIAMTANSFAESSEECLAAGMDSYISKPVNFQNIKECLQRYLMSQ

SEQ ID NO: 195882 - protein, 289 aa, Zea Mays
MGVRMKDKYDKYWGVWHTNNNSFENDDEDEDEDGNGRGRRKGKGKGKEKEKENINLLIFVAAVLDPRYKLSLYTKITIEEIFGQERGELVWEAINTCVHELFEEYRKLYAPNEQPIEASDLTPKGGPGGKLKEVIAKRMKMNNGSSSSSKSELDKYLTEENEDTERKLNILAWWKAHAHRFPILAHLARDVLAMPISTVASESAFSTSGRILDDFRTSLTPFMLEALVCTQDWMRRSTPIDIKESDEELAMIEKELIEEFGPGSKGKGKEKASTQSSSKAPSNTGTGTS

SEQ ID NO: 195883 - protein, 135 aa, Zea Mays
MGCSGDTNAKDWGNLRQSELTRKTTSSWPNLQSIYNTEAQLVTLEFLFAIQLPARPRRHAFRCSGLSIGCCSPLTLRTVKLCDVPFHSEKVSRRLGCVVTSVLLLRSGASVTAWAPSAVTGLLQLSNCASLDVLL

SEQ ID NO: 195884 - protein, 138 aa, Zea Mays
MGMEHFISSANLSAGFTSYGNEAAEEMKKLRGLRLETLMETCQNTESRDVAIRCPIPCKSSRRYREHDLRAAQDLSEFIASPPYFMGSPPLRATNPLAHDAQFCAWKVHSVDQSLGIPIPAKSYNARYYARKESFRKA

SEQ ID NO: 195885 - protein, 114 aa, Zea Mays
MGMEHFISSANLSAEGFTSYGNEAAEEMKKLRGLRLETLMETCQNTESRDVAIRCPIPCKSSRRYREHDLRAAQDLSEFIVSKVRFCTVVSSNWRLYTVVSQMCFHFHLIYRLY

SEQ ID NO: 195886 - protein, 112 aa, Zea Mays
MKKLRGLRLETLMETCQNTESRDVAIRCPIPCKSSRRYREHDLRAAQDLSEFIASPPYFMGSPPLRATNPLAHDAQFCAWKVHSVDQSLGIPIPAKSYNARYYARKESFRKA

SEQ ID NO: 195887 - protein, 451 aa, Zea Mays
MDSPEASPGTEYIDKINIPSALVNRAFGESLKKMAQKVAGAGSEEVVVKLDWRESMPHPDERVEYELWTNSNDECGARCDEQMAFVRGFRGHAQLLERAGYARFTPHYITWYCPEAFRATQQCRSQCINRGRYCAPDPEGDFGAGYEGKDVVVENLRQLCVHRVANETGRPWAWWDYVMDYKIRCSMKEKKYTKTCAEDVVTALGLDLKKVLECMGDPEADADNAVLSKEQEDQIGSGSRGDVTILPTLVINNVQYRGKLERTAVLKAVCAGFKEGTEPRVCLSHDIETNECLHRNGGCWRDEATNVTACQDTYRGRVCECPVVNGVRYEGDGYTDCKAIGPGRCALNNGGCWSATRGHQTFSACTETALTGCRCPPGFHGDGHKCEADRTARMAELIEMPPIRVVLLQTWTSAGRSWRARARTASARTRGATTSASARATSSTSGARTSA

SEQ ID NO: 195888 - protein, 239 aa, Zea Mays
MEMQRSVASSSGMIARSMNDRSVNVNEALRIQMEVQRRLHGELEVQKHLQMRVEAQGKYMQSIVEKAYQALGSSDCATWPAGYRTLGSQGVLDIGTSSTSFSSVQDLQCFYGGSSHMDQLLHQMERPMDGFLTLGESCFIGSADNKKDLNNHCSSSGKSSMMWASEEQQAKSGNDQLQMGSSTRMEGAGIDVMDPVTGLYEGAVSGDSMDSKGFEGSNSRLEMKPPAQQAPVGSQRIRI

SEQ ID NO: 195889 - protein, 78 aa, Zea Mays
MDWIIHLDTDELIHPAGAREYSLRRLLLDVPDNVDMVIFPNYESSIDCMTLRILLLRYRTTVICNIYSKEREKCSVSY

SEQ ID NO: 195890 - protein, 56 aa, Zea Mays
MYDKLRRSRRFDAVQSGCTALSIVKEGDLMVVDDSRVVLGTAYDAAAITPSSSSST

SEQ ID NO: 195891 - protein, 60 aa, Zea Mays
MQALECILLLIRFFPSLSTKESLMLNHKQKLNGGYMSNIQFFKPTIVFSLRLPVYLQRFS

SEQ ID NO: 195892 - protein, 135 aa, Zea Mays
MYLKSSQFGAKICLLTSFKDTCLIEIVPRDLTPTKGKGLATLLLSYQMLGSISNFSGTSIAASILLLRQFCIQPLQDANHNSIFRFCRNHYHLIPVMVHIFAELWLSFWCEVHYNSLYGIDDLLTRKTKKKHWLF

SEQ ID NO: 195893 - protein, 234 aa, Zea Mays
MSGQQDHASKSSSSSISSSTQESEEEAPVRSVTIGSLLAQANSTSGHSLGKRLSHLGSIPYTPRVNGKIPNVGNATLDHERLLERLGTYGLAEFQIEGDGNCQVYLQFRALADQIYHNPDYHKHVRKAVMKQLKEFRKQYESYVPMEYKVYLKKMKRSGEWGDHLTLQAAADRFGAKICLLTSFKDTCLIEIVPRDLTPTKELWLSFWCEVHYNSLYGIDDLLTRKTKKKHWLF

SEQ ID NO: 195894 - protein, 68 aa, Zea Mays
MYLKSSQFGAKICLLTSFKDTCLIEIVPRDLTPTKELWLSFWCEVHYNSLYGIDDLLTRKTKKKHWLF

SEQ ID NO: 195895 - protein, 310 aa, Zea Mays
MGQSKAEFLKQFGGDYGYPDAPRGIDELRAAEFKRLEGMVYLDHAGATLYSEAQMTDVARDLMSNVYGNPHSQNDSSMATIDAVTSVRHQVLKYFNASPRDYKCIFTSGATAALKLVGECFPWSRDSCYMYTMENHNSVLGIREYALSKGATVSAVDVEEVVDPSKNHESDSLFKVSKRSNQRRGDNVLLHNYQNGSLSAISGNNLNLFAFPSECNFSGHKFNLSLVKLIKEGKFMDFSSQQQGQWMVLIDAAKGCATEPPNLTLYPADFVVCSFYKIFGYPTGLGALIVKNEAASLLNKTYFSGEKKRH

SEQ ID NO: 195896 - protein, 195 aa, Zea Mays
MDFSSQQQGQWMVLIDAAKGCATEPPNLTLYPADFVVCSFYKIFGYPTGLGALIVKNEAASLLNKTYFSGGTVAASIADIDFVQKRKGIEQTLEDGTISFLSISSLRYGFKIIDILTISAIARHTASLATYVRNKMLELKHSNEKNVCIIYGQDFKVINGLEEEQVLTLVSLDVWLIAVIGKPLPWRSTISVGVG

SEQ ID NO: 195897 - protein, 243 aa, Zea Mays
MGQSKAEFLKQFGGDYGYPDAPRGIDELRAAEFKRLEGMVYLDHAGATLYSEAQMTDVARDLMSNVYGNPHSQNDSSMATIDAVTSVRHQVLKYFNASPRDYKCIFTSGATAALKLVGECFPWSRDSCYMYTMENHNSVLGIREYALSKGATVSAVDVEEVVDPSKNHESDSLFKVSKRSNQRRGDNVLLHNYQNGSLSAISGNNLNLFAFPSECNFSGHKFNLSLVKLIKEGKFMDFSSQQQ

SEQ ID NO: 195898 - protein, 371 aa, Zea Mays
MLLETLCLMSMGILNDSSMATIDAVTSVRHQVLKYFNASPRDYKCIFTSGATAALKLVGECFPWSRDSCYMYTMENHNSVLGIREYALSKGATVSAVDVEEVVDPSKNHESDSLFKVSKRSNQRRGDNVLLHNYQNGSLSAISGNNLNLFAFPSECNFSGHKFNLSLVKLIKEGKFMDFSSQQQGQWMVLIDAAKGCATEPPNLTLYPADFVVCSFYKIFGYPTGLGALIVKNEAASLLNKTYFSGGTVAASIADIDFVQKRKGIEQTLEDGTISFLSISSLRYGFKIIDILTISAIARHTASLATYVRNKMLELKHSNEKNVCIIYGQDFKVINGLEEEQVLTLVSLDVWLIAVIGKPLPWRSTISVGVG

SEQ ID NO: 195899 - protein, 401 aa, Zea Mays
MGQSKAEFLKQFGGDYGYPDAPRGIDELRAAEFKRLEGMVYLDHAGATLYSEAQMTDVARDLMSNVYGNPHSQNDSSMATIDAVTSVRHQVLKYFNASPRDYKCIFTSGATAALKLVGECFPWSRDSCYMYTMENHNSVLGIREYALSKGATVSAVDVEEVVDPSKNHESDSLFKVSKRSNQRRECNFSGHKFNLSLVKLIKEGKFMDFSSQQQGQWMVLIDAAKGCATEPPNLTLYPADFVVCSFYKIFGYPTGLGALIVKNEAASLLNKTYFSGGTVAASIADIDFVQKRKGIEQTLEDGTISFLSISSLRYGFKIIDILTISAIARHTASLATYVRNKMLELKHSNEKNVCIIYGQDFKVINGLEEEQVLTLVSLDVWLIAVIGKPLPWRSTISVGVG

SEQ ID NO: 195900 - protein, 246 aa, Zea Mays
MGQSKAEFLKQFGGDYGYPDAPRGIDELRAAEFKRLEGMVYLDHAGATLYSEAQMTDVARDLMSNVYGNPHSQNDSSMATIDAVTSVRHQVLKYFNASPRDYKCIFTSGATAALKLVGECFPWSRDSCYMYTMENHNSVLGIREYALSKGATVSAVDVEEVVDPSKNHESDSLFKVSKRSNQRRGDNVLLHNYQNGSLSAISGNNLNLFAFPSECNFSGHKFNLSLVKLIKEGKFMDFSSQQHGWF

SEQ ID NO: 195901 - protein, 75 aa, Zea Mays
MDFSSQQQGQWMVLIDAAKGCATEPPNLTLYPADFVVCSFYKIFGYPTGLGALIVKNEAASLLNKTYFSGEKKRH

SEQ ID NO: 195902 - protein, 59 aa, Zea Mays
MAGSAAADARAHGEVISSMRTANRRFDAEQRASRAPNRELARAGKNDELGKLHVISARK

SEQ ID NO: 195903 - protein, 81 aa, Zea Mays
MYVSCVIIYHCPMSIDITTSTRRFGTVPTRHAPHQYRATSHVMTANRPATLLGARCRIGGCRVKEGRSSSRRSMESGDRRE

SEQ ID NO: 195904 - protein, 95 aa, Zea Mays
MYVSCVIIYHCPMSIDITTSTRRFGTVPTRYVLVFPWLCSFYRRIPYITISVKDISASWPNSDALQVPKTHQTLTMDIILLFSYLGWSSSSCHLF

SEQ ID NO: 195905 - protein, 87 aa, Zea Mays
MCGFACRRRSTSTARRRPGTTRARRAARRESRRRGGRRRPRSSRRQLRHATETGGRRPGRGPAPFLPSIADEIAIFSSFLVSKGTGV

SEQ ID NO: 195906 - protein, 359 aa, Zea Mays
MRDPFDAPVDLINPDHNGGNKLSRTGAVSAGDYGLQNGPKSFAPNSDTLVRHQVQVASLHKDLVLEDPNTRIMDPETKELYFRSQSQGDEILLLRKKIAEASLKELRLLGEKHILERRLTDLRMAVDEKQEEAISGALQQLNQKKTHLEDNMRLANELKVEEEELYFFTSSLLSMLAEYNIRPPQINASIITTVTKRLYQQMHLKLRSLNDNLGDMTQPGNIYNPNLQQVTLSRNEPSPSYNLDSNRNTLQQYAQGPSDRHMDQMDTGGTTPSNYFEGDRRVDGDSQLYQPDGDALPGIEGFQIAGEPRPGFQLTACGFPTNGTTLCNFQWVRHLENGTRQSIEGATMYDYVVTADDVG

SEQ ID NO: 195907 - protein, 395 aa, Zea Mays
MAVDEKQEEAISGALQQLNQKKTHLEDNMRLANELKVEEEELYFFTSSLLSMLAEYNIRPPQINASIITTVTKRLYQQMHLKLRSLNDNLGDMTQPGNIYNPNLQQVTLSRNEPSPSYNLDSNRNTLQQYAQGPSDRHMDQMDTGGTTPSNYFEGDRRVDGDSQLYQPDGDALPGIEGFQIAGEPRPGFQLTACGFPTNGTTLCNFQWVRHLENGTRQSIEGATMYDYVVTADDVGTFLAVDCTPMDDNGRQGDLVTEFANNGNKITCDPEMQSHIDAYISNGRAEFEVFVLAYSPEEWELATLVLTRPNYQIKFKKTGEAIIDEKYSQSLQMKIPNGRTTQFVLVTAGATLPFNTQGISEPNNEDYDVRLRDLIVLVMRTFQKKALDAKRKVNT

SEQ ID NO: 195908 - protein, 351 aa, Zea Mays
MRDPFDAPVDLINPDHNGGNKLSRTGAVSAGDYGLQNGPKSFAPNSDTLVRHQVQVASLHKDLVLEDPNTRIMDPETKELYFRSQSQGDEILLLRKKIAEASLKELRLLGEKHILERRLTDLRMAVDEKQEEAISGALQQLNQKKTHLEDNMRLANELKVEEEELYFFTSSLLSMLAEYNIRPPQINASIITTVTKRLYQQMHLKLRSLNDNLGDMTQPGNIYNPNLQQVTLSRNEPSPSYNLDSNRNTLQQYAQGPSDRHMDQMDTGGTTPSNYFEGDRRVDGDSQLYQPDGDALPGIEGFQIAGEPRPGFQLTACGFPTNGTTLCNFQWVRHLENGTRQSIEGKVGNLS

SEQ ID NO: 195909 - protein, 404 aa, Zea Mays
MAVDEKQEEAISGALQQLNQKKTHLEDNMRLANELKVEEEELYFFTSSLLSMLAEYNIRPPQINASIITTVTKRLYQQMHLKLRSLNDNLGDMTQPGNIYNPNLQQVTLSRNEPSPSYNLDSNRNTLQQYAQGPSDRHMDQMYHGSNFQQDTGGTTPSNYFEGDRRVDGDSQLYQPDGDALPGIEGFQIAGEPRPGFQLTACGFPTNGTTLCNFQWVRHLENGTRQSIEGATMYDYVVTADDVGTFLAVDCTPMDDNGRQGDLVTEFANNGNKITCDPEMQSHIDAYISNGRAEFEVFVLQAYSPEEWELATLVLTRPNYQIKFKKTGEAIIDEKYSQSLQMKIPNGRTTQFVLVTAGATLPFNTQGISEPNNEDYDVRLRDLIVLVMRTFQKKALDAKRKVNT

SEQ ID NO: 195910 - protein, 317 aa, Zea Mays
MRDPFDAPVDLINPDHNGGNKLSRTGAVSAGDYGLQNGPKSFAPNSDTLVRHQVQVASLHKDLVLEDPNTRIMDPETKELYFRSQSQGDEILLLRKKIAEASLKELRLLGEKHILERRLTDLRMAVDEKQEEAISGALQQLNQKKTHLEDNMRLANELKVEEEELYFFTSSLLSMLAEYNIRPPQINASIITTVTKRLYQQMHLKLRSLNDSNRNTLQQYAQGPSDRHMDQMYHGSNFQQDTGGTTPSNYFEGDRRVDGDSQLYQPDGDALPGIEGFQIAGEPRPGFQLTACGFPTNGTTLCNFQVYCFLNFCCYSL

SEQ ID NO: 195911 - protein, 316 aa, Zea Mays
MTQPGNIYNPNLQQVTLSRNEPSPSYNLDSNRNTLQQYAQGPSDRHMDQMYHGSNFQQDTGGTTPSNYFEGDRRVDGDSQLYQPDGDALPGIEGFQIAGEPRPGFQLTACGFPTNGTTLCNFQWVRHLENGTRQSIEGATMYDYVVTADDVGTFLAVDCTPMDDNGRQGDLVTEFANNGNKITCDPEMQSHIDAYISNGRAEFEVFVLQAYSPEEWELATLVLTRPNYQIKFKKTGEAIIDEKYSQSLQMKIPNGRTTQFVLVTAGATLPFNTQGISEPNNEDYDVRLRDLIVLVMRTFQKKLKECSSKNLLLCRS

SEQ ID NO: 195912 - protein, 381 aa, Zea Mays
MAVDEKQEEAISGALQQLNQKKTHLEDNMRLANELKVEEEELYFFTSSLLSMLAEYNIRPPQINASIITTVTKRLYQQMHLKLRSLNDNLGDMTQPGNIYNPNLQQVTLSRNEPSPSYNLDSNRNTLQQYAQGPSDRHMDQMYHGSNFQQDTGGTTPSNYFEGDRRVDGDSQLYQPDGDALPGIEGFQIAGEPRPGFQLTACGFPTNGTTLCNFQWVRHLENGTRQSIEGATMYDYVVTADDVGTFLAVDCTPMDDNGRQGDLVTEFANNGNKITCDPEMQSHIDAYISNGRAEFEVFVLAYSPEEWELATLVLTRPNYQIKFKKTGEAIIDEKYSQSLQMKIPNGRTTQFVLVTAGATLPFNTQGISEPNNEDYDVRYQL

SEQ ID NO: 195913 - protein, 454 aa, Zea Mays
MDPETKELYFRSQSQGDEILLLRKKIAEASLKELRLLGEKHILERRLTDLRMAVDEKQEEAISGALQQLNQKKTHLEDNMRLANELKVEEEELYFFTSSLLSMLAEYNIRPPQINASIITTVTKRLYQQMHLKLRSLNDNLGDMTQPGNIYNPNLQQVTLSRNEPSPSYNLDSNRNTLQQYAQGPSDRHMDQMYHGSNFQQDTGGTTPSNYFEGDRRVDGDSQLYQPDGDALPGIEGFQIAGEPRPGFQLTACGFPTNGTTLCNFQWVRHLENGTRQSIEGATMYDYVVTADDVGTFLAVDCTPMDDNGRQGDLVTEFANNGNKITCDPEMQSHIDAYISNGRAEFEVFVLAYSPEEWELATLVLTRPNYQIKFKKTGEAIIDEKYSQSLQMKIPNGRTTQFVLVTAGATLPFNTQGISEPNNEDYDVRLRDLIVLVMRTFQKKALDAKRKVNT

SEQ ID NO: 195914 - protein, 239 aa, Zea Mays
MRDPFDAPVDLINPDHNGGNKLSRTGAVSAGDYGLQNGPKSFAPNSDTLVRHQVQVASLHKDLVLEDPNTRIMDPETKELYFRSQSQGDEILLLRKKIAEASLKELRLLGEKHILERRLTDLRMAVDEKQEEAISGALQQLNQKKTHLEDNMRLANELKVEEEELYFFTSSLLSMLAEYNIRPPQINASIITTVTKRLYQQMHLKLRSLNDSNRNTLQQYAQGILAVLLPLIILRETEE

SEQ ID NO: 195915 - protein, 2565 aa, Zea Mays
MDFASRHAAAEAATSSAASASAPAAVAEEPEYLARYIVVKHSWRGRYRRVLCIASSCVVTLDPTTLNLTNSYDVGSKFDHAEALTATDEFTLAVRTDARGKFKPMRFSSPLRPGILTELHRLRPVQDSFDFPVLHLRRRTHEWAPFKLKVTPVGVELLEASGYMRWCLEFRDMNSPAIILLGNSYGSKTTEGGGFVLCPLYGRKSKAFMAASGTTNTAIISHLTKTAKLKIGLSLSVDNSQSMKADEFIAKRAMEAVGAAETRHGEWSVTRLRSAAHGTAYIESLSLGVGPRGGLGEQGDSVSCLLVLTSTSLVERRPENYEAVIVRPLSAVSALVRFVEEPQIFAFEFNDGCPIHVYASTSRDNLLATVLDVLETQRQCAIPVLPRLTMSGHRIDPPCGVAHLEMPYHGSVDMESASMHTKHLAAIAKEAVVSSDTVPGAKIRLWRRIREFNACVPYTGVPVNIEVPEVVVLALISLLPTIPHSLPADAPPLLPPSPKAAATIMGFVACLRRLLTSRSVASHVMSFPVAVGRIMGLLRNGSEGVAAEAAGLVAMLIGGGPGDSSILMDARGESHATYMHAKSVLFSQPMYVPILVNRLRPISVSPLLSLSVVEVLEAMLCEPHGETTQHATFVELLRQVAGLRRRLFALFAHPAESVRETISVIMRTIAEEDAIAAEFMRDAALKDGALLRHLLNAFFLPAGEQRDVSRQLVALWADSYQPALDLLSRILPPGLVAYLHTRSDEESQSQYDEAPLSRRQRRILQQRRVRGSKSMSVQEQGVPPNGVEDGEPFRHTSAGTYGVADVHQRHVGPYSSTHSPLPGISIDPSCAVTVPHGFVPEALSENNHQIGEPQLDSHVYSVDSNANGDLVSSSHSDFSVPAQVVVENTPVGSGRLLCNWYGFWRAFSLDHNRADLIWNERTRQELREALQAEVHNLDVEKARTNDIVPGSSVTEDAGGSDNLPRMSWNYAEFLVSYPSLSKEVCVGQYYLRLLLEIGSNYRAHNFPLRDPVAFFRALYHQFLCDADIGLTVDGAVPDELGSSDDWCDIGRLDGFGGGGGSSVRELCSRAMTIVYEQHYKVIGAFDGTPHITVLLDRTDDRVLRHRLLLLLKVLMNDLSNVEACVLVGGCVLAVDLLTVAHETSERTAIPLQSNLIAATAFMEPSKEWMYIDKDGTQVGPLEKDAIRRLWSKKSIDWTTKCWASGMSDWKGLRDIRELRWALSVRVPVLTPTQIGDAALSILHSMTSARSDLDDAGEIVTPTPRVKRILSSPRCLPHVAQVMLTGEPSIVEAAASLLMAIVTRNPKAMIRLYITGAFYFALAYPGSNLLSIAHLFSATHTHQAFHGGEEAALSSSLPLAKRSVLGGLLPESLLYVLERSGPSAFAGAMVSDSDTPEIIWTHKMRAENLICQVLQHLGEFPQKLAQHCHSLYDYAPMPPVTYPNLKDEMWCHRYYLRNLCDEIRFPNWPIVEHVEFLQSLLVMWREELTRRPMDLSEEEVCKILEISLDDLVLGENGSIKQSSDLSLANSGNKIENIDEEKLKRQYRKLAIKYHPDKNPEGREKFVAVQKAYERLQASMQGLQGPQVWRLLLLLKAQRILYKRYGDVLGPFKYAGYPMLLNAVTVDKDDSNFLSFDRTPLLIAASELIWLTCASSSLNGEELIRDGGIPLLATLLSRCMCVVQPTTPANEPAARIVTNIMHTFSVLSQFESGRVEILKFGGLADGIVHCTELEFVPSAVDAALLTAANVLVSSELQNALLRAGFLWYVLPLLLQYDSTAEENETCEAHGVGARVQIAKNLHAVHATQALSKLCGLSGDDILYPDNKPAYNALKALLTPKLADMLRNHPPKELLSNLNSNLESPEIIWNSSTRGELLKFVDQQRASQGPDGSYDLTESHSFTYEALSKELNVGNVYLRVYNNQPDFEISDQEEFCIALLKFIVELVLQWNSINLETIHQHGSVTEASMSGNDEVSDSTIEGKMDNSSGKQSTDGDSEVIINLQSGLTSLQNLLTSNPGLAAVFASKERLIPLFECLALHVPSESTSPQICLSVLSLLTKHASCLEAMVAERMSLILLFQILHCNPPCRDGALAVLYSLASTPELAWAAAKHGGVVYILELMLPLQEEIPVQQRAVAASLLGKLVGQPMHGPRVAITLARFLPDGLVSAIKDGPGEAVVSSLELTTETPELVWTPAMAASLSAQLATMASDLYQEQMKGRVVDWDVPEQASGQHVMKDEPQVGGIYVRLFLKDPKFPLRNPKRFLEGLLDQYVSSVAATHHEAIATDPELPLLLSAALVSLLRVHPVLADHVGYLGYVPKLVAAMAYEGQRETMASGQASSGSQAEPGEHDNSSHSEATVQTPQERVRLSCLRVLHQLASSTTCAEAMASTSAGTPQVIPLLMKAIGWQGGSILALETLKRVVGAGNRARDALVAQGLKVGLVEVLLGILDWRAGGRQGLRNKMKWNESEASIGRVLAVEVLHAFATEGAHCARVREVLNSSDVWSAYKDQKHDLFLPSSAQSSAAGVAGLIESSSRFTYALAAPPSSSLSPPSAPANPSGRQYYQHS

SEQ ID NO: 195916 - protein, 1288 aa, Zea Mays
MMQVMLTGEPSIVEAAASLLMAIVTRNPKAMIRLYITGAFYFALAYPGSNLLSIAHLFSATHTHQAFHGGEEAALSSSLPLAKRSVLGGLLPESLLYVLERSGPSAFAGAMVSDSDTPEIIWTHKMRAENLICQVLQHLGEFPQKLAQHCHSLYDYAPMPPVTYPNLKDEMWCHRYYLRNLCDEIRFPNWPIVEHVEFLQSLLVMWREELTRRPMDLSEEEVCKILEISLDDLVLGENGSIKQSSDLSLANSGNKIENIDEEKLKRQYRKLAIKYHPDKNPEGREKFVAVQKAYERLQASMQGLQGPQVWRLLLLLKAQRILYKRYGDVLGPFKYAGYPMLLNAVTVDKDDSNFLSFDRTPLLIAASELIWLTCASSSLNGEELIRDGGIPLLATLLSRCMCVVQPTTPANEPAARIVTNIMHTFSVLSQFESGRVEILKFGGLADGIVHCTELEFVPSAVDAALLTAANVLVSSELQNALLRAGFLWYVLPLLLQYDSTAEENETCEAHGVGARVQIAKNLHAVHATQALSKLCGLSGDDILYPDNKPAYNALKALLTPKLADMLRNHPPKELLSNLNSNLESPEIIWNSSTRGELLKFVDQQRASQGPDGSYDLTESHSFTYEALSKELNVGNVYLRVYNNQPDFEISDQEEFCIALLKFIVELVLQWNSINLETIHQHGSVTEASMSGNDEVSDSTIEGKMDNSSGKQSTDGDSEVIINLQSGLTSLQNLLTSNPGLAAVFASKERLIPLFECLALHVPSESTSPQICLSVLSLLTKHASCLEAMVAERMSLILLFQILHCNPPCRDGALAVLYSLASTPELAWAAAKHGGVVYILELMLPLQEEIPVQQRAVAASLLGKLVGQPMHGPRVAITLARFLPDGLVSAIKDGPGEAVVSSLELTTETPELVWTPAMAASLSAQLATMASDLYQEQMKGRVVDWDVPEQASGQHVMKDEPQVGGIYVRLFLKDPKFPLRNPKRFLEGLLDQYVSSVAATHHEAIATDPELPLLLSAALVSLLRVHPVLADHVGYLGYVPKLVAAMAYEGQRETMASGQASSGSQAEPGEHDNSSHSEATVQTPQERVRLSCLRVLHQLASSTTCAEAMASTSAGTPQVIPLLMKAIGWQGGSILALETLKRVVGAGNRARDALVAQGLKVGLVEVLLGILDWRAGGRQGLRNKMKWNESEASIGRVLAVEVLHAFATEGAHCARVREVLNSSDVWSAYKDQKHDLFLPSSAQSSAAGVAGLIESSSRFTYALAAPPSSSLSPPSAPANPSGRQYYQHS

SEQ ID NO: 195917 - protein, 2540 aa, Zea Mays
MDFASRHAAAEAATSSAASASAPAAVAEEPEYLARYIVVKHSWRGRYRRVLCIASSCVVTLDPTTLNLTNSYDVGSKFDHAEALTATDEFTLAVRTDARGKFKPMRFSSPLRPGILTELHRLRPVQDSFDFPVLHLRRRTHEWAPFKLKVTPVGVELLEASGYMRWCLEFRDMNSPAIILLGNSYGSKTTEGGGFVLCPLYGRKSKAFMAASGTTNTAIISHLTKTAKLKIGLSLSVDNSQSMKADEFIAKRAMEAVGAAETRHGEWSVTRLRSAAHGTAYIESLSLGVGPRGGLGEQGDSVSCLLVLTSTSLVERRPENYEAVIVRPLSAVYASTSRDNLLATVLDVLETQRQCAIPVLPRLTMSGHRIDPPCGVAHLEMPYHGSVDMESASMHTKHLAAIAKEAVVSSDTVPGAKIRLWRRIREFNACVPYTGVPVNIEVPEVVVLALISLLPTIPHSLPADAPPLLPPSPKAAATIMGFVACLRRLLTSRSVASHVMSFPVAVGRIMGLLRNGSEGVAAEAAGLVAMLIGGGPGDSSILMDARGESHATYMHAKSVLFSQPMYVPILVNRLRPISVSPLLSLSVVEVLEAMLCEPHGETTQHATFVELLRQVAGLRRRLFALFAHPAESVRETISVIMRTIAEEDAIAAEFMRDAALKDGALLRHLLNAFFLPAGEQRDVSRQLVALWADSYQPALDLLSRILPPGLVAYLHTRSDEESQSQYDEAPLSRRQRRILQQRRVRGSKSMSVQEQGVPPNGVEDGEPFRHTSAGTYGVADVHQRHVGPYSSTHSPLPGISIDPSCAVTVPHGFVPEALSENNHQIGEPQLDSHVYSVDSNANGDLVSSSHSDFSVPAQVVVENTPVGSGRLLCNWYGFWRAFSLDHNRADLIWNERTRQELREALQAEVHNLDVEKARTNDIVPGSSVTEDAGGSDNLPRMSWNYAEFLVSYPSLSKEVCVGQYYLRLLLEIGSNYRAHNFPLRDPVAFFRALYHQFLCDADIGLTVDGAVPDELGSSDDWCDIGRLDGFGGGGGSSVRELCSRAMTIVYEQHYKVIGAFDGTPHITVLLDRTDDRVLRHRLLLLLKVLMNDLSNVEACVLVGGCVLAVDLLTVAHETSERTAIPLQSNLIAATAFMEPSKEWMYIDKDGTQVGPLEKDAIRRLWSKKSIDWTTKCWASGMSDWKGLRDIRELRWALSVRVPVLTPTQIGDAALSILHSMTSARSDLDDAGEIVTPTPRVKRILSSPRCLPHVAQVMLTGEPSIVEAAASLLMAIVTRNPKAMIRLYITGAFYFALAYPGSNLLSIAHLFSATHTHQAFHGGEEAALSSSLPLAKRSVLGGLLPESLLYVLERSGPSAFAGAMVSDSDTPEIIWTHKMRAENLICQVLQHLGEFPQKLAQHCHSLYDYAPMPPVTYPNLKDEMWCHRYYLRNLCDEIRFPNWPIVEHVEFLQSLLVMWREELTRRPMDLSEEEVCKILEISLDDLVLGENGSIKQSSDLSLANSGNKIENIDEEKLKRQYRKLAIKYHPDKNPEGREKFVAVQKAYERLQASMQGLQGPQVWRLLLLLKAQRILYKRYGDVLGPFKYAGYPMLLNAVTVDKDDSNFLSFDRTPLLIAASELIWLTCASSSLNGEELIRDGGIPLLATLLSRCMCVVQPTTPANEPAARIVTNIMHTFSVLSQFESGRVEILKFGGLADGIVHCTELEFVPSAVDAALLTAANVLVSSELQNALLRAGFLWYVLPLLLQYDSTAEENETCEAHGVGARVQIAKNLHAVHATQALSKLCGLSGDDILYPDNKPAYNALKALLTPKLADMLRNHPPKELLSNLNSNLESPEIIWNSSTRGELLKFVDQQRASQGPDGSYDLTESHSFTYEALSKELNVGNVYLRVYNNQPDFEISDQEEFCIALLKFIVELVLQWNSINLETIHQHGSVTEASMSGNDEVSDSTIEGKMDNSSGKQSTDGDSEVIINLQSGLTSLQNLLTSNPGLAAVFASKERLIPLFECLALHVPSESTSPQICLSVLSLLTKHASCLEAMVAERMSLILLFQILHCNPPCRDGALAVLYSLASTPELAWAAAKHGGVVYILELMLPLQEEIPVQQRAVAASLLGKLVGQPMHGPRVAITLARFLPDGLVSAIKDGPGEAVVSSLELTTETPELVWTPAMAASLSAQLATMASDLYQEQMKGRVVDWDVPEQASGQHVMKDEPQVGGIYVRLFLKDPKFPLRNPKRFLEGLLDQYVSSVAATHHEAIATDPELPLLLSAALVSLLRVHPVLADHVGYLGYVPKLVAAMAYEGQRETMASGQASSGSQAEPGEHDNSSHSEATVQTPQERVRLSCLRVLHQLASSTTCAEAMASTSAGTPQVIPLLMKAIGWQGGSILALETLKRVVGAGNRARDALVAQGLKVGLVEVLLGILDWRAGGRQGLRNKMKWNESEASIGRVLAVEVLHAFATEGAHCARVREVLNSSDVWSAYKDQKHDLFLPSSAQSSAAGVAGLIESSSRFTYALAAPPSSSLSPPSAPANPSGRQYYQHS

SEQ ID NO: 195918 - protein, 2245 aa, Zea Mays
MRAVIVRPLSAVSALVRFVEEPQIFAFEFNDGCPIHVYASTSRDNLLATVLDVLETQRQCAIPVLPRLTMSGHRIDPPCGVAHLEMPYHGSVDMESASMHTKHLAAIAKEAVVSSDTVPGAKIRLWRRIREFNACVPYTGVPVNIEVPEVVVLALISLLPTIPHSLPADAPPLLPPSPKAAATIMGFVACLRRLLTSRSVASHVMSFPVAVGRIMGLLRNGSEGVAAEAAGLVAMLIGGGPGDSSILMDARGESHATYMHAKSVLFSQPMYVPILVNRLRPISVSPLLSLSVVEVLEAMLCEPHGETTQHATFVELLRQVAGLRRRLFALFAHPAESVRETISVIMRTIAEEDAIAAEFMRDAALKDGALLRHLLNAFFLPAGEQRDVSRQLVALWADSYQPALDLLSRILPPGLVAYLHTRSDEESQSQYDEAPLSRRQRRILQQRRVRGSKSMSVQEQGVPPNGVEDGEPFRHTSAGTYGVADVHQRHVGPYSSTHSPLPGISIDPSCAVTVPHGFVPEALSENNHQIGEPQLDSHVYSVDSNANGDLVSSSHSDFSVPAQVVVENTPVGSGRLLCNWYGFWRAFSLDHNRADLIWNERTRQELREALQAEVHNLDVEKARTNDIVPGSSVTEDAGGSDNLPRMSWNYAEFLVSYPSLSKEVCVGQYYLRLLLEIGSNYRAHNFPLRDPVAFFRALYHQFLCDADIGLTVDGAVPDELGSSDDWCDIGRLDGFGGGGGSSVRELCSRAMTIVYEQHYKVIGAFDGTPHITVLLDRTDDRVLRHRLLLLLKVLMNDLSNVEACVLVGGCVLAVDLLTVAHETSERTAIPLQSNLIAATAFMEPSKEWMYIDKDGTQVGPLEKDAIRRLWSKKSIDWTTKCWASGMSDWKGLRDIRELRWALSVRVPVLTPTQIGDAALSILHSMTSARSDLDDAGEIVTPTPRVKRILSSPRCLPHVAQVMLTGEPSIVEAAASLLMAIVTRNPKAMIRLYITGAFYFALAYPGSNLLSIAHLFSATHTHQAFHGGEEAALSSSLPLAKRSVLGGLLPESLLYVLERSGPSAFAGAMVSDSDTPEIIWTHKMRAENLICQVLQHLGEFPQKLAQHCHSLYDYAPMPPVTYPNLKDEMWCHRYYLRNLCDEIRFPNWPIVEHVEFLQSLLVMWREELTRRPMDLSEEEVCKILEISLDDLVLGENGSIKQSSDLSLANSGNKIENIDEEKLKRQYRKLAIKYHPDKNPEGREKFVAVQKAYERLQASMQGLQGPQVWRLLLLLKAQRILYKRYGDVLGPFKYAGYPMLLNAVTVDKDDSNFLSFDRTPLLIAASELIWLTCASSSLNGEELIRDGGIPLLATLLSRCMCVVQPTTPANEPAARIVTNIMHTFSVLSQFESGRVEILKFGGLADGIVHCTELEFVPSAVDAALLTAANVLVSSELQNALLRAGFLWYVLPLLLQYDSTAEENETCEAHGVGARVQIAKNLHAVHATQALSKLCGLSGDDILYPDNKPAYNALKALLTPKLADMLRNHPPKELLSNLNSNLESPEIIWNSSTRGELLKFVDQQRASQGPDGSYDLTESHSFTYEALSKELNVGNVYLRVYNNQPDFEISDQEEFCIALLKFIVELVLQWNSINLETIHQHGSVTEASMSGNDEVSDSTIEGKMDNSSGKQSTDGDSEVIINLQSGLTSLQNLLTSNPGLAAVFASKERLIPLFECLALHVPSESTSPQICLSVLSLLTKHASCLEAMVAERMSLILLFQILHCNPPCRDGALAVLYSLASTPELAWAAAKHGGVVYILELMLPLQEEIPVQQRAVAASLLGKLVGQPMHGPRVAITLARFLPDGLVSAIKDGPGEAVVSSLELTTETPELVWTPAMAASLSAQLATMASDLYQEQMKGRVVDWDVPEQASGQHVMKDEPQVGGIYVRLFLKDPKFPLRNPKRFLEGLLDQYVSSVAATHHEAIATDPELPLLLSAALVSLLRVHPVLADHVGYLGYVPKLVAAMAYEGQRETMASGQASSGSQAEPGEHDNSSHSEATVQTPQERVRLSCLRVLHQLASSTTCAEAMASTSAGTPQVIPLLMKAIGWQGGSILALETLKRVVGAGNRARDALVAQGLKVGLVEVLLGILDWRAGGRQGLRNKMKWNESEASIGRVLAVEVLHAFATEGAHCARVREVLNSSDVWSAYKDQKHDLFLPSSAQSSAAGVAGLIESSSRFTYALAAPPSSSLSPPSAPANPSGRQYYQHS

SEQ ID NO: 195919 - protein, 1321 aa, Zea Mays
MTSARSDLDDAGEIVTPTPRVKRILSSPRCLPHVAQVMLTGEPSIVEAAASLLMAIVTRNPKAMIRLYITGAFYFALAYPGSNLLSIAHLFSATHTHQAFHGGEEAALSSSLPLAKRSVLGGLLPESLLYVLERSGPSAFAGAMVSDSDTPEIIWTHKMRAENLICQVLQHLGEFPQKLAQHCHSLYDYAPMPPVTYPNLKDEMWCHRYYLRNLCDEIRFPNWPIVEHVEFLQSLLVMWREELTRRPMDLSEEEVCKILEISLDDLVLGENGSIKQSSDLSLANSGNKIENIDEEKLKRQYRKLAIKYHPDKNPEGREKFVAVQKAYERLQASMQGLQGPQVWRLLLLLKAQRILYKRYGDVLGPFKYAGYPMLLNAVTVDKDDSNFLSFDRTPLLIAASELIWLTCASSSLNGEELIRDGGIPLLATLLSRCMCVVQPTTPANEPAARIVTNIMHTFSVLSQFESGRVEILKFGGLADGIVHCTELEFVPSAVDAALLTAANVLVSSELQNALLRAGFLWYVLPLLLQYDSTAEENETCEAHGVGARVQIAKNLHAVHATQALSKLCGLSGDDILYPDNKPAYNALKALLTPKLADMLRNHPPKELLSNLNSNLESPEIIWNSSTRGELLKFVDQQRASQGPDGSYDLTESHSFTYEALSKELNVGNVYLRVYNNQPDFEISDQEEFCIALLKFIVELVLQWNSINLETIHQHGSVTEASMSGNDEVSDSTIEGKMDNSSGKQSTDGDSEVIINLQSGLTSLQNLLTSNPGLAAVFASKERLIPLFECLALHVPSESTSPQICLSVLSLLTKHASCLEAMVAERMSLILLFQILHCNPPCRDGALAVLYSLASTPELAWAAAKHGGVVYILELMLPLQEEIPVQQRAVAASLLGKLVGQPMHGPRVAITLARFLPDGLVSAIKDGPGEAVVSSLELTTETPELVWTPAMAASLSAQLATMASDLYQEQMKGRVVDWDVPEQASGQHVMKDEPQVGGIYVRLFLKDPKFPLRNPKRFLEGLLDQYVSSVAATHHEAIATDPELPLLLSAALVSLLRVHPVLADHVGYLGYVPKLVAAMAYEGQRETMASGQASSGSQAEPGEHDNSSHSEATVQTPQERVRLSCLRVLHQLASSTTCAEAMASTSAGTPQVIPLLMKAIGWQGGSILALETLKRVVGAGNRARDALVAQGLKVGLVEVLLGILDWRAGGRQGLRNKMKWNESEASIGRVLAVEVLHAFATEGAHCARVREVLNSSDVWSAYKDQKHDLFLPSSAQSSAAGVAGLIESSSRFTYALAAPPSSSLSPPSAPANPSGRQYYQHS

SEQ ID NO: 195920 - protein, 200 aa, Zea Mays
MMVYGGNNRAQAFFKQHGWTDGGKIEAKYTSRAADLYRQLLAKEVAKSATEDGNNSWPSSPVAASQASDQTAAFPDLKLTEVSKENVSEKEDSEIVRSPRVPTRSIKKPIGAKKPGNKTGGLGARKLTSKPNESLYEQKPEETAPVLPSSVIASTTARSKPHTSRFEYVENAPAPKTGSSSEGNLMSGHVAPPKVIELLC

SEQ ID NO: 195921 - protein, 61 aa, Zea Mays
MPVHEPYPSAVLDEQVHQMLHNSRAELDAPSAASSLQGVAICLLMRFQLQNWWCHFLMDNP

SEQ ID NO: 195922 - protein, 78 aa, Zea Mays
MSNNGWTHVETIDSLVRKAGYQRIITESLRKKIKVTRYQSTLYTMHYGEYVAYLKKNRGAAPSISGAPPVVNGFKPSH

SEQ ID NO: 195923 - protein, 206 aa, Zea Mays
MTFSQQGPRTVCILSANGAISNVTLRQPATSGGLVTYEGRFEIISLSGSFLLAEDGDTRSRTGGLSVALAGSDGRVLGGCVAGMLMAATPVQVVVASFIAEGKKSKPAEARKVEPMAAPPPPPPQMAAFVPAPVATSPPSEGTSSASSDDSGSPINHGAMPFSHSSQHQHPHQHQQHMPPAYASGGWSLSVHQQNRHDSDMKMMSN

SEQ ID NO: 195924 - protein, 87 aa, Zea Mays
MYLWSQVHLAKLPKNLLEKASFAKNTEHVLHQLPQVISSLDAYMDRSLQSASQIKTVTQLLSNMENTQLRYMLPSSQKKKDQKSTEP

SEQ ID NO: 195925 - protein, 477 aa, Zea Mays
MESSSDRSNVSQGNHLGYARSTSMDSTGPQLAGRSSSMLSRRSSRQGSRGSISLSREMGDSILSSMRHSLQSADQLLGDIDSSVLAQLIESGRVLSPEGDVDEDTVRISEHHKVGPVPDDAIKQTSDNFASAPISSAETKDTISNVLADSSTKVEPYKLSLRLDYAAYMIHLAVFGFFGVFTRYGLQKLFGPDCLALTSDQSPLYPDLPSNMADIRYISDHLIVGITTGYMGSLTTFSGWNQKMVGLSSKGHWVYAIAGVVLGMFIVNESITVGAETGERLRSLILKYIREKSLIGHKYDWEHWRVNTRAKQSVLLSVMIILMSFFWILSIVLTVVKMHSLADGAVLWMGCSVAPPGVWLRWYLARLNGQGIGKQRSLKWLPTGTLVANVLAAGIMAVLAVTSKAVDTKRSTTILSGIQLGFLGCLSTVSTFAAEVYTMRRSGQIARAFVYAASTFLLSFLLGTLVYSVPVWEKHYK

SEQ ID NO: 195926 - protein, 280 aa, Zea Mays
MLGSFLMGWFGIIFKADIRYISDHLIVGITTGYMGSLTTFSGWNQKMVGLSSKGHWVYAIAGVVLGMFIVNESITVGAETGERLRSLILKYIREKSLIGHKYDWEHWRVNTRAKQSVLLSVMIILMSFFWILSIVLTVVKMHSLADGAVLWMGCSVAPPGVWLRWYLARLNGQGIGKQRSLKWLPTGTLVANVLAAGIMAVLAVTSKAVDTKRSTTILSGIQLGFLGCLSTVSTFAAEVYTMRRSGQIARAFVYAASTFLLSFLLGTLVYSVPVWEKHYK

SEQ ID NO: 195927 - protein, 278 aa, Zea Mays
MESSSDRSNVSQGNHLGYARSTSMDSTGPQLAGRSSSMLSRRSSRQGSRGSISLSREMGDSILSSMRHSLQSADQLLGDIDSSVLAQLIESGRVLSPEGDVDEDTVRISEHHKVGPVPDDAIKQTSDNFASAPISSAETKDTISNVLADSSTKVEPYKLSLRLDYAAYMIHLAVFGFFGVFTRYGLQKLFGPDCLALTSDQSPLYPDLPSNMLGSFLMGWFGIIFKADIRYISDHLIVGITTGYMGSLTTFSGWNQKMVGLSSKGHWVYAIAGVVLGI

SEQ ID NO: 195928 - protein, 74 aa, Zea Mays
MFLKQIHCANLQAATIMALSATEICLLQTLKINMLYFGTALVYFALHWVLLLCQVLQFCIVCHICIFTEVQCSS

SEQ ID NO: 195929 - protein, 325 aa, Zea Mays
MAVQAHYHHHHHHHHRESPFLVSRLAAAMELHQAQKEATTAQQHAPPDFSHGGCGGGKKRQREADPVSRQLLSLQQQQPQAQGPKFINLAQLHKRPATGLRLDLDEGSEHVPCTSSASASCLLLSEELAAQRDQHKDEMERLIQEHAERLRRALADTRRRHYRSLVGAAEAAAARRIREKESEAWEAARRRADLEDRVARLRAEAAAWQAKELADQSTAAALHAQLQQARGKATDAEEGGNAADDAGSCFVDPDRVVEIAPPPARPCRACRRRSASVVLLPCRHLCVCAECEPAVPAAPFAAAAVAAACPVCRGAVTGTVQVFVS

SEQ ID NO: 195930 - protein, 4076 aa, Zea Mays
MLEDQVAFLLQKYLGNYVRGLSKEALKISVWRGDVELTNMQLKPEALNSLKLPVRVKAGFLGSVKLKVPWSRLGQEPVLVYLDRIFILAEPATQVEGCSEDAVQEAKRSRVREMEIKLLERQQQLKSELSSSWLGSFIGTVIGNIKLSIGNIHIRYEDVESNPGHPFAAGLVLSKLSAVTVDDLGKETFATGGDLDRVKKSVELESLAVYFDSDSSSWIVDKPWEDLLPSEWSQVFEFQEQDGSRSASKKHAYILQPVSGKAKYTKIQLTEAKKTGQALQNTAVDLDDVTLSLSKDGYRDMLKLADNFSTFNQRLRYAHLRPSSPLKSDPRAWWKYAYKVVTQEMKKASGRLSWEQLLRNARLRKTYVSLYASLLKSDMSRLVVDDHEEIKRLDRELDMEVILQWRMLAHKFVEQSVETYQYAQQNKKSWWSFGWTGSSKDEEDSKSFTDEDWERLNRIIGYKETNEYVTDQQDMKLMQFDFEIRMKHNASKLTIDDSECLADLSCQDFCCNLKMYPEAKIFDLKLGSYRLLSPYGLLAESASVIDSFVGLFSYKPFDEQLDWSLTAKASPCYITYLKDSVDQIVGFFKSSPTISQNLALETAAAVQMTLDEVKRTAQQQMTRVLKDQSRFSLNMDIAAPKITVPTKFRPDDVHETKLLLDLGNLVLRTEEIWDAYTSEEQDIYLNFNLVLSDVSAFLVDGDYHWNETSDEKNLLPVIDKCGIALKLQQGVGNREAVWQHRYLRLVGPFLYVFENLMSTTYKQWFSLRGKQVHQILEDTGALILLFDNDEGRKIWQNRLQGAIYRASGSAISSFPGVALPSEAHSFKGNFLDVADTEKLFVAGILDELKICFSCGYEVELSMKGGNLLIGTILGSLEIEDQYYYPGSPVPRFLARSFINSMQTQELPSLSRKNSAGPRNTPLMKNDSEENFFEASDDFDEFETPMHQKRTISDYFSTQKFLPTSVPSLQPPTFKRIPDLIPDTELQTGKFTLEGSGTFNSFVKAQIVIYDQHSPQYNSLDNRVVVTVATLSFFCHRPTVIAIMEFMNAINLANGSDTDKDKSTYPATVEDSAIEESKSDLESEPSIKPLLAKGKSRIVFHLTSSMAEAQILLMNENGDRLATLSQNNLSTDIKVFTSSFSIKAALGNLKISDDSLLSSHPYFWVCDMRNPGGRSFVEIDFSSYNVGDEDYCGYDYSLVGQLSEVRIVYLNRFVQEIISYFMGLVPKSSDAVVKLKDNKTNSEKWVSKTDMEGSPALKLDVSFSRPIIVMPRETNSNDFLELDVLYITVQNEFQWIGGDKNEMSTVHLDILTVTVRDINLVIGMNMVRGETIIQDVEGLSFELRRSLRDLRHQLPVVEAAIKVDVLKATLSNREYEIISECALSNFSETPHPVPTLDDPRYGTSTTPSHVSASSSESIHVLSEGAETWIANKFSVSINLVELSLHSGSTRDSPLASVQASGAWLFYKSNTRGENFMYATLKGFSVFDDREGTKDELRLAIGKSASVRDTSSVDGYDNPNELDSGERRIQKDLGLEPIPSMLILDAIFRKSSSSVSVCVQRPKFLVALDFLLAVIEFFVPSAQSLLSNDEDKDLLHMITPVVLNDQIYFQEHSTFSLSPQKPLIVDNERFDHFVYDGKGGKLYLLDSEGKILSSPCTESFIHVLGCKRLQFRNVTIVNGEYLDSCISLGDDSCYSASRNDHVYLVREDDGSLSTPSKEIRGDSVKNGSADISTEFIMELQAIGPELTFYSTSRNAGENLALSTKVIHAHTDAFCRLIMKGDSMEMNGNILGLKMESNGIRVIEPFDMVVKYSNASGKTNLHLLVSEIYMNFSFSILRLFLAVEEEISAFLRMSSKKISLVCYQFDKVATMQGNANDQVLSFWRPRAPSGYAIFGDYLTPMNEPPTKGVLALNTNIVRVKRPLSYKLVWQSGSPRTNIFHQKDLEDKISNIDQLCSVWLPVAPAGYVAMGCVASSGTAEPPLSSAFCLTASLVSSCNLRDCIALRDNTNMIFWRVDNAFGSFLPGDPASMSVDGNAYDLRHMLFDSADSSSKTVSRRQDSRNDFSQLERSELTSGRLFDAVASFKLIWSNSGTSSPKKLSIWRPMLSEGMFYFGDIAVNGYEPPNSTVVLRDTGEDTFLRAPEGFDLVGRIKKHRGTEGVSFWFPKAPSGFVALGCVASKSSPTKEDFSLLRCIRNDMVAGGQFSEESLWDSSNARTSEPFSLWTVDNDAGTFLVRSGYRKPPKRLALKLAGPPTSSSSDSIIVDAKIKTFSAVSFDDYGGMMVPLFGVSFDSVGLSYHGGPHHLNATVSLSFVARSYNDKYSSWEPFIEPTDAFLRYQFDMNTPGSPRQLRITSTQDLNLNISVSNTNMLSQAYASWNNISCGDELYKKETFSSTERPVLDVHQRRSYYVVPQNKLGQDIYVRTTENRGSLVTLLPSGDDRSIKVPALRDLSDSHLNGRSVKPYRLMITAILADAEVKDDEGLETGEYMTAVRLFSENHSISVQQQSARTCAAIGEHLSQNTRKVNWNEMFFFKVERVDSYTLELLVLDAGKGQPVGIYSAPLEQVVQKLPPTSNPDSVKFDLALGDLMSTKTVEQETVKPSGKIRFAVLVSGRASVQQGNRASPESKTGYIQISPSKEGPWTSMKLNYAVPAACWRFGNCVIASEATVKEGNRYVSIRSLVSVTNTTNFIVDLRLKGRISQSARADEQGDSFGKEDQILIGTLEPNSTIPVPLSGLSHPLMPYMLQLRPAKHHDHENYSWSDVQERRSQTEFRKEEILDLCISDLYESENLLFCSQVDGTSNSCHGLWFCLSIEGKEIGKDVQMEPIYDWCIIIKSPLCLTYYLPIAAHYTVSSSHLDNEDSSCSLGTLSPGEAVKVHNVDPRNPLYLSLVPHGGWELMHEPVVISHPTQAPSKFINLRSSLSGRVVQILLEQSSDSDYLMARLIRIYVPYWISFSRLPTLTLRLIDISGRKEKRRLLSRSHLERGEKQLYDIKHDELVEGYTIASGLNFKGLGLLSSVGHGGRFGSVKELSPLGDMDGAVDLSAYDDDGKCMHILLCSKPSSYQAVPTKVIHVRPYITFTNRAGQDLYLKLSIEDEPKVLHAYDWRVSFMYSKGTTDKLQVRLVDTEWCQPLEIVKEDTIVIAMRKQGGTQKFVKAEIRGYEEGSRFLIVFRLGPAYGPIRIENRTSHTTISTCQSGLGEESWIQVKPHATRKYSWDDPYGQKVIDVSIDKGDDTCVLCVDLENPIGSSTSFREHGLMFTVDTSDIKILKFADYIRKEEVYGLPGSELTDHQGSSLKENETEPGAGPLELIVELGVVGISLIDHKPRELLYLHLQKVFVSYLTGYDFGTTSRFKLILGELQLDNQLPLSTMPVVLSTESRPDSNRSVFKANVAVSNVTSNGIQVYPHVYIRVTDQTWRLNIHEPIIWALFDFYSNLRFVTTINSTTVTEVDPEIRIELIDISEIRLKISLETAPSQRPRGVLGIWSPILSAVGNALKIQVHLRKVMHRSRFMRKSSIIPAITNRIKRDLIHNPLHLIFSVDFLGVTKSTLSSLSKGFAELSTDGQFLQLRSKQVWSRRITGVGDGLVQGTEAFAQGLAFGVSGVLRKPVESARQYGVIGIAPGIGRAFVGFIVQPLSGALDFFSLTVDGISASFMRCVNILSNKSVPQRIRDPRAIHRDGIVRDYDKFEAAGQMALYLAEASRYFACTDLFREPSKYAWSDYYEDHFILPSQRIALVTNKRVMLLQCLDLDKMDKKPSKILWDVPWEEVLSLELAKAGYQRPSHVIIHLKNFRRSENFVRLIKCNIDNEREPQALSLCCSIRKMWRSHQAAMKVIPLKVPSGQRHVYFVSDDDKKESHSLSRPLLSSGGTSTDVEQQFINNTVHFQKMWSSEPEIQSRCKLVAKQIADDGRVFSIWRPLCPNGYVSIGDIAHVGIHPPHFAAVYKNINGNFALPLGYDLVWRNCAEDYKSPVSIWLPRPPGGYVALGCVAVPSFKEPTLDCAFCVDERLAEDAAYEEQIIWASSDAYPWGCYIYQVQSASMQFMALRVPKEQSELRPKKILESFLQQASETQTSRA

SEQ ID NO: 195931 - protein, 4146 aa, Zea Mays
MLEDQVAFLLQKYLGNYVRGLSKEALKISVWRGDVELTNMQLKPEALNSLKLPVRVKAGFLGSVKLKVPWSRLGQEPVLVYLDRIFILAEPATQVEGCSEDAVQEAKRSRVREMEIKLLERQQQLKSELSSSWLGSFIGTVIGNIKLSIGNIHIRYEDVESNPGHPFAAGLVLSKLSAVTVDDLGKETFATGGDLDRVKKSVELESLAVYFDSDSSSWIVDKPWEDLLPSEWSQVFEFQEQDGSRSASKKHAYILQPVSGKAKYTKIQLTEAKKTGQALQNTAVDLDDVTLSLSKDGYRDMLKLADNFSTFNQRLRYAHLRPSSPLKSDPRAWWKYAYKVVTQEMKKASGRLSWEQLLRNARLRKTYVSLYASLLKSDMSRLVVDDHEEIKRLDRELDMEVILQWRMLAHKFVEQSVETYQYAQQNKKSWWSFGWTGSSKDEEDSKSFTDEDWERLNRIIGYKETNEYVTDQQDMKLMQFDFEIRMKHNASKLTIDDSECLADLSCQDFCCNLKMYPEAKIFDLKLGSYRLLSPYGLLAESASVIDSFVGLFSYKPFDEQLDWSLTAKASPCYITYLKDSVDQIVGFFKSSPTISQNLALETAAAVQMTLDEVKRTAQQQMTRVLKDQSRFSLNMDIAAPKITVPTKFRPDDVHETKLLLDLGNLVLRTEEIWDAYTSEEQDIYLNFNLVLSDVSAFLVDGDYHWNETSDEKNLLPVIDKCGIALKLQQIQLESPLYPSTRMAIRVPSLGFHFSPARYHRLMEILKFFQDGASDNSNSDHEHLWDHADFEGWSSLLTWKGVGNREAVWQHRYLRLVGPFLYVFENLMSTTYKQWFSLRGKQVHQILEDTGALILLFDNDEGRKIWQNRLQGAIYRASGSAISSFPGVALPSEAHSFKGNFLDVADTEKLFVAGILDELKICFSCGYEVELSMKGGNLLIGTILGSLEIEDQYYYPGSPVPRFLARSFINSMQTQELPSLSRKNSAGPRNTPLMKNDSEENFFEASDDFDEFETPMHQKRTISDYFSTQKFLPTSVPSLQPPTFKRIPDLIPDTELQTGKFTLEGSGTFNSFVKAQIVIYDQHSPQYNSLDNRVVVTVATLSFFCHRPTVIAIMEFMNAINLANGSDTDKDKSTYPATVEDSAIEESKSDLESEPSIKPLLAKGKSRIVFHLTSSMAEAQILLMNENGDRLATLSQNNLSTDIKVFTSSFSIKAALGNLKISDDSLLSSHPYFWVCDMRNPGGRSFVEIDFSSYNVGDEDYCGYDYSLVGQLSEVRIVYLNRFVQEIISYFMGLVPKSSDAVVKLKDNKTNSEKWVSKTDMEGSPALKLDVSFSRPIIVMPRETNSNDFLELDVLYITVQNEFQWIGGDKNEMSTVHLDILTVTVRDINLVIGMNMVRGETIIQDVEGLSFELRRSLRDLRHQLPVVEAAIKVDVLKATLSNREYEIISECALSNFSETPHPVPTLDDPRYGTSTTPSHVSASSSESIHVLSEGAETWIANKFSVSINLVELSLHSGSTRDSPLASVQASGAWLFYKSNTRGENFMYATLKGFSVFDDREGTKDELRLAIGKSASVRDTSSVDGYDNPNELDSGERRIQKDLGLEPIPSMLILDAIFRKSSSSVSVCVQRPKFLVALDFLLAVIEFFVPSAQSLLSNDEDKDLLHMITPVVLNDQIYFQEHSTFSLSPQKPLIVDNERFDHFVYDGKGGKLYLLDSEGKILSSPCTESFIHVLGCKRLQFRNVTIVNGEYLDSCISLGDDSCYSASRNDHVYLVREDDGSLSTPSKEIRGDSVKNGSADISTEFIMELQAIGPELTFYSTSRNAGENLALSTKVIHAHTDAFCRLIMKGDSMEMNGNILGLKMESNGIRVIEPFDMVVKYSNASGKTNLHLLVSEIYMNFSFSILRLFLAVEEEISAFLRMSSKKISLVCYQFDKVATMQGNANDQVLSFWRPRAPSGYAIFGDYLTPMNEPPTKGVLALNTNIVRVKRPLSYKLVWQSGSPRTNIFHQKDLEDKISNIDQLCSVWLPVAPAGYVAMGCVASSGTAEPPLSSAFCLTASLVSSCNLRDCIALRDNTNMIFWRVDNAFGSFLPGDPASMSVDGNAYDLRHMLFDSADSSSKTVSRRQDSRNDFSQLERSELTSGRLFDAVASFKLIWSNSGTSSPKKLSIWRPMLSEGMFYFGDIAVNGYEPPNSTVVLRDTGEDTFLRAPEGFDLVGRIKKHRGTEGVSFWFPKAPSGFVALGCVASKSSPTKEDFSLLRCIRNDMVAGGQFSEESLWDSSNARTSEPFSLWTVDNDAGTFLVRSGYRKPPKRLALKLAGPPTSSSSDSIIVDAKIKTFSAVSFDDYGGMMVPLFGVSFDSVGLSYHGGPHHLNATVSLSFVARSYNDKYSSWEPFIEPTDAFLRYQFDMNTPGSPRQLRITSTQDLNLNISVSNTNMLSQAYASWNNISCGDELYKKETFSSTERPVLDVHQRRSYYVVPQNKLGQDIYVRTTENRGSLVTLLPSGDDRSIKVPALRDLSDSHLNGRSVKPYRLMITAILADAEVKDDEGLETGEYMTAVRLFSENHSISVQQQSARTCAAIGEHLSQNTRKVNWNEMFFFKVERVDSYTLELLVLDAGKGQPVGIYSAPLEQVVQKLPPTSNPDSVKFDLALGDLMSTKTVEQETVKPSGKIRFAVLVSGRASVQQGNRASPESKTGYIQISPSKEGPWTSMKLNYAVPAACWRFGNCVIASEATVKEGNRYVSIRSLVSVTNTTNFIVDLRLKGRISQSARADEQGDSFGKEDQILIGTLEPNSTIPVPLSGLSHPLMPYMLQLRPAKHHDHENYSWSDVQERRSQTEFRKEEILDLCISDLYESENLLFCSQVDGTSNSCHGLWFCLSIEGKEIGKDVQMEPIYDWCIIIKSPLCLTYYLPIAAHYTVSSSHLDNEDSSCSLGTLSPGEAVKVHNVDPRNPLYLSLVPHGGWELMHEPVVISHPTQAPSKFINLRSSLSGRVVQILLEQSSDSDYLMARLIRIYVPYWISFSRLPTLTLRLIDISGRKEKRRLLSRSHLERGEKQLYDIKHDELVEGYTIASGLNFKGLGLLSSVGHGGRFGSVKELSPLGDMDGAVDLSAYDDDGKCMHILLCSKPSSYQAVPTKVIHVRPYITFTNRAGQDLYLKLSIEDEPKVLHAYDWRVSFMYSKGTTDKLQVRLVDTEWCQPLEIVKEDTIVIAMRKQGGTQKFVKAEIRGYEEGSRFLIVFRLGPAYGPIRIENRTSHTTISTCQSGLGEESWIQVKPHATRKYSWDDPYGQKVIDVSIDKGDDTCVLCVDLENPIGSSTSFREHGLMFTVDTSDIKILKFADYIRKEEVYGLPGSELTDHQGSSLKENETEPGAGPLELIVELGVVGISLIDHKPRELLYLHLQKVFVSYLTGYDFGTTSRFKLILGELQLDNQLPLSTMPVVLSTESRPDSNRSVFKANVAVSNVTSNGIQVYPHVYIRVTDQTWRLNIHEPIIWALFDFYSNLRFVTTINSTTVTEVDPEIRIELIDISEIRLKISLETAPSQRPRGVLGIWSPILSAVGNALKIQVHLRKVMHRSRFMRKSSIIPAITNRIKRDLIHNPLHLIFSVDFLGVTKSTLSSLSKGFAELSTDGQFLQLRSKQVWSRRITGVGDGLVQGTEAFAQGLAFGVSGVLRKPVESARQYGVIGIAPGIGRAFVGFIVQPLSGALDFFSLTVDGISASFMRCVNILSNKSVPQRIRDPRAIHRDGIVRDYDKFEAAGQMALYLAEASRYFACTDLFREPSKYAWSDYYEDHFILPSQRIALVTNKRVMLLQCLDLDKMDKKPSKILWDVPWEEVLSLELAKAGYQRPSHVIIHLKNFRRSENFVRLIKCNIDNEREPQALSLCCSIRKMWRSHQAAMKVIPLKVPSGQRHVYFVSDDDKKESHSLSRPLLSSGGTSTDVEQQFINNTVHFQKMWSSEPEIQSRCKLVAKQIADDGRVFSIWRPLCPNGYVSIGDIAHVGIHPPHFAAVYKNINGNFALPLGYDLVWRNCAEDYKSPVSIWLPRPPGGYVALGCVAVPSFKEPTLDCAFCVDERLAEDAAYEEQIIWASSDAYPWGCYIYQVQSASMQFMALRVPKEQSELRPKKILESFLQQASETQTSRA

SEQ ID NO: 195932 - protein, 3243 aa, Zea Mays
MKGGNLLIGTILGSLEIEDQYYYPGSPVPRFLARSFINSMQTQELPSLSRKNSAGPRNTPLMKNDSEENFFEASDDFDEFETPMHQKRTISDYFSTQKFLPTSVPSLQPPTFKRIPDLIPDTELQTGKFTLEGSGTFNSFVKAQIVIYDQHSPQYNSLDNRVVVTVATLSFFCHRPTVIAIMEFMNAINLANGSDTDKDKSTYPATVEDSAIEESKSDLESEPSIKPLLAKGKSRIVFHLTSSMAEAQILLMNENGDRLATLSQNNLSTDIKVFTSSFSIKAALGNLKISDDSLLSSHPYFWVCDMRNPGGRSFVEIDFSSYNVGDEDYCGYDYSLVGQLSEVRIVYLNRFVQEIISYFMGLVPKSSDAVVKLKDNKTNSEKWVSKTDMEGSPALKLDVSFSRPIIVMPRETNSNDFLELDVLYITVQNEFQWIGGDKNEMSTVHLDILTVTVRDINLVIGMNMVRGETIIQDVEGLSFELRRSLRDLRHQLPVVEAAIKVDVLKATLSNREYEIISECALSNFSETPHPVPTLDDPRYGTSTTPSHVSASSSESIHVLSEGAETWIANKFSVSINLVELSLHSGSTRDSPLASVQASGAWLFYKSNTRGENFMYATLKGFSVFDDREGTKDELRLAIGKSASVRDTSSVDGYDNPNELDSGERRIQKDLGLEPIPSMLILDAIFRKSSSSVSVCVQRPKFLVALDFLLAVIEFFVPSAQSLLSNDEDKDLLHMITPVVLNDQIYFQEHSTFSLSPQKPLIVDNERFDHFVYDGKGGKLYLLDSEGKILSSPCTESFIHVLGCKRLQFRNVTIVNGEYLDSCISLGDDSCYSASRNDHVYLVREDDGSLSTPSKEIRGDSVKNGSADISTEFIMELQAIGPELTFYSTSRNAGENLALSTKVIHAHTDAFCRLIMKGDSMEMNGNILGLKMESNGIRVIEPFDMVVKYSNASGKTNLHLLVSEIYMNFSFSILRLFLAVEEEISAFLRMSSKKISLVCYQFDKVATMQGNANDQVLSFWRPRAPSGYAIFGDYLTPMNEPPTKGVLALNTNIVRVKRPLSYKLVWQSGSPRTNIFHQKDLEDKISNIDQLCSVWLPVAPAGYVAMGCVASSGTAEPPLSSAFCLTASLVSSCNLRDCIALRDNTNMIFWRVDNAFGSFLPGDPASMSVDGNAYDLRHMLFDSADSSSKTVSRRQDSRNDFSQLERSELTSGRLFDAVASFKLIWSNSGTSSPKKLSIWRPMLSEGMFYFGDIAVNGYEPPNSTVVLRDTGEDTFLRAPEGFDLVGRIKKHRGTEGVSFWFPKAPSGFVALGCVASKSSPTKEDFSLLRCIRNDMVAGGQFSEESLWDSSNARTSEPFSLWTVDNDAGTFLVRSGYRKPPKRLALKLAGPPTSSSSDSIIVDAKIKTFSAVSFDDYGGMMVPLFGVSFDSVGLSYHGGPHHLNATVSLSFVARSYNDKYSSWEPFIEPTDAFLRYQFDMNTPGSPRQLRITSTQDLNLNISVSNTNMLSQAYASWNNISCGDELYKKETFSSTERPVLDVHQRRSYYVVPQNKLGQDIYVRTTENRGSLVTLLPSGDDRSIKVPALRDLSDSHLNGRSVKPYRLMITAILADAELKLLGSLNSLSFWVELASVSTLTWFPSQVKDDEGLETGEYMTAVRLFSENHSISVQQQSARTCAAIGEHLSQNTRKVNWNEMFFFKVERVDSYTLELLVLDAGKGQPVGIYSAPLEQVVQKLPPTSNPDSVKFDLALGDLMSTKTVEQETVKPSGKIRFAVLVSGRASVQQGNRASPESKTGYIQISPSKEGPWTSMKLNYAVPAACWRFGNCVIASEATVKEGNRYVSIRSLVSVTNTTNFIVDLRLKGRISQSARADEQGDSFGKEDQILIGTLEPNSTIPVPLSGLSHPLMPYMLQLRPAKHHDHENYSWSDVQERRSQTEFRKEEILDLCISDLYESENLLFCSQVDGTSNSCHGLWFCLSIEGKEIGKDVQMEPIYDWCIIIKSPLCLTYYLPIAAHYTVSSSHLDNEDSSCSLGTLSPGEAVKVHNVDPRNPLYLSLVPHGGWELMHEPVVISHPTQAPSKFINLRSSLSGRVVQILLEQSSDSDYLMARLIRIYVPYWISFSRLPTLTLRLIDISGRKEKRRLLSRSHLERGEKQLYDIKHDELVEGYTIASGLNFKGLGLLSSVGHGGRFGSVKELSPLGDMDGAVDLSAYDDDGKCMHILLCSKPSSYQAVPTKVIHVRPYITFTNRAGQDLYLKLSIEDEPKVLHAYDWRVSFMYSKGTTDKLQVRLVDTEWCQPLEIVKEDTIVIAMRKQGGTQKFVKAEIRGYEEGSRFLIVFRLGPAYGPIRIENRTSHTTISTCQSGLGEESWIQVKPHATRKYSWDDPYGQKVIDVSIDKGDDTCVLCVDLENPIGSSTSFREHGLMFTVDTSDIKILKFADYIRKEEVYGLPGSELTDHQGSSLKENETEPGAGPLELIVELGVVGISLIDHKPRELLYLHLQKVFVSYLTGYDFGTTSRFKLILGELQLDNQLPLSTMPVVLSTESRPDSNRSVFKANVAVSNVTSNGIQVYPHVYIRVTDQTWRLNIHEPIIWALFDFYSNLRFVTTINSTTVTEVDPEIRIELIDISEIRLKISLETAPSQRPRGVLGIWSPILSAVGNALKIQVHLRKVMHRSRFMRKSSIIPAITNRIKRDLIHNPLHLIFSVDFLGVTKSTLSSLSKGFAELSTDGQFLQLRSKQVWSRRITGVGDGLVQGTEAFAQGLAFGVSGVLRKPVESARQYGVIGIAPGIGRAFVGFIVQPLSGALDFFSLTVDGISASFMRCVNILSNKSVPQRIRDPRAIHRDGIVRDYDKFEAAGQMALYLAEASRYFACTDLFREPSKYAWSDYYEDHFILPSQRIALVTNKRVMLLQCLDLDKMDKKPSKILWDVPWEEVLSLELAKAGYQRPSHVIIHLKNFRRSENFVRLIKCNIDNEREPQALSLCCSIRKMWRSHQAAMKVIPLKVPSGQRHVYFVSDDDKKESHSLSRPLLSSGGTSTDVEQQFINNTVHFQKMWSSEPEIQSRCKLVAKQIADDGRVFSIWRPLCPNGYVSIGDIAHVGIHPPHFAAVYKNINGNFALPLGYDLVWRNCAEDYKSPVSIWLPRPPGGYVALGCVAVPSFKEPTLDCAFCVDERLAEDAAYEEQIIWASSDAYPWGCYIYQVQSASMQFMALRVPKEQSELRPKKILESFLQQASETQTSRA

SEQ ID NO: 195933 - protein, 2234 aa, Zea Mays
MVDSWPIKPYCFYVVKYAATNLSLCRTGSSKDEEDSKSFTDEDWERLNRIIGYKETNEYVTDQQDMKLMQFDFEIRMKHNASKLTIDDSECLADLSCQDFCCNLKMYPEAKIFDLKLGSYRLLSPYGLLAESASVIDSFVGLFSYKPFDEQLDWSLTAKASPCYITYLKDSVDQIVGFFKSSPTISQNLALETAAAVQMTLDEVKRTAQQQMTRVLKDQSRFSLNMDIAAPKITVPTKFRPDDVHETKLLLDLGNLVLRTEEIWDAYTSEEQDIYLNFNLVLSDVSAFLVDGDYHWNETSDEKNLLPVIDKCGIALKLQQIQLESPLYPSTRMAIRVPSLGFHFSPARYHRLMEILKFFQDGASDNSNSDHEHLWDHADFEGWSSLLTWKGVGNREAVWQHRYLRLVGPFLYVFENLMSTTYKQWFSLRGKQVHQILEDTGALILLFDNDEGRKIWQNRLQGAIYRASGSAISSFPGVALPSEAHSFKGNFLDVADTEKLFVAGILDELKICFSCGYESNHKLKKILLAKESSLFEFRAVGGQVELSMKGGNLLIGTILGSLEIEDQYYYPGSPVPRFLARSFINSMQTQELPSLSRKNSAGPRNTPLMKNDSEENFFEASDDFDEFETPMHQKRTISDYFSTQKFLPTSVPSLQPPTFKRIPDLIPDTELQTGKFTLEGSGTFNSFVKAQIVIYDQHSPQYNSLDNRVVVTVATLSFFCHRPTVIAIMEFMNAINLANGSDTDKDKSTYPATVEDSAIEESKSDLESEPSIKPLLAKGKSRIVFHLTSSMAEAQILLMNENGDRLATLSQNNLSTDIKVFTSSFSIKAALGNLKISDDSLLSSHPYFWVCDMRNPGGRSFVEIDFSSYNVGDEDYCGYDYSLVGQLSEVRIVYLNRFVQEIISYFMGLVPKSSDAVVKLKDNKTNSEKWVSKTDMEGSPALKLDVSFSRPIIVMPRETNSNDFLELDVLYITVQNEFQWIGGDKNEMSTVHLDILTVTVRDINLVIGMNMVRGETIIQDVEGLSFELRRSLRDLRHQLPVVEAAIKVDVLKATLSNREYEIISECALSNFSETPHPVPTLDDPRYGTSTTPSHVSASSSESIHVLSEGAETWIANKFSVSINLVELSLHSGSTRDSPLASVQASGAWLFYKSNTRGENFMYATLKGFSVFDDREGTKDELRLAIGKSASVRDTSSVDGYDNPNELDSGERRIQKDLGLEPIPSMLILDAIFRKSSSSVSVCVQRPKFLVALDFLLAVIEFFVPSAQSLLSNDEDKDLLHMITPVVLNDQIYFQEHSTFSLSPQKPLIVDNERFDHFVYDGKGGKLYLLDSEGKILSSPCTESFIHVLGCKRLQFRNVTIVNGEYLDSCISLGDDSCYSASRNDHVYLVREDDGSLSTPSKEIRGDSVKNGSADISTEFIMELQAIGPELTFYSTSRNAGENLALSTKVIHAHTDAFCRLIMKGDSMEMNGNILGLKMESNGIRVIEPFDMVVKYSNASGKTNLHLLVSEIYMNFSFSILRLFLAVEEEISAFLRMSSKKISLVCYQFDKVATMQGNANDQVLSFWRPRAPSGYAIFGDYLTPMNEPPTKGVLALNTNIVRVKRPLSYKLVWQSGSPRTNIFHQKDLEDKISNIDQLCSVWLPVAPAGYVAMGCVASSGTAEPPLSSAFCLTASLVSSCNLRDCIALRDNTNMIFWRVDNAFGSFLPGDPASMSVDGNAYDLRHMLFDSADSSSKTVSRRQDSRNDFSQLERSELTSGRLFDAVASFKLIWSNSGTSSPKKLSIWRPMLSEGMFYFGDIAVNGYEPPNSTVVLRDTGEDTFLRAPEGFDLVGRIKKHRGTEGVSFWFPKAPSGFVALGCVASKSSPTKEDFSLLRCIRNDMVAGGQFSEESLWDSSNARTSEPFSLWTVDNDAGTFLVRSGYRKPPKRLALKLAGPPTSSSSDSIIVDAKIKTFSAVSFDDYGGMYSMQMVPLFGVSFDSVGLSYHGGPHHLNATVSLSFVARSYNDKYSSWEPFIEPTDAFLRYQFDMNTPGSPRQLRITSTQDLNLNISVSNTNMLSQAYASWNNISCGDELYKKETFSSTERPVLDVHQRRSYYVVPQNKLGQDIYVRTTENRGSLVTLLPSGDDRSIKVPALRDLSDSHLNGRSVKPYRLMITAILADAEVKDDEGLETGEYMTAVRLFSENHSISVQQQSARTCAAIGEHLSQNTRKVNWNEMFFFKVERVLYSRASCA

SEQ ID NO: 195934 - protein, 1251 aa, Zea Mays
MSTVHLDILTVTVRDINLVIGMNMVRGETIIQDVEGLSFELRRSLRDLRHQLPVVEAAIKVDVLKATLSNREYEIISECALSNFSETPHPVPTLDDPRYGTSTTPSHVSASSSESIHVLSEGAETWIANKFSVSINLVELSLHSGSTRDSPLASVQASGAWLFYKSNTRGENFMYATLKGFSVFDDREGTKDELRLAIGKSASVRDTSSVDGYDNPNELDSGERRIQKDLGLEPIPSMLILDAIFRKSSSSVSVCVQRPKFLVALDFLLAVIEFFVPSAQSLLSNDEDKDLLHMITPVVLNDQIYFQEHSTFSLSPQKPLIVDNERFDHFVYDGKGGKLYLLDSEGKILSSPCTESFIHVLGCKRLQFRNVTIVNGEYLDSCISLGDDSCYSASRNDHVYLVREDDGSLSTPSKEIRGDSVKNGSADISTEFIMELQAIGPELTFYSTSRNAGENLALSTKVIHAHTDAFCRLIMKGDSMEMNGNILGLKMESNGIRVIEPFDMVVKYSNASGKTNLHLLVSEIYMNFSFSILRLFLAVEEEISAFLRMSSKKISLVCYQFDKVATMQGNANDQVLSFWRPRAPSGYAIFGDYLTPMNEPPTKGVLALNTNIVRVKRPLSYKLVWQSGSPRTNIFHQKDLEDKISNIDQLCSVWLPVAPAGYVAMGCVASSGTAEPPLSSAFCLTASLVSSCNLRDCIALRDNTNMIFWRVDNAFGSFLPGDPASMSVDGNAYDLRHMLFDSADSSSKTVSRRQDSRNDFSQLERSELTSGRLFDAVASFKLIWSNSGTSSPKKLSIWRPMLSEGMFYFGDIAVNGYEPPNSTVVLRDTGEDTFLRAPEGFDLVGRIKKHRGTEGVSFWFPKAPSGFVALGCVASKSSPTKEDFSLLRCIRNDMVAGGQFSEESLWDSSNARTSEPFSLWTVDNDAGTFLVRSGYRKPPKRLALKLAGPPTSSSSDSIIVDAKIKTFSAVSFDDYGGMMVPLFGVSFDSVGLSYHGGPHHLNATVSLSFVARSYNDKYSSWEPFIEPTDAFLRYQFDMNTPGSPRQLRITSTQDLNLNISVSNTNMLSQAYASWNNISCGDELYKKETFSSTERPVLDVHQRRSYYVVPQNKLGQDIYVRTTENRGSLVTLLPSGDDRSIKVPALRDLSDSHLNGRSVKPYRLMITAILADAEVKDDEGLETGEYMTAVRLFSENHSISVQQQSARTCAAIGEHLSQNTRKVNWNEMFFFKVERVDSYTLELLVLDAGKGS

SEQ ID NO: 195935 - protein, 3187 aa, Zea Mays
MKGGNLLIGTILGSLEIEDQYYYPGSPVPRFLARSFINSMQTQELPSLSRKNSAGPRNTPLMKNDSEENFFEASDDFDEFETPMHQKRTISDYFSTQKFLPTSVPSLQPPTFKRIPDLIPDTELQTGKFTLEGSGTFNSFVKAQIVIYDQHSPQYNSLDNRVVVTVATLSFFCHRPTVIAIMEFMNAINLANGSDTDKDKSTYPATVEDSAIEESKSDLESEPSIKPLLAKGKSRIVFHLTSSMAEAQILLMNENGDRLATLSQNNLSTDIKVFTSSFSIKAALGNLKISDDSLLSSHPYFWVCDMRNPGGRSFVEIDFSSYNVGDEDYCGYDYSLVGQLSEVRIVYLNRFVQEIISYFMGLVPKSSDAVVKLKDNKTNSEKWVSKTDMEGSPALKLDVSFSRPIIVMPRETNSNDFLELDVLYITVQNEFQWIGGDKNEMSTVHLDILTVTVRDINLVIGMNMVRGETIIQDVEGLSFELRRSLRDLRHQLPVVEAAIKVDVLKATLSNREYEIISECALSNFSETPHPVPTLDDPRYGTSTTPSHVSASSSESIHVLSEGAETWIANKFSVSINLVELSLHSGSTRDSPLASVQASGAWLFYKSNTRGENFMYATLKGFSVFDDREGTKDELRLAIGKSASVRDTSSVDGYDNPNELDSGERRIQKDLGLEPIPSMLILDAIFRKSSSSVSVCVQRPKFLVALDFLLAVIEFFVPSAQSLLSNDEDKDLLHMITPVVLNDQIYFQEHSTFSLSPQKPLIVDNERFDHFVYDGKGGKLYLLDSEGKILSSPCTESFIHVLGCKRLQFRNVTIVNGEYLDSCISLGDDSCYSASRNDHVYLVREDDGSLSTPSKEIRGDSVKNGSADISTEFIMELQAIGPELTFYSTSRNAGENLALSTKVIHAHTDAFCRLIMKGDSMEMNGNILGLKMESNGIRVIEPFDMVVKYSNASGKTNLHLLVSEIYMNFSFSILRLFLAVEEEISAFLRMSSKKISLVCYQFDKVATMQGNANDQVLSFWRPRAPSGYAIFGDYLTPMNEPPTKGVLALNTNIVRVKRPLSYKLVWQSGSPRTNIFHQKDLEDKISNIDQLCSVWLPVAPAGYVAMGCVASSGTAEPPLSSAFCLTASLVSSCNLRDCIALRDNTNMIFWRVDNAFGSFLPGDPASMSVDGNAYDLRHMLFDSADSSSKTVSRRQDSRNDFSQLERSELTSGRLFDAVASFKLIWSNSGTSSPKKLSIWRPMLSEGMFYFGDIAVNGYEPPNSTVVLRDTGEDTFLRAPEGFDLVGRIKKHRGTEGVSFWFPKAPSGFVALGCVASKSSPTKEDFSLLRCIRNDMVAGGQFSEESLWDSSNARTSEPFSLWTVDNDAGTFLVRSGYRKPPKRLALKLAGPPTSSSSDSIIVDAKIKTFSAVSFDDYGGMYSMQMVPLFGVSFDSVGLSYHGGPHHLNATVSLSFVARSYNDKYSSWEPFIEPTDAFLRYQFDMNTPGSPRQLRITSTQDLNLNISVSNTNMLSQAYASWNNISCGDELYKKETFSSTERPVLDVHQRRSYYVVPQNKLGQDIYVRTTENRGSLVTLLPSGDDRSIKVPALRDLSDSHLNGRSVKPYRLMITAILADAEVKDDEGLETGEYMTAVRLFSENHSISVQQQSARTCAAIGEHLSQNTRKVNWNEMFFFKVERVDSYTLELLVLDAGKGQPVGIYSAPLEQVVQKLPPTSNPDSVKFDLALGDLMSTKTVEQETVKPSGKIRFAVLVSGRASVQQGNRASPESKTGYIQISPSKEGPWTSMKLNYAVPAACWRFGNCVIASEATVKEGNRYVSIRSLVSVTNTTNFIVDLRLKGRISQSARADEQGDSFGKEDQILIGTLEPNSTIPVPLSGLSHPLMPYMLQLRPAKHHDHENYSWSDVQERRSQTEFRKEEILDLCISDLYESENLLFCSQVDGTSNSCHGLWFCLSIEGKEIGKDVQMEPIYDWCIIIKSPLCLTYYLPIAAHYTVSSSHLDNEDSSCSLGTLSPGEAVKVHNVDPRNPLYLSLVPHGGWELMHEPVVISHPTQAPSKFINLRSSLSGRLPTLTLRLIDISGRKEKRRLLSRSHLERGEKQLYDIKHDELVEGYTIASGLNFKGLGLLSSVGHGGRFGSVKELSPLGDMDGAVDLSAYDDDGKCMHILLCSKPSSYQAVPTKVIHVRPYITFTNRAGQDLYLKLSIEDEPKVLHAYDWRVSFMYSKGTTDKLQVRLVDTEWCQPLEIVKEDTIVIAMRKQGGTQKFVKAEIRGYEEGSRFLIVFRLGPAYGPIRIENRTSHTTISTCQSGLGEESWIQVKPHATRKYSWDDPYGQKVIDVSIDKGDDTCVLCVDLENPIGSSTSFREHGLMFTVDTSDIKILKFADYIRKEEVYGLPGSELTDHQGSSLKENETEPGAGPLELIVELGVVGISLIDHKPRELLYLHLQKVFVSYLTGYDFGTTSRFKLILGELQLDNQLPLSTMPVVLSTESRPDSNRSVFKANVAVSNVTSNGIQVYPHVYIRVTDQTWRLNIHEPIIWALFDFYSNLRFVTTINSTTVTEVDPEIRIELIDISEIRLKISLETAPSQRPRGVLGIWSPILSAVGNALKIQVHLRKVMHRSRFMRKSSIIPAITNRIKRDLIHNPLHLIFSVDFLGVTKSTLSSLSKGFAELSTDGQFLQLRSKQVWSRRITGVGDGLVQGTEAFAQGLAFGVSGVLRKPVESARQYGVIGIAPGIGRAFVGFIVQPLSGALDFFSLTVDGISASFMRCVNILSNKSVPQRIRDPRAIHRDGIVRDYDKFEAAGQMALYLAEASRYFACTDLFREPSKYAWSDYYEDHFILPSQRIALVTNKRVMLLQCLDLDKMDKKPSKILWDVPWEEVLSLELAKAGYQRPSHVIIHLKNFRRSENFVRLIKCNIDNEREPQALSLCCSIRKMWRSHQAAMKVIPLKVPSGQRHVYFVSDDDKKESHSLSRPLLSSGGTSTDVEQQFINNTVHFQKMWSSEPEIQSRCKLVAKQIADDGRVFSIWRPLCPNGYVSIGDIAHVGIHPPHFAAVYKNINGNFALPLGYDLVWRNCAEDYKSPVSIWLPRPPGGYVALGCVAVPSFKEPTLDCAFCVDERLAEDAAYEEQIIWASSDAYPWGCYIYQVQSASMQFMALRVPKEQSELRPKKILESFLQQASETQTSRA

SEQ ID NO: 195936 - protein, 4167 aa, Zea Mays
MLEDQVAFLLQKYLGNYVRGLSKEALKISVWRGDVELTNMQLKPEALNSLKLPVRVKAGFLGSVKLKVPWSRLGQEPVLVYLDRIFILAEPATQVEGCSEDAVQEAKRSRVREMEIKLLERQQQLKSELSSSWLGSFIGTVIGNIKLSIGNIHIRYEDVESNPGHPFAAGLVLSKLSAVTVDDLGKETFATGGDLDRVKKSVELESLAVYFDSDSSSWIVDKPWEDLLPSEWSQVFEFQEQDGSRSASKKHAYILQPVSGKAKYTKIQLTEAKKTGQALQNTAVDLDDVTLSLSKDGYRDMLKLADNFSTFNQRLRYAHLRPSSPLKSDPRAWWKYAYKVVTQEMKKASGRLSWEQLLRNARLRKTYVSLYASLLKSDMSRLVVDDHEEIKRLDRELDMEVILQWRMLAHKFVEQSVETYQYAQQNKKSWWTGSSKDEEDSKSFTDEDWERLNRIIGYKETNEYVTDQQDMKLMQFDFEIRMKHNASKLTIDDSECLADLSCQDFCCNLKMYPEAKIFDLKLGSYRLLSPYGLLAESASVIDSFVGLFSYKPFDEQLDWSLTAKASPCYITYLKDSVDQIVGFFKSSPTISQNLALETAAAVQMTLDEVKRTAQQQMTRVLKDQSRFSLNMDIAAPKITVPTKFRPDDVHETKLLLDLGNLVLRTEEIWDAYTSEEQDIYLNFNLVLSDVSAFLVDGDYHWNETSDEKNLLPVIDKCGIALKLQQIQLESPLYPSTRMAIRVPSLGFHFSPARYHRLMEILKFFQDGASDNSNSDHEHLWDHADFEGWSSLLTWKGVGNREAVWQHRYLRLVGPFLYVFENLMSTTYKQWFSLRGKQVHQILEDTGALILLFDNDEGRKIWQNRLQGAIYRASGSAISSFPGVALPSEAHSFKGNFLDVADTEKLFVAGILDELKICFSCGYESNHKLKKILLAKESSLFEFRAVGGQVELSMKGGNLLIGTILGSLEIEDQYYYPGSPVPRFLARSFINSMQTQELPSLSRKNSAGPRNTPLMKNDSEENFFEASDDFDEFETPMHQKRTISDYFSTQKFLPTSVPSLQPPTFKRIPDLIPDTELQTGKFTLEGSGTFNSFVKAQIVIYDQHSPQYNSLDNRVVVTVATLSFFCHRPTVIAIMEFMNAINLANGSDTDKDKSTYPATVEDSAIEESKSDLESEPSIKPLLAKGKSRIVFHLTSSMAEAQILLMNENGDRLATLSQNNLSTDIKVFTSSFSIKAALGNLKISDDSLLSSHPYFWVCDMRNPGGRSFVEIDFSSYNVGDEDYCGYDYSLVGQLSEVRIVYLNRFVQEIISYFMGLVPKSSDAVVKLKDNKTNSEKWVSKTDMEGSPALKLDVSFSRPIIVMPRETNSNDFLELDVLYITVQNEFQWIGGDKNEMSTVHLDILTVTVRDINLVIGMNMVRGETIIQDVEGLSFELRRSLRDLRHQLPVVEAAIKVDVLKATLSNREYEIISECALSNFSETPHPVPTLDDPRYGTSTTPSHVSASSSESIHVLSEGAETWIANKFSVSINLVELSLHSGSTRDSPLASVQASGAWLFYKSNTRGENFMYATLKGFSVFDDREGTKDELRLAIGKSASVRDTSSVDGYDNPNELDSGERRIQKDLGLEPIPSMLILDAIFRKSSSSVSVCVQRPKFLVALDFLLAVIEFFVPSAQSLLSNDEDKDLLHMITPVVLNDQIYFQEHSTFSLSPQKPLIVDNERFDHFVYDGKGGKLYLLDSEGKILSSPCTESFIHVLGCKRLQFRNVTIVNGEYLDSCISLGDDSCYSASRNDHVYLVREDDGSLSTPSKEIRGDSVKNGSADISTEFIMELQAIGPELTFYSTSRNAGENLALSTKVIHAHTDAFCRLIMKGDSMEMNGNILGLKMESNGIRVIEPFDMVVKYSNASGKTNLHLLVSEIYMNFSFSILRLFLAVEEEISAFLRMSSKKISLVCYQFDKVATMQGNANDQVLSFWRPRAPSGYAIFGDYLTPMNEPPTKGVLALNTNIVRVKRPLSYKLVWQSGSPRTNIFHQKDLEDKISNIDQLCSVWLPVAPAGYVAMGCVASSGTAEPPLSSAFCLTASLVSSCNLRDCIALRDNTNMIFWRVDNAFGSFLPGDPASMSVDGNAYDLRHMLFDSADSSSKTVSRRQDSRNDFSQLERSELTSGRLFDAVASFKLIWSNSGTSSPKKLSIWRPMLSEGMFYFGDIAVNGYEPPNSTVVLRDTGEDTFLRAPEGFDLVGRIKKHRGTEGVSFWFPKAPSGFVALGCVASKSSPTKEDFSLLRCIRNDMVAGGQFSEESLWDSSNARTSEPFSLWTVDNDAGTFLVRSGYRKPPKRLALKLAGPPTSSSSDSIIVDAKIKTFSAVSFDDYGGMMVPLFGVSFDSVGLSYHGGPHHLNATVSLSFVARSYNDKYSSWEPFIEPTDAFLRYQFDMNTPGSPRQLRITSTQDLNLNISVSNTNMLSQAYASWNNISCGDELYKKETFSSTERPVLDVHQRRSYYVVPQNKLGQDIYVRTTENRGSLVTLLPSGDDRSIKVPALRDLSDSHLNGRSVKPYRLMITAILADAEVKDDEGLETGEYMTAVRLFSENHSISVQQQSARTCAAIGEHLSQNTRKVNWNEMFFFKVERVDSYTLELLVLDAGKGQPVGIYSAPLEQVVQKLPPTSNPDSVKFDLALGDLMSTKTVEQETVKPSGKIRFAVLVSGRASVQQGNRASPESKTGYIQISPSKEGPWTSMKLNYAVPAACWRFGNCVIASEATVKEGNRYVSIRSLVSVTNTTNFIVDLRLKGRISQSARADEQGDSFGKEDQILIGTLEPNSTIPVPLSGLSHPLMPYMLQLRPAKHHDHENYSWSDVQERRSQTEFRKEEILDLCISDLYESENLLFCSQVDGTSNSCHGLWFCLSIEGKEIGKDVQMEPIYDWCIIIKSPLCLTYYLPIAAHYTVSSSHLDNEDSSCSLGTLSPGEAVKVHNVDPRNPLYLSLVPHGGWELMHEPVVISHPTQAPSKFINLRSSLSGRVVQILLEQSSDSDYLMARLIRIYVPYWISFSRLPTLTLRLIDISGRKEKRRLLSRSHLERGEKQLYDIKHDELVEGYTIASGLNFKGLGLLSSVGHGGRFGSVKELSPLGDMDGAVDLSAYDDDGKCMHILLCSKPSSYQAVPTKVIHVRPYITFTNRAGQDLYLKLSIEDEPKVLHAYDWRVSFMYSKGTTDKLQVRLVDTEWCQPLEIVKEDTIVIAMRKQGGTQKFVKAEIRGYEEGSRFLIVFRLGPAYGPIRIENRTSHTTISTCQSGLGEESWIQVKPHATRKYSWDDPYGQKVIDVSIDKGDDTCVLCVDLENPIGSSTSFREHGLMFTVDTSDIKILKFADYIRKEEVYGLPGSELTDHQGSSLKENETEPGAGPLELIVELGVVGISLIDHKPRELLYLHLQKVFVSYLTGYDFGTTSRFKLILGELQLDNQLPLSTMPVVLSTESRPDSNRSVFKANVAVSNVTSNGIQVYPHVYIRVTDQTWRLNIHEPIIWALFDFYSNLRFVTTINSTTVTEVDPEIRIELIDISEIRLKISLETAPSQRPRGVLGIWSPILSAVGNALKIQVHLRKVMHRSRFMRKSSIIPAITNRIKRDLIHNPLHLIFSVDFLGVTKSTLSSLSKGFAELSTDGQFLQLRSKQVWSRRITGVGDGLVQGTEAFAQGLAFGVSGVLRKPVESARQYGVIGIAPGIGRAFVGFIVQPLSGALDFFSLTVDGISASFMRCVNILSNKSVPQRIRDPRAIHRDGIVRDYDKFEAAGQMALYLAEASRYFACTDLFREPSKYAWSDYYEDHFILPSQRIALVTNKRVMLLQCLDLDKMDKKPSKILWDVPWEEVLSLELAKAGYQRPSHVIIHLKNFRRSENFVRLIKCNIDNEREPQALSLCCSIRKMWRSHQAAMKVIPLKVPSGQRHVYFVSDDDKKESHSLSRPLLSSGGTSTDVEQQFINNTVHFQKMWSSEPEIQSRCKLVAKQIADDGRVFSIWRPLCPNGYVSIGDIAHVGIHPPHFAAVYKNINGNFALPLGYDLVWRNCAEDYKSPVSIWLPRPPGGYVALGCVAVPSFKEPTLDCAFCVDERLAEDAAYEEQIIWASSDAYPWGCYIYQVQSASMQFMALRVPKEQSELRPKKILESFLQQASETQTSRA

SEQ ID NO: 195937 - protein, 4101 aa, Zea Mays
MLEDQVAFLLQKYLGNYVRGLSKEALKISVWRGDVELTNMQLKPEALNSLKLPVRVKAGFLGSVKLKVPWSRLGQEPVLVYLDRIFILAEPATQVEGCSEDAVQEAKRSRVREMEIKLLERQQQLKSELSSSWLGSFIGTVIGNIKLSIGNIHIRYEDVESNPGHPFAAGLVLSKLSAVTVDDLGKETFATGGDLDRVKKSVELESLAVYFDSDSSSWIVDKPWEDLLPSEWSQVFEFQEQDGSRSASKKHAYILQPVSGKAKYTKIQLTEAKKTGQALQNTAVDLDDVTLSLSKDGYRDMLKLADNFSTFNQRLRYAHLRPSSPLKSDPRAWWKYAYKVVTQEMKKASGRLSWEQLLRNARLRKTYVSLYASLLKSDMSRLVVDDHEEIKRLDRELDMEVILQWRMLAHKFVEQSVETYQYAQQNKKSWWSFGWTGSSKDEEDSKSFTDEDWERLNRIIGYKETNEYVTDQQDMKLMQFDFEIRMKHNASKLTIDDSECLADLSCQDFCCNLKMYPEAKIFDLKLGSYRLLSPYGLLAESASVIDSFVGLFSYKPFDEQLDWSLTAKASPCYITYLKDSVDQIVGFFKSSPTISQNLALETAAAVQMTLDEVKRTAQQQMTRVLKDQSRFSLNMDIAAPKITVPTKFRPDDVHETKLLLDLGNLVLRTEEIWDAYTSEEQDIYLNFNLVLSDVSAFLVDGDYHWNETSDEKNLLPVIDKCGIALKLQQGVGNREAVWQHRYLRLVGPFLYVFENLMSTTYKQWFSLRGKQVHQILEDTGALILLFDNDEGRKIWQNRLQGAIYRASGSAISSFPGVALPSEAHSFKGNFLDVADTEKLFVAGILDELKICFSCGYESNHKLKKILLAKESSLFEFRAVGGQVELSMKGGNLLIGTILGSLEIEDQYYYPGSPVPRFLARSFINSMQTQELPSLSRKNSAGPRNTPLMKNDSEENFFEASDDFDEFETPMHQKRTISDYFSTQKFLPTSVPSLQPPTFKRIPDLIPDTELQTGKFTLEGSGTFNSFVKAQIVIYDQHSPQYNSLDNRVVVTVATLSFFCHRPTVIAIMEFMNAINLANGSDTDKDKSTYPATVEDSAIEESKSDLESEPSIKPLLAKGKSRIVFHLTSSMAEAQILLMNENGDRLATLSQNNLSTDIKVFTSSFSIKAALGNLKISDDSLLSSHPYFWVCDMRNPGGRSFVEIDFSSYNVGDEDYCGYDYSLVGQLSEVRIVYLNRFVQEIISYFMGLVPKSSDAVVKLKDNKTNSEKWVSKTDMEGSPALKLDVSFSRPIIVMPRETNSNDFLELDVLYITVQNEFQWIGGDKNEMSTVHLDILTVTVRDINLVIGMNMVRGETIIQDVEGLSFELRRSLRDLRHQLPVVEAAIKVDVLKATLSNREYEIISECALSNFSETPHPVPTLDDPRYGTSTTPSHVSASSSESIHVLSEGAETWIANKFSVSINLVELSLHSGSTRDSPLASVQASGAWLFYKSNTRGENFMYATLKGFSVFDDREGTKDELRLAIGKSASVRDTSSVDGYDNPNELDSGERRIQKDLGLEPIPSMLILDAIFRKSSSSVSVCVQRPKFLVALDFLLAVIEFFVPSAQSLLSNDEDKDLLHMITPVVLNDQIYFQEHSTFSLSPQKPLIVDNERFDHFVYDGKGGKLYLLDSEGKILSSPCTESFIHVLGCKRLQFRNVTIVNGEYLDSCISLGDDSCYSASRNDHVYLVREDDGSLSTPSKEIRGDSVKNGSADISTEFIMELQAIGPELTFYSTSRNAGENLALSTKVIHAHTDAFCRLIMKGDSMEMNGNILGLKMESNGIRVIEPFDMVVKYSNASGKTNLHLLVSEIYMNFSFSILRLFLAVEEEISAFLRMSSKKISLVCYQFDKVATMQGNANDQVLSFWRPRAPSGYAIFGDYLTPMNEPPTKGVLALNTNIVRVKRPLSYKLVWQSGSPRTNIFHQKDLEDKISNIDQLCSVWLPVAPAGYVAMGCVASSGTAEPPLSSAFCLTASLVSSCNLRDCIALRDNTNMIFWRVDNAFGSFLPGDPASMSVDGNAYDLRHMLFDSADSSSKTVSRRQDSRNDFSQLERSELTSGRLFDAVASFKLIWSNSGTSSPKKLSIWRPMLSEGMFYFGDIAVNGYEPPNSTVVLRDTGEDTFLRAPEGFDLVGRIKKHRGTEGVSFWFPKAPSGFVALGCVASKSSPTKEDFSLLRCIRNDMVAGGQFSEESLWDSSNARTSEPFSLWTVDNDAGTFLVRSGYRKPPKRLALKLAGPPTSSSSDSIIVDAKIKTFSAVSFDDYGGMMVPLFGVSFDSVGLSYHGGPHHLNATVSLSFVARSYNDKYSSWEPFIEPTDAFLRYQFDMNTPGSPRQLRITSTQDLNLNISVSNTNMLSQAYASWNNISCGDELYKKETFSSTERPVLDVHQRRSYYVVPQNKLGQDIYVRTTENRGSLVTLLPSGDDRSIKVPALRDLSDSHLNGRSVKPYRLMITAILADAEVKDDEGLETGEYMTAVRLFSENHSISVQQQSARTCAAIGEHLSQNTRKVNWNEMFFFKVERVDSYTLELLVLDAGKGQPVGIYSAPLEQVVQKLPPTSNPDSVKFDLALGDLMSTKTVEQETVKPSGKIRFAVLVSGRASVQQGNRASPESKTGYIQISPSKEGPWTSMKLNYAVPAACWRFGNCVIASEATVKEGNRYVSIRSLVSVTNTTNFIVDLRLKGRISQSARADEQGDSFGKEDQILIGTLEPNSTIPVPLSGLSHPLMPYMLQLRPAKHHDHENYSWSDVQERRSQTEFRKEEILDLCISDLYESENLLFCSQVDGTSNSCHGLWFCLSIEGKEIGKDVQMEPIYDWCIIIKSPLCLTYYLPIAAHYTVSSSHLDNEDSSCSLGTLSPGEAVKVHNVDPRNPLYLSLVPHGGWELMHEPVVISHPTQAPSKFINLRSSLSGRVVQILLEQSSDSDYLMARLIRIYVPYWISFSRLPTLTLRLIDISGRKEKRRLLSRSHLERGEKQLYDIKHDELVEGYTIASGLNFKGLGLLSSVGHGGRFGSVKELSPLGDMDGAVDLSAYDDDGKCMHILLCSKPSSYQAVPTKVIHVRPYITFTNRAGQDLYLKLSIEDEPKVLHAYDWRVSFMYSKGTTDKLQVRLVDTEWCQPLEIVKEDTIVIAMRKQGGTQKFVKAEIRGYEEGSRFLIVFRLGPAYGPIRIENRTSHTTISTCQSGLGEESWIQVKPHATRKYSWDDPYGQKVIDVSIDKGDDTCVLCVDLENPIGSSTSFREHGLMFTVDTSDIKILKFADYIRKEEVYGLPGSELTDHQGSSLKENETEPGAGPLELIVELGVVGISLIDHKPRELLYLHLQKVFVSYLTGYDFGTTSRFKLILGELQLDNQLPLSTMPVVLSTESRPDSNRSVFKANVAVSNVTSNGIQVYPHVYIRVTDQTWRLNIHEPIIWALFDFYSNLRFVTTINSTTVTEVDPEIRIELIDISEIRLKISLETAPSQRPRGVLGIWSPILSAVGNALKIQVHLRKVMHRSRFMRKSSIIPAITNRIKRDLIHNPLHLIFSVDFLGVTKSTLSSLSKGFAELSTDGQFLQLRSKQVWSRRITGVGDGLVQGTEAFAQGLAFGVSGVLRKPVESARQYGVIGIAPGIGRAFVGFIVQPLSGALDFFSLTVDGISASFMRCVNILSNKSVPQRIRDPRAIHRDGIVRDYDKFEAAGQMALYLAEASRYFACTDLFREPSKYAWSDYYEDHFILPSQRIALVTNKRVMLLQCLDLDKMDKKPSKILWDVPWEEVLSLELAKAGYQRPSHVIIHLKNFRRSENFVRLIKCNIDNEREPQALSLCCSIRKMWRSHQAAMKVIPLKVPSGQRHVYFVSDDDKKESHSLSRPLLSSGGTSTDVEQQFINNTVHFQKMWSSEPEIQSRCKLVAKQIADDGRVFSIWRPLCPNGYVSIGDIAHVGIHPPHFAAVYKNINGNFALPLGYDLVWRNCAEDYKSPVSIWLPRPPGGYVALGCVAVPSFKEPTLDCAFCVDERLAEDAAYEEQIIWASSDAYPWGCYIYQVQSASMQFMALRVPKEQSELRPKKILESFLQQASETQTSRA

SEQ ID NO: 195938 - protein, 2682 aa, Zea Mays
MKGGNLLIGTILGSLEIEDQYYYPGSPVPRFLARSFINSMQTQELPSLSRKNSAGPRNTPLMKNDSEENFFEASDDFDEFETPMHQKRTISDYFSTQKFLPTSVPSLQPPTFKRIPDLIPDTELQTGKFTLEGSGTFNSFVKAQIVIYDQHSPQYNSLDNRVVVTVATLSFFCHRPTVIAIMEFMNAINLANGSDTDKDKSTYPATVEDSAIEESKSDLESEPSIKPLLAKGKSRIVFHLTSSMAEAQILLMNENGDRLATLSQNNLSTDIKVFTSSFSIKAALGNLKISDDSLLSSHPYFWVCDMRNPGGRSFVEIDFSSYNVGDEDYCGYDYSLVGQLSEVRIVYLNRFVQEIISYFMGLVPKSSDAVVKLKDNKTNSEKWVSKTDMEGSPALKLDVSFSRPIIVMPRETNSNDFLELDVLYITVQNEFQWIGGDKNEMSTVHLDILTVTVRDINLVIGMNMVRGETIIQDVEGLSFELRRSLRDLRHQLPVVEAAIKVDVLKATLSNREYEIISECALSNFSETPHPVPTLDDPRYGTSTTPSHVSASSSESIHVLSEGAETWIANKFSVSINLVELSLHSGSTRDSPLASVQASGAWLFYKSNTRGENFMYATLKGFSVFDDREGTKDELRLAIGKSASVRDTSSVDGYDNPNELDSGERRIQKDLGLEPIPSMLILDAIFRKSSSSVSVCVQRPKFLVALDFLLAVIEFFVPSAQSLLSNDEDKDLLHMITPVVLNDQIYFQEHSTFSLSPQKPLIVDNERFDHFVYDGKGGKLYLLDSEGKILSSPCTESFIHVLGCKRLQFRNVTIVNGEYLDSCISLGDDSCYSASRNDHVYLVREDDGSLSTPSKEIRGDSVKNGSADISTEFIMELQAIGPELTFYSTSRNAGENLALSTKVIHAHTDAFCRLIMKGDSMEMNGNILGLKMESNGIRVIEPFDMVVKYSNASGKTNLHLLVSEIYMNFSFSILRLFLAVEEEISAFLRMSSKKISLVCYQFDKVATMQGNANDQVLSFWRPRAPSGYAIFGDYLTPMNEPPTKGVLALNTNIVRVKRPLSYKLVWQSGSPRTNIFHQKDLEDKISNIDQLCSVWLPVAPAGYVAMGCVASSGTAEPPLSSAFCLTASLVSSCNLRDCIALRDNTNMIFWRVDNAFGSFLPGDPASMSVDGNAYDLRHMLFDSADSSSKTVSRRQDSRNDFSQLERSELTSGRLFDAVASFKLIWSNSGTSSPKKLSIWRPMLSEGMFYFGDIAVNGYEPPNSTVVLRDTGEDTFLRAPEGFDLVGRIKKHRGTEGVSFWFPKAPSGFVALGCVASKSSPTKEDFSLLRCIRNDMVAGGQFSEESLWDSSNARTSEPFSLWTVDNDAGTFLVRSGYRKPPKRLALKLAGPPTSSSSDSIIVDAKIKTFSAVSFDDYGGMMVPLFGVSFDSVGLSYHGGPHHLNATVSLSFVARSYNDKYSSWEPFIEPTDAFLRYQFDMNTPGSPRQLRITSTQDLNLNISVSNTNMLSQAYASWNNISCGDELYKKETFSSTERPVLDVHQRRSYYVVPQNKLGQDIYVRTTENRGSLVTLLPSGDDRSIKVPALRDLSDSHLNGRSVKPYRLMITAILADAEVKDDEGLETGEYMTAVRLFSENHSISVQQQSARTCAAIGEHLSQNTRKVNWNEMFFFKVERVDSYTLELLVLDAGKGQPVGIYSAPLEQVVQKLPPTSNPDSVKFDLALGDLMSTKTVEQETVKPSGKIRFAVLVSGRASVQQGNRASPESKTGYIQISPSKEGPWTSMKLNYAVPAACWRFGNCVIASEATVKEGNRYVSIRSLVSVTNTTNFIVDLRLKGRISQSARADEQGDSFGKEDQILIGTLEPNSTIPVPLSGLSHPLMPYMLQLRPAKHHDHENYSWSDVQERRSQTEFRKEEILDLCISDLYESENLLFCSQVDGTSNSCHGLWFCLSIEGKEIGKDVQMEPIYDWCIIIKSPLCLTYYLPIAAHYTVSSSHLDNEDSSCSLGTLSPGEAVKVHNVDPRNPLYLSLVPHGGWELMHEPVVISHPTQAPSKFINLRSSLSGRLPTLTLRLIDISGRKEKRRLLSRSHLERGEKQLYDIKHDELVEGYTIASGLNFKGLGLLSSVGHGGRFGSVKELSPLGDMDGAVDLSAYDDDGKCMHILLCSKPSSYQAVPTKVIHVRPYITFTNRAGQDLYLKLSIEDEPKVLHAYDWRVSFMYSKGTTDKLQVRLVDTEWCQPLEIVKEDTIVIAMRKQGGTQKFVKAEIRGYEEGSRFLIVFRLGPAYGPIRIENRTSHTTISTCQSGLGEESWIQVKPHATRKYSWDDPYGQKVIDVSIDKGDDTCVLCVDLENPIGSSTSFREHGLMFTVDTSDIKILKFADYIRKEEVYGLPGSELTDHQGSSLKENETEPGAGPLELIVELGVVGISLIDHKPRELLYLHLQKVFVSYLTGYDFGTTSRFKLILGELQLDNQLPLSTMPVVLSTESRPDSNRSVFKANVAVSNVTSNGIQVYPHVYIRVTDQTWRLNIHEPIIWALFDFYSNLRFVTTINSTTVTEVDPEIRIELIDISEIRLKISLETAPSQRPRGVLGIWSPILSAVGNALKIQVHLRKVMHRSRFMRKSSIIPAITNRIKRDLIHNPLHLIFSVDFLGVTKSTLSSLSKGFAELSTDGQFLQLRSKQVQ

SEQ ID NO: 195939 - protein, 3219 aa, Zea Mays
MLEDQVAFLLQKYLGNYVRGLSKEALKISVWRGDVELTNMQLKPEALNSLKLPVRVKAGFLGSVKLKVPWSRLGQEPVLVYLDRIFILAEPATQVEGCSEDAVQEAKRSRVREMEIKLLERQQQLKSELSSSWLGSFIGTVIGNIKLSIGNIHIRYEDVESNPGHPFAAGLVLSKLSAVTVDDLGKETFATGGDLDRVKKSVELESLAVYFDSDSSSWIVDKPWEDLLPSEWSQVFEFQEQDGSRSASKKHAYILQPVSGKAKYTKIQLTEAKKTGQALQNTAVDLDDVTLSLSKDGYRDMLKLADNFSTFNQRLRYAHLRPSSPLKSDPRAWWKYAYKVVTQEMKKASGRLSWEQLLRNARLRKTYVSLYASLLKSDMSRLVVDDHEEIKRLDRELDMEVILQWRMLAHKFVEQSVETYQYAQQNKKSWWTGSSKDEEDSKSFTDEDWERLNRIIGYKETNEYVTDQQDMKLMQFDFEIRMKHNASKLTIDDSECLADLSCQDFCCNLKMYPEAKIFDLKLGSYRLLSPYGLLAESASVIDSFVGLFSYKPFDEQLDWSLTAKASPCYITYLKDSVDQIVGFFKSSPTISQNLALETAAAVQMTLDEVKRTAQQQMTRVLKDQSRFSLNMDIAAPKITVPTKFRPDDVHETKLLLDLGNLVLRTEEIWDAYTSEEQDIYLNFNLVLSDVSAFLVDGDYHWNETSDEKNLLPVIDKCGIALKLQQIQLESPLYPSTRMAIRVPSLGFHFSPARYHRLMEILKFFQDGASDNSNSDHEHLWDHADFEGWSSLLTWKGVGNREAVWQHRYLRLVGPFLYVFENLMSTTYKQWFSLRGKQVHQILEDTGALILLFDNDEGRKIWQNRLQGAIYRASGSAISSFPGVALPSEAHSFKGNFLDVADTEKLFVAGILDELKICFSCGYESNHKLKKILLAKESSLFEFRAVGGQVELSMKGGNLLIGTILGSLEIEDQYYYPGSPVPRFLARSFINSMQTQELPSLSRKNSAGPRNTPLMKNDSEENFFEASDDFDEFETPMHQKRTISDYFSTQKFLPTSVPSLQPPTFKRIPDLIPDTELQTGKFTLEGSGTFNSFVKAQIVIYDQHSPQYNSLDNRVVVTVATLSFFCHRPTVIAIMEFMNAINLANGSDTDKDKSTYPATVEDSAIEESKSDLESEPSIKPLLAKGKSRIVFHLTSSMAEAQILLMNENGDRLATLSQNNLSTDIKVFTSSFSIKAALGNLKISDDSLLSSHPYFWVCDMRNPGGRSFVEIDFSSYNVGDEDYCGYDYSLVGQLSEVRIVYLNRFVQEIISYFMGLVPKSSDAVVKLKDNKTNSEKWVSKTDMEGSPALKLDVSFSRPIIVMPRETNSNDFLELDVLYITVQNEFQWIGGDKNEMSTVHLDILTVTVRDINLVIGMNMVRGETIIQDVEGLSFELRRSLRDLRHQLPVVEAAIKVDVLKATLSNREYEIISECALSNFSETPHPVPTLDDPRYGTSTTPSHVSASSSESIHVLSEGAETWIANKFSVSINLVELSLHSGSTRDSPLASVQASGAWLFYKSNTRGENFMYATLKGFSVFDDREGTKDELRLAIGKSASVRDTSSVDGYDNPNELDSGERRIQKDLGLEPIPSMLILDAIFRKSSSSVSVCVQRPKFLVALDFLLAVIEFFVPSAQSLLSNDEDKDLLHMITPVVLNDQIYFQEHSTFSLSPQKPLIVDNERFDHFVYDGKGGKLYLLDSEGKILSSPCTESFIHVLGCKRLQFRNVTIVNGEYLDSCISLGDDSCYSASRNDHVYLVREDDGSLSTPSKEIRGDSVKNGSADISTEFIMELQAIGPELTFYSTSRNAGENLALSTKVIHAHTDAFCRLIMKGDSMEMNGNILGLKMESNGIRVIEPFDMVVKYSNASGKTNLHLLVSEIYMNFSFSILRLFLAVEEEISAFLRMSSKKISLVCYQFDKVATMQGNANDQVLSFWRPRAPSGYAIFGDYLTPMNEPPTKGVLALNTNIVRVKRPLSYKLVWQSGSPRTNIFHQKDLEDKISNIDQLCSVWLPVAPAGYVAMGCVASSGTAEPPLSSAFCLTASLVSSCNLRDCIALRDNTNMIFWRVDNAFGSFLPGDPASMSVDGNAYDLRHMLFDSADSSSKTVSRRQDSRNDFSQLERSELTSGRLFDAVASFKLIWSNSGTSSPKKLSIWRPMLSEGMFYFGDIAVNGYEPPNSTVVLRDTGEDTFLRAPEGFDLVGRIKKHRGTEGVSFWFPKAPSGFVALGCVASKSSPTKEDFSLLRCIRNDMVAGGQFSEESLWDSSNARTSEPFSLWTVDNDAGTFLVRSGYRKPPKRLALKLAGPPTSSSSDSIIVDAKIKTFSAVSFDDYGGMMVPLFGVSFDSVGLSYHGGPHHLNATVSLSFVARSYNDKYSSWEPFIEPTDAFLRYQFDMNTPGSPRQLRITSTQDLNLNISVSNTNMLSQAYASWNNISCGDELYKKETFSSTERPVLDVHQRRSYYVVPQNKLGQDIYVRTTENRGSLVTLLPSGDDRSIKVPALRDLSDSHLNGRSVKPYRLMITAILADAEVKDDEGLETGEYMTAVRLFSENHSISVQQQSARTCAAIGEHLSQNTRKVNWNEMFFFKVERVDSYTLELLVLDAGKGQPVGIYSAPLEQVVQKLPPTSNPDSVKFDLALGDLMSTKTVETVKPSGKIRFAVLVSGRASVQQGNRASPESKTGYIQISPSKEGPWTSMKLNYAVPAACWRFGNCVIASEATVKEGNRYVSIRSLVSVTNTTNFIVDLRLKGRISQSARADEQGDSFGKEDQILIGTLEPNSTIPVPLSGLSHPLMPYMLQLRPAKHHDHENYSWSDVQERRSQTEFRKEEILDLCISDLYESENLLFCSQVDGTSNSCHGLWFCLSIEGKEIGKDVQMEPIYDWCIIIKSPLCLTYYLPIAAHYTVSSSHLDNEDSSCSLGTLSPGEAVKVHNVDPRNPLYLSLVPHGGWELMHEPVVISHPTQAPSKFINLRSSLSGRVVQILLEQSSDSDYLMARLIRIYVPYWISFSRLPTLTLRLIDISGRKEKRRLLSRSHLERGEKQLYDIKHDELVEGYTIASGLNFKGLGLLSSVGHGGRFGSVKELSPLGDMDGAVDLSAYDDDGKCMHILLCSKPSSYQAVPTKVIHVRPYITFTNRAGQDLYLKLSIEDEPKVLHAYDWRVSFMYSKGTTDKLQVLQYSQRSTI

SEQ ID NO: 195940 - protein, 3508 aa, Zea Mays
MLEDQVAFLLQKYLGNYVRGLSKEALKISVWRGDVELTNMQLKPEALNSLKLPVRVKAGFLGSVKLKVPWSRLGQEPVLVYLDRIFILAEPATQVEGCSEDAVQEAKRSRVREMEIKLLERQQQLKSELSSSWLGSFIGTVIGNIKLSIGNIHIRYEDVESNPGHPFAAGLVLSKLSAVTVDDLGKETFATGGDLDRVKKSVELESLAVYFDSDSSSWIVDKPWEDLLPSEWSQVFEFQEQDGSRSASKKHAYILQPVSGKAKYTKIQLTEAKKTGQALQNTAVDLDDVTLSLSKDGYRDMLKLADNFSTFNQRLRYAHLRPSSPLKSDPRAWWKYAYKVVTQEMKKASGRLSWEQLLRNARLRKTYVSLYASLLKSDMSRLVVDDHEEIKRLDRELDMEVILQWRMLAHKFVEQSVETYQYAQQNKKSWWSFGWTGSSKDEEDSKSFTDEDWERLNRIIGYKETNEYVTDQQDMKLMQFDFEIRMKHNASKLTIDDSECLADLSCQDFCCNLKMYPEAKIFDLKLGSYRLLSPYGLLAESASVIDSFVGLFSYKPFDEQLDWSLTAKASPCYITYLKDSVDQIVGFFKSSPTISQNLALETAAAVQMTLDEVKRTAQQQMTRVLKDQSRFSLNMDIAAPKITVPTKFRPDDVHETKLLLDLGNLVLRTEEIWDAYTSEEQDIYLNFNLVLSDVSAFLVDGDYHWNETSDEKNLLPVIDKCGIALKLQQIQLESPLYPSTRMAIRVPSLGFHFSPARYHRLMEILKFFQDGASDNSNSDHEHLWDHADFEGWSSLLTWKGVGNREAVWQHRYLRLVGPFLYVFENLMSTTYKQWFSLRGKQVHQILEDTGALILLFDNDEGRKIWQNRLQGAIYRASGSAISSFPGVALPSEAHSFKGNFLDVADTEKLFVAGILDELKICFSCGYEVELSMKGGNLLIGTILGSLEIEDQYYYPGSPVPRFLARSFINSMQTQELPSLSRKNSAGPRNTPLMKNDSEENFFEASDDFDEFETPMHQKRTISDYFSTQKFLPTSVPSLQPPTFKRIPDLIPDTELQTGKFTLEGSGTFNSFVKAQIVIYDQHSPQYNSLDNRVVVTVATLSFFCHRPTVIAIMEFMNAINLANGSDTDKDKSTYPATVEDSAIEESKSDLESEPSIKPLLAKGKSRIVFHLTSSMAEAQILLMNENGDRLATLSQNNLSTDIKVFTSSFSIKAALGNLKISDDSLLSSHPYFWVCDMRNPGGRSFVEIDFSSYNVGDEDYCGYDYSLVGQLSEVRIVYLNRFVQEIISYFMGLVPKSSDAVVKLKDNKTNSEKWVSKTDMEGSPALKLDVSFSRPIIVMPRETNSNDFLELDVLYITVQNEFQWIGGDKNEMSTVHLDILTVTVRDINLVIGMNMVRGETIIQDVEGLSFELRRSLRDLRHQLPVVEAAIKVDVLKATLSNREYEIISECALSNFSETPHPVPTLDDPRYGTSTTPSHVSASSSESIHVLSEGAETWIANKFSVSINLVELSLHSGSTRDSPLASVQASGAWLFYKSNTRGENFMYATLKGFSVFDDREGTKDELRLAIGKSASVRDTSSVDGYDNPNELDSGERRIQKDLGLEPIPSMLILDAIFRKSSSSVSVCVQRPKFLVALDFLLAVIEFFVPSAQSLLSNDEDKDLLHMITPVVLNDQIYFQEHSTFSLSPQKPLIVDNERFDHFVYDGKGGKLYLLDSEGKILSSPCTESFIHVLGCKRLQFRNVTIVNGEYLDSCISLGDDSCYSASRNDHVYLVREDDGSLSTPSKEIRGDSVKNGSADISTEFIMELQAIGPELTFYSTSRNAGENLALSTKVIHAHTDAFCRLIMKGDSMEMNGNILGLKMESNGIRVIEPFDMVVKYSNASGKTNLHLLVSEIYMNFSFSILRLFLAVEEEISAFLRMSSKKISLVCYQFDKVATMQGNANDQVLSFWRPRAPSGYAIFGDYLTPMNEPPTKGVLALNTNIVRVKRPLSYKLVWQSGSPRTNIFHQKDLEDKISNIDQLCSVWLPVAPAGYVAMGCVASSGTAEPPLSSAFCLTASLVSSCNLRDCIALRDNTNMIFWRVDNAFGSFLPGDPASMSVDGNAYDLRHMLFDSADSSSKTVSRRQDSRNDFSQLERSELTSGRLFDAVASFKLIWSNSGTSSPKKLSIWRPMLSEGMFYFGDIAVNGYEPPNSTVVLRDTGEDTFLRAPEGFDLVGRIKKHRGTEGVSFWFPKAPSGFVALGCVASKSSPTKEDFSLLRCIRNDMVAGGQFSEESLWDSSNARTSEPFSLWTVDNDAGTFLVRSGYRKPPKRLALKLAGPPTSSSSDSIIVDAKIKTFSAVSFDDYGGMYSMQMVPLFGVSFDSVGLSYHGGPHHLNATVSLSFVARSYNDKYSSWEPFIEPTDAFLRYQFDMNTPGSPRQLRITSTQDLNLNISVSNTNMLSQAYASWNNISCGDELYKKETFSSTERPVLDVHQRRSYYVVPQNKLGQDIYVRTTENRGSLVTLLPSGDDRSIKVPALRDLSDSHLNGRSVKPYRLMITAILADAEVKDDEGLETGEYMTAVRLFSENHSISVQQQSARTCAAIGEHLSQNTRKVNWNEMFFFKVERVDSYTLELLVLDAGKGQPVGIYSAPLEQVVQKLPPTSNPDSVKFDLALGDLMSTKTVETVKPSGKIRFAVLVSGRASVQQGNRASPESKTGYIQISPSKEGPWTSMKLNYAVPAACWRFGNCVIASEATVKEGNRYVSIRSLVSVTNTTNFIVDLRLKGRISQSARADEQGDSFGKEDQILIGTLEPNSTIPVPLSGLSHPLMPYMLQLRPAKHHDHENYSWSDVQERRSQTEFRKEEILDLCISDLYESENLLFCSQVDGTSNSCHGLWFCLSIEGKEIGKDVQMEPIYDWCIIIKSPLCLTYYLPIAAHYTVSSSHLDNEDSSCSLGTLSPGEAVKVHNVDPRNPLYLSLVPHGGWELMHEPVVISHPTQAPSKFINLRSSLSGRLPTLTLRLIDISGRKEKRRLLSRSHLERGEKQLYDIKHDELVEGYTIASGLNFKGLGLLSSVGHGGRFGSVKELSPLGDMDGAVDLSAYDDDGKCMHILLCSKPSSYQAVPTKVIHVRPYITFTNRAGQDLYLKLSIEDEPKVLHAYDWRVSFMYSKGTTDKLQVRLVDTEWCQPLEIVKEDTIVIAMRKQGGTQKFVKAEIRGYEEGSRFLIVFRLGPAYGPIRIENRTSHTTISTCQSGLGEESWIQVKPHATRKYSWDDPYGQKVIDVSIDKGDDTCVLCVDLENPIGSSTSFREHGLMFTVDTSDIKILKFADYIRKEEVYGLPGSELTDHQGSSLKENETEPGAGPLELIVELGVVGISLIDHKPRELLYLHLQKVFVSYLTGYDFGTTSRFKLILGELQLDNQLPLSTMPVVLSTESRPDSNRSVFKANVAVSNVTSNGIQVYPHVYIRVTDQTWRLNIHEPIIWALFDFYSNLRFVTTINSTTVTEVDPEIRIEDKAKNISGNCA

SEQ ID NO: 195941 - protein, 3496 aa, Zea Mays
MLEDQVAFLLQKYLGNYVRGLSKEALKISVWRGDVELTNMQLKPEALNSLKLPVRVKAGFLGSVKLKVPWSRLGQEPVLVYLDRIFILAEPATQVEGCSEDAVQEAKRSRVREMEIKLLERQQQLKSELSSSWLGSFIGTVIGNIKLSIGNIHIRYEDVESNPGHPFAAGLVLSKLSAVTVDDLGKETFATGGDLDRVKKSVELESLAVYFDSDSSSWIVDKPWEDLLPSEWSQVFEFQEQDGSRSASKKHAYILQPVSGKAKYTKIQLTEAKKTGQALQNTAVDLDDVTLSLSKDGYRDMLKLADNFSTFNQRLRYAHLRPSSPLKSDPRAWWKYAYKVVTQEMKKASGRLSWEQLLRNARLRKTYVSLYASLLKSDMSRLVVDDHEEIKRLDRELDMEVILQWRMLAHKFVEQSVETYQYAQQNKKSWWSFGWTGSSKDEEDSKSFTDEDWERLNRIIGYKETNEYVTDQQDMKLMQFDFEIRMKHNASKLTIDDSECLADLSCQDFCCNLKMYPEAKIFDLKLGSYRLLSPYGLLAESASVIDSFVGLFSYKPFDEQLDWSLTAKASPCYITYLKDSVDQIVGFFKSSPTISQNLALETAAAVQMTLDEVKRTAQQQMTRVLKDQSRFSLNMDIAAPKITVPTKFRPDDVHETKLLLDLGNLVLRTEEIWDAYTSEEQDIYLNFNLVLSDVSAFLVDGDYHWNETSDEKNLLPVIDKCGIALKLQQGVGNREAVWQHRYLRLVGPFLYVFENLMSTTYKQWFSLRGKQVHQILEDTGALILLFDNDEGRKIWQNRLQGAIYRASGSAISSFPGVALPSEAHSFKGNFLDVADTEKLFVAGILDELKICFSCGYEVELSMKGGNLLIGTILGSLEIEDQYYYPGSPVPRFLARSFINSMQTQELPSLSRKNSAGPRNTPLMKNDSEENFFEASDDFDEFETPMHQKRTISDYFSTQKFLPTSVPSLQPPTFKRIPDLIPDTELQTGKFTLEGSGTFNSFVKAQIVIYDQHSPQYNSLDNRVVVTVATLSFFCHRPTVIAIMEFMNAINLANGSDTDKDKSTYPATVEDSAIEESKSDLESEPSIKPLLAKGKSRIVFHLTSSMAEAQILLMNENGDRLATLSQNNLSTDIKVFTSSFSIKAALGNLKISDDSLLSSHPYFWVCDMRNPGGRSFVEIDFSSYNVGDEDYCGYDYSLVGQLSEVRIVYLNRFVQEIISYFMGLVPKSSDAVVKLKDNKTNSEKWVSKTDMEGSPALKLDVSFSRPIIVMPRETNSNDFLELDVLYITVQNEFQWIGGDKNEMSTVHLDILTVTVRDINLVIGMNMVRGETIIQDVEGLSFELRRSLRDLRHQLPVVEAAIKVDVLKATLSNREYEIISECALSNFSETPHPVPTLDDPRYGTSTTPSHVSASSSESIHVLSEGAETWIANKFSVSINLVELSLHSGSTRDSPLASVQASGAWLFYKSNTRGENFMYATLKGFSVFDDREGTKDELRLAIGKSASVRDTSSVDGYDNPNELDSGERRIQKDLGLEPIPSMLILDAIFRKSSSSVSVCVQRPKFLVALDFLLAVIEFFVPSAQSLLSNDEDKDLLHMITPVVLNDQIYFQEHSTFSLSPQKPLIVDNERFDHFVYDGKGGKLYLLDSEGKILSSPCTESFIHVLGCKRLQFRNVTIVNGEYLDSCISLGDDSCYSASRNDHVYLVREDDGSLSTPSKEIRGDSVKNGSADISTEFIMELQAIGPELTFYSTSRNAGENLALSTKVIHAHTDAFCRLIMKGDSMEMNGNILGLKMESNGIRVIEPFDMVVKYSNASGKTNLHLLVSEIYMNFSFSILRLFLAVEEEISAFLRMSSKKISLVCYQFDKVATMQGNANDQVLSFWRPRAPSGYAIFGDYLTPMNEPPTKGVLALNTNIVRVKRPLSYKLVWQSGSPRTNIFHQKDLEDKISNIDQLCSVWLPVAPAGYVAMGCVASSGTAEPPLSSAFCLTASLVSSCNLRDCIALRDNTNMIFWRVDNAFGSFLPGDPASMSVDGNAYDLRHMLFDSADSSSKTVSRRQDSRNDFSQLERSELTSGRLFDAVASFKLIWSNSGTSSPKKLSIWRPMLSEGMFYFGDIAVNGYEPPNSTVVLRDTGEDTFLRAPEGFDLVGRIKKHRGTEGVSFWFPKAPSGFVALGCVASKSSPTKEDFSLLRCIRNDMVAGGQFSEESLWDSSNARTSEPFSLWTVDNDAGTFLVRSGYRKPPKRLALKLAGPPTSSSSDSIIVDAKIKTFSAVSFDDYGGMMVPLFGVSFDSVGLSYHGGPHHLNATVSLSFVARSYNDKYSSWEPFIEPTDAFLRYQFDMNTPGSPRQLRITSTQDLNLNISVSNTNMLSQAYASWNNISCGDELYKKETFSSTERPVLDVHQRRSYYVVPQNKLGQDIYVRTTENRGSLVTLLPSGDDRSIKVPALRDLSDSHLNGRSVKPYRLMITAILADAELKLLGSLNSLSFWVELASVSTLTWFPSQVKDDEGLETGEYMTAVRLFSENHSISVQQQSARTCAAIGEHLSQNTRKVNWNEMFFFKVERVDSYTLELLVLDAGKGQPVGIYSAPLEQVVQKLPPTSNPDSVKFDLALGDLMSTKTVEQETVKPSGKIRFAVLVSGRASVQQGNRASPESKTGYIQISPSKEGPWTSMKLNYAVPAACWRFGNCVIASEATVKEGNRYVSIRSLVSVTNTTNFIVDLRLKGRISQSARADEQGDSFGKEDQILIGTLEPNSTIPVPLSGLSHPLMPYMLQLRPAKHHDHENYSWSDVQERRSQTEFRKEEILDLCISDLYESENLLFCSQVDGTSNSCHGLWFCLSIEGKEIGKDVQMEPIYDWCIIIKSPLCLTYYLPIAAHYTVSSSHLDNEDSSCSLGTLSPGEAVKVHNVDPRNPLYLSLVPHGGWELMHEPVVISHPTQAPSKFINLRSSLSGRVVQILLEQSSDSDYLMARLIRIYVPYWISFSRLPTLTLRLIDISGRKEKRRLLSRSHLERGEKQLYDIKHDELVEGYTIASGLNFKGLGLLSSVGHGGRFGSVKELSPLGDMDGAVDLSAYDDDGKCMHILLCSKPSSYQAVPTKVIHVRPYITFTNRAGQDLYLKLSIEDEPKVLHAYDWRVSFMYSKGTTDKLQVRLVDTEWCQPLEIVKEDTIVIAMRKQGGTQKFVKAEIRGYEEGSRFLIVFRLGPAYGPIRIENRTSHTTISTCQSGLGEESWIQVKPHATRKYSWDDPYGQKVIDVSIDKGDDTCVLCVDLENPIGSSTSFREHGLMFTVDTSDIKILKFADYIRKEEVYGLPGSELTDHQGSSLKENETEPGAGPLELIVELGVVGISLIDHKPRELLYLHLQKVFVSYLTGYDFGTTSRFKLILGELQLDNQLPLSTMPVVLSTESRPDSNRSVFKANVAVSNVTSNGIQVYPHVYIRVTDQTWRLNIHEPIIWALFDFYSNLRFVTTINSTTVTEVDPEIRIEDKAKNISGNCA

SEQ ID NO: 195942 - protein, 3109 aa, Zea Mays
MSRLVVDDHEEIKRLDRELDMEVILQWRMLAHKFVEQSVETYQYAQQNKKSWWTGSSKDEEDSKSFTDEDWERLNRIIGYKETNEYVTDQQDMKLMQFDFEIRMKHNASKLTIDDSECLADLSCQDFCCNLKMYPEAKIFDLKLGSYRLLSPYGLLAESASVIDSFVGLFSYKPFDEQLDWSLTAKASPCYITYLKDSVDQIVGFFKSSPTISQNLALETAAAVQMTLDEVKRTAQQQMTRVLKDQSRFSLNMDIAAPKITVPTKFRPDDVHETKLLLDLGNLVLRTEEIWDAYTSEEQDIYLNFNLVLSDVSAFLVDGDYHWNETSDEKNLLPVIDKCGIALKLQQGVGNREAVWQHRYLRLVGPFLYVFENLMSTTYKQWFSLRGKQVHQILEDTGALILLFDNDEGRKIWQNRLQGAIYRASGSAISSFPGVALPSEAHSFKGNFLDVADTEKLFVAGILDELKICFSCGYESNHKLKKILLAKESSLFEFRAVGGQVELSMKGGNLLIGTILGSLEIEDQYYYPGSPVPRFLARSFINSMQTQELPSLSRKNSAGPRNTPLMKNDSEENFFEASDDFDEFETPMHQKRTISDYFSTQKFLPTSVPSLQPPTFKRIPDLIPDTELQTGKFTLEGSGTFNSFVKAQIVIYDQHSPQYNSLDNRVVVTVATLSFFCHRPTVIAIMEFMNAINLANGSDTDKDKSTYPATVEDSAIEESKSDLESEPSIKPLLAKGKSRIVFHLTSSMAEAQILLMNENGDRLATLSQNNLSTDIKVFTSSFSIKAALGNLKISDDSLLSSHPYFWVCDMRNPGGRSFVEIDFSSYNVGDEDYCGYDYSLVGQLSEVRIVYLNRFVQEIISYFMGLVPKSSDAVVKLKDNKTNSEKWVSKTDMEGSPALKLDVSFSRPIIVMPRETNSNDFLELDVLYITVQNEFQWIGGDKNEMSTVHLDILTVTVRDINLVIGMNMVRGETIIQDVEGLSFELRRSLRDLRHQLPVVEAAIKVDVLKATLSNREYEIISECALSNFSETPHPVPTLDDPRYGTSTTPSHVSASSSESIHVLSEGAETWIANKFSVSINLVELSLHSGSTRDSPLASVQASGAWLFYKSNTRGENFMYATLKGFSVFDDREGTKDELRLAIGKSASVRDTSSVDGYDNPNELDSGERRIQKDLGLEPIPSMLILDAIFRKSSSSVSVCVQRPKFLVALDFLLAVIEFFVPSAQSLLSNDEDKDLLHMITPVVLNDQIYFQEHSTFSLSPQKPLIVDNERFDHFVYDGKGGKLYLLDSEGKILSSPCTESFIHVLGCKRLQFRNVTIVNGEYLDSCISLGDDSCYSASRNDHVYLVREDDGSLSTPSKEIRGDSVKNGSADISTEFIMELQAIGPELTFYSTSRNAGENLALSTKVIHAHTDAFCRLIMKGDSMEMNGNILGLKMESNGIRVIEPFDMVVKYSNASGKTNLHLLVSEIYMNFSFSILRLFLAVEEEISAFLRMSSKKISLVCYQFDKVATMQGNANDQVLSFWRPRAPSGYAIFGDYLTPMNEPPTKGVLALNTNIVRVKRPLSYKLVWQSGSPRTNIFHQKDLEDKISNIDQLCSVWLPVAPAGYVAMGCVASSGTAEPPLSSAFCLTASLVSSCNLRDCIALRDNTNMIFWRVDNAFGSFLPGDPASMSVDGNAYDLRHMLFDSADSSSKTVSRRQDSRNDFSQLERSELTSGRLFDAVASFKLIWSNSGTSSPKKLSIWRPMLSEGMFYFGDIAVNGYEPPNSTVVLRDTGEDTFLRAPEGFDLVGRIKKHRGTEGVSFWFPKAPSGFVALGCVASKSSPTKEDFSLLRCIRNDMVAGGQFSEESLWDSSNARTSEPFSLWTVDNDAGTFLVRSGYRKPPKRLALKLAGPPTSSSSDSIIVDAKIKTFSAVSFDDYGGMMVPLFGVSFDSVGLSYHGGPHHLNATVSLSFVARSYNDKYSSWEPFIEPTDAFLRYQFDMNTPGSPRQLRITSTQDLNLNISVSNTNMLSQAYASWNNISCGDELYKKETFSSTERPVLDVHQRRSYYVVPQNKLGQDIYVRTTENRGSLVTLLPSGDDRSIKVPALRDLSDSHLNGRSVKPYRLMITAILADAEVKDDEGLETGEYMTAVRLFSENHSISVQQQSARTCAAIGEHLSQNTRKVNWNEMFFFKVERVDSYTLELLVLDAGQPVGIYSAPLEQVVQKLPPTSNPDSVKFDLALGDLMSTKTVEQETVKPSGKIRFAVLVSGRASVQQGNRASPESKTGYIQISPSKEGPWTSMKLNYAVPAACWRFGNCVIASEATVKEGNRYVSIRSLVSVTNTTNFIVDLRLKGRISQSARADEQGDSFGKEDQILIGTLEPNSTIPVPLSGLSHPLMPYMLQLRPAKHHDHENYSWSDVQERRSQTEFRKEEILDLCISDLYESENLLFCSQVDGTSNSCHGLWFCLSIEGKEIGKDVQMEPIYDWCIIIKSPLCLTYYLPIAAHYTVSSSHLDNEDSSCSLGTLSPGEAVKVHNVDPRNPLYLSLVPHGGWELMHEPVVISHPTQAPSKFINLRSSLSGRVVQILLEQSSDSDYLMARLIRIYVPYWISFSRLPTLTLRLIDISGRKEKRRLLSRSHLERGEKQLYDIKHDELVEGYTIASGLNFKGLGLLSSVGHGGRFGSVKELSPLGDMDGAVDLSAYDDDGKCMHILLCSKPSSYQAVPTKVIHVRPYITFTNRAGQDLYLKLSIEDEPKVLHAYDWRVSFMYSKGTTDKLQVRLVDTEWCQPLEIVKEDTIVIAMRKQGGTQKFVKAEIRGYEEGSRFLIVFRLGPAYGPIRIENRTSHTTISTCQSGLGEESWIQVKPHATRKYSWDDPYGQKVIDVSIDKGDDTCVLCVDLENPIGSSTSFREHGLMFTVDTSDIKILKFADYIRKEEVYGLPGSELTDHQGSSLKENETEPGAGPLELIVELGVVGISLIDHKPRELLYLHLQKVFVSYLTGYDFGTTSRFKLILGELQLDNQLPLSTMPVVLSTESRPDSNRSVFKANVAVSNVTSNGIQVYPHVYIRVTDQTWRLNIHEPIIWALFDFYSNLRFVTTINSTTVTEVDPEIRIEDKAKNISGNCA

SEQ ID NO: 195943 - protein, 2002 aa, Zea Mays
MDIAAPKITVPTKFRPDDVHETKLLLDLGNLVLRTEEIWDAYTSEEQDIYLNFNLVLSDVSAFLVDGDYHWNETSDEKNLLPVIDKCGIALKLQQGVGNREAVWQHRYLRLVGPFLYVFENLMSTTYKQWFSLRGKQVHQILEDTGALILLFDNDEGRKIWQNRLQGAIYRASGSAISSFPGVALPSEAHSFKGNFLDVADTEKLFVAGILDELKICFSCGYESNHKLKKILLAKESSLFEFRAVGGQVELSMKGGNLLIGTILGSLEIEDQYYYPGSPVPRFLARSFINSMQTQELPSLSRKNSAGPRNTPLMKNDSEENFFEASDDFDEFETPMHQKRTISDYFSTQKFLPTSVPSLQPPTFKRIPDLIPDTELQTGKFTLEGSGTFNSFVKAQIVIYDQHSPQYNSLDNRVVVTVATLSFFCHRPTVIAIMEFMNAINLANGSDTDKDKSTYPATVEDSAIEESKSDLESEPSIKPLLAKGKSRIVFHLTSSMAEAQILLMNENGDRLATLSQNNLSTDIKVFTSSFSIKAALGNLKISDDSLLSSHPYFWVCDMRNPGGRSFVEIDFSSYNVGDEDYCGYDYSLVGQLSEVRIVYLNRFVQEIISYFMGLVPKSSDAVVKLKDNKTNSEKWVSKTDMEGSPALKLDVSFSRPIIVMPRETNSNDFLELDVLYITVQNEFQWIGGDKNEMSTVHLDILTVTVRDINLVIGMNMVRGETIIQDVEGLSFELRRSLRDLRHQLPVVEAAIKVDVLKATLSNREYEIISECALSNFSETPHPVPTLDDPRYGTSTTPSHVSASSSESIHVLSEGAETWIANKFSVSINLVELSLHSGSTRDSPLASVQASGAWLFYKSNTRGENFMYATLKGFSVFDDREGTKDELRLAIGKSASVRDTSSVDGYDNPNELDSGERRIQKDLGLEPIPSMLILDAIFRKSSSSVSVCVQRPKFLVALDFLLAVIEFFVPSAQSLLSNDEDKDLLHMITPVVLNDQIYFQEHSTFSLSPQKPLIVDNERFDHFVYDGKGGKLYLLDSEGKILSSPCTESFIHVLGCKRLQFRNVTIVNGEYLDSCISLGDDSCYSASRNDHVYLVREDDGSLSTPSKEIRGDSVKNGSADISTEFIMELQAIGPELTFYSTSRNAGENLALSTKVIHAHTDAFCRLQMQHVQGQNQPTRRNTKMMCYQWMALKIRHPTNLLTNLVQVTNESYLLTNLNKSRFHGTVRMALVLSSHVSSPLDAPSPHQPTSAPTPRPVATALAAAAAASPNPGASCSFPSLSPQSASLTAGGVPSSSGGWPQASALLPPLVLPASQPSFRDVVFASLVPTSVERAKMVPRPTHPLVEKPWRSMQNEPPTKGVLALNTNIVRVKRPLSYKLVWQSGSPRTNIFHQKDLEDKISNIDQLCSVWLPVAPAGYVAMGCVASSGTAEPPLSSAFCLTASLVSSCNLRDCIALRDNTNMIFWRVDNAFGSFLPGDPASMSVDGNAYDLRHMLFDSADSSSKTVSRRQDSRNDFSQLERSELTSGRLFDAVASFKLIWSNSGTSSPKKLSIWRPMLSEGMFYFGDIAVNGYEPPNSTVVLRDTGEDTFLRAPEGFDLVGRIKKHRGTEGVSFWFPKAPSGFVALGCVASKSSPTKEDFSLLRCIRNDMVAGGQFSEESLWDSSNARTSEPFSLWTVDNDAGTFLVRSGYRKPPKRLALKLAGPPTSSSSDSIIVDAKIKTFSAVSFDDYGGMYSMQMVPLFGVSFDSVGLSYHGGPHHLNATVSLSFVARSYNDKYSSWEPFIEPTDAFLRYQFDMNTPGSPRQLRITSTQDLNLNISVSNTNMLSQAYASWNNISCGDELYKKETFSSTERPVLDVHQRRSYYVVPQNKLGQDIYVRTTENRGSLVTLLPSGDDRSIKVPALRDLSDSHLNGRSVKPYRLMITAILADAEVKDDEGLETGEYMTAVRLFSENHSISVQQQSARTCAAIGEHLSQNTRKVNWNEMFFFKVERVLYSRASCA

SEQ ID NO: 195944 - protein, 3530 aa, Zea Mays
MDIAAPKITVPTKFRPDDVHETKLLLDLGNLVLRTEEIWDAYTSEEQDIYLNFNLVLSDVSAFLVDGDYHWNETSDEKNLLPVIDKCGIALKLQQGVGNREAVWQHRYLRLVGPFLYVFENLMSTTYKQWFSLRGKQVHQILEDTGALILLFDNDEGRKIWQNRLQGAIYRASGSAISSFPGVALPSEAHSFKGNFLDVADTEKLFVAGILDELKICFSCGYESNHKLKKILLAKESSLFEFRAVGGQVELSMKGGNLLIGTILGSLEIEDQYYYPGSPVPRFLARSFINSMQTQELPSLSRKNSAGPRNTPLMKNDSEENFFEASDDFDEFETPMHQKRTISDYFSTQKFLPTSVPSLQPPTFKRIPDLIPDTELQTGKFTLEGSGTFNSFVKAQIVIYDQHSPQYNSLDNRVVVTVATLSFFCHRPTVIAIMEFMNAINLANGSDTDKDKSTYPATVEDSAIEESKSDLESEPSIKPLLAKGKSRIVFHLTSSMAEAQILLMNENGDRLATLSQNNLSTDIKVFTSSFSIKAALGNLKISDDSLLSSHPYFWVCDMRNPGGRSFVEIDFSSYNVGDEDYCGYDYSLVGQLSEVRIVYLNRFVQEIISYFMGLVPKSSDAVVKLKDNKTNSEKWVSKTDMEGSPALKLDVSFSRPIIVMPRETNSNDFLELDVLYITVQNEFQWIGGDKNEMSTVHLDILTVTVRDINLVIGMNMVRGETIIQDVEGLSFELRRSLRDLRHQLPVVEAAIKVDVLKATLSNREYEIISECALSNFSETPHPVPTLDDPRYGTSTTPSHVSASSSESIHVLSEGAETWIANKFSVSINLVELSLHSGSTRDSPLASVQASGAWLFYKSNTRGENFMYATLKGFSVFDDREGTKDELRLAIGKSASVRDTSSVDGYDNPNELDSGERRIQKDLGLEPIPSMLILDAIFRKSSSSVSVCVQRPKFLVALDFLLAVIEFFVPSAQSLLSNDEDKDLLHMITPVVLNDQIYFQEHSTFSLSPQKPLIVDNERFDHFVYDGKGGKLYLLDSEGKILSSPCTESFIHVLGCKRLQFRNVTIVNGEYLDSCISLGDDSCYSASRNDHVYLVREDDGSLSTPSKEIRGDSVKNGSADISTEFIMELQAIGPELTFYSTSRNAGENLALSTKVIHAHTDAFCRLQMQHVQGQNQPTRRNTKMMCYQWMALKIRHPTNLLTNLVQVTNESYLLTNLNKSRFHGTVRMALVLSSHVSSPLDAPSPHQPTSAPTPRPVATALAAAAAASPNPGASCSFPSLSPQSASLTAGGVPSSSGGWPQASALLPPLVLPASQPSFRDVVFASLVPTSVERAKMVPRPTHPLVEKPWRSMQNEPPTKGVLALNTNIVRVKRPLSYKLVWQSGSPRTNIFHQKDLEDKISNIDQLCSVWLPVAPAGYVAMGCVASSGTAEPPLSSAFCLTASLVSSCNLRDCIALRDNTNMIFWRVDNAFGSFLPGDPASMSVDGNAYDLRHMLFDSADSSSKTVSRRQDSRNDFSQLERSELTSGRLFDAVASFKLIWSNSGTSSPKKLSIWRPMLSEGMFYFGDIAVNGYEPPNSTVVLRDTGEDTFLRAPEGFDLVGRIKKHRGTEGVSFWFPKAPSGFVALGCVASKSSPTKEDFSLLRCIRNDMVAGGQFSEESLWDSSNARTSEPFSLWTVDNDAGTFLVRSGYRKPPKRLALKLAGPPTSSSSDSIIVDAKIKTFSAVSFDDYGGMMVPLFGVSFDSVGLSYHGGPHHLNATVSLSFVARSYNDKYSSWEPFIEPTDAFLRYQFDMNTPGSPRQLRITSTQDLNLNISVSNTNMLSQAYASWNNISCGDELYKKETFSSTERPVLDVHQRRSYYVVPQNKLGQDIYVRTTENRGSLVTLLPSGDDRSIKVPALRDLSDSHLNGRSVKPYRLMITAILADAEVKDDEGLETGEYMTAVRLFSENHSISVQQQSARTCAAIGEHLSQNTRKVNWNEMFFFKVERVDSYTLELLVLDAGKGQPVGIYSAPLEQVVQKLPPTSNPDSVKFDLALGDLMSTKTVEQETVKPSGKIRFAVLVSGRASVQQGNRASPESKTGYIQISPSKEGPWTSMKLNYAVPAACWRFGNCVIASEATVKEGNRYVSIRSLVSVTNTTNFIVDLRLKGRISQSARADEQGDSFGKEDQILIGTLEPNSTIPVPLSGLSHPLMPYMLQLRPAKHHDHENYSWSDVQERRSQTEFRKEEILDLCISDLYESENLLFCSQVDGTSNSCHGLWFCLSIEGKEIGKDVQMEPIYDWCIIIKSPLCLTYYLPIAAHYTVSSSHLDNEDSSCSLGTLSPGEAVKVHNVDPRNPLYLSLVPHGGWELMHEPVVISHPTQAPSKFINLRSSLSGRVVQILLEQSSDSDYLMARLIRIYVPYWISFSRLPTLTLRLIDISGRKEKRRLLSRSHLERGEKQLYDIKHDELVEGYTIASGLNFKGLGLLSSVGHGGRFGSVKELSPLGDMDGAVDLSAYDDDGKCMHILLCSKPSSYQAVPTKVIHVRPYITFTNRAGQDLYLKLSIEDEPKVLHAYDWRVSFMYSKGTTDKLQVRLVDTEWCQPLEIVKEDTIVIAMRKQGGTQKFVKAEIRGYEEGSRFLIVFRLGPAYGPIRIENRTSHTTISTCQSGLGEESWIQVKPHATRKYSWDDPYGQKVIDVSIDKGDDTCVLCVDLENPIGSSTSFREHGLMFTVDTSDIKILKFADYIRKEEVYGLPGSELTDHQGSSLKENETEPGAGPLELIVELGVVGISLIDHKPRELLYLHLQKVFVSYLTGYDFGTTSRFKLILGELQLDNQLPLSTMPVVLSTESRPDSNRSVFKANVAVSNVTSNGIQVYPHVYIRVTDQTWRLNIHEPIIWALFDFYSNLRFVTTINSTTVTEVDPEIRIELIDISEIRLKISLETAPSQRPRGVLGIWSPILSAVGNALKIQVHLRKVMHRSRFMRKSSIIPAITNRIKRDLIHNPLHLIFSVDFLGVTKSTLSSLSKGFAELSTDGQFLQLRSKQVWSRRITGVGDGLVQGTEAFAQGLAFGVSGVLRKPVESARQYGVIGIAPGIGRAFVGFIVQPLSGALDFFSLTVDGISASFMRCVNILSNKSVPQRIRDPRAIHRDGIVRDYDKFEAAGQMALYLAEASRYFACTDLFREPSKYAWSDYYEDHFILPSQRIALVTNKRVMLLQCLDLDKMDKKPSKILWDVPWEEVLSLELAKAGYQRPSHVIIHLKNFRRSENFVRLIKCNIDNEREPQALSLCCSIRKMWRSHQAAMKVIPLKVPSGQRHVYFVSDDDKKESHSLSRPLLSSGGTSTDVEQQFINNTVHFQKMWSSEPEIQSRCKLVAKQIADDGRVFSIWRPLCPNGYVSIGDIAHVGIHPPHFAAVYKNINGNFALPLGYDLVWRNCAEDYKSPVSIWLPRPPGGYVALGCVAVPSFKEPTLDCAFCVDERLAEDAAYEEQIIWASSDAYPWGCYIYQVQSASMQFMALRVPKEQSELRPKKILESFLQQASETQTSRA

SEQ ID NO: 195945 - protein, 3471 aa, Zea Mays
MDIAAPKITVPTKFRPDDVHETKLLLDLGNLVLRTEEIWDAYTSEEQDIYLNFNLVLSDVSAFLVDGDYHWNETSDEKNLLPVIDKCGIALKLQQGVGNREAVWQHRYLRLVGPFLYVFENLMSTTYKQWFSLRGKQVHQILEDTGALILLFDNDEGRKIWQNRLQGAIYRASGSAISSFPGVALPSEAHSFKGNFLDVADTEKLFVAGILDELKICFSCGYESNHKLKKILLAKESSLFEFRAVGGQVELSMKGGNLLIGTILGSLEIEDQYYYPGSPVPRFLARSFINSMQTQELPSLSRKNSAGPRNTPLMKNDSEENFFEASDDFDEFETPMHQKRTISDYFSTQKFLPTSVPSLQPPTFKRIPDLIPDTELQTGKFTLEGSGTFNSFVKAQIVIYDQHSPQYNSLDNRVVVTVATLSFFCHRPTVIAIMEFMNAINLANGSDTDKDKSTYPATVEDSAIEESKSDLESEPSIKPLLAKGKSRIVFHLTSSMAEAQILLMNENGDRLATLSQNNLSTDIKVFTSSFSIKAALGNLKISDDSLLSSHPYFWVCDMRNPGGRSFVEIDFSSYNVGDEDYCGYDYSLVGQLSEVRIVYLNRFVQEIISYFMGLVPKSSDAVVKLKDNKTNSEKWVSKTDMEGSPALKLDVSFSRPIIVMPRETNSNDFLELDVLYITVQNEFQWIGGDKNEMSTVHLDILTVTVRDINLVIGMNMVRGETIIQDVEGLSFELRRSLRDLRHQLPVVEAAIKVDVLKATLSNREYEIISECALSNFSETPHPVPTLDDPRYGTSTTPSHVSASSSESIHVLSEGAETWIANKFSVSINLVELSLHSGSTRDSPLASVQASGAWLFYKSNTRGENFMYATLKGFSVFDDREGTKDELRLAIGKSASVRDTSSVDGYDNPNELDSGERRIQKDLGLEPIPSMLILDAIFRKSSSSVSVCVQRPKFLVALDFLLAVIEFFVPSAQSLLSNDEDKDLLHMITPVVLNDQIYFQEHSTFSLSPQKPLIVDNERFDHFVYDGKGGKLYLLDSEGKILSSPCTESFIHVLGCKRLQFRNVTIVNGEYLDSCISLGDDSCYSASRNDHVYLVREDDGSLSTPSKEIRGDSVKNGSADISTEFIMELQAIGPELTFYSTSRNAGENLALSTKVIHAHTDAFCRLIMKGDSMEMNGNILGLKMESNGIRVIEPFDMVVKYSNASGKTNLHLLVSEIYMNFSFSILRLFLAVEEEISAFLRMSSKKISLVCYQFDKVATMQGNANDQVLSFWRPRAPSGYAIFGDYLTPMNEPPTKGVLALNTNIVRVKRPLSYKLVWQSGSPRTNIFHQKDLEDKISNIDQLCSVWLPVAPAGYVAMGCVASSGTAEPPLSSAFCLTASLVSSCNLRDCIALRDNTNMIFWRVDNAFGSFLPGDPASMSVDGNAYDLRHMLFDSADSSSKTVSRRQDSRNDFSQLERSELTSGRLFDAVASFKLIWSNSGTSSPKKLSIWRPMLSEGMFYFGDIAVNGYEPPNSTVVLRDTGEDTFLRAPEGFDLVGRIKKHRGTEGVSFWFPKAPSGFVALGCVASKSSPTKEDFSLLRCIRNDMVAGGQFSEESLWDSSNARTSEPFSLWTVDNDAGTFLVRSGYRKPPKRLALKLAGPPTSSSSDSIIVDAKIKTFSAVSFDDYGGMYSMQMVPLFGVSFDSVGLSYHGGPHHLNATVSLSFVARSYNDKYSSWEPFIEPTDAFLRYQFDMNTPGSPRQLRITSTQDLNLNISVSNTNMLSQAYASWNNISCGDELYKKETFSSTERPVLDVHQRRSYYVVPQNKLGQDIYVRTTENRGSLVTLLPSGDDRSIKVPALRDLSDSHLNGRSVKPYRLMITAILADAEVKDDEGLETGEYMTAVRLFSENHSISVQQQSARTCAAIGEHLSQNTRKVNWNEMFFFKVERVDSYTLELLVLDAGKGQPVGIYSAPLEQVVQKLPPTSNPDSVKFDLALGDLMSTKTVEQETVKPSGKIRFAVLVSGRASVQQGNRASPESKTGYIQISPSKEGPWTSMKLNYAVPAACWRFGNCVIASEATVKEGNRYVSIRSLVSVTNTTNFIVDLRLKGRISQSARADEQGDSFGKEDQILIGTLEPNSTIPVPLSGLSHPLMPYMLQLRPAKHHDHENYSWSDVQERRSQTEFRKEEILDLCISDLYESENLLFCSQVDGTSNSCHGLWFCLSIEGKEIGKDVQMEPIYDWCIIIKSPLCLTYYLPIAAHYTVSSSHLDNEDSSCSLGTLSPGEAVKVHNVDPRNPLYLSLVPHGGWELMHEPVVISHPTQAPSKFINLRSSLSGRVVQILLEQSSDSDYLMARLIRIYVPYWISFSRLPTLTLRLIDISGRKEKRRLLSRSHLERGEKQLYDIKHDELVEGYTIASGLNFKGLGLLSSVGHGGRFGSVKELSPLGDMDGAVDLSAYDDDGKCMHILLCSKPSSYQAVPTKVIHVRPYITFTNRAGQDLYLKLSIEDEPKVLHAYDWRVSFMYSKGTTDKLQVRLVDTEWCQPLEIVKEDTIVIAMRKQGGTQKFVKAEIRGYEEGSRFLIVFRLGPAYGPIRIENRTSHTTISTCQSGLGEESWIQVKPHATRKYSWDDPYGQKVIDVSIDKGDDTCVLCVDLENPIGSSTSFREHGLMFTVDTSDIKILKFADYIRKEEVYGLPGSELTDHQGSSLKENETEPGAGPLELIVELGVVGISLIDHKPRELLYLHLQKVFVSYLTGYDFGTTSRFKLILGELQLDNQLPLSTMPVVLSTESRPDSNRSVFKANVAVSNVTSNGIQVYPHVYIRVTDQTWRLNIHEPIIWALFDFYSNLRFVTTINSTTVTEVDPEIRIELIDISEIRLKISLETAPSQRPRGVLGIWSPILSAVGNALKIQVHLRKVMHRSRFMRKSSIIPAITNRIKRDLIHNPLHLIFSVDFLGVTKSTLSSLSKGFAELSTDGQFLQLRSKQVWSRRITGVGDGLVQGTEAFAQGLAFGVSGVLRKPVESARQYGVIGIAPGIGRAFVGFIVQPLSGALDFFSLTVDGISASFMRCVNILSNKSVPQRIRDPRAIHRDGIVRDYDKFEAAGQMALYLAEASRYFACTDLFREPSKYAWSDYYEDHFILPSQRIALVTNKRVMLLQCLDLDKMDKKPSKILWDVPWEEVLSLELAKAGYQRPSHVIIHLKNFRRSENFVRLIKCNIDNEREPQALSLCCSIRKMWRSHQAAMKVIPLKVPSGQRHVYFVSDDDKKESHSLSRPLLSSGGTSTDVEQQFINNTVHFQKMWSSEPEIQSRCKLVAKQIADDGRVFSIWRPLCPNGYVSIGDIAHVGIHPPHFAAVYKNINGNFALPLGYDLVWRNCAEDYKSPVSIWLPRPPGGYVALGCVAVPSFKEPTLDCAFCVDERLAEDAAYEEQIIWASSDAYPWGCYIYQVQSASMQFMALRVPKEQSELRPKKILESFLQQASETQTSRA

SEQ ID NO: 195946 - protein, 571 aa, Zea Mays
MHRSRFMRKSSIIPAITNRIKRDLIHNPLHLIFSVDFLGVTKSTLSSLSKGFAELSTDGQFLQLRSKQVWSRRITGVGDGLVQGTEAFAQGLAFGVSGVLRKPVESARQYGVIGIAPGIGRAFVGFIVQPLSGALDFFSLTVDGISASFMRCVNILSNKSVPQRIRDPRAIHRDGIVRDYDKFEAAGQMALYLAEASRYFACTDLFREPSKYAWSDYYEDHFILPSQRIALVTNKRVMLLQCLDLDKMDKKPSKILWDVPWEEVLSLELAKAGYQRPSHVIIHLKNFRRSENFVRLIKCNIDNEREPQALSLCCSIRKMWRSHQAAMKVIPLKVPSGQRHVYFVSDDDKKESHSLSRPLLSSGGTSTDVEQQFINNTVHFQKMWSSEPEIQSRCKLVAKQIADDGRVFSIWRPLCPNGYVSIGDIAHVGIHPPHFAAVYKNINGNFALPLGYDLVWRNCAEDYKSPVSIWLPRPPGGYVALGCVAVPSFKEPTLDCAFCVDERLAEDAAYEEQIIWASSDAYPWGCYIYQVQSASMQFMALRVPKEQSELRPKKILESFLQQASETQTSRA

SEQ ID NO: 195947 - protein, 243 aa, Zea Mays
MNFTSIEPSRPPVTQPCQGAATQPSQAAFTLTQPSQIAFTQPSLAAFAQPSRTAFRHPSLAAFPQPSQAAFAQPSQTIFTQPSKAAFTHPSEATFTQPSQAAFTQPSQANISQAICDEDDELRVLDPPAPTSVSKRAKNVGTGNSRTRINKRTQDRNVVEMMGRFLEMKEKQAEADERATTNANEDDFPIQTCIAIVDGMEELSDDEKVDAYDVFKDAQNRAIFMTAKDATRIKWLRKKIART

SEQ ID NO: 195948 - protein, 414 aa, Zea Mays
MFGRGSPRMNLIQAATMKKISPRSTTNKRKKRTSPKVGRLRANWNSGLEKGLVEILQDHNNDCYKGQNGWSSEAWNRIVKLFHEKFSYVTFTKCQIQDKEKELKRDYKALKEARQQSGVSWDERLCRIEAEEPIWNNLTTSNERLKKFRTKSFPLFEALGELYDGNIAKGTMNFTSIEPSRPPVTQPCQGAATQPSQAAFTLTQPSQIAFTQPSLAAFAQPSRTAFRHPSLAAFPQPSQAAFAQPSQTIFTQPSKAAFTHPSEATFTQPSQAAFTQPSQANISQAICDEDDELRVLDPPAPTSVSKRAKNVGTGNSRTRINKRTQDRNVVEMMGRFLEMKEKQAEADERATTNANEDDFPIQTCIAIVDGMEELSDDEKVDAYDVFKDAQNRAIFMTAKDATRIKWLRKKIART

SEQ ID NO: 195949 - protein, 426 aa, Zea Mays
MIIVNIVHDISRMFGRGSPRMNLIQAATMKKISPRSTTNKRKKRTSPKVGRLRANWNSGLEKGLVEILQDHNNDCYKGQNGWSSEAWNRIVKLFHEKFSYVTFTKCQIQDKEKELKRDYKALKEARQQSGVSWDERLCRIEAEEPIWNNLTTSNERLKKFRTKSFPLFEALGELYDGNIAKGTMNFTSIEPSRPPVTQPCQGAATQPSQAAFTLTQPSQIAFTQPSLAAFAQPSRTAFRHPSLAAFPQPSQAAFAQPSQTIFTQPSKAAFTHPSEATFTQPSQAAFTQPSQANISQAICDEDDELRVLDPPAPTSVSKRAKNVGTGNSRTRINKRTQDRNVVEMMGRFLEMKEKQAEADERATTNANEDDFPIQTCIAIVDGMEELSDDEKVDAYDVFKDAQNRAIFMTAKDATRIKWLRKKIART

SEQ ID NO: 195950 - protein, 63 aa, Zea Mays
MYICHVRLATQDIGISKFHGIDSGCTSSLWLIWKWLAMFLNSLPATTTTACTLHAFLKHKRQF

SEQ ID NO: 195951 - protein, 105 aa, Zea Mays
MDKNQGCTSSLWLIWKWLAMFLNSLPATTTTACTLHAFLKPGSMHDTSVLYNAMKVDNNFFQNPPKNKFYVVDAGYPNRVDYLASYKGKRYHLLEWHRGMEPKSL

SEQ ID NO: 195952 - protein, 610 aa, Zea Mays
MTRRVRRRTCREREGRVVRGAWCVVSARPEGEDDAAAVEVDWRALPDDTVLQLFARLNYRDRASMASACRAWRALGSSSCLWSTLDLRAHRYDREVASSLASRCGSLRRLRLRGHEAAEAVPALCAHGLREVVADGCRGLTDATLAVLAARHEDLQSLQIGPDPLERISSDALRHVALCCSQLRRLRLSGLREADADAVGALARCCPLLEDVAFLDCGTVDETALAGIHSLRFLSVAGCRNLKWATASTSWTQLSSLIALDVSRTDVSPSAVSRLISHAKTLKLICTLNCISVEEEQLHNPAVFSNSKGKVVLTINSDIFRSFETMFPIVDAKEHGVFHQCNWSHKDKIAGDITTWLEWILSQSLLRIAESNPQGMDGFWLQKGTTLLLRLLKSLQEDVQERAATALATFVVMDDETANVDPARSEAVMQNGGIRMLLDLARCSRESAQSEAAKAIANLSVNTKVAKAVADEGGITILTDLAKSMNRLVAEEAAGGLWNLSVGEDHKASIAVSGGIKALVDLIFRWPAGTDGVLERAAGALANLAADDKCSLEVAKAGGVHALVTLARSCKLDGALEQAVIKKISFVPRQSALLRFRSRSRSFSHGIRCR

SEQ ID NO: 195953 - protein, 922 aa, Zea Mays
MTRRVRRRTCREREGRVVRGAWCVVSARPEGEDDAAAVEVDWRALPDDTVLQLFARLNYRDRASMASACRAWRALGSSSCLWSTLDLRAHRYDREVASSLASRCGSLRRLRLRGHEAAEAVPALCAHGLREVVADGCRGLTDATLAVLAARHEDLQSLQIGPDPLERISSDALRHVALCCSQLRRLRLSGLREADADAVGALARCCPLLEDVAFLDCGTVDETALAGIHSLRFLSVAGCRNLKWATASTSWTQLSSLIALDVSRTDVSPSAVSRLISHAKTLKLICTLNCISVEEEQLHNPAVFSNSKGKVVLTINSDIFRSFETMFPIVDAKEHGVFHQCNWSHKDKIAGDITTWLEWILSQSLLRIAESNPQGMDGFWLQKGTTLLLRLLKSLQEDVQERAATALATFVVMDDETANVDPARSEAVMQNGGIRMLLDLARCSRESAQSEAAKAIANLSVNTKVAKAVADEGGITILTDLAKSMNRLVAEEAAGGLWNLSVGEDHKASIAVSGGIKALVDLIFRWPAGTDGVLERAAGALANLAADDKCSLEVAKAGGVHALVTLARSCKLDGALEQAARGLANLAAHGDNNDNNAAVGQEAGALEALVQLTGSQNEGVRQEAAGALWNLSFDDRNREAIAAVGGVEALVALVQQCLNASEGLQERAAGALWGLSVSEANSIAIGQGGGVAPLLTLARSEVEDVHETAAGALWNLAFYSGNALRIVEEGGVPVLVKICSSSGSKMARFMSALALAYMFDGRMDEVALVGASSASSSKSVNIEGARRIAFKHIETFVLTFSDPQMFSTAAASSAPAALSHVAEAVFIQEAGHLRCSRSEIGRFVVMLRNPSPILRACAAFALLQFTIPGGRHAVHHAGLLQEAGAGRVLRPAAAATTASIEAKIFARIVLRNLEHHQSGTST

SEQ ID NO: 195954 - protein, 816 aa, Zea Mays
MTRRVRRRTCREREGRVVRGAWCVVSARPEGEDDAAAVEVDWRALPDDTVLQLFARLNYRDRASMASACRAWRALGSSSCLWSTLDLRAHRYDREVASSLASRCGSLRRLRLRGHEAAEAVPALCAHGLREVVADGCRGLTDATLAVLAARHEDLQSLQIGPDPLERISSDALRHVALCCSQLRRLRLSGLREADADAVGALARCCPLLEDVAFLDCGTVDETALAGIHSLRFLSVAGCRNLKWATASTSWTQLSSLIALDVSRTDVSPSAVSRLISHAKTLKLICTLNCISVEEEQLHNPAVFSNSKGKVVLTINSDIFRSFETMFPIVDAKEHGVFHQCNWSHKDKIAGDITTWLEWILSQSLLRIAESNPQGMDGFWLQKGTTLLLRLLKSLQEDVQERAATALATFVVMDDETANVDPARSEAVMQNGGIRMLLDLARCSRESAQSEAAKAIANLSVNTKVAKAVADEGGITILTDLAKSMNRLVAEEAAGGLWNLSVGEDHKASIAVSGGIKALVDLIFRWPAGTDGVLERAAGALANLAADDKCSLEVAKAGGVHALVTLARSCKLDGALEQVALVQQCLNASEGLQERAAGALWGLSVSEANSIAIGQGGGVAPLLTLARSEVEDVHETAAGALWNLAFYSGNALRIVEEGGVPVLVKICSSSGSKMARFMSALALAYMFDGRMDEVALVGASSASSSKSVNIEGARRIAFKHIETFVLTFSDPQMFSTAAASSAPAALSHVAEAVFIQEAGHLRCSRSEIGRFVVMLRNPSPILRACAAFALLQVCFLYPFSTDNAVYLVALSRGIIV

SEQ ID NO: 195955 - protein, 873 aa, Zea Mays
MTRRVRRRTCREREGRVVRGAWCVVSARPEGEDDAAAVEVDWRALPDDTVLQLFARLNYRDRASMASACRAWRALGSSSCLWSTLDLRAHRYDREVASSLASRCGSLRRLRLRGHEAAEAVPALCAHGLREVVADGCRGLTDATLAVLAARHEDLQSLQIGPDPLERISSDALRHVALCCSQLRRLRLSGLREADADAVGALARCCPLLEDVAFLDCGTVDETALAGIHSLRFLSVAGCRNLKWATASTSWTQLSSLIALDVSRTDVSPSAVSRLISHAKTLKLICTLNCISVEEEQLHNPAVFSNSKGKVVLTINSDIFRSFETMFPIVDAKEHGVFHQCNWSHKDKIAGDITTWLEWILSQSLLRIAESNPQGMDGFWLQKGTTLLLRLLKSLQEDVQERAATALATFVVMDDETANVDPARSEAVMQNGGIRMLLDLARCSRESAQSEAAKAIANLSVNTKVAKAVADEGGITILTDLAKSMNRLVAEEAAGGLWNLSVGEDHKASIAVSGGIKALVDLIFRWPAGTDGVLERAAGALANLAADDKCSLEVAKAGGVHALVTLARSCKLDGALEQAARGLANLAAHGDNNDNNAAVGQEAGALEALVQLTGSQNEGVRQEAAGALWNLSFDDRNREAIAAVGGVEALVALVQQCLNASEGLQERAAGALWGLSVSEANSIAIGQGGGVAPLLTLARSEVEDVHETAAGALWNLAFYSGNALRIVEEGGVPVLVKICSSSGSKMARFMSALALAYMFDGRMDEVALVGASSASSSKSVNIEGARRIAFKHIETFVLTFSDPQMFSTAAASSAPAALSHVAEAVFIQEAGHLRCSRSEIGRFVVMLRNPSPILRACAAFALLQAMGLTRRKS

SEQ ID NO: 195956 - protein, 654 aa, Zea Mays
MTRRVRRRTCREREGRVVRGAWCVVSARPEGEDDAAAVEVDWRALPDDTVLQLFARLNYRDRASMASACRAWRALGSSSCLWSTLDLRAHRYDREVASSLASRCGSLRRLRLRGHEAAEAVPALCAHGLREVVADGCRGLTDATLAVLAARHEDLQSLQIGPDPLERISSDALRHVALCCSQLRRLRLSGLREADADAVGALARCCPLLEDVAFLDCGTVDETALAGIHSLRFLSVAGCRNLKWATASTSWTQLSSLIALDVSRTDVSPSAVSRLISHAKTLKLICTLNCISVEEEQLHNPAVFSNSKGKVVLTINSDIFRSFETMFPIVDAKEHGVFHQCNWSHKDKIAGDITTWLEWILSQSLLRIAESNPQGMDGFWLQKGTTLLLRLLKSLQEDVQERAATALATFVVMDDETANVDPARSEAVMQNGGIRMLLDLARCSRESAQSEAAKAIANLSVNTKVAKAVADEGGITILTDLAKSMNRLVAEEAAGGLWNLSVGEDHKASIAVSGGIKALVDLIFRWPAGTDGVLERAAGALANLAADDKCSLEVAKAGGVHALVTLARSCKLDGALEQAARGLANLAAHGDNNDNNAAVGQEAGALEALVQLTGSQNEGVRQEAAGALWNLSFDDRNREAIAAVGGVEALCNNV

SEQ ID NO: 195957 - protein, 873 aa, Zea Mays
MTRRVRRRTCREREGRVVRGAWCVVSARPEGEDDAAAVEVDWRALPDDTVLQLFARLNYRDRASMASACRAWRALGSSSCLWSTLDLRAHRYDREVASSLASRCGSLRRLRLRGHEAAEAVPALCAHGLREVVADGCRGLTDATLAVLAARHEDLQSLQIGPDPLERISSDALRHVALCCSQLRRLRLSGLREADADAVGALARCCPLLEDVAFLDCGTVDETALAGIHSLRFLSVAGCRNLKWATASTSWTQLSSLIALDVSRTDVSPSAVSRLISHAKTLKLICTLNCISVEEEQLHNPAVFSNSKGKVVLTINSDIFRSFETMFPIVDAKEHGVFHQCNWSHKDKIAGDITTWLEWILSQSLLRIAESNPQGMDGFWLQKGTTLLLRLLKSLQEDVQERAATALATFVVMDDETANVDPARSEAVMQNGGIRMLLDLARCSRESAQSEAAKAIANLSVNTKVAKAVADEGGITILTDLAKSMNRLVAEEAAGGLWNLSVGEDHKASIAVSGGIKALVDLIFRWPAGTDGVLERAAGALANLAADDKCSLEVAKAGGVHALVTLARSCKLDGALEQAARGLANLAAHGDNNDNNAAVGQEAGALEALVQLTGSQNEGVRQEAAGALWNLSFDDRNREAIAAVGGVEALVALVQQCLNASEGLQERAAGALWGLSVSEANSIAIGQGGGVAPLLTLARSEVEDVHETAAGALWNLAFYSGNALRIVEEGGVPVLVKICSSSGSKMARFMSALALAYMFDGRMDEVALVGASSASSSKSVNIEGARRIAFKHIETFVLTFSDPQMFSTAAASSAPAALSHVAEAVFIQEAGHLRCSRSEIGRFVVMLRNPSPILRACAAFALLQGAANSSEQA

SEQ ID NO: 195958 - protein, 900 aa, Zea Mays
MTRRVRRRTCREREGRVVRGAWCVVSARPEGEDDAAAVEVDWRALPDDTVLQLFARLNYRDRASMASACRAWRALGSSSCLWSTLDLRAHRYDREVASSLASRCGSLRRLRLRGHEAAEAVPALCAHGLREVVADGCRGLTDATLAVLAARHEDLQSLQIGPDPLERISSDALRHVALCCSQLRRLRLSGLREADADAVGALARCCPLLEDVAFLDCGTVDETALAGIHSLRFLSVAGCRNLKWATASTSWTQLSSLIALDVSRTDVSPSAVSRLISHAKTLKLICTLNCISVEEEQLHNPAVFSNSKGKVVLTINSDIFRSFETMFPIVDAKEHGVFHQCNWSHKDKIAGDITTWLEWILSQSLLRIAESNPQGMDGFWLQKGTTLLLRLLKSLQEDVQERAATALATFVVMDDETANVDPARSEAVMQNGGIRMLLDLARCSRESAQSEAAKAIANLSVNTKVAKAVADEGGITILTDLAKSMNRLVAEEAAGGLWNLSVGEDHKASIAVSGGIKALVDLIFRWPAGTDGVLERAAGALANLAADDKCSLEVAKAGGVHALVTLARSCKLDGALEQAARGLANLAAHGDNNDNNAAVGQEAGALEALVQLTGSQNEGVRQEAAGALWNLSFDDRNREAIAAVGGVEALVALVQQCLNASEGLQERAAGALWGLSVSEANSIAIGQGGGVAPLLTLARSEVEDVHETAAGALWNLAFYSGSKMARFMSALALAYMFDGRMDEVALVGASSASSSKSVNIEGARRIAFKHIETFVLTFSDPQMFSTAAASSAPAALSHVAEAVFIQEAGHLRCSRSEIGRFVVMLRNPSPILRACAAFALLQFTIPGGRHAVHHAGLLQEAGAGRVLRPAAAATTASIEAKIFARIVLRNLEHHQSGTST

SEQ ID NO: 195959 - protein, 851 aa, Zea Mays
MTRRVRRRTCREREGRVVRGAWCVVSARPEGEDDAAAVEVDWRALPDDTVLQLFARLNYRDRASMASACRAWRALGSSSCLWSTLDLRAHRYDREVASSLASRCGSLRRLRLRGHEAAEAVPALCAHGLREVVADGCRGLTDATLAVLAARHEDLQSLQIGPDPLERISSDALRHVALCCSQLRRLRLSGLREADADAVGALARCCPLLEDVAFLDCGTVDETALAGIHSLRFLSVAGCRNLKWATASTSWTQLSSLIALDVSRTDVSPSAVSRLISHAKTLKLICTLNCISVEEEQLHNPAVFSNSKGKVVLTINSDIFRSFETMFPIVDAKEHGVFHQCNWSHKDKIAGDITTWLEWILSQSLLRIAESNPQGMDGFWLQKGTTLLLRLLKSLQEDVQERAATALATFVVMDDETANVDPARSEAVMQNGGIRMLLDLARCSRESAQSEAAKAIANLSVNTKVAKAVADEGGITILTDLAKSMNRLVAEEAAGGLWNLSVGEDHKAARGLANLAAHGDNNDNNAAVGQEAGALEALVQLTGSQNEGVRQEAAGALWNLSFDDRNREAIAAVGGVEALVALVQQCLNASEGLQERAAGALWGLSVSEANSIAIGQGGGVAPLLTLARSEVEDVHETAAGALWNLAFYSGNALRIVEEGGVPVLVKICSSSGSKMARFMSALALAYMFDGRMDEVALVGASSASSSKSVNIEGARRIAFKHIETFVLTFSDPQMFSTAAASSAPAALSHVAEAVFIQEAGHLRCSRSEIGRFVVMLRNPSPILRACAAFALLQFTIPGGRHAVHHAGLLQEAGAGRVLRPAAAATTASIEAKIFARIVLRNLEHHQSGTST

SEQ ID NO: 195960 - protein, 878 aa, Zea Mays
MTRRVRRRTCREREGRVVRGAWCVVSARPEGEDDAAAVEVDWRALPDDTVLQLFARLNYRDRASMASACRAWRALGSSSCLWSTLDLRAHRYDREVASSLASRCGSLRRLRLRGHEAAEAVPALCAHGLREVVADGCRGLTDATLAVLAARHEDLQSLQIGPDPLERISSDALRHVALCCSQLRRLRLSGLREADADAVGALARCCPLLEDVAFLDCGTVDETALAGIHSLRFLSVAGCRNLKWATASTSWTQLSSLIALDVSRTDVSPSAVSRLISHAKTLKLICTLNCISVEEEQLHNPAVFSNSKGKVVLTINSDIFRSFETMFPIVDAKEHGVFHQCNWSHKDKIAGDITTWLEWILSQSLLRIAESNPQGMDGFWLQKGTTLLLRLLKSLQEDVQERAATALATFVVMDDETANVDPARSEAVMQNGGIRMLLDLARCSRESAQSEAAKAIANLSVNTKVAKAVADEGGITILTDLAKSMNRLVAEEAAGGLWNLSVGEDHKASIAVSGGIKALVDLIFRWPAGTDGVLAARGLANLAAHGDNNDNNAAVGQEAGALEALVQLTGSQNEGVRQEAAGALWNLSFDDRNREAIAAVGGVEALVALVQQCLNASEGLQERAAGALWGLSVSEANSIAIGQGGGVAPLLTLARSEVEDVHETAAGALWNLAFYSGNALRIVEEGGVPVLVKICSSSGSKMARFMSALALAYMFDGRMDEVALVGASSASSSKSVNIEGARRIAFKHIETFVLTFSDPQMFSTAAASSAPAALSHVAEAVFIQEAGHLRCSRSEIGRFVVMLRNPSPILRACAAFALLQFTIPGGRHAVHHAGLLQEAGAGRVLRPAAAATTASIEAKIFARIVLRNLEHHQSGTST

SEQ ID NO: 195961 - protein, 893 aa, Zea Mays
MTRRVRRRTCREREGRVVRGAWCVVSARPEGEDDAAAVEVDWRALPDDTVLQLFARLNYRDRASMASACRAWRALGSSSCLWSTLDLRAHRYDREVASSLASRCGSLRRLRLRGHEAAEAVPALCAHGLREVVADGCRGLTDATLAVLAARHEDLQSLQIGPDPLERISSDALRHVALCCSQLRRLRLSGLREADADAVGALARCCPLLEDVAFLDCGTVDETALAGIHSLRFLSVAGCRNLKWATASTSWTQLSSLIALDVSRTDVSPSAVSRLISHAKTLKLICTLNCISVEEEQLHNPAVFSNSKGKVVLTINSDIFRSFETMFPIVDAKEHGVFHQCNWSHKDKIAGDITTWLEWILSQSLLRIAESNPQGMDGFWLQKGTTLLLRLLKSLQEDVQERAATALATFVVMDDETANVDPARSEAVMQNGGIRMLLDLARCSRESAQSEAAKAIANLSVNTKVAKAVADEGGITILTDLAKSMNRLVAEEAAGGLWNLSVGEDHKAARGLANLAAHGDNNDNNAAVGQEAGALEALVQLTGSQNEGVRQEAAGALWNLSFDDRNREAIAAVGGVEALVALVQQCLNASEGLQERAAGALWGLSVSEANSIAIGQGGGVAPLLTLARSEVEDVHETAAGALWNLAFYSGNALRIVEEGGVPVLVKICSSSGSKMARFMSALALAYMFDGRMDEVALVGASSASSSKSVNIEGARRIAFKHIETFVLTFSDPQMFSTAAASSAPAALSHVAEAVFIQEAGHLRCSRSEIGRFVVMLRNPSPILRACAAFALLQEVGMRCTTQVSCRKQEQVECYAQRRQRQQLLLKPKSLPGLSSGTWNTISQGRQHEHPAEVHPPTNKGFCNDGLLGRCRMDYFGFRSLFTSQQQFFCADSD

SEQ ID NO: 195962 - protein, 785 aa, Zea Mays
MGCTASKVEQEDTVRRCKERRRHMKDAVAARQLLASAHADYLRSLRVTAAALSRFAQGHPSLAVSHHTAPVLLSAAAPPPAPIAVHAFPTPAPSTAASSSLPPPTPLVQRPHPPPQPPTAAAMAAPQPALARAPRPRRLRVPHILSDSSVTSPAQPSFRKQPPVGTPSSSSAWDWENFYPPSPPDSEFFDRRKAEVEQASRLRELEEEEKARAYLHHHTHYNLKEEDEAAEDDDGEVDHEPDGMHSGGWEDDEHYASTTTSETRSDEEGEMGDRSECGFAARSECGFVARSEYGGTAPSEYAAVPLPLRRDERSEAGDFSTVMAATEMRMVVRHRTLAEIVAAIEEYFVKAADSGNDVSELLEASRAQLDRNFRQLKKTGYHSNSVLSAFSSTWTSKPPLAVRYKLDTNALEMESTEGKSHGSTLERLLAWEKKLYEEVKARESVKIEHEKKLSTLQSLEYKGRDSAKLDKTKASINKLQSLIVVTSQAATTTSSAIVRVRDNELAPQLVQLCFALLGMWRSMNHFHEIQNEIVQQVRGLVDSSMAESTSDLHRLATRDLEAAVAAWHSNFDRLIKYQRDYIRSLYGWLKLTLCQVDSCVPQGAHASMISRELTSFCDEWKQALDRLPDAVASEAIKSFVNVVHVIYAKQAEEMKVKKRAEAYSKELEKKTNSLRSVEKKYYQSYSMVGLGLPGSGGHGGIDSHAYDARDPLAEKKTEIAQCRRKVEDEMARHAKAIEVTRSMTLNNIQTGLPGIFQAIAGFSGTVVEALDVVCRRAGSVRSPGC

SEQ ID NO: 195963 - protein, 202 aa, Zea Mays
MENPFSVKVLQVFTGFGVGCGVGIGVGRPIYLGMIPGLQQVMSATRGATDAFSGVTRHVNSALRTAGLKNIEAGIGCGVGIGHGFGIGIALKPRVLHGIQSSVGDPLFQNDTKVDFRDAVRTKTFLNPGNLHGMDSVLQLVLKHQKVIEELQEENENLRQILIEELKISPTKLQIGHKNGVKAYYPCSDCFECRRRSRRTTR

SEQ ID NO: 195964 - protein, 285 aa, Zea Mays
MENPFSVKVLQVFTGFGVGCGVGIGVGRPIYLGMIPGLQQVMSATRGATDAFSGVTRHVNSALRTAGLKNIEAGIGCGVGIGHGFGIGIALKPRVLHGIQSSVGEIMSKWTSKLKDTPETPSSSNPMVHSLSSNEQTHNSMSMDLEAKDAESNLNQTSSYEMSKVQSTQPEALTVSRTKKVIANFLQDPLFQNDTKVDFRDAVRTKTFLNPGNLHGMDSVLQLVLKHQKVIEELQEENENLRQILIEELKISPTKLQIGHKNGVKAYYPCSDCFECRRRSRRTTR

SEQ ID NO: 195965 - protein, 179 aa, Zea Mays
MSKWTSKLKDTPETPSSSNPMVHSLSSNEQTHNSMSMDLEAKDAESNLNQTSSYEMSKVQSTQPEALTVSRTKKVIANFLQDPLFQNDTKVDFRDAVRTKTFLNPGNLHGMDSVLQLVLKHQKVIEELQEENENLRQILIEELKISPTKLQIGHKNGVKAYYPCSDCFECRRRSRRTTR

SEQ ID NO: 195966 - protein, 244 aa, Zea Mays
MIPGLQQVMSATRGATDAFSGVTRHVNSALRTAGLKNIEAGIGCGVGIGHGFGIGIALKPRVLHGIQSSVGEIMSKWTSKLKDTPETPSSSNPMVHSLSSNEQTHNSMSMDLEAKDAESNLNQTSSYEMSKVQSTQPEALTVSRTKKVIANFLQDPLFQNDTKVDFRDAPGNLHGMDSVLQLVLKHQKVIEELQEENENLRQILIEELKISPTKLQIGHKNGVKAYYPCSDCFECRRRSRRTTR

SEQ ID NO: 195967 - protein, 815 aa, Zea Mays
MPRQSDPRSSPSTMDSGGGSSADMELAWHLLTVLIRLGRPAAASELTAAATVAAPSISTRVVKQMCCLPRSPLWISDDGVVTPSETAILAFLRFMGWDIPGPKVSLWPSEVRRWSGKVSIRYERKRQGSDARCFSAKRRRLLASAADLVEQTEHQSWQLVAQTCTTAATGEVHLEVMQKLQDRLPSLGTFLGDLQHKLDQPLRGDDDLAIGNMSLALVPTGFSDCPCSVNLPPLDAEKLRNINMEVDGRSNKISESETVSLLNNRVEDSDDLQKECALPMASHDVLVGECKNGADEYLNPVCKSPGSPIDHNMKTATSIEAFDMILNQADALQYNCLNDGHHQNAPSCVQKKNPLRASAYAEVCTDKTAQILFQPSVVNKVGSIAPQMMINVQSETLPQETTRQDGMNMKHLNIVPENRDIRYLNHGEQSLNKAEVNVSKNGRDKLTVKQKEKCKKNEQPKEDKDNTAKTQKGHVAPKPLPAFKGFVIEEEEGSGGYGTVYRAQRTKDGKTFAIKCPHPNAHSHHVNNELKILERFGGKNCVIKYECSLKSGDLDCFVLEHVEHDRPEILKKDITLLELQWYGHCLFRALASLHKQGVVHRDVKPGNFLFCRKLKKGYLIDFNLANDLHQKFLKNCKSDATSSGKDTTSQSLSTISPVVHVKEPVADSKQPLPLKRKRSSRSPVDSARAPMVDSKSRHGNQTADVSGITSAKDPTSTKTSLDRLKQPMPYKGRKELMNFLHETMQSPNKSTMPTPVSQRKRVAAPFGSVDRKLFILTPMPLRSGGSAVAGAGMFNNKGHGKHRREGPCVGTKGSP

SEQ ID NO: 195968 - protein, 757 aa, Zea Mays
MPRQSDPRSSPSTMDSGGGSSADMELAWHLLTVLIRLGRPAAASELTAAATVAAPSISTRVVKQMCCLPRSPLWISDDGVVTPSETAILAFLRFMGWDIPGPKVSLWPSEVRRWSGKVSIRYERKRQGSDARCFSAKRRRLLASAADLVEQTEHQSWQLVAQTCTTAATGEVHLEVMQKLQDRLPSLGTFLGDLQHKLDQPLRGDDDLAIGNMSLALVPTGFSDCPCSVNLPPLDAEKLRNINMEVDGRSNKISESETVSLLNNRVEDSDDLQKECALPMASHDVLVGECKNGADEYLNPVCKSPGSPIDHNMKTATSIEAFDMILNQADALQYNCLNDGHHQNAPSCVQKKNPLRASAYAEVCTDKTAQILFQPSVVNKVGSIAPQMMINVQSETLPQETTRQDGMNMKHLNIVPENRDIRYLNHGEQSLNKAEVNVSKNGRDKLTVKQKEKCKKNEQPKEDKDNTAKTQKGHVAPKPLPAFKGFVIEEEEGSGGYGTVYRAQRTKDGKTFAIKCPHPNAHSHHVNNELKILERFGGKNCVIKYECSLKSGDLDCFVLEHVEHDRPEILKKDITLLELQWYGHCLFRALASLHKQGVVHRDVKPGNFLFCRKLKKGYLIDFNLANDLHQKFLKNCKSDATSSGKDTTSQSLSTISPVVHVKEPVADSKQPLPLKRKRSSRSPVDSARAPMVDSKSRHGNQTADVSVLLLVLACSTTKDMENIEEKVHVLELKVSELQRFSLGPSTRAVKLMSGRLG

SEQ ID NO: 195969 - protein, 266 aa, Zea Mays
MTAGHVLLGAVPFPSDVLRLKTLGVCGVVTLNESYERLVPTSLYEAHGIENLVLPTRDYLYAPSFVNLCEAADFIHRNASCGKLTYVHCKAGRGRSTTVVICYLVQYKNMTPAEAYEHVRLRRPRVLLASAQWQAVQEFYQLTVKKTGRSTWLDNPLIKPPLFLATRKLVAFDDSAFVMVSESDLEGYNADALALNMGSRLWEISLIYRVQFASKTAFAGFSYLWLRCRACKEALPENLGRDSCSLEVDQLTTGHPCLLQGVVVNP

SEQ ID NO: 195970 - protein, 409 aa, Zea Mays
MKDMRDALGSQMFFSGEHLHVRCSSHVLNIMVQAGLKVIPNAVGKVRDIIKVVISTPSRLQIFNSIVQILGLKSKSGLILDVPHRWNATYDMLNEALKYKAALNRYAVEQHHECPTEEDWSKAEALHGFLQEFSDATKAFSADRHPIAHLFLKMLLVIRGVLLDENYNSNELLNEMANVMYTKFQKYWINPNIVLLIAPVLDPSMKTEFVKFYFYTVGDNVDMKMRELKRYLKKYYLEYEKIMRSHSLHVFITPDDQMRSDPSTSSPLCGKRRVEHAFAQFASQNANARPERTEMDTYLEDPRILIKPDECFNVLGWWKKNSDAYPILSLMARDFLAIPVSTVSSESAFSAAGRVLGKNRTSLSPETLEALVCAKDWLIGFNDEKEGKLSYKSRLLYDNELNCLRHFTR

SEQ ID NO: 195971 - protein, 529 aa, Zea Mays
MINYCQPSFRLVGRQTVRSDCMLLYEEEKLQLIEQFTKLKSHVSLTADLWSSNQNLGYLGVTAHFISEDFELHKKIIAFKKISFPHTSYAVQDGITSCLLEWGLVGDLFTLTLDNASVNNRAMKDMRDALGSQMFFSGEHLHVRCSSHVLNIMVQAGLKVIPNAVGKVRDIIKVVISTPSRLQIFNSIVQILGLKSKSGLILDVPHRWNATYDMLNEALKYKAALNRYAVEQHHECPTEEDWSKAEALHGFLQEFSDATKAFSADRHPIAHLFLKMLLVIRGVLLDENYNSNELLNEMANVMYTKFQKYWINPNIVLLIAPVLDPSMKTEFVKFYFYTVGDNVDMKMRELKRYLKKYYLEYEKIMRSHSLHVFITPDDQMRSDPSTSSPLCGKRRVEHAFAQFASQNANARPERTEMDTYLEDPRILIKPDECFNVLGWWKKNSDAYPILSLMARDFLAIPVSTVSSESAFSAAGRVLGKNRTSLSPETLEALVCAKDWLIGFNDEKEGEPMTGKRMFDSDDEEYDWEI

SEQ ID NO: 195972 - protein, 526 aa, Zea Mays
MERVSSAPEMDEAASTDQSSRLTKRRAKVWDYVDTEVVDGKEKAVCKYCKVHLSSAAGKAHFISEDFELHKKIIAFKKISFPHTSYAVQDGITSCLLEWGLVGDLFTLTLDNASVNNRAMKDMRDALGSQMFFSGEHLHVRCSSHVLNIMVQAGLKVIPNAVGKVRDIIKVVISTPSRLQIFNSIVQILGLKSKSGLILDVPHRWNATYDMLNEALKYKAALNRYAVEQHHECPTEEDWSKAEALHGFLQEFSDATKAFSADRHPIAHLFLKMLLVIRGVLLDENYNSNELLNEMANVMYTKFQKYWINPNIVLLIAPVLDPSMKTEFVKFYFYTVGDNVDMKMRELKRYLKKYYLEYEKIMRSHSLHVFITPDDQMRSDPSTSSPLCGKRRVEHAFAQFASQNANARPERTEMDTYLEDPRILIKPDECFNVLGWWKKNSDAYPILSLMARDFLAIPVSTVSSESAFSAAGRVLGKNRTSLSPETLEALVCAKDWLIGFNDEKEGEPMTGKRMFDSDDEEYDWEI

SEQ ID NO: 195973 - protein, 472 aa, Zea Mays
MINYCQPSFRLVGRQTVRSDCMLLYEEEKLQLIEQFTKLKSHVSLTADLWSSNQNLGYLGVTAHFISEDFELHKKIIAFKKISFPHTSYAVQDGITSCLLEWGLVGDLFTLTLDNASVNNRAMKDMRDALGSQMFFSGEHLHVRCSSHVLNIMVQAGLKVIPNAVGKVRDIIKVVISTPSRLQIFNSIVQILGLKSKSGLILDVPHRWNATYDMLNEALKYKAALNRYAVEQHHECPTEEDWSKAEALHGFLQEFSDATKAFSADRHPIAHLFLKMLLVIRVGDNVDMKMRELKRYLKKYYLEYEKIMRSHSLHVFITPDDQMRSDPSTSSPLCGKRRVEHAFAQFASQNANARPERTEMDTYLEDPRILIKPDECFNVLGWWKKNSDAYPILSLMARDFLAIPVSTVSSESAFSAAGRVLGKNRTSLSPETLEALVCAKDWLIGFNDEKEGEPMTGKRMFDSDDEEYDWEI

SEQ ID NO: 195974 - protein, 172 aa, Zea Mays
MSRRKRRSSLFDMVPDESMDLPPLPGSQEPETSMLNQPPLPPAVEEEVESMESDTSAVAESSGASALMPESLQPTYPMIVPAYFSPFLQFSVPFWPNQEDGGDLPQETHEIVKPVAVHSQNPINVDELVGMSKLSIWEHGQETVSTSLSLNLLGGQNRQSAFHANPQTRAQA

SEQ ID NO: 195975 - protein, 105 aa, Zea Mays
MWLAAEHLAFHLQFSAALEGSFCFPGDADAAMPTPNATGTGSERGLYFSRGHHLQRGKLMVALTASATMAACLPEGFSSVFCSALPWEQGAAAPPGPGHPARQSA

SEQ ID NO: 195976 - protein, 238 aa, Zea Mays
MQVKQKVYEFYKGTVERVTAPRTVSAFLEKGVLSVPEFILAGDNLVAKCPTWSWEAGDPSKRKPYLPANKQFLVTRNVPCLRRAISVEEEYDAAGAEVVLDEDGEGWLATHGVQASKTEEEEDIPSMDTLDIGRSDGIKSIPSYFSGGKDEEEEDIPDMDTYEDTGDNLAAAEPSYFIAEEPEDDNILHTRTYDVSITYDKYYQTPRVWLTGYDESRMPLMPELVFEDISQDHARKTL

SEQ ID NO: 195977 - protein, 307 aa, Zea Mays
MQVKQKVYEFYKGTVERVTAPRTVSAFLEKGVLSVPEFILAGDNLVAKCPTWSWEAGDPSKRKPYLPANKQFLVTRNVPCLRRAISVEEEYDAAGAEVVLDEDGEGWLATHGVQEEEEDIPSMDTLDIGRSDGIKSIPSYFSGGKDEEEEDIPDMDTYEDTGDNLAAAEPSYFIAEEPEDDNILHTRTYDVSITYDKYYQTPRVWLTGYDESRMPLMPELVFEDISQDHARKTVTIEDHPHLLAGKHASVHPCKHAAVMKKIIDVPMSGGVEPEVDKYLFIFLKFIATVIPTIEYDYTMDVDLGSTS

SEQ ID NO: 195978 - protein, 58 aa, Zea Mays
MSVTSLADSNGTPAPSPAGHGVPRRLSLASIGAHTVAPSWGETTKYSRRGTLISLSTN

SEQ ID NO: 195979 - protein, 767 aa, Zea Mays
MDHDDTDFQSQNFQLAGVGSSKFPSGLRPFALPKLDIEDQLQGHLRFDNLIDSEAFFSVQGHENSWIEVLSTGSSVVDFSSSAAESCSISKTNNVWSEATSTESVEMLLKSVGGNETTGNMDSNAHLQLIGMDSQTDQSSVHPKSSTSPTDSTVVPTEKDQSWSTHSRMTADLSNTESQLEHFVPFLLDKKAAQAADSVAEKCLTGEKLSSSNNTPGSCPTVGNYFGAGHDDNSLDKFNVPSAEVDSKKLNNESFPELAPLQNIYTDSYHFKKDIKESEAVVTPQDSKFCHINENKVEGGLQELQNLSCAGQSLGAVNLSSPPSNETLLSKSSDGLLEAITNPVKMLHRSDDTCHKVNITLQPSFLAVQHGTEGLKSSVHRSNELVVKEFSIGSNSLISHQSEADPRNSNPHPVSSVSPKSKITDATCVPEETNNTETNSTNTCYTYDESKHVVLEYNQGSVDKLKSGDMGEKATGEEIPAVSGSIEQMIENYHEENATGTSNNKVGLSDSIAPENCAADTLNASEEPNSPSLNHERSFEEHELPALGEEPKSTNLLLSTSGFQEKISASVISSSSGVMPTIVTDNVATSEDNNGCSIGVSSVDSSVLLDEKDLRTSTVNNEEPFKEGTKSALGDQENDGISPGSEQGGEMPAVPMDSNIAVYSDTVSATEKEKYKDHPNSLGSLTTGGTQDKSGNHPDALSLKCQTGRSSIHTDLIDPTTAPMLGIPTGKVAEKIVKTPLNASDDLNAHMQATNGVLHIRYFSITS

SEQ ID NO: 195980 - protein, 958 aa, Zea Mays
MDHDDTDFQSQNFQLAGVGSSKFPSGLRPFALPKLDIEDQLQGHLRFDNLIDSEAFFSVQGHENSWIEVLSTGSSVVDFSSSAAESCSISKTNNVWSEATSTESVEMLLKSVGGNETTGNMDSNAHLQLIGMDSQTDQSSVHPKSSTSPTDSTVVPTEKDQSWSTHSRMTADLSNTESQLEHFVPFLLDKKAAQAADSVAEKCLTGEKLSSSNNTPGSCPTVGNYFGAGHDDNSLDKFNVPSAEVDSKKLNNESFPELAPLQNIYTDSYHFKKDIKESEAVVTPQDSKFCHINENKVEGGLQELQNLSCAGQSLGAVNLSSPPSNETLLSKSSDGLLEAITNPVKMLHRSDDTCHKVNITLQPSFLAVQHGTEGLKSSVHRSNELVVKEFSIGSNSLISHQSEADPRNSNPHPVSSVSPKSKITDATCVPEETNNTETNSTNTCYTYDESKHVVLEYNQGSVDKLKSGDMGEKATGEEIPAVSGSIEQMIENYHEENATGTSNNKVGLSDSIAPENCAADTLNASEEPNSPSLNHERSFEEHELPALGEEPKSTNLLLSTSGFQEKISASVISSSSGVMPTIVTDNVATSEDNNGCSIGVSSVDSSVLLDEKDLRTSTVNNEEPFKEGTKSALGDQENDEKEKYKDHPNSLGSLTTGGTQDKSGNHPDALSLKCQTGRSSIHTDLIDPTTAPMLGIPTGKVAEKIVKTPLNASDDLNAHMQDIVLNHGTDCSPGTVTSQGKEGSSLLEPGNGICTGVTCGSPSVISCAESFPQGGGNGSNDLLDHTLCGQSEDPKDRGASADATQRSKQCCTRNMKSAPGSEETSAAGGDRSFSFEVGAPPNVAEKAHSSVWSPFHLKSTETVTENLQAGSSLKDTSDDSKKTSTIDACKEQLSERKVAESSGGSPPDNSNIGGSIKSRSSPPQQHPIPECSDLVNFPFTEAQHLQLRAQIFVYGALM

SEQ ID NO: 195981 - protein, 936 aa, Zea Mays
MDHDDTDFQSQNFQLAGVGSSKFPSGLRPFALPKLDIEDQLQGHLRFDNLIDSEAFFSVQGHENSWIEVLSTGSSVVDFSSSAAESCSISKTNNVWSEATSTESVEMLLKSVGGNETTGNMDSNAHLQLIGMDSQTDQSSVHPKSSTSPTDSTVVPTEKDQSWSTHSRMTADLSNTESQLEHFVPFLLDKKAAQAADSVAEKCLTGEKLSSSNNTPGSCPTVGNYFGAGHDDNSLDKFNVPSAEVDSKKLNNESFPELAPLQNIYTDSYHFKKDIKESEAVVTPQDSKFCHINENKVEGGLQELQNLSCAGQSLGAVNLSSPPSNETLLSKSSDGLLEAITNPVKMLHRSDDTCHKVNITLQPSFLAVQHGTEGLKSSVHRSNELVVKEFSIGSNSLISHQSEADPRNSNPHPVSSVSPKSKITDATCVPEETNNTETNSTNTCYTYDESKHVVLEYNQGSVDKLKSGDMGEKATGEEIPAVSGSIEQMIENYHEENATGTSNNKVGLSDSIAPENCAADTLNASEEPNSPSLNHERSFEEHELPALGEEPKSTNLLLSTSGFQEKISASVISSSSGVMPTIVTDNVATSEDNNGCSIGVSSVDSSVLLDEKDLRTSTVNNEEPFKEGTKSALGDQENDGISPGSEQGGEMPAVPMDSNIAVYSDTVSATEKEKYKDHPNSLGSLTTGGTQDKSGNHPDALSLKCQTGRSSIHTDLIDPTTAPMLGIPTGKVAEKIVKTPLNASDDLNAHMQDIVLNHGTDCSPGTVTSQGKEGSSLLEPGNGICTGVTCGSPSVISCAESFPQGGGNGSNDLLDHTLCGQSEDPKDRGASADATQRSKQCCTRNMKSAPGSEETSAAGGDRSFSFEVGAPPNVAEKAHSSVWSPFHLKSTETVTENLQAGSSLKDTSDDNLVNFPFTEAQHLQLRAQIFVYGALM

SEQ ID NO: 195982 - protein, 900 aa, Zea Mays
MDHDDTDFQSQNFQLAGVGSSKFPSGLRPFALPKLDIEDQLQGHLRFDNLIDSEAFFSVQGHENSWIEVLSTGSSVVDFSSSAAESCSISKTNNVWSEATSTESVEMLLKSVGGNETTGNMDSNAHLQLIGMDSQTDQSSVHPKSSTSPTDSTVVPTEKDQSWSTHSRMTADLSNTESQLEHFVPFLLDKKAAQAADSVAEKCLTGEKLSSSNNTPGSCPTVGNYFGAGHDDNSLDKFNVPSAEVDSKKLNNESFPELAPLQNIYTDSYHFKKDIKESEAVVTPQDSKFCHINENKVEGGLQELQNLSCAGQSLGAVNLSSPPSNETLLSKSSDGLLEAITNPVKMLHRSDDTCHKVNITLQPSFLAVQHGTEGLKSSVHRSNELVVKEFSIGSNSLISHQSEADPRNSNPHPVSSVSPKSKITDATCVPEETNNTETNSTNTCYTYDESKHVVLEYNQGSVDKLKSGDMGEKATGEEIPAVSGSIEQMIENYHEENATGTSNNKVGLSDSIAPENCAADTLNASEEPNSPSLNHERSFEEHELPALGEEPKSTNLLLSTSGFQEKISASVISSSSGVMPTIVTDNVATSEDNNGCSIGVSSVDSSVLLDEKDLRTSTVNNEEPFKEGTKSALGDQENDGISPGSEQGGEMPAVPMDSNIAVYSDTVSATEKEKYKDHPNSLGSLTTGGTQDKSGNHPDALSLKCQTGRSSIHTDLIDPTTAPMLGIPTGKVAEKIVKTPLNASDDLNAHMQDIVLNHGTDCSPGTVTSQGKEGSSLLEPGNGICTGVTCGSPSVISCAESFPQGGGNGSNDLLDHTLCGQSEDPKDRGASADATQRSKQCCTRNMKSAPGSEETSAAGGDRSFSFEVGAPPNVAEKAHSSVWSPFHLKSTEKIFKLEVL

SEQ ID NO: 195983 - protein, 905 aa, Zea Mays
MDHDDTDFQSQNFQLAGVGSSKFPSGLRPFALPKLDIEDQLQGHLRFDNLIDSEAFFSVQGHENSWIEVLSTGSSVVDFSSSAAESCSISKTNNVWSEATSTESVEMLLKSVGGNETTGNMDSNAHLQLIGMDSQTDQSSVHPKSSTSPTDSTVVPTEKDQSWSTHSRMTADLSNTESQLEHFVPFLLDKKAAQAADSVAEKCLTGEKLSSSNNTPGSCPTVGNYFGAGHDDNSLDKFNVPSAEVDSKKLNNESFPELAPLQNIYTDSYHFKKDIKESEAVVTPQDSKFCHINENKVEGGLQELQNLSCAGQSLGAVNLSSPPSNETLLSKSSDGLLEAITNPVKMLHRSDDTCHKVNITLQPSFLAVQHGTEGLKSSVHRSNELVVKEFSIGSNSLISHQSEADPRNSNPHPVSSVSPKSKITDATCVPEETNNTETNSTNTCYTYDESKHVVLEYNQGSVDKLKSGDMGEKATGEEIPAVSGSIEQMIENYHEENATGTSNNKVGLSDSIAPENCAADTLNASEEPNSPSLNHERSFEEHELPALGEEPKSTNLLLSTSGFQEKISASVISSSSGVMPTIVTDNVATSEDNNGCSIGVSSVDSSVLLDEKDLRTSTVNNEEPFKEGTKSALGDQENDGISPGSEQGGEMPAVPMDSNIAVYSDTVSATEKEKYKDHPNSLGSLTTGGTQDKSGIPTGKVAEKIVKTPLNASDDLNAHMQDIVLNHGTDCSPGTVTSQGKEGSSLLEPGNGICTGVTCGSPSVISCAESFPQGGGNGSNDLLDHTLCGQSEDPKDRGASADATQRSKQCCTRNMKSAPGSEETSAAGGDRSFSFEVGAPPNVAEKAHSSVWSPFHLKSTETVTENLQAGSSLKDTSDDNLVNFPFTEAQHLQLRAQIFVYGALM

SEQ ID NO: 195984 - protein, 875 aa, Zea Mays
MDHDDTDFQSQNFQLAGVGSSKFPSGLRPFALPKLDIEDQLQGHLRFDNLIDSEAFFSVQGHENSWIEVLSTGSSVVDFSSSAAESCSISKTNNVWSEATSTESVEMLLKSVGGNETTGNMDSNAHLQLIGMDSQTDQSSVHPKSSTSPTDSTVVPTEKDQSWSTHSRMTADLSNTESQLEHFVPFLLDKKAAQAADSVAEKCLTGEKLSSSNNTPGSCPTVGNYFGAGHDDNSLDKFNVPSAEVDSKKLNNESFPELAPLQNIYTDSYHFKKDIKESEAVVTPQDSKFCHINENKVEGGLQELQNLSCAGQSLGAVNLSSPPSNETLLSKSSDGLLEAITNPVKMLHRSDDTCHKVNITLQPSFLAVQHGTEGLKSSVHRSNELVVKEFSIGSNSLISHQSEADPRNSNPHPVSSVSPKSKITDATCVPEETNNTETNSTNTCYTYDESKHVVLEYNQGSVDKLKSGDMGEKATGEEIPAVSGSIEQMIENYHEENATGTSNNKVGLSDSIAPENCAADTLNASEEPNSPSLNHERSFEEHELPALGEEPKSTNLLLSTSGFQEKISASVISSSSGVMPTIVTDNVATSEDNNGCSIGVSSVDSSVLLDEKDLRTSTVNNEEPFKEGTKSALGDQENDGISPGSEQGGEMPAVPMDSNIAVYSDTVSATEKEKYKDHPNSLGSLTTGGTQDKSGNHPDALSLKCQTGRSSIHTDLIDPTTAPMLGIPTGKVAEKIVKTPLNASDDLNAHMQDIVLNHGTDCSPGTVTSQGKEGSSLLEPGNGICTGVTCGSPSVISCAESFPQGGGNGSNDLLDHTLCGQSEDPKDRGASADATQRSKQCCTRNMKSAPGSEETSAAGGDRSFSFEKIFKLEVL

SEQ ID NO: 195985 - protein, 958 aa, Zea Mays
MDHDDTDFQSQNFQLAGVGSSKFPSGLRPFALPKLDIEDQLQGHLRFDNLIDSEAFFSVQGHENSWIEVLSTGSSVVDFSSSAAESCSISKTNNVWSEATSTESVEMLLKSVGGNETTGNMDSNAHLQLIGMDSQTDQSSVHPKSSTSPTDSTVVPTEKDQSWSTHSRMTADLSNTESQLEHFVPFLLDKKAAQAADSVAEKCLTGEKLSSSNNTPGSCPTVGNYFGAGHDDNSLDKFNVPSAEVDSKKLNNESFPELAPLQNIYTDSYHFKKDIKESEAVVTPQDSKFCHINENKVEGGLQELQNLSCAGQSLGAVNLSSPPSNETLLSKSSDGLLEAITNPVKMLHRSDDTCHKVNITLQPSFLAVQHGTEGLKSSVHRSNELVVKEFSIGSNSLISHQSEADPRNSNPHPVSSVSPKSKITDATCVPEETNNTETNSTNTCYTYDESKHVVLEYNQGSVDKLKSGDMGEKATGEEIPAVSGSIEQMIENYHEENATGTSNNKVGLSDSIAPENCAADTLNASEEPNSPSLNHERSFEEHELPALGEEPKSTNLLLSTSGFQEKISASVISSSSGVMPTIVTDNVATSEDNNGCSIGVSSVDSSVLLDEKDLRTSTVNNEEPFKEGTKSALGDQENDGISPGSEQGGEMPAVPMDSNIAVYSDTVSATEKEKYKDHPNSLGSLTTGGTQDKSGIPTGKVAEKIVKTPLNASDDLNAHMQDIVLNHGTDCSPGTVTSQGKEGSSLLEPGNGICTGVTCGSPSVISCAESFPQGGGNGSNDLLDHTLCGQSEDPKDRGASADATQRSKQCCTRNMKSAPGSEETSAAGGDRSFSFEVGAPPNVAEKAHSSVWSPFHLKSTETVTENLQAGSSLKDTSDDSKKTSTIDACKEQLSERKVAESSGGSPPDNSNIGGSIKSRSSPPQQHPIPECSDLVNFPFTEAQHLQLRAQIFVYGALM

SEQ ID NO: 195986 - protein, 964 aa, Zea Mays
MDHDDTDFQSQNFQLAGVGSSKFPSGLRPFALPKLDIEDQLQGHLRFDNLIDSEAFFSVQGHENSWIEVLSTGSSVVDFSSSAAESCSISKTNNVWSEATSTESVEMLLKSVGGNETTGNMDSNAHLQLIGMDSQTDQSSVHPKSSTSPTDSTVVPTEKDQSWSTHSRMTADLSNTESQLEHFVPFLLDKKAAQAADSVAEKCLTGEKLSSSNNTPGSCPTVGNYFGAGHDDNSLDKFNVPSAEVDSKKLNNESFPELAPLQNIYTDSYHFKKDIKESEAVVTPQDSKFCHINENKVEGGLQELQNLSCAGQSLGAVNLSSPPSNETLLSKSSDGLLEAITNPVKMLHRSDDTCHKVNITLQPSFLAVQHGTEGLKSSVHRSNELVVKEFSIGSNSLISHQSEADPRNSNPHPVSSVSPKSKITDATCVPEETNNTETNSTNTCYTYDESKHVVLEYNQGSVDKLKSGDMGEKATGEEIPAVSGSIEQMIENYHEENATGTSNNKVGLSDSIAPENCAADTLNASEEPNSPSLNHERSFEEHELPALGEEPKSTNLLLSTSGFQEKISASVISSSSGVMPTIVTDNVATSEDNNGCSIGVSSVDSSVLLDEKDLRTSTVNNEEPFKEGTKSALGDQENDGISPGSEQGGEMPAVPMDSNIAVYSDTVSATEKEKYKDHPNSLGSLTTGGTQDKSGNHPDALSLKCQTGRSSIHTDLIDPTTAPMLGIPTGKVAEKIVKTPLNASDDLNAHMQDIVLNHGTDCSPGTVTSQGKEGSSLLEPGNGICTGVTCGSPSVISCAESFPQGGGNGSNDLLDHTLCGQSEDPKDRGASADATQRSKQCCTRNMKSAPGSEETSAAGGDRSFSFETVTENLQAGSSLKDTSDDSKKTSTIDACKEQLSERKVAESSGGSPPDNSNIGGSIKSRSSPPQQHPIPECSDLVNFPFTEAQHLQLRAQIFVYGALM

SEQ ID NO: 195987 - protein, 1051 aa, Zea Mays
MDHDDTDFQSQNFQLAGVGSSKFPSGLRPFALPKLDIEDQLQGHLRFDNLIDSEAFFSVQGHENSWIEVLSTGSSVVDFSSSAAESCSISKTNNVWSEATSTESVEMLLKSVGGNETTGNMDSNAHLQLIGMDSQTDQSSVHPKSSTSPTDSTVVPTEKDQSWSTHSRMTADLSNTESQLEHFVPFLLDKKAAQAADSVAEKCLTGEKLSSSNNTPGSCPTVGNYFGAGHDDNSLDKFNVPSAEVDSKKLNNESFPELAPLQNIYTDSYHFKKDIKESEAVVTPQDSKFCHINENKVEGGLQELQNLSCAGQSLGAVNLSSPPSNETLLSKSSDGLLEAITNPVKMLHRSDDTCHKVNITLQPSFLAVQHGTEGLKSSVHRSNELVVKEFSIGSNSLISHQSEADPRNSNPHPVSSVSPKSKITDATCVPEETNNTETNSTNTCYTYDESKHVVLEYNQGSVDKLKSGDMGEKATGEEIPAVSGSIEQMIENYHEENATGTSNNKVGLSDSIAPENCAADTLNASEEPNSPSLNHERSFEEHELPALGEEPKSTNLLLSTSGFQEKISASVISSSSGVMPTIVTDNVATSEDNNGCSIGVSSVDSSVLLDEKDLRTSTVNNEEPFKEGTKSALGDQENDGISPGSEQGGEMPAVPMDSNIAVYSDTVSATEKEKYKDHPNSLGSLTTGGTQDKSGNHPDALSLKCQTGRSSIHTDLIDPTTAPMLGIPTGKVAEKIVKTPLNASDDLNAHMQDAVVAKHKTTPELAEDTASLGTGMVVFDAYAGGVPTAAGTNRLRAVGRGWSAGHSRCLRWCTQPWKWLTKDIVLNHGTDCSPGTVTSQGKEGSSLLEPGNGICTGVTCGSPSVISCAESFPQGGGNGSNDLLDHTLCGQSEDPKDRGASADATQRSKQCCTRNMKSAPGSEETSAAGGDRSFSFEVGAPPNVAEKAHSSVWSPFHLKSTETVTENLQAGSSLKDTSDDSKKTSTIDACKEQLSERKVAESSGGSPPDNSNIGGSIKSRSSPPQQHPIPECSEAQHLQLRAQIFVYGALM

SEQ ID NO: 195988 - protein, 187 aa, Zea Mays
MFGRGSPRMNLIQAAAMQRVSPRSTTNKRKKRTSPKVGRLRANWNSGLEKGLIEILQDHNNDYYKGQNGWSSEAWNRIVKLFHEKFPYVTFTKCQIQDKEKELKRDYKALKEARQQSGVSWDERLCRIEAEEPIWNNLTTSNERLKKFRTKSFPLFEALGELHDGLLSMFFLYLSIGPLIFILVLKS

SEQ ID NO: 195989 - protein, 140 aa, Zea Mays
MFGRGSPRMNLIQAAAMQRVSPRSTTNKRKKRTSPKVGRLRANWNSGLEKGLIEILQDHNNDYYKGQNGWSSEAWNRIVKLFHEKFPYVTFTKCQIQDKEKELKRDYKALKEARQQSGVSWDERLCRIEAEEPIWNNLTT

SEQ ID NO: 195990 - protein, 253 aa, Zea Mays
MIIVNIVHDISRMFGRGSPRMNLIQAAAMQRVSPRSTTNKRKKRTSPKVGRLRANWNSGLEKGLIEILQDHNNDYYKGQNGWSSEAWNRIVKLFHEKFPYVTFTKCQIQDKEKELKRDYKALKEARQQSGVSWDERLCRIEAEEPIWNNLTTSNERLKKFRTKSFPLFEALGELHDEMKEKQDEVEKRATTNANEDDFPITTCIAIVDGMEELSDDEKVDAYDVFKDAQNRAIFMTAKDATRIKWLRKKIART

SEQ ID NO: 195991 - protein, 224 aa, Zea Mays
MNEQEKRIDDAERGKELRGARKRRPKAAAAAAALLARMFGRGSPRMNLIQAAAMQRVSPRSTTNKRKKRTSPKVGRLRANWNSGLEKGLIEILQDHNNDYYKGQNGWSSEAWNRIVKLFHEKFPYVTFTKCQIQDKEKELKRDYKALKEARQQSGVSWDERLCRIEAEEPIWNNLTTSNERLKKFRTKSFPLFEALGELHDGLLSMFFLYLSIGPLIFILVLKS

SEQ ID NO: 195992 - protein, 199 aa, Zea Mays
MIIVNIVHDISRMFGRGSPRMNLIQAAAMQRVSPRSTTNKRKKRTSPKVGRLRANWNSGLEKGLIEILQDHNNDYYKGQNGWSSEAWNRIVKLFHEKFPYVTFTKCQIQDKEKELKRDYKALKEARQQSGVSWDERLCRIEAEEPIWNNLTTSNERLKKFRTKSFPLFEALGELHDGLLSMFFLYLSIGPLIFILVLKS

SEQ ID NO: 195993 - protein, 173 aa, Zea Mays
MNFGSGVDLCTDVWFCCCKLLTPPIPVRGGLDSDGEVSGEVDQVRALREEVVVQDDFGFKLKEEAMLNRVLKETILSKVVAIEQLQSDLASSFRIQDVMRNEIQRVQNELSCITHKAKQLELQNEVVSLKKKIEALDEDILVKEGQITILQDSIDKPFNIICSPSSMQEFDMA

SEQ ID NO: 195994 - protein, 126 aa, Zea Mays
MNFGSGVDLCTDVWFCCCKLLTPPIPVRGGLDSDGEVSGEVDQVRALREEVVVQDDFGFKLKEEAMLNRVLKETILSKVVAIEQLQSDLASSFRIQDVMRNEIQRVQNELSCITHKAKQLELQDFQ

SEQ ID NO: 195995 - protein, 71 aa, Zea Mays
MKNTSKRKKMPLLVQGGTHLVSQPSSLNPSDPGAWRIRLRWGSLWRGGSSSCSSGRSRRPGPAPPRPIIYR

SEQ ID NO: 195996 - protein, 84 aa, Zea Mays
MPPTPARPPPAVAAGEPSAMGYDQGLPPHDATWPQRSDYDPYAYARHSAAAASSYYQPPPPGTEHAAPAAAFSSWSSAVGSSNS

SEQ ID NO: 195997 - protein, 425 aa, Zea Mays
MMVGGGIGTLNGVSRGRGPSQGGGRGGSPMYHPLIWNAGITSPRGRGRGRGRGSGRGRRNKSSDRQLAIQASGGSFALQAQPETVCAPAHMVQATTSSSTRGTVVPAAWCDICHVGCNSKEILEQHKNGKRHKRSVQRMQDMARLQGTTPAIADMGAPSSSQLAEVEGPSRSVHMVPPLGSTSLSGEHKDLAPENVGASVYGVQITEVPGSSSKQNKTHHTSTVGHGVEAQVELHVAVQACQPSNEMKDGGEAPPNATGPSNAQLVEARMGVNGNNNGSKRKPTGAGRGRKKLRVSQAPQQRRPERVREQPLVCTICNAICDTRAVFDIHLVGKKHQSRLKRSQGPDVLFGPLVGHIPPNQSAAHMTGAPEPLYFGFKSMGASLVEQEAYLAGAMQHVLPVLPQAGPTIMAADYPAQPVASNRCC

SEQ ID NO: 195998 - protein, 297 aa, Zea Mays
MSSVMLNLILICNTATGHDLAGSKRLALFLDYDGTLSPIVDNPENALMSDEMRAAVRHAASLFPTAIISGRSRDKVFDFVKLNELYYAGSHGMDIMGPVRKTTDSNGVECIRSTDVHGKEVNLFQPASEFLPMITEVYEKLGESVKDIDGARMEDNKFCVSVHYRNVAEDDYKKVFHRVTAVLEGYPCLRLTHGRKVFEVRPVIDWNKGKAVEFLLESLGLSESEDVLPIYVGDDRTDEDAFKVLKASNRGFGILVSSIPKESDAFYSLRDPAEVTHSTVATTTNFCFEYFLGQKEN

SEQ ID NO: 195999 - protein, 205 aa, Zea Mays
MDIMGPVRKTTDSNGVECIRSTDVHGKEVNLFQPASEFLPMITEVYEKLGESVKDIDGARMEDNKFCVSVHYRNVAEDDYKKVFHRVTAVLEGYPCLRLTHGRKVFEVRPVIDWNKGKAVEFLLESLGLSESEDVLPIYVGDDRTDEDAFKVLKASNRGFGILVSSIPKESDAFYSLRDPAEVTHSTVATTTNFCFEYFLGQKEN

SEQ ID NO: 196000 - protein, 244 aa, Zea Mays
MSDEMRAAVRHAASLFPTAIISGRSRDKLNELYYAGSHGMDIMGPVRKTTDSNGVECIRSTDVHGKEVNLFQPASEFLPMITEVYEKLGESVKDIDGARMEDNKFCVSVHYRNVAEDDYKKVFHRVTAVLEGYPCLRLTHGRKVFEVRPVIDWNKGKAVEFLLESLGLSESEDVLPIYVGDDRTDEDAFKVLKASNRGFGILVSSIPKESDAFYSLRDPAEVTHSTVATTTNFCFEYFLGQKEN

SEQ ID NO: 196001 - protein, 70 aa, Zea Mays
MSLFVAITWQLTFECSDDATIHDGFHVSVEENIWLNIFLRALRSCLADCIYGRVKYTVLYCIMYKVEFKI

SEQ ID NO: 196002 - protein, 148 aa, Zea Mays
MRCDFGTTISEGGDVSLGGQVVPKDTFRYLGSMLQRDGDIDEEVSHRIKARLMKWRQASRVLYNKRVPQKFKVKFYRTAIRPAMLYGAECWPTKRRHIQQLSVAEMRMLRWICGHTRLDRVRNDDIRDRLGIASIGEKLIQHRLRWFG

SEQ ID NO: 196003 - protein, 89 aa, Zea Mays
MNKTERRLTATSNHLTHAGWLELVNSVLSSLPTYAMCTLQVPVTVLEYIDRARRHRLWRGSDSNAKMKPLVVWKKIVDSKGKEALASLI

SEQ ID NO: 196004 - protein, 300 aa, Zea Mays
MAVTTQPDFYNWNRVKLRYCDGGSFMGDSAVYINSSSVLYFSGQRIWDAIVADLLRKGLARADKVLLSGCSAGGLATFFHCDGLKQRLGAAATVKCLSDAGFFLDLSDISGSNTIRQFFSSLVSLQGIQKNLNMDCLSSTSTDNAYLCFFPQFALANIRTPFFILNSAYDVYQFHHILVPPSSDPGGHWSRCKSDPGGCNATQIATLQGLRSGMLTSLRQFKSKPEAGMFINSCFAHCQSELQDTWFAPNSPSIDNKKIAEVVGDWYFERGAAVEIDCAYPCDSTCRNLIPIDKNGFAGA

SEQ ID NO: 196005 - protein, 167 aa, Zea Mays
MDCLSSTSTDNAYLCFFPQFALANIRTPFFILNSAYDVYQFHHILVPPSSDPGGHWSRCKSDPGGCNATQIATLQGLRSGMLTSLRQFKSKPEAGMFINSCFAHCQSELQDTWFAPNSPSIDNKKIAEVVGDWYFERGAAVEIDCAYPCDSTCRNLIPIDKNGFAGA

SEQ ID NO: 196006 - protein, 758 aa, Zea Mays
MATAPLAFRLPFPFSFPSASRPPPSRILAPPTPRRLPLRLAAAAARRFRPPTADDEPPEAAEDSSHGLTRYDQLARSVERARIRQPEITPDNPLFSSPSTAGGGGGGSYDPDDEFFDEIDRAIAEKREEFTRRGLIKPSPASPPPSQSQPEDEDLTDELSPEEVIDLDEIRKLQGLSVVSVADEEDEEVEGGEDEDDGLPLDEDGEGFDVAEELGLEGARMRQPAFRMTLAELLDESKLVPVAVTGDQDVALAGVQRDASLVAAGDLFVCVGEDGLAGLTEADKRGAVAVVADQDLNIEGTLACRALVIVDDILTALRVLPACLYSRPSMNMAIIGVTGTDGVTTTTHLVKAMYEAMGVRTGLVGVLGTYAFSSNKLDARPDASSDPIAAQKLMATMLHNGTEAVVLEKGTDGMPPSGVDSEIDYDIAVLTNVRHTDEENGMTYEEYMSRMASLFSRMVDPERHRKVVNIDDPSAPFFAAQGGHDVPVVTYSFENKKADVHTLKYQLSLFETEVLVQTPHGILEISSGLLGRDNIYSILATVAVGIAVGAPLEDIVRGIEEVDAIPGRCELIDEEQAFGVIVDHARTPEALSRLLDGVRELGPRRIVTVVGCCGEKERGKRPVMTKIAADKSDVVMLTSDNPANEDPLDILDDMLAGVGWTMEEYLKYGANDYYPPLPNGHRLFLHDIRRVAVRAAVAMGEQGDVITGKGNDTYQIEGDKNEFFDDREECREALQYVDQLHRAGIDTSEFPWRLPESH

SEQ ID NO: 196007 - protein, 477 aa, Zea Mays
MATAPLAFRLPFPFSFPSASRPPPSRILAPPTPRRLPLRLAAAAARRFRPPTADDEPPEAAEDSSHGLTRYDQLARSVERARIRQPEITPDNPLFSSPSTAGGGGGGSYDPDDEFFDEIDRAIAEKREEFTRRGLIKPSPASPPPSQSQPEDEDLTDELSPEEVIDLDEIRKLQGLSVVSVADEEDEEVEGGEDEDDGLPLDEDGEGFDVAEELGLEGARMRQPAFRMTLAELLDESKLVPVAVTGDQDVALAGVQRDASLVAAGDLFVCVGEDGLAGLTEADKRGAVAVVADQDLNIEGTLACRALVIVDDILTALRVLPACLYSRPSMNMAIIGVTGTDGVTTTTHLVKAMYEAMGVRTGLVGVLGTYAFSSNKLDARPDASSDPIAAQKLMATMLHNGTEAVVLEKGTDGMPPSGVDSEIDYDIAVLTNVRHTDEENGMTYEEYMSRMASLFSRMVDPERHRKLALQWVHHWRT

SEQ ID NO: 196008 - protein, 777 aa, Zea Mays
MATAPLAFRLPFPFSFPSASRPPPSRILAPPTPRRLPLRLAAAAARRFRPPTADDEPPEAAEDSSHGLTRYDQLARSVERARIRQPEITPDNPLFSSPSTAGGGGGGSYDPDDEFFDEIDRAIAEKREEFTRRGLIKPSPASPPPSQSQPEDEDLTDELSPEEVIDLDEIRKLQGLSVVSVADEEDEEVEGGEDEDDGLPLDEDGEGFDVAEELGLEGARMRQPAFRMTLAELLDESKLVPVAVTGDQDVALAGVQRDASLVAAGDLFVCVGEDGLAGLTEADKRGAVAVVADQDLNIEGTLACRALVIVDDILTALRVLPACLYSRPSMNMAIIGVTGTDGVTTTTHLVKAMYEAMGVRTGLVGVLGTYAFSSNKLDARPDASSDPIAAQKLMATMLHNGTEAVVLEKGTDGMPPSGVDSEIDYDIAVLTNVRHTDEENGMTYEEYMSRMASLFSRMVDPERHRKVVNIDDPSAPFFAAQGGHDVPVVTYSFENKKADVHTLKYQLSLFETEVLVQTPHGILEISSGLLGRDNIYSILATVAVGIAVGAPLEDIVRGIEEVDAIPGRCELIDEEQAFGVIVDHARTPEALSRLLDGVRELGPRRIVTVVGCCGEKERGKRPVMTKIAADKSDVVMLTSDNPANEDPLDILDDMLAGVGWTMEEYLKYGANDYYPPLPNGHRLFLHDIRRVAVRAAVAMGEQGDVVVITGKGNDTYQIEGDKNEFFDDREECREALQYVDQLHRAGIDTSEFPWRYVSSKSLVTRSSFMSLDLSPDY

SEQ ID NO: 196009 - protein, 726 aa, Zea Mays
MATAPLAFRLPFPFSFPSASRPPPSRILAPPTPRRLPLRLAAAAARRFRPPTADDEPPEAAEDSSHGLTRYDQLARSVERARIRQPEITPDNPLFSSPSTAGGGGGGSYDPDDEFFDEIDRAIAEKREEFTRRGLIKPSPASPPPSQSQPEDEDLTDELSPEEVIDLDEIRKLQGLSVVSVADEEDEEVEGGEDEDDGLPLDEDGEGFDVAEELGLEGARMRQPAFRMTLAELLDESKLVPVAVTGDQDVALAGVQRDASLVAAGDLFVCVGEDGLAGLTEADKRGAVAVVADQDLNIEGTLACRALVIVDDILTALRVLPACLYSRPSMNMAIIGVTGTDGVTTTTHLVKAMYEAMGVRTGLVGVLGTYAFSSNKLDARPDASSDPIAAQKLMATMLHNGTEAVVLEKGTDGMPPSGVDSEIDYDIAVLTNVRHTDEENGMTYEEYMSRMASLFSRMVDPERHRKVVNIDDPSAPFFAAQGGHDVPVVTYSFENKKADVHTLKYQLSLFETEVLVQTPHGILEISSGLLGRDNIYSILATVAVGIAVGAPLEDIVRGIEEVDAIPGRCELIDEEQAFGVIVDHARTPEALSRLLDGVRELGPRRIVTVVGCCGEKERGKRPVMTKIAADKSDVVMLTSDNPANEDPLDILDDMLAGVGWTMEEYLKYGANDYYPPLPNGHRLFLHDIRRVAVRAAVAMGEQGDVVVSFLSMLSGSLFCSSELVTI

SEQ ID NO: 196010 - protein, 52 aa, Zea Mays
MYLFHRDSSYLKRFFLILIDLTNLKRFYPILRDTSCSNKHTYPHHLAYFIMS

SEQ ID NO: 196011 - protein, 78 aa, Zea Mays
MCVRIRCQAILALNTPAIRSVGEAIWPRLLHCEACPSWASGESRVRPLLEEALGRGVNSPGSTVPARGWVRARRDRVP

SEQ ID NO: 196012 - protein, 89 aa, Zea Mays
MRWPQPQPYLLAARLLLPHKFSSSLCVSLCSPRPPTPAMVATGSASPGSSSTVCVLPALPSCAPLSCSLRALFLLALASAPWSPAGTGR

SEQ ID NO: 196013 - protein, 199 aa, Zea Mays
MLLFSATLSDWVNKLSMRFLKVDRKTVDLVGNEKLKASASVKHLVLPCNKAARAQVIPDIIRCYSHGGRTIIFTKTKDSASELSGLIPGSRALHGDVAQAQREVILAGFCSGKFQVLVATNVAARGLDINDVQLIIQFKLCNGRSVQFDVGNVVMVTGGRNTGRVGVIKNWEKHKGIFEENIEWNSNLVVAKVWRLEFI

SEQ ID NO: 196014 - protein, 427 aa, Zea Mays
MESEFSDEICAENGAEEDDETEDLIWSKEEIDAISALFDRPMRQKPLKPRNPARQRALPLPLPHKTRLPVAPAPKQHVRLAARAGLSSRACFSDQVRKKPEFLLGIAREIAALPPEHDVSTVLDRWARFLRKGSLSLTIRELGHMGLPERALQTLCWAQRQKAVPLFPDDRVLASAIEVLARFERLRVESALEQCVPTASRAVLEAMASGFIRAGKVDRVRKLLELARINNRTLHPSIYVKLMLEATRTPEGYGLASALVDELGERPELELRPQDCTAVMKVCIRLRRYAAVESLFSWFRGAIGSPTVVMYTTVIHSRCRDGRHREALSLVWEMEQAGCLLDLPAYRVIVKLCVALHDPGRALRYLSRMKEAGFIPTGDMYDSLIEGYLADGRLAKCRQLIRDAESAGVKLDRRLLSRLSETGGRHP

SEQ ID NO: 196015 - protein, 114 aa, Zea Mays
MWWFYRKGPSGFSGASTAEEVTAGVDGHLLVAVITGATSGIGLETARVLALRGVRVVMAVRNVSAGLMAKDAIVAKTPDARIDVLELDLSSIASVRRFASEFDSLKLPLNILIK

SEQ ID NO: 196016 - protein, 322 aa, Zea Mays
MWWFYRKGPSGFSGASTAEEVTAGVDGHLLVAVITGATSGIGLETARVLALRGVRVVMAVRNVSAGLMAKDAIVAKTPDARIDVLELDLSSIASVRRFASEFDSLKLPLNILINNAGVMTRNCTRSCDGLELHFATNHIGHFLLTNLVLENMKSTCRDTGTEGRIVNVTSAGHVMTYPEGIRFETIRDPSGCKSAVRSLNDFIAYGQSKLANILHTNELSRIFKEEGVNISANSVHPGLIATNLFRAFGRTIIAAFFNTVGRIVRRSVEQGAATTCYVAVHPQVKGLSGKYFANCNIASPSSQASDAELAKKLWEFSLQTVS

SEQ ID NO: 196017 - protein, 79 aa, Zea Mays
MAITYITEKEVAHIFVVKGSNSSLGGFRVTYSWFFGWHIGNKYFKKTTKLKLKQVPNKQIHAVSNATFRYIGSEHLRQG

SEQ ID NO: 196018 - protein, 182 aa, Zea Mays
MTVYHPAPTRGDWDCEEERREGEVDCTAHTTRPRSSVPFRAPPQHETPKPYPLASPSSSSPPPIRAPAECRREAVGGSSSATRRRRPRCCTCGTFRGSARKRSSSSSASLSAASSTPRAASAPTTTRPLSSSLTLIRQEIINNKSPGETAGNVLLVTIEGVQSSDVTIDVIHMYACYFLDCR

SEQ ID NO: 196019 - protein, 199 aa, Zea Mays
MTVYHPAPTRGDWDCEEERREGEVDCTAHTTRPRSSVPFRAPPQHETPKPYPLASPSSSSPPPIRAPAECRREAVGGSSSATRRRRPRCCTCGTFRGSARKRSSSSSASLSAASSTPRAASAPTTTRPLSSSLTLIRQEIINNKSPGETAGNVLLVTIEGVQSSDVTIDVIHMQAHDNWRKYHYQHLQLERYHVCFAAF

SEQ ID NO: 196020 - protein, 267 aa, Zea Mays
MPDPTTKPPSPRPRRRRRLCGLCLGTALLALLVAALVHVVAPLPRAASASARFSVIIDGGSTGTRAHVFVTGHDGSPDLALSTVMRVSPGLSSFAADPARAGESLKPLIDFARDKIDGAGSAAGEAEVRLMATAGLRLLEERTQEAILASCRDVLRASGFRFEDAWAKVIPGSDEGIYAWVAANYALGRLGGDPNRTVGIIELGGASAQLAFVSDEVLPPKLSYNYTFIETTYTLYTNSFLNFGQNAAQDSFHEMLRSREDIHAMKK

SEQ ID NO: 196021 - protein, 504 aa, Zea Mays
MPDPTTKPPSPRPRRRRRLCGLCLGTALLALLVAALVHVVAPLPRAASASARFSVIIDGGSTGTRAHVFVTGHDGSPDLALSTVMRVSPGLSSFAADPARAGESLKPLIDFARDKIDGAGSAAGEAEVRLMATAGLRLLEERTQEAILASCRDVLRASGFRFEDAWAKVIPGSDEGIYAWVAANYALGRLGGDPNRTVGIIELGGASAQLAFVSDEVLPPKLSYNYTFIETTYTLYTNSFLNFGQNAAQDSFHEMLRSRGSSENATLADPCAPRGYSRNEEMMLRMSGASRSTLENQYVDNGTGNFTECISSSLLLLQKGKEKCQYQQCHLGSTFVPELRGYFLATENFYFTSKFFGLKKSSSLSDFMFAGEQFCNQDLSTLRKKHPNRSDEDFSRYCFSMAYIVALLHDSLGVSLDDKRIEYSNQVGDIQVEWALGAFITLIQNASLKPLHTAVESTHSNRPLFAVLGMFLLCGVLFVSRWRKHKTKVIYDLEKGRYIITHIS

SEQ ID NO: 196022 - protein, 442 aa, Zea Mays
MPDPTTKPPSPRPRRRRRLCGLCLGTALLALLVAALVHVVAPLPRAASASARFSVIIDGGSTGTRAHVFVTGHDGSPDLALSTVMRVSPGLSSFAADPARAGESLKPLIDFARDKIDGAGSAAGEAEVRLMATAGLRLLEERTQEAILASCRDVLRASGFRFEDAWAKVIPGSDEGIYAWVAANYALGRLGGDPNRTVGIIELGGASAQLAFVSDEVLPPKLSYNYTFIETTYTLYTNSFLNFGQNAAQDSFHEMLRSREKCQYQQCHLGSTFVPELRGYFLATENFYFTSKFFGLKKSSSLSDFMFAGEQFCNQDLSTLRKKHPNRSDEDFSRYCFSMAYIVALLHDSLGVSLDDKRIEYSNQVGDIQVEWALGAFITLIQNASLKPLHTAVESTHSNRPLFAVLGMFLLCGVLFVSRWRKHKTKVIYDLEKGRYIITHIS

SEQ ID NO: 196023 - protein, 137 aa, Zea Mays
MFAGEQFCNQDLSTLRKKHPNRSDEDFSRYCFSMAYIVALLHDSLGVSLDDKRIEYSNQVGDIQVEWALGAFITLIQNASLKPLHTAVESTHSNRPLFAVLGMFLLCGVLFVSRWRKHKTKVIYDLEKGRYIITHIS

SEQ ID NO: 196024 - protein, 313 aa, Zea Mays
MQYFSTLGVDYLTVVLPIILVFTVLSEWVFMCAISLVILISIYIMFKRSQFHLKDGFSQLPLLRADISSYRVSVVLVTCLCILAVDFKIFPRRYAKAETYGSGIMDLGVGSFVVANALVSRQARNIASMSFKAVLCSISPLLSLGFARIISTWGVDYQVHVGEYGVHWNFFFTLAAVSILTSVVRIHPKHCGLVGLLILAGYQIWLSSGLNEYLISHKRSADIITQNKEGIYSILGYWGMFLIGVSLGFYLFVDTSSKGKNRNTQVMQIWVLAASFWILAIIFDSYIERVSRRMCNFAYVMLVFGQNFQCLYL

SEQ ID NO: 196025 - protein, 190 aa, Zea Mays
MLRLKHMVVASSFKAVLCSISPLLSLGFARIISTWGVDYQVHVGEYGVHWNFFFTLAAVSILTSVVRIHPKHCGLVGLLILAGYQIWLSSGLNEYLISHKRSADIITQNKEGIYSILGYWGMFLIGVSLGFYLFVDTSSKGKNRNTQVMQIWVLAASFWILAIIFDSYIERVSRRMRTYIGLLFNNMNFI

SEQ ID NO: 196026 - protein, 273 aa, Zea Mays
MQYFSTLGVDYLTVVLPIILVFTVLSEWVFMCAISLVILISIYIMFKRSQFHLKDGFSQLPLLRADISSYRVSVVLVTCLCILAVDFKIFPRRYAKAETYGSGIMDLGVGSFVVANALVSRQARNIASMSFKAVLCSISPLLSLGFARIISTWGVDYQVHVGEYGVHWNFFFTLAAVSILTSVVRIHPKHCGLVGLLILAGYQIWLSSGLNEYLISHKRSADIITQNKEGIYSILVQRARTGTLKSCKSGFLLLLFGFWQSSLIATLREFLVE

SEQ ID NO: 196027 - protein, 181 aa, Zea Mays
MLRLKHMVVASSFKAVLCSISPLLSLGFARIISTWGVDYQVHVGEYGVHWNFFFTLAAVSILTSVVRIHPKHCGLVGLLILAGYQIWLSSGLNEYLISHKRSADIITQNKEGIYSILVQRARTGTLKSCKSGFLLLLFGFWQSSLIATLREFLVECATSLMLCLFLARIFRGHILDFSLTI

SEQ ID NO: 196028 - protein, 58 aa, Zea Mays
MCDQAEPCLVLDKMDWTRGQHLQIPSFLESLLFFLDLDSLANHELIVMLFDIHPRLMC

SEQ ID NO: 196029 - protein, 342 aa, Zea Mays
MAHCSRCLIPWSGNDGMYMMEVDRVLRPGGFWVLSGPPIGWKIHYKGWQRSKEDLRNEQRKIEHFAQLLCWKKVSEKDGIAIWTKRLNDKSCSMKQDNPNGGKCDLTSDSDVWYKKMEVCMTPLPEVNSVDEVAGGQLEPFPKRLYAVPPRITDGSVPGFSVESYEEDNNLWRKHVKAYKKINNLLDTGRYRNIMDMNAGLGSFAAALESPKVWVMNVIPTIANTSTLGVIYERGLIGMYHDWCEGFSTYPRTYDLIHSNDIFSLYQNKCQFEDILLEMDRILRPEGAIIIRDKVDVLVKVEKIANAMRWKTRLADHEGGPHVPEKILFAVKQYWTAEKTSS

SEQ ID NO: 196030 - protein, 611 aa, Zea Mays
MARNLTENRTRNTLIVIVVFGLCSFFYLLGAWQKSGSGGGDRIQNWVNEQTKCAQLPNLSFETHHSASNLPNDTGSSKIEPFKPCDEQYTDYTPCEEQKRAMTFPRDNMIYRERHCPPDKEKLYCLIPAPKGYVAPFRWPKGRDFVPYANVPHKSLTVEKAIQNWVHYEGNVFRFPGGGTQFPQGADKYIEQLASVIPIAEGKVRTALDTGCGVASLGAYLLNKNVLTMSFAPRDNHEAQVQFALERGVPAYIGVLGSIKLPFPSRVFDMAHCSRCLIPWSGNDGMYMMEVDRVLRPGGFWVLSGPPIGWKIHYKGWQRSKEDLRNEQRKIEHFAQLLCWKKVSEKDGIAIWTKRLNDKSCSMKQDNPNGGKCDLTSDSDVWYKKMEVCMTPLPEVNSVDEVAGGQLEPFPKRLYAVPPRITDGSVPGFSVESYEEDNNLWRKHVKAYKKINNLLDTGRYRNIMDMNAGLGSFAAALESPKVWVMNVIPTIANTSTLGVIYERGLIGMYHDWCEGFSTYPRTYDLIHSNDIFSLYQNKCQFEDILLEMDRILRPEGAIIIRDKVDVLVKVEKIANAMRWKTRLADHEGGPHVPEKILFAVKQYWTAEKTSS

SEQ ID NO: 196031 - protein, 112 aa, Zea Mays
MNRYGLLGEGQNKLDYVLALTVENFLQRRLQTIVFKNGMAKSIHHARVLIRQRHIRVGRQLVNIPSFMVRVDSEKHIDFSLTSPLGGGEPGRVKRKNQKKASGGGGDDEEEE

SEQ ID NO: 196032 - protein, 117 aa, Zea Mays
MASSSRRALPLLRHVGALDSSAWRAAPFPCFCARGALACRSSSAPPPWSSLPHPSPWPTASPSMASKICSASIPACTPASVSWWPTPLPGARPCPLSSALPAPSHGVDTSPLSCCHG

SEQ ID NO: 196033 - protein, 65 aa, Zea Mays
MVWTPAPSLVAMDSPSHLLPSLTLAPLYWLPFPCQHFPHGRVSPMLDAWRLGTTAAVRPLQPRFR

SEQ ID NO: 196034 - protein, 77 aa, Zea Mays
MICSNWWPSSFLLKIKSDHEVQIPDSRIRVVDGLNLVHKYKERFLSEALLGRQLKVKFMCYLLDCLRLEFDFSISVL

SEQ ID NO: 196035 - protein, 347 aa, Zea Mays
MHTQPIKMKRGLLVLWSLFYFSVANADTRNQAKQPLEFNQLRVSRKYVQGKQDSTPKNGTSPSVHRGSTSNQREQDKIVCMPGQTGVAEFDQYAGYVTVDAKAGRALFYYFVEAPQDPSNKPLVLWLNGGPGCSSFGSGAMVELGPFSVHSDNKTLYKKRHAWNRMANMLFIEIPAGVGYSYSNTTSDYYNTGHYIPELANLILSKNRATNVTSIKLKGVAIGNADLDDNLTLRASYDYYWMHAMISGKAYKAVKDKCGFNGTYTEDCQNAMDLATQEKGNIDDYDIYAPICQDASNPSKSSDSLVFGDPCTNHYVSSYLNRPEVQRALHANTTGLGYPWMDCRYVY

SEQ ID NO: 196036 - protein, 329 aa, Zea Mays
MSIHFFYKFGKKIKLRTTKVNYIFKEWSQLIFHFPFMNAVANMLFIEIPAGVGYSYSNTTSDYYNTGDQRTTDDAYTFLITWLEKFPEYQDRDFFITGESYAGHYIPELANLILSKNRATNVTSIKLKGVAIGNADLDDNLTLRASYDYYWMHAMISGKAYKAVKDKCGFNGTYTEDCQNAMDLATQEKGNIDDYDIYAPICQDASNPSKSSDSLVFGDPCTNHYVSSYLNRPEVQRALHANTTGLGYPWMDCSQQIFDNWKDSPETMLPSIKKLISSGTRIWLYSGDMDAVCSFISTQYVLDNLGLPIEAAWRPWRVDNEVHSPLFIR

SEQ ID NO: 196037 - protein, 403 aa, Zea Mays
MQDWRVREFEGKFTDEFAHSSSNEHKGGVEASGVISSKKLKHAVANEKIQGVIPGTNSSGSLKRNSENIQHANGVLSQNISCAGDYKNGSIAFPLREENTITETRCPDDNWNSCQFALNNGSSILNNHSAPQDSLTYGDNDLNYIEWPGIDNFEDVDTLFRSSDSTYGQQQLENADGLSWIPSSDAVYSTDVALQQGLDSSYSDYGILDDLSAFQCAEDKSLPLVDPSSALCDNQFNDTYLFSEQKNVNAYGEQIYQEDLMELLPTDQICSGHENIDMLQVGNQYPSENAIQGTEDKKFSIASTSQLSSQNLLNQRHHLDSSSPSNITSESYPGKFGPSSCSSAQRNSKVQKKTVNIQPRQPANDNVMNTSRASYPCENYETERRGLGKELWGILKLQWVVQW

SEQ ID NO: 196038 - protein, 360 aa, Zea Mays
MQDWRVREFEGKFTDEFAHSSSNEHKGGVEASGVISSKKLKHAVANEKIQGVIPGTNSSGSLKRNSENIQHANGVLSQNISCAGDYKNGSIAFPLREENTITETRCPDDNWNSCQFALNNGSSILNNHSAPQDSLTYGDNDLNYIEWPGIDNFEDVDTLFRSSDSTYGQQQLENADGLSWIPSSDAVYSTDVALQQGLDSSYSDYGILDDLSAFQCAEDKSLPLVDPSSALCDNQFNDTYLFSEQKNVNAYGEQIYQEDLMELLPTDQICSGHENIDMVGNQYPSENAIQGTEDKKFSIASTSQLSSQNLLNQRHHLDSSSPSNITSESYPGKFGPSSCSSAQRNSKEENCQHTTKTASK

SEQ ID NO: 196039 - protein, 412 aa, Zea Mays
MQDWRVREFEGKFTDEFAHSSSNEHKGGVEASGVISSKKLKHAVANEKIQGVIPGTNSSGSLKRNSENIQHANGVLSQNISCAGDYKNGSIAFPLREENTITETRCPDDNWNSCQFALNNGSSILNNHSAPQDSLTYGDNDLNYIEWPGIDNFEDVDTLFSSDSTYGQQQLENADGLSWIPSSDAVYSTDVALQQGLDSSYSDYGILDDLSAFQCAEDKSLPLVDPSSALCDNQFNDTYLFSEQKNVNAYGEQIYQEDLMELLPTDQICSGHENIDMLQVGNQYPSENAIQGTEDKKFSIASTSQLSSQNLLNQRHHLDSSSPSNITSESYPGKFGPSSCSSAQRNSKAGVTLKCANAVQKKTVNIQPRQPANDNVMNTSRASYPCENYETERRGLGKELWGILKLQWVVQW

SEQ ID NO: 196040 - protein, 362 aa, Zea Mays
MQDWRVREFEGKFTDEFAHSSSNEHKGGVEASGVISSKKLKHAVANEKIQGVIPGTNSSGSLKRNSENIQHANGVLSQNISCAGDYKNGSIAFPLREENTITETRCPDDNWNSCQFALNNGSSILNNHSAPQDSLTYGDNDLNYIEWPGIDNFEDVDTLFRSSDSTYGQQQLENADGLSWIPSSDAVYSTDVALQQGLDSSYSDYGILDDLSAFQCAEDKSLPLVDPSSALCDNQFNDTYLFSEQKNVNAYGEQIYQEDLMELLPTDQICSGHENIDMLQVGNQYPSENAIQGTEDKKFSIASTSQLSSQNLLNQRHHLDSSSPSNITSESYPGKFGPSSCSSAQRNSKEENCQHTTKTASK

SEQ ID NO: 196041 - protein, 297 aa, Zea Mays
MGGGDDRRAAALQRSSSPWSVGERWRAHAGMVLVMLAYSGYHVLAKSVLNVGMNQVVFCVYRDLLALLVVAPVAFLRERRVRPPVTPQLLASFALLGFTGLYGNPLLCLVGLRYTNASYAAAFQPSIPVLTFLLAAIVGVEAISVFTKDGILKVTGTAVCVSGAILMALYRGPSLIALLRSMPTAWTSAPYHPATPDWFTPAVPVLEQGVEAWQLGVLCLIGNCLLVAVYLVVQAPVMIKYPASLSVTAYSYFFATTFMVLTGVCATSGLHEWALTKAEVIAVLYAVSDYSLYYMLN

SEQ ID NO: 196042 - protein, 130 aa, Zea Mays
MGGGDDRRAAALQRSSSPWSVGERWRAHAGMVLVMLAYSGYHVLAKSVLNVGMNQVVFCVYRDLLALLVVAPVAFLRESVIGGVSIIAGLYLVIWARYNQGQRAPTDGCLDPLIIVDNPRIHKTQESPFV

SEQ ID NO: 196043 - protein, 324 aa, Zea Mays
MGGGDDRRAAALQRSSSPWSVGERWRAHAGMVLVMLAYSGYHVLAKSVLNVGMNQVVFCVYRDLLALLVVAPVAFLRERRVRPPVTPQLLASFALLGFTGLYGNPLLCLVGLRYTNASYAAAFQPSIPVLTFLLAAIVGVEAISVFTKDGILKVTGTAVCVSGAILMALYRGPSLIALLRSMPTAWTSAPYHPATPDWFTPAVPVLEQGVEAWQLGVLCLIGNCLLVAVYLVVQAPVMIKYPASLSVTAYSYFFATTFMVLTGVCATSGLHEWALTKAEVIAVLYARYWGSLYNCWSLSGHLGSLQSRAAGAYGWLFGPSYYCG

SEQ ID NO: 196044 - protein, 183 aa, Zea Mays
MEAVVATTTTRVSFPLLPTAGRPLLPPVLARPRRGFASVSATSTSGAGGGGGRSSAGGCGGDGGGDDSGAGAAAAAAAVAALGESEQQEDGDSDAIVLHVGGMTCGGCADKVKRILESQPEVAAATVDVEKATAIVWTTPEAKATKDWQKQLAEKLANHLTSCGFQSHLQGVKDEGEAEQTDA

SEQ ID NO: 196045 - protein, 791 aa, Zea Mays
MQQLVDGVITENMLYPSASTVGSRQGYHGEMLPITDNLDNRSFSNHDIARMLDGANIGLSDVSSTLFDSVPFNEPFTNYSAGFTEPTLHSSFACLEANDLDDSSCLQTFTSEALYTNHLNQKEADALGFTGILASEVNRDRYNDGSIKHSLLKQSSLDLLTIEAPGLKKNDSFSRWMSKELEELDAYVVNPSLSQDQLFSILDVSPSCAYIGTNTKVSVTGTFLVNKKHVESHRWSCMFGDVEVPAEVLTDGTLRCYAPAHQSGRVPFYVTCSNRVACSEVREFEYRDSEAHYMETSRSQANGVNEMHLHIRLEKLLTLGPDDHQMLVISSGNEKYEIMNAINSLMLDGKWSNQESSVKEVVSTARVQSLKKLVKEKLHQWLICKVNDDGKGPNVLCKEGQGVIHLVAALGYDWAIRPIMIAGVNVNFRDAHGWTALHWAASLGRERTVSVLIANGAAAGALTDPTSEFPSGRSPADLASVNGHKGIAGFLAESALTSHLSALTIRESNDSTVEACGLPFAEDLTGIDSVHLAGEGPDAESLEGSLSAVRKSTQAAARIFQAFRVESFHRKKVVEYGDDTCGLSDECTLSLVSLKNVKPGQHDTHLHSAAVRIQNKFRGWKGRKEFMIIRQRIVKLQAHVRGHQVRKNYRKVVWSVGIVEKVILRWRRKRPGLRGFRPEKQLEGPSQIQPAKAEDEYDFLHDGRRQAEARLQRALARVHSMSQYPEAREQYHRLTTCVAEMKQSRMMQDEMLSQAAGGADDFMAGLEDLICIDDAPPRCLPFGEAEPFYIR

SEQ ID NO: 196046 - protein, 778 aa, Zea Mays
MQQLVDGVITENMLYPSASTVGSRQGYHGEMLPITDNLDNRSFSNHDIARMLDGANIGLSDVSSTLFDSVPFNEPFTNYSAGFTEPTLHSSFACLEANDLDDSSCLQTFTSEALYTNHLNQKEADALGFTGILASEVNRDRYNDGSIKHSLLKQSSLDLLTIEAPGLKKNDSFSRWMSKELEELDAYVVNPSLSQDQLFSILDVSPSCAYIGTNTKVSVTGTFLVNKKHVESHRWSCMFGDVEVPAEVLTDGTLRCYAPAHQSGRVPFYVTCSNRVACSEVREFEYRDSEAHYMETSRSQANGVNEMHLHIRLEKLLTLGPDDHQMLAINSLMLDGKWSNQESSVKEVVSTARVQSLKKLVKEKLHQWLICKVNDDGKGPNVLCKEGQGVIHLVAALGYDWAIRPIMIAGVNVNFRDAHGWTALHWAASLGRERTVSVLIANGAAAGALTDPTSEFPSGRSPADLASVNGHKGIAGFLAESALTSHLSALTIRESNDSTVEACGLPFAEDLTGIDSVHLAGEGPDAESLEGSLSAVRKSTQAAARIFQAFRVESFHRKKVVEYGDDTCGLSDECTLSLVSLKNVKPGQHDTHLHSAAVRIQNKFRGWKGRKEFMIIRQRIVKLQAHVRGHQVRKNYRKVVWSVGIVEKVILRWRRKRPGLRGFRPEKQLEGPSQIQPAKAEDEYDFLHDGRRQAEARLQRALARVHSMSQYPEAREQYHRLTTCVAEMKQSRMMQDEMLSQAAGGADDFMAGLEDLICIDDAPPRCLPFGEAEPFYIR

SEQ ID NO: 196047 - protein, 615 aa, Zea Mays
MSKELEELDAYVVNPSLSQDQLFSILDVSPSCAYIGTNTKVSVTGTFLVNKKHVESHRWSCMFGDVEVPAEVLTDGTLRCYAPAHQSGRVPFYVTCSNRVACSEVREFEYRDSEAHYMETSRSQANGVNEMHLHIRLEKLLTLGPDDHQMLVISSGNEKYEIMNAINSLMLDGKWSNQESSVKEVVSTARVQSLKKLVKEKLHQWLICKVNDDGKGPNVLCKEGQGVIHLVAALGYDWAIRPIMIAGVNVNFRDAHGWTALHWAASLGRERTVSVLIANGAAAGALTDPTSEFPSGRSPADLASVNGHKGIAGFLAESALTSHLSALTIRESNDSTVEACGLPFAEDLTGIDSVHLAGEGPDAESLEGSLSAVRKSTQAAARIFQAFRVESFHRKKVVEYGDDTCGLSDECTLSLVSLKNVKPGQHDTHLHSAAVRIQNKFRGWKGRKEFMIIRQRIVKLQAHVRGHQVRKNYRKVVWSVGIVEKVILRWRRKRPGLRGFRPEKQLEGPSQIQPAKAEDEYDFLHDGRRQAEARLQRALARVHSMSQYPEAREQYHRLTTCVAEMKQSRMMQDEMLSQAAGGADDFMAGLEDLICIDDAPPRCLPFGEAEPFYIR

SEQ ID NO: 196048 - protein, 988 aa, Zea Mays
MADTRKFVLPGQPPDISQILQEAQNRWLRPTEICEILSNYKLFSIAAEPPNMPRSGSLFLFDRKVLRYFRKDGHNWRKKKDGKTVKEAHEKLKAGSIDVLHCYYAHGEENENFQRRTYWLLEEDFTHIVLVHYLEVKGCKQSFNRVKEELMQLSNVDSPSCSNSITSQNQMGPQNMEAAESPISGQISEYEDTESADNCRASSRYHPLAEMQQLVDGVITENMLYPSASTVGSRQGYHGEMLPITDNLDNRSFSNHDIARMLDGANIGLSDVSSTLFDSVPFNEPFTNYSAGFTEPTLHSSFACLEANDLDDSSCLQTFTSEALYTNHLNQKEADALGFTGILASEVNRDRYNDGSIKHSLLKQSSLDLLTIEAPGLKKNDSFSRWMSKELEELDAYVVNPSLSQDQLFSILDVSPSCAYIGTNTKVSVTGTFLVNKKHVESHRWSCMFGDVEVPAEVLTDGTLRCYAPAHQSGRVPFYVTCSNRVACSEVREFEYRDSEAHYMETSRSQANGVNEMHLHIRLEKLLTLGPDDHQMLAINSLMLDGKWSNQESSVKEVVSTARVQSLKKLVKEKLHQWLICKVNDDGKGPNVLCKEGQGVIHLVAALGYDWAIRPIMIAGVNVNFRDAHGWTALHWAASLGRERTVSVLIANGAAAGALTDPTSEFPSGRSPADLASVNGHKGIAGFLAESALTSHLSALTIRESNDSTVEACGLPFAEDLTGIDSVHLAGEGPDAESLEGSLSAVRKSTQAAARIFQAFRVESFHRKKVVEYGDDTCGLSDECTLSLVSLKNVKPGQHDTHLHSAAVRIQNKFRGWKGRKEFMIIRQRIVKLQAHVRGHQVRKNYRKVVWSVGIVEKVILRWRRKRPGLRGFRPEKQLEGPSQIQPAKAEDEYDFLHDGRRQAEARLQRALARVHSMSQYPEAREQYHRLTTCVAEMKQSRMMQDEMLSQAAGGADDFMAGLEDLICIDDAPPRCLPFGEAEPFYIR

SEQ ID NO: 196049 - protein, 70 aa, Zea Mays
MGKLSLGWTNTRKAGPQWEWRDGESIVYPPGKRLDGGVLSSRLAGTRSGIEKPVGELTYARVKCYICRVV

SEQ ID NO: 196050 - protein, 250 aa, Zea Mays
MGPRHVTTLAPSFESPAPCPSRKRPSVLYQKETHGPTAAPLRRSKGPLDPVPELQGSNETNVTDVGAEETEGVHENTDEIDALLDSSDSDEGPHELDRARRQPAAENETSSVESVASAAGSAPPAKKRRLSSCTDRSVVDTASSARPDHSVEQKPLASDCDAQSCCVGEVVESGRLRFSPGEGEGEVEAAEGDSPDDQRRRRERIQETVAALRNIVPGGTAKDATAVLDEAICYLQYLKLKVKTLGAASL

SEQ ID NO: 196051 - protein, 266 aa, Zea Mays
MEYAAGGELFERICSAGRFSEDEARFFFQQLISGVSYCHSMQVCHRDLKLENTLLDGSVAPRLKICDFGYSKSSVLHSQPKSTVGTPAYIAPEVLSRKEYDGKVADVWSCGVTLYVMLVGAYPFEDPDDPKNFRKTITRILSVQYSIPDYVRVTMECGHLLSRIFVGNPEQRITIPEIKKHPWFLKNLPIEMTDEYQQSMQLADMNTPGQSLEEVMAIIQEARKPGDAMNLAGQLPCLGSVDLDDIDFDDIDDIDTENSGDFVCAV

SEQ ID NO: 196052 - protein, 444 aa, Zea Mays
MEVHADVDGSGVPLAVLLKRELCNQKVERPDILFGEANKSKKGEDFTLLLPRCHRTTGEGGGSGGGENAGGGDDDDTISVFAIFDGHNGSLAAIYTRENLINNVLAAIPPNLTSEEWTAALPRALVAGFVKTDKDFQTKAARSGTTVTFVIIDGWVVTVASVGDSRCILESAEGSVYFLSADHRLDANEEEVERVTASGGEVGRINIAGGAGIGPLRCWPGGLCLSRSIGDIDVGEFIVPVPHVKQVKLSNAGGRLVIASDGVWDALCFQEALNYIRGLPAEAAANRIVKEAVTSKGLRDDTTCIVVDILPPEKLSPPLKRPGKGVIKTLFRRRPSDEMSEDQMDRGCLEPDVVEEIYEEGSAMLARRLNINYPSGNMFKLHDCAVCQLEMKPGEGTSVHGNMPKHSRVDPWGGPFLCSSCQLKKEAMEGKLHSRSMDVFTQKL

SEQ ID NO: 196053 - protein, 310 aa, Zea Mays
MFSAARSGTTVTFVIIDGWVVTVASVGDSRCILESAEGSVYFLSADHRLDANEEEVERVTASGGEVGRINIAGGAGIGPLRCWPGGLCLSRSIGDIDVGEFIVPVPHVKQVKLSNAGGRLVIASDGVWDALCFQEALNYIRGLPAEAAANRIVKEAVTSKGLRDDTTCIVVDILPPEKLSPPLKRPGKGVIKTLFRRRPSDEMSEDQMDRGCLEPDVVEEIYEEGSAMLARRLNINYPSGNMFKLHDCAVCQLEMKPGEGTSVHGNMPKHSRVDPWGGPFLCSSCQLKKEAMEGKLHSRNSQFDVRPMPK

SEQ ID NO: 196054 - protein, 293 aa, Zea Mays
MQSATRLTLLLCAAWAAALLYGEMGAYWVSYLACSWPSSSSSPPNNHVKVAVVADPQLMDSTSLGLPSSSVALQAAEFYTDLNMRRSFQSTILPFKPDVVLFLGDHFDGGPYMPDEEWQESLFRFKHIFGLNDQRTKQQIPIYYLPGNHDIGYSAFHSVHPEVLSRYEKEFGSRNYQFSAGKVDFVVVDAQTLDGAKQSKERSSSWEFIKTLSPGNTSNPKVLLTHIPLYRPDNSPCGPHRSSPVINQRVSYAALDQGITYQNYLTKETSDLLLSLLKPAMIMTNAQLSTPLL

SEQ ID NO: 196055 - protein, 282 aa, Zea Mays
MMVAEKPALGFQAHGDGDDELELELASPAPPPRKMHSLEFEHIGSLAAVAESLAPGSRWQRALTSVRVVIFQAKINVLLPFGPLAIMLHYLSGTHQGWVFLFSLIGITPLAERLGYATEQLACYTGPTVGGLLNATFGNATEMIISIYALKNGMIRVVQQSLLGSILSNMLLVLGCAFFAGGLVHSDRDQVFNKASAVVNSGLLLMAVLGLMFPAVLHFTHSEAQYGKSEVALSRFSSCIMLVAYASYLFFQLKSHRSMYSPIGDVSSLPLDLCKHWKLENK

SEQ ID NO: 196056 - protein, 331 aa, Zea Mays
MMVAEKPALGFQAHGDGDDELELELASPAPPPRKMHSLEFEHIGSLAAVAESLAPGSRWQRALTSVRVVIFQAKINVLLPFGPLAIMLHYLSGTHQGWVFLFSLIGITPLAERLGYATEQLACYTGPTVGGLLNATFGNATEMIISIYALKNGMIRVVQQSLLGSILSNMLLVLGCAFFAGGLVHSDRDQVFNKASAVVNSGLLLMAVLGLMFPAVLHFTHSEAQYGKSEVALSRFSSCIMLVAYASYLFFQLKSHRSMYSPIGDEEAAAEEEDEKEITQGEAICWLFILTIWISVLSGYLVDAIQWPLLVLFCFLLWGMLLNMQAPSCLP

SEQ ID NO: 196057 - protein, 448 aa, Zea Mays
MMVAEKPALGFQAHGDGDDELELELASPAPPPRKMHSLEFEHIGSLAAVAESLAPGSRWQRALTSVRVVIFQAKINVLLPFGPLAIMLHYLSGTHQGWVFLFSLIGITPLAERLGYATEQLACYTGPTVGGLLNATFGNATEMIISIYALKNGMIRVVQQSLLGSILSNMLLVLGCAFFAGGLVHSDRDQVFNKASAVVNSGLLLMAVLGLMFPAVLHFTHSEAQYGKSEVALSRFSSCIMLVAYASYLFFQLKSHRSMYSPIGDEEAAAEEEDEKEITQGEAICWLFILTIWISVLSGYLVDAIQGASDSLNLPVAFISVILLPIVGNAAEHASAIMFAMKNKLDITLGVAIGSSTQISMFVIPFCVVIGWMMGQEMDLNFQLFETATLFITVLVVAFMLQEGTSNYFKGLMLILCYLIVAASFFVHVDPDASKYLVYCFLRCTRAN

SEQ ID NO: 196058 - protein, 111 aa, Zea Mays
MFAMKNKLDITLGVAIGSSTQISMFVIPFCVVIGWMMGQEMDLNFQLFETATLFITVLVVAFMLQEGTSNYFKGLMLILCYLIVAASFFVHVDPDASKYLVYCFLRCTRAN

SEQ ID NO: 196059 - protein, 73 aa, Zea Mays
MIMSRLKVSREKSPITSMAKSSVVGMSYCTGSPSLAPIILMINSSSACSISLSLAILNFLAKGLWVSNICNSS

SEQ ID NO: 196060 - protein, 283 aa, Zea Mays
MSCIGGSSSSTASNKRKGKEIVVEVSAVVEEEEKQQQQQRKGKEVALEEVPLPAVAESYDDSDLDSGSGWDFYEEEYSEKKEQERKEKKPAWLDTLLRTKFWDPCKEHGSKNRADQCMFCLRCSKLSCPRCVHDQPGHRLLKIRRYVYRSVVHASDMQELGIDVSRIQTYVINARKVLHLRPMNRSKHFRPQAGTPRCITCRTWLRSAPNLFCSLTCEGPKLSSATGVSKCIWLNLLRSCCLMTLKLSMRSCLHKLSRHHWRQPPPQIRTCHSAGGRASRQRH

SEQ ID NO: 196061 - protein, 561 aa, Zea Mays
MGGPVKDANDMLTRWLEKSTELRTSLQTSLLPIGCIKIGLSHHRALLFKILAYSVGIPCKLVKGSNYTGGDDDDAINIIKMDNEREFLVDLMAAPGALIPADILSWKGNSLNSNRKLGLNRTAGSSSTVDANVDPTVLPLEPKGGQLPLFSSGDWMSDIDSGYEAAEIAASTQTSSGVTPYLCSAGSVFGSSWMLVNHDQSDGPSTSAGTSSQQKVVPQSEHQRNLNRLPDLQEIPESKNLFADLVPSGDNKSKKTSVPFKGPDHRNNELQKRRENIVPNAGRPHQRLVMKNWSPYNDVSNNKQYNYVEDSFARRNVGNNAAPSSSQMPRPAARSNLNSRLHNDASYHNYDSIMAGTSAMNITSTAETGKVPERVMRGDLDKGQTNYRLEDQHVIVQPPQGRLPWGIPAEGSVPMNRVQSQAKQHLENMDAKQDHKKLLPDPKKSPLDKFMDTSLPSRNMDMRSQRLDFDDVSECEIPWEDLVIGERIGLGSYGEIYCADWNGTEVAVKKFLDQDFYGDALDEFRSEDAKIFQRNFVIDLLSYEDNSYRYAIPANIQQGLI

SEQ ID NO: 196062 - protein, 441 aa, Zea Mays
MKDILSWKGNSLNSNRKLGLNRTAGSSSTVDANVDPTVLPLEPKGGQLPLFSSGDWMSDIDSGYEAAEIAASTQTSSGVTPYLCSAGSVFGSSWMLVNHDQSDGPSTSAGTSSQQKVVPQSEHQRNLNRLPDLQEIPESKNLFADLVPSGDNKSKKTSVPFKGPDHRNNELQKRRENIVPNAGRPHQRLVMKNWSPYNDVSNNKQYNYVEDSFARRNVGNNAAPSSSQMPRPAARSNLNSRLHNDASYHNYDSIMAGTSAMNITSTAETGKVPERVMRGDLDKGQTNYRLEDQHVIVQPPQGRLPWGIPAEGSVPMNRVQSQAKQHLENMDAKQDHKKLLPDPKKSPLDKFMDTSLPSRNMDMRSQRLDFDDVSECEIPWEDLVIGERIGLGSYGEIYCADWNGTEVAVKKFLDQDFYGDALDEFRSEVGELLSVSILEFS

SEQ ID NO: 196063 - protein, 448 aa, Zea Mays
MKADILSWKGNSLNSNRKLGLNRTAGSSSTVDANVDPTVLPLEPKGGQLPLFSSGDWMSDIDSGYEAAEIAASTQTSSGVTPYLCSAGSVFGSSWMLVNHDQSDGPSTSAGTSSQQKVVPQSEHQRNLNRLPDLQEIPESKNLFADLVPSGDNKSKKTSVPFKGPDHRNNELQKRRENIVPNAGRPHQRLVMKNWSPYNDVSNNKQYNYVEDSFARRNVGNNAAPSSSQMPRPAARSNLNSRLHNDASYHNYDSIMAGTSAMNITSTAETGKVPERVMRGDLDKGQTNYRLEDQHVIVQPPQGRLPWGIPAEGSVPMNRVQSQAKQHLENMDAKQDHKKLLPDPKKSPLDKFMDTSLPSRNMDMRSQRLDFDDVSECEIPWEDLVIGERIGLGSYGEIYCADWNGTEVAVKKFLDQDFYGDALDEFRSEAATRICIRREEWGGRWSCC

SEQ ID NO: 196064 - protein, 250 aa, Zea Mays
MICKVKRLIHTSSIAVVFDGVNGLLDANESLPYPDKFPDAYGQTKAEAEKIVMKANGISGLLTCCIRPGSIFGPGDIVILPTLDQCGKTHFVFGDGKNCDDFVYVENVVHGHICAEKTLSTMEGAKTSGGKAYFITNTEPMNMWDFLYLLQEELGYKRLFKIRIPLIVIQAVSYLVEWGYKVLHHYGMCQPQVLTPARIKYLTVHRTFSCNKAAEELGYKPIVTLMDGMKLAVKSYIRLRNHADLSYKHI

SEQ ID NO: 196065 - protein, 186 aa, Zea Mays
MLLLSSLMRPTLRERSPGTLDSWLWLISLIRRRFWSSSVCTCTKLVWNACSTLVSTPPTPNPDSVVSPSPPSMEPGQLLLVVVGVLVLAILHSLSAAAQSLLLAVVVVVLLRSTHQHLRSRGGEEKDREEGDQEILRHTKQAEAGWTAFFCFFFLFFLLVGVFFLLSAVRWRESFGLRRRRGRATF

SEQ ID NO: 196066 - protein, 480 aa, Zea Mays
MEEVPREKVNFSEELLSSTSFARQLADQMTLAKAYVILAKEHDNLQLAWELSSQIRNCQRLLSEGAVSGRAITKDEAHPIISRLALLIYKAQDSHYDISTTIVTLKNHALALEERAKAAIVQSAEFGQLAAESFPKNLHCLTVKLTEEWLRNPKHRSRSEENRNSTRLVDNNLYHFCIFSDNVLATSVVVNSTVSNANHPQQLVFHVVTDRIHFGAMSTLFLINDFKGCTVEVRCIDEFSWLNASSSPLVRQLSEVETQGYYYSAGSKNPEREIKFHNPKFVSLLNHLRFYIPQILPNLEKVVFLDDDVVVQKDLTQLFSIELHGNVIGAVETCLESFHRYHKYLNFSHPTISSKIDPHTCGWAFGMNIFDLIAWRKANATSLYHYWQEQNSDLLLWRTGTLPAGLLTFYGLMEPLDRRWHVLGLGYDVDIDDRLIESAAVVHYNGNMKPWLKLAIRRYKYIWERYVNISHPYVRECMLH

SEQ ID NO: 196067 - protein, 57 aa, Zea Mays
MQDGKFATEKSTMRTKHCTGYTHEMTTVVHDSDIARSRQRRGDGGRPAAGSVGLRLL

SEQ ID NO: 196068 - protein, 136 aa, Zea Mays
MKRKKSTDQPPKTAMHNRSSSFSGESKPQHTPKNLMRTAATAAFTVPREGIPCGSTTVSHKIQQIRVYRQAADARKPEMDADLNLAARFGRLRRKSGHGSETTNRGLSGQRKGPYREAAARRWRATGGGVGGTAAA

SEQ ID NO: 196069 - protein, 104 aa, Zea Mays
MKEHKVAYRKEVASVLTISPVVVIGLAGNPSSNLLGRISLCSRWFLNRWSTCSWCHCWFGGLTASKEITQRTLTTTGTTTTAHREAAARRWRATGGGVGGTAAA

SEQ ID NO: 196070 - protein, 565 aa, Zea Mays
MAGQAGNPVNHPISPHVISGAFVQQYYHILHEQPDQVHKFYQDSSILGRPDSNGIMAYVTTMRDINEKIMSMDFRNCLTEIETADAQLSHKDGVLIVVTGSLTSDEGVFRRFTQSFFLAPQESGGYFVLTDVFRFISERKPAEINQVATQENEISQNVRPASETCSALPEPIPADGSVISDHVTADSNVTEKQISDLSANGTAIESNDNTQPPVQVPKEDPKKALLVAPPPPTQMDVTKKSYASIVKVMKEGPPTPVVKTTSSVSKQKPAPKPVSTAVEGLEKPSEKPTQAIGTGDGIVAQNNSSRNEQGYSIFIKNLPFHANIEMVEEEFKKFGTIKPGGVQVRHNKVDRFGFGFVEYESQQSMQAAIEASPIRMADKEVGIEAKRANSRGECTMVITLEGEEVAMWTTQTTEAAAASTARMKGRCTTAGMKGRCTTAGMKGTSTTTGMRGSSTTDGMMVARTTTGATMVARTITGAMMVARTSAAGMTVVPRTSTAGMTVAARTSAAGTMVLARTSTSGMTALVRTSTGGTTSEIRMTSLDEDGVHLHQGTVTTRTGMGGSVA

SEQ ID NO: 196071 - protein, 158 aa, Zea Mays
MASNASQGSNSASTTEQGIGGSMFNQSADAKSPSTSDNRNQNDMLPPTKAAEKPLNGTATEQQPRLRTLGSLTTRTGSTSDIRKLMMEDMPMVSSKVEGPNARRIDGFLYRYKKGEDVRIVCVCHGSFLTPAEFVKHAGGGDVPNPLRHIVVNPAPFS

SEQ ID NO: 196072 - protein, 75 aa, Zea Mays
MCCTKQHIAEIHLFCAAASVDRATSSFHADLRVLPATVASSLKKIVCQSVCVSTSKKVRTSCRLGSWGLADLQWS

SEQ ID NO: 196073 - protein, 123 aa, Zea Mays
MSGVQEQFEIKFRLPDGIDIGPRRFPPASTVATLKETIIAQWPKDKEKGPRTVNDLKLINAGKILENNKTLSECKSPICDFSGMTTMHVVVRAPTSSKQSGKRAATKAKGFRFSSIFMLPRVT

SEQ ID NO: 196074 - protein, 52 aa, Zea Mays
MSGVQEQFEIKFRLPDGIDIGPRRFPPASTVATLKETIIAQWPKELFPYPRE

SEQ ID NO: 196075 - protein, 53 aa, Zea Mays
MPVFSLFPLLLECCIMFEALSPFISFSSIVGKLRYTITHFGASVQSNYPEHPI

SEQ ID NO: 196076 - protein, 141 aa, Zea Mays
MGKKEADSSCRRLRWPLPIVRSHSSHSTGKIRSTPSHATQRPGQHASRWLIVSGDSGPLELLQPQSQLSRSSQPPLPLPHPPTTTMDPATVVVIEESYRSYYCMRNSKQCTEDNRAKAKLQKRKGGHLTVERWSKVPISVA

SEQ ID NO: 196077 - protein, 138 aa, Zea Mays
MGKKEADSSCRRLRWPLPIVRSHSSHSTGKIRSTPSHATQRPGQHASRWLIVSGDSGPLELLQPQSQLSRSSQPPLPLPHPPTTTMDPATVVVIEESYRSYYCMRNRAYEEALFSAAVCQLQVDRPLKKLTLLAIEEP

SEQ ID NO: 196078 - protein, 73 aa, Zea Mays
MCYCHLPSHLSPVIFCPPGDSCKCSPPEDMKKVRKQIVDHIYPWILECQEKGHAKVPSLGSKWMFRTDTGALK

SEQ ID NO: 196079 - protein, 191 aa, Zea Mays
MGKKEADSSCRRLRWPLPIVRSHSSHSTGKIRSTPSHATQRPGQHASRWLIVSGDSGPLELLQPQSQLSRSSQPPLPLPHPPTTTMDPATVVVIEESYRSYYCMRNRAYEEALFSAAVCQLQVDRPLKKLTLLAIEGDSCKCSPPEDMKKVRKQIVDHIYPWILECQEKGHAKVPSLGSKWMFRTDTGALK

SEQ ID NO: 196080 - protein, 237 aa, Zea Mays
MQRREVGKYFFVNLKVCFLLPTRTAYQLGSDSVNKGQYPISTTHTAPGICTMLPVKYNFRQALPEIAQKITRLENEIPCLILLARLAHFLLHTDLAEHHKLGLDISELEKKIIYEMMRPERTLLYLVPGRLVRVRDGSTDWGWGVLAGITFTGDPAKNKKDLFGAIAMVLRVVGGKNSQLSLPTRYSLNTIFTSLIGLFWNTNYEFGKKRKHARIIDKKIAKKKSEAVEYQKLLPIG

SEQ ID NO: 196081 - protein, 686 aa, Zea Mays
MPNEWRSILVDPLKCASSGMFVNLSAVMLRLCEPFLDNMESKKDKIDVKYLFCNNRIDFKDLTAINASSEEVSSWIESINNEHAQNNASGEARFVESQEATSSGKNSASSQLRCSKKNFSFVCECFFMTSRVLNLGLMKAISDFKHISQQLARFEDDLESNRAVRDQGGGSPQLEQDITRLEKIVEILSQDKLCYEAQILRDGAFLQRALSFYRLMILWSVNLVGGFKMPLPSQCSKEFACIPEHFLDDAMDLLVLTSRIPKALESFVLDDFLSFIIMFMGSTSYIKNPYLRAKMVEVLNCWMPQRSGLSSTASLFEGHQLCLDYLVRNLLKLYVDIEFTGSHTQFFDKFNIRHNIAELLEYLWDVPSHRNAWRQIAKEEEKGVYLNFLNFLINDSIYLLDESLNKILELKEIEAEMTNTVEWERRPAQEREERLRVFHQWENIVRFDMRLANEDVGMLAFTSEQIPAPFLLPEMVERVASMLNYFLLQLAGPQRKSLTVKDPEKYEFKPKQLLKQIATIYVHISRGDKESVFPAAISKDGRAYNDQLFASAANILWKIGGDPKIIQEFMQLAGRAKAAASEAMDAEAILGDIPDEFLDPIQYTLMKDPVTLPSSKVTVDRPVIIRHLLSDSTDPFNRSHLTQDMLIPNTELKLQIEEFVQSQQLRKRTAAVSEIGQADGADDMAE

SEQ ID NO: 196082 - protein, 720 aa, Zea Mays
MNGLYDGLKDILLTLLKNLDTREKVLEYIAEVINKNASRSGMQVDPLKCASSGMFVNLSAVMLRLCEPFLDNMESKKDKIDVKYLFCNNRIDFKDLTAINASSEEVSSWIESINNEHAQNNASGEARFVESQEATSSGKNSASSQLRCSKKNFSFVCECFFMTSRVLNLGLMKAISDFKHISQQLARFEDDLESNRAVRDQGGGSPQLEQDITRLEKIVEILSQDKLCYEAQILRDGAFLQRALSFYRLMILWSVNLVGGFKMPLPSQCSKEFACIPEHFLDDAMDLLVLTSRIPKALESFVLDDFLSFIIMFMGSTSYIKNPYLRAKMVEVLNCWMPQRSGLSSTASLFEGHQLCLDYLVRNLLKLYVDIEFTGSHTQFFDKFNIRHNIAELLEYLWDVPSHRNAWRQIAKEEEKGVYLNFLNFLINDSIYLLDESLNKILELKEIEAEMTNTVEWERRPAQEREERLRVFHQWENIVRFDMRLANEDVGMLAFTSEQIPAPFLLPEMVERVASMLNYFLLQLAGPQRKSLTVKDPEKYEFKPKQLLKQIATIYVHISRGDKESVFPAAISKDGRAYNDQLFASAANILWKIGGDPKIIQEFMQLAGRAKAAASEAMDAEAILGDIPDEFLDPIQYTLMKDPVTLPSSKVTVDRPVIIRHLLSDSTDPFNRSHLTQDMLIPNTELKLQIEEFVQSQQLRKRTAAVSEIGQADGADDMAE

SEQ ID NO: 196083 - protein, 53 aa, Zea Mays
MKMVKTDRHIVFPLIYSLIELVLILLCNVRKSIFNNEWCMIRDGNGYPRPDTR

SEQ ID NO: 196084 - protein, 93 aa, Zea Mays
MPILLPMWHQHRRNQLCRHMQVIATLNQMRFHKDSKLLHPLLINLLTMDTTGGSMARRQLRVASIQGVTTNVPTRVVQLRKKWSAQQKDTSLK

SEQ ID NO: 196085 - protein, 287 aa, Zea Mays
MLCTTVPDGSFEMSHQQALAQVTAQAVHSQYNMINHTDYSIPFSSTTAPALITAQHANSSANVASAQEKPALPSHAGNSNIESNEVSQGLKTSAPTFDKPADDGYNWRKYGQKAVKGGEYPRSYYKCTHTSCPVKKKVERSAEGHITQIIYRGQHNHQRPPKRRSKDGGGPLNEADVLHENEDISTRSEPGSQEHSGKHEGSNDGILGPSVSRRGGGDEQLSGSSDSDEEQDDEQRAGDEDPGYANANKSEVDLLDDGYRWRKYGQKVVKGNPYPRTHKLWNYNSLP

SEQ ID NO: 196086 - protein, 252 aa, Zea Mays
MSNIFQGSFEMSHQQALAQVTAQAVHSQYNMINHTDYSIPFSSTTAPALITAQHANSSANVASAQEKPALPSHAGNSNIESNEVSQGLKTSAPTFDKPADDGYNWRKYGQKAVKGGEYPRSYYKCTHTSCPVKKKVERSAEGHITQIIYRGQHNHQRPPKRRSKDGGGPLNEADVLHENEDISTRSEPGSQEHSGKHEGSNDGILGPSVSRRGGGDEQLSGSSDSDEEQDDEQRAGDEDPGYANANKRWFLP

SEQ ID NO: 196087 - protein, 269 aa, Zea Mays
MMTNMKSHHKTTMNTYLFQRERMRFCALWMTNDPEYLWPQRPGESSSPGSPRWRTRGSQSMPWDWGDGGGEERMLGVGIEGGDDRLLAHASLAATFVATALLLASEVGSEVPARAAGAKTDVGDNLGVADDLVQQLLQPCHETFISAVQIVGADCGLPTWRNDEINAADGIDRGEGVDHDDDETDAEVGGDCGERVQETHAQQNARIVSVSGKCKQAGAEPSRVQRKKKPSAKNNGAEPNNRSNGARPEALLQMAIKHMAHEADMKPVI

SEQ ID NO: 196088 - protein, 153 aa, Zea Mays
MPPPRLFLPRCLQRRMAWRVTEAAIRGACRQEKVKVVSQVGRGCNDASPSSHSNVLVPLPTEAYGSEEFARCHLWWCGRIWVRKAETERDGQLGVNIGRQHRGGSATLIVVACLFEYAIGKACVHVNVITILGVSPSTKKEELERGSSLTYTQ

SEQ ID NO: 196089 - protein, 55 aa, Zea Mays
MRRMRKGGRWKVEKGRSLHTQDLKVEQEGEDHAFCGLSDACFSTFGQELAQSASA

SEQ ID NO: 196090 - protein, 73 aa, Zea Mays
MKTLCMVVKSVTFSDVDNTMAKTFLPSNTPESSANTLESPAKSGYFQYMSFNYGWLTVSKTFLAQRGLALIGC

SEQ ID NO: 196091 - protein, 153 aa, Zea Mays
MASHRSSKSKSKSKSKARNTTTTDLVCEGDQVAQRVLRLLGAEAQVRGALAVPLVHLVHVQLLHLGRPRVLGRRGLGREQRRPHGHGADTAPRMLPEPAHRDSGRLAHLGGGGGARDLGRGRGPERGGHGDLAEVAGWPGSRCDGGREWGIRE

SEQ ID NO: 196092 - protein, 165 aa, Zea Mays
MHKQAQAHPVSGSLPPPNQDSKKPSMACRQGAGDARTHIGAEDRLAPDDDFEFCILSSGGLAPVGDDAPGMCVADEVFYGGKLLPLRLSSADAAALLLLRSDSLDGAATASASASTTTSSGFSSRSVSRGSSSSSCCRSATEQSGKGTARRSRILEWLDDLSVSK

SEQ ID NO: 196093 - protein, 264 aa, Zea Mays
MSRRSPSAAAFSSVSTNTTATETSVLCFCVSGHFPLSLPVGRGALTRGHRCGSTLPHTYPSLPYLVPAAATQAGTTEEEQDPTSPPGWRGARVGRNRRGRRCLCERGGGTTGDGEMRKEEWLRVEARICGETRRVGWRVEKRVARRERGGDTELMARRSAGKRVARRERLARLMARRSSWRLARSSAGRDHRGEEGGSCRAHRGRGRAGGRGGERCGDRGRVGVGGGLERARIGRGRSSTAYWTIEIARWQNGRTEGGRLLLHT

SEQ ID NO: 196094 - protein, 91 aa, Zea Mays
MAGSQSQAMLEKMELRQSYRNVWHTDLTNAVAADLPSARACPTCCADARSTMTCQGTCAAPGTCRAAASAARASARKYALQPRCSAASATR

SEQ ID NO: 196095 - protein, 102 aa, Zea Mays
MAGSQSQAMLEKMELRQSYRNVWHTDLTNAVAADLPCLHVLPAAAGLHLLPGRLHRRQQRALGGRARHLLHVESGLLDGLLVHAGKLHIHFSWYSGNSPFLI

SEQ ID NO: 196096 - protein, 177 aa, Zea Mays
MAGSQSQAMLEKMELRQSYRNVWHTDLTNAVAADLPWCCLSLWCGPCVSYMLRRRALYNDMSRYVCCAGYMPCSGKCGESQCPEVCLATEVFCCFGNSVASTRFLLQDEFNIQTTQPSCSSCSSWPASAPWSPASSATASSRRPRTSSPACRIWSTGRFARACRRSTRWRWTRGTAR

SEQ ID NO: 196097 - protein, 208 aa, Zea Mays
MAVGKGGGLLVLVVVGLLLHGTRVADAQSLRVGYYSQTCGSAESIVADEVQKASYRDRGVLASLIRLHFHDCFVNGCDGSVLLEASDRQAEKNAKPNLSLRGFDVIERIKQRLEAACALTVSCADIVAFAARDSVKLSGGLWYAVPGGRQDGTVSRASMTGDLPPPNQRNVDLLAQYFYRKGLTLDEMVLLSARTRWASRTAARSTTG

SEQ ID NO: 196098 - protein, 185 aa, Zea Mays
MHDQPVEDIHNQDKKHENSHTGLVVNAFLFDTRKIGTFWFLDSFDTNEFQIILWLVLWWKPVRIMVILSKMFFAGVSLFAALGFVLYGGRLFMMLQRFPVESKGRRKKLQEVGYVTTICFSCFLIRCVMMCLNAFDKAADLDVLNHPILNFFYYLLVEIVPSALVLFILRKLPPKRGITQYHPIH

SEQ ID NO: 196099 - protein, 205 aa, Zea Mays
MRGLLSVEAAGAASSSASASVLNGAVDWWRDVNESPLWQDRIFHALAVLYGIVSAVALVQLIRIECRVPEYGWTTQKVFHFLNFLVNGVRSAVFVLRRNVQLVEPEHVLLDMPGLAFFTTYALLVLFWAEIYYQARAMSTDGLRPTFYWINSVVYAIQIILWLVLWWKPVRIMVILSKMFFAGVSLFAALGFVLYGGSGSYYTLS

SEQ ID NO: 196100 - protein, 180 aa, Zea Mays
MEGPTPPSLSPRGCSKEGNSDPAIPAPALSRHLRAAAPRKEGPTPPSPSPRGCLPLSPSPRGCSKEGRSDPAIAIPARPVERHQPHKSGLAPPATIGSVEHLMPTTVSRRLHGSESSVPAHQGHHGLDDDGNKVKVVITTQDLAPAPRRHKPRARPRPMASPNPAPGSSPFPFADDASAR

SEQ ID NO: 196101 - protein, 276 aa, Zea Mays
MAQSRRSLPTKVTMGSTTMATRSRSSSQPKGLAIDNLDYIFTVGAPSIINHRTAYVRALQPINKDEEVSISYIETAAVTKKRNNDLKQYFFTCTCPRCVKGFDEDALLEGFRCKSQACDGFLLPNSGKKAYTCQKCGASRDVEEIKNMRSKILQLSDKASSFLSSGNKAEAGSIYKIIKQLERNLYHAFSTTLLHTCETLLKIYLELQDWWTALTYCRLTIPVYERVYPPFHPMIGLQFYTCGKLEWDWFGGRRPLTLCPPAACLLLYCSLVFMFI

SEQ ID NO: 196102 - protein, 88 aa, Zea Mays
MVHHLDPTKTVAGQLYCYSVAAIYVHTYILNILQKALFIAYLNLSMLLCHHIFYFTARLSKVEHAVVSSIKKLTYQMLFSSSIETSKG

SEQ ID NO: 196103 - protein, 194 aa, Zea Mays
MLASGHDVSQPAPQTYVGHVNRETVKRVSFIGPNDEYVASGSDCGRIFIWRKGDGKFLRAMEGDECIVNCIEPHPHAMAIASCGIDNDVKVWTPSAIERAPMIHVDELQLRPRKRRAKLWRFGIRDLLIQQILVSENRQQSAEEGSSEDHEDNIELLDLVLQAAVEGVSSSSDEEEEDDDDGDNEEAAASDGSE

SEQ ID NO: 196104 - protein, 237 aa, Zea Mays
MASSAMLQVFGQPASTDVARVMACLLERQLEFELVRTDTFKRGRNNKLPELVKMRDPTSGHQVTLKHGDITLGDSRDICRYVCTEFPRWCTRDLYGAGAHRAVAAGGGAQLRRAELGAGAPPRLVAGHRRRERAAAAARAGRVRRRAGPERVPRGRRLHPGGPVPPPQRALPPNFSQGPRAAGVQAQRGALVRGHLVAPVVEAGRRGAGPDRALLPRRVRPASVRPRRRLTVLPALV

SEQ ID NO: 196105 - protein, 150 aa, Zea Mays
MLSALMDYLKSCWGPASPAGRPRKGSDATGRQDGLLWYKDGGQVVDGEFSMAVVQANNLLEDHSQVESGPLSTSEPGLQGTFVGVYDGHGGPETARYINDHLFNHLRRFASEHKCMSADVIRKAFRATEEGFISVDNKVNWRCVSEETRI

SEQ ID NO: 196106 - protein, 97 aa, Zea Mays
MVQSSPRNGIARKLVKSAVQEAAKKREMRYSDLKKVDRGVRRHFHDDITVIVVFFDSNAMTTAAWSRPSVSLRGGGFPIHSNTLAPFSVPTELNNSY

SEQ ID NO: 196107 - protein, 141 aa, Zea Mays
MTAREPRGFGFIQYFDPEDASDAKYYMDGKMLLGREIAVVFAEENRKKPSDMRAREKIRGRSYDGRLRSRSPGLNGSPRGRSRSQSRSYSPAPKRKHYSRSPAPRPRERSLSRSPAVNRSRSASPIVSRSPHRQGSLSVSE

SEQ ID NO: 196108 - protein, 360 aa, Zea Mays
MFPTVDEPSAAGAMVSSSFPDADAYGNGDSDGLDFPVDPNPNPVFSSPAAAAAPGSAGAAGERRQLFQRLWTDEDEIVILRAFAEFTAQRGTSFASHQYDTTPFYEDMRRRLNTGFTKNQLAEKIRRLKRKYRNCVERLRVAGSGFTFRSPHEQAIFEIARTIWRPASDKHGRDSDDEGGGGNVHDATFAPFAIDAAANGDCGGGHERGLRPHRGPSLWSANRAVISCGGGNGRVRRQHHGEPHPHGAVQGDGTRDAERRRQRRWHHGTSGAGATAPYRGGADGRGEVAAAADPGAGGVPASDGPAAGPGQGGAGGTQVRAARRGHEHLIVLGSAAPPASRLLADSASSITIRKKGSSYW

SEQ ID NO: 196109 - protein, 497 aa, Zea Mays
MTKAATIYGSKTQSDALRPGPLRPANIIRNKFPTYKNGSNGIVIKLADGPEIPPLKEIVAKETADLLDRRQRLSVRELAMKFEKGLSTATLLSNEVKWRQVALMERDILLKNLKSVLESLRGQVTGKTKDEIEESISMVEILTVQLSKREAELVQQKEEVTKLAKSLKQASEDAKRIVEEERANAHTEIETAKGAVQRVQQAVQEHEKMSQNTGKQKQDMEELKKEVREARRIKMLHQPSKAMDLENEIRILRNTFAEKSKDCVSLLKELETHKRLKENGTIPSFDLEGLQCLGSMLRIVGLSGTHMDLSNISIQWFRIHPKESNKEIISGATRPVYALEPHDVGRYLQAEIDVGGEIAVAKTAGPVDPADAGLVDYVETLVRKPETEFNVVVLQSNGVDQPKESVHVLNVGRLRMRLTKGKSVVAKEFYSSSMQLCGVRGGGEAASQAMFWRPRNDLSLVLAFESTRERNAAIMLARRFAVDCNIILAGPGDKTPW

SEQ ID NO: 196110 - protein, 394 aa, Zea Mays
MWSLQHWVEILTVQLSKREAELVQQKEEVTKLAKSLKQASEDAKRIVEEERANAHTEIETAKGAVQRVQQAVQEHEKMSQNTGKQKQDMEELKKEVREARRIKMLHQPSKAMDLENEIRILRNTFAEKSKDCVSLLKELETHKRLKENGTIPSFDLEGLQCLGSMLRIVGLSGTHMDLSNISIQWFRIHPKESNKEIISGATRPVYALEPHDVGRYLQAEIDVGGEIAVAKTAGPVDPDAGLVDYVETLVRKPETEFNVVVLQSNGVDQPKESVHVLNVGRLRMRLTKGKSVVAKEFYSSSMQLCGVRGGGEAASQAMFWRPRNDLSLVLAFESTRERNAAIMLARRFAVDCNVCAFTKRYVRVSDRCSIFFLPYLNEMWLQIILAGPGDKTPW

SEQ ID NO: 196111 - protein, 213 aa, Zea Mays
MRERRQNLSSVLGTLDRLYGMDWLTSAAKNECTAAFGFKWMLNQGLMENHRDIVNYLNRKGAMVVFLFRRNTLRRLISVVANNYDRRARQLNGVHKSHVHSKEEAEVLARFRPELDAPALIPSIRTAQRAVRACLRRFGSTRHMVLYYEDVVRDSRKALSRVQEFLGVPARELSSKHVKIHTRPLPDLVGNWEEVRRTLRGTEYSRFLDDDAE

SEQ ID NO: 196112 - protein, 166 aa, Zea Mays
MEKGKGLARRWAVELPDASSSSPAVPDPPGFTRSAPDADDAAGARQRKDSEAAWKAQKAWEVAQAPFKNLMMMGFMMWMAGSTVHLFSIGITFSALWQPLNALRSVGKVFEPFKDPRVDTIAPKLLFIALNLAAMGLGIWKLNTLGLLPTNPSDWVSSLAPARVCF

SEQ ID NO: 196113 - protein, 1009 aa, Zea Mays
MAPAKRKRAAAAAAAAAAAKWKVGDLVLAKMKGFPAWPAMISEPEQWKMPSTKKKPLVYFYGTKQIAFCNYADLEAFTEEKKRSLLAKRHGKGADFLRAVDEIIEVYDSLKDIGSNKVDLPAEEVKPGVEKFAENNSRMDTEDLVSSSYMHNDRKIEDHYVTTRSHDMVNSDRPSVDERCVVNSAPDEPIENVSILDEMRDISLRTNSFSNKQRDAQPQNCYTRTRVPSLRKSRSSLSLESRKAQGSDNVWLHSGEGTSNQPVTLGASNGNRMLNTPAEVDSTSNREASENGTTETELKSNGTSDLPMNTAVNFKRKRKSDRKPGPHYRDCTTPNKDDQLCAEYSEILPDSPNSKNEVSKSDGDEHLPLVKRARVRMGRSQLEDSPVDEIDVSNKKPELATALDQCDRNGKPASPANDYSADQVSAVVSSAPNLSCKLDTTILSKEGHLPWKNKEYHPKILALDVEAALPPSKRLHRALEAMSANVAENTKNIPEVTGPNEMTLNGSLLTASSLSNKSADAVVTVSNRPVIVQSPEPSLDTQFVHNPSGKCTSESILQNNSIPDSASVPSKENDHIVLKGDICEETLMDTKTANGSWDCSELNNDSCGKTSALCMKLNRPALNVTQATSVPDRLSSSLEKASENVAASGVKETKTFGSAVCDVDRSAEPIDRSNNNVTSNTMRHSETIVADSVNNVGDTASNSSLATKSSSIQSDADTRTSELHTFSSLALKELNHRKIKDRSTSPDSMPMKELIAVAQARRFSRSTSFPDNFLNAKYIPETSINIPSKEGPHRQLSPSNRIIRSTSGNDNVNSRSPFDNIQQKKLAAHGANAARRSFKDFLSTLTRTKESISRATRLAMECAKFGIAGEAIDIIVEHLEKESNLYKRVDLFFLVDSITQCSRNQKGGAGDVYPSLIQAVLPRILYAAAPPGNSAWENRKQCLKVLKLWLERKTLSEYIIRHHIREIETINEASFGSSRRPSRTERALNDPLRDNEGMLVDEYGRTRTI

SEQ ID NO: 196114 - protein, 672 aa, Zea Mays
MRDISLRTNSFSNKQRDAQPQNCYTRTRVPSLRKSRSSLSLESRKAQGSDNVWLHSGEGTSNQPVTLGASNGNRMLNTPAEVDSTSNREASENGTTETELKSNGTSDLPMNTAVNFKRKRKSDRKPGPHYRDCTTPNKDDQLCAEYSEILPDSPNSKNEVSKSDGDEHLPLVKRARVRMGRSQLEDSPVDEIDVSNKKPELATALDQCDRNGKPASPANDYSADQVSAVVSSAPNLSCKLDTTILSKEGHLPWKNKEYHPKILALDVEAALPPSKRLHRALEAMSANVAENTKNIPEVTGPNEMTLNGSLLTASSLSNKSADAVVTVSNRPVIVQSPEPSLDTQFVHNPSGKCTSESILQNNSIPDSASVPSKENDHIVLKGDICEETLMDTKTANGSWDCSELNNDSCGKTSALCMKLNRPALNVTQATSVPDRLSSSLEKASENVAASGVKETKTFGSAVCDVDRSAEPIDRSNNNVTSNTMRHSETIVADSVNNVGDTASNSSLATKSSSIQSDADTRTSELHTFSSLALKELNHRKIKDRSTSPDSMPMKELIAVAQARRFSRSTSFPDNFLNAKYIPETSINIPSKEGPHRQLSPSNRIIRSTSGNDNVNSRSPFDNIQQKKLAAHGANAARRSFKDFLSTLTRTKESISRATRLAMECAKFGIAGN

SEQ ID NO: 196115 - protein, 1240 aa, Zea Mays
MRDISLRTNSFSNKQRDAQPQNCYTRTRVPSLRKSRSSLSLESRKAQDNVWLHSGEGTSNQPVTLGASNGNRMLNTPAEVDSTSNREASENGTTETELKSNGTSDLPMNTAVNFKRKRKSDRKPGPHYRDCTTPNKDDQLCAEYSEILPDSPNSKNEVSKSDGDEHLPLVKRARVRMGRSQLEDSPVDEIDVSNKKPELATALDQCDRNGKPASPANDYSADQVSAVVSSAPNLSCKLDTTILSKEGHLPWKNKEYHPKILALDVEAALPPSKRLHRALEAMSANVAENTKNIPEVTGPNEMTLNGSLLTASSLSNKSADAVVTVSNRPVIVQSPEPSLDTQFVHNPSGKCTSESILQNNSIPDSASVPSKENDHIVLKGDICEETLMDTKTANGSWDCSELNNDSCGKTSALCMKLNRPALNVTQATSVPDRLSSSLEKASENVAASGVKETKTFGSAVCDVDRSAEPIDRSNNNVTSNTMRHSETIVADSVNNVGDTASNSSLATKSSSIQSDADTRTSELHTFSSLALKELNHRKIKDRSTSPDSMPMKELIAVAQARRFSRSTSFPDNFLNAKSPFDNIQQKKLAAHGANAARRSFKDFLSTLTRTKESISRATRLAMECAKFGIAGEAIDIIVEHLEKESNLYKRVDLFFLVDSITQCSRNQKGGAGDVYPSLIQAVLPRILYAAAPPGNSAWENRKQCLKVLKLWLERKTLSEYIIRHHIREIETINEASFGSSRRPSRTERALNDPLRDNEGMLVDEYGSNAGFQLPNLICTKVLEEEEENSSEGRSLSFEAVTPEQDAPYNDDNEESQMPVEKHHHILEEVDGELEMEDVAPPSDIGATTKCQPEQSDTNRAPSDQRPSDAGPPLPVDRPPSPPPLPSSPPPVPVPQSAQMQPKLQMASDPMAPHPQRATYSVQSQQQHSIAEHPVQDMEGNKIRYHLPHQWHHSILLVPMAVSLLPQHLTMGTTIIGLQPHPCLTRDIISNHHPLHRLQINSLLCHQNTNIGHITGVITVHRIPRDIGTMDMIEVITDMIEGIMDMTDNTIMMIEDTTTMIEDITMMIEAITLMIEDIILTIEDITLMRELLGGQCTMMPLTREDILFLQVLLGFLTILKLHQPQCTMGDHQILRQGLVQAGLGRLGYLITILPRDILWSLQFHIQLEVMVDGDLDNLFRYRSGALMLSLVCGGLTCGRVCLVSLLQVEGTHGGGALQESGSWYLPPCTDVSHGFYGGRAA

SEQ ID NO: 196116 - protein, 1416 aa, Zea Mays
MAPAKRKRAAAAAAAAAAAKWKVGDLVLAKMKGFPAWPAMISEPEQWKMPSTKKKPLVYFYGTKQIAFCNYADLEAFTEEKKRSLLAKRHGKGADFLRAVDEIIEVYDSLKDIGSNKVDLPAEEVKPGVEKFAENNSRMDTEDLVSSSYMHNDRKIEDHYVTTRSHDMVNSDRPSVDERCVVNSAPDEPIENVSILDEMRDISLRTNSFSNKQRDAQPQNCYTRTRVPSLRKSRSSLSLESRKAQGSDNVWLHSGEGTSNQPVTLGASNGNRMLNTPAEVDSTSNREASENGTTETELKSNGTSDLPMNTAVNFKRKRKSDRKPGPHYRDCTTPNKDDQLCAEYSEILPDSPNSKNEVSKSDGDEHLPLVKRARVRMGRSQLEDSPVDEIDVSNKKPELATALDQCDRNGKPASPANDYSADQVSAVVSSAPNLSCKLDTTILSKEGHLPWKNKEYHPKILALDVEAALPPSKRLHRALEAMSANVAENTKNIPEVTGPNEMTLNGSLLTASSLSNKSADAVVTVSNRPVIVQSPEPSLDTQFVHNPSGKCTSESILQNNSIPDSASVPSKENDHIVLKGDICEETLMDTKTANGSWDCSELNNDSCGKTSALCMKLNRPALNVTQATSVPDRLSSSLEKASENVAASGVKETKTFGSAVCDVDRSAEPIDRSNNNVTSNTMRHSETIVADSVNNVGDTASNSSLATKSSSIQSDADTRTSELHTFSSLALKELNHRKIKDRSTSPDSMPMKELIAVAQARRFSRSTSFPDNFLNAKYIPETSINIPSKEGPHRQLSPSNRIIRSTSGNDNVNSRSPFDNIQQKKLAAHGANAARRSFKDFLSTLTRTKESISRATRLAMECAKFGIAGEAIDIIVEHLEKESNLYKRVDLFFLVDSITQCSRNQKGGAGDVYPSLIQAVLPRILYAAAPPGNSAWENRKQCLKVLKLWLERKTLSEYIIRHHIREIETINEASFGSSRRPSRTERALNDPLRDNEGMLVDEYGSNAGFQLPNLICTKVLEEEEENSSEGRSLSFEAVTPEQDAPYNDDNEESQMPVEKHHHILEEVDGELEMEDVAPPSDIGATTKCQPEQSDTNRAPSDQRPSDAGPPLPVDRPPSPPPLPSSPPPVPVPQSAQMQPKLQMASDPMAPHPQRATYSVQSQQQHSIAEHPVQDMEGNKIRYHLPHQWHHSILLVPMAVSLLPQHLTMGTTIIGLQPHPCLTRDIISNHHPLHRLQINSLLCHQNTNIGHITGVITVHRIPRDIGTMDMIEVITDMIEGIMDMTDNTIMMIEDTTTMIEDITMMIEAITLMIEDIILTIEDITLMRELLGGQCTMMPLTREDILFLQPCAGPPRIPDHFEAPPAPMHYGRPSDPPPRPCAGWSRPPRISDNYSPSRHSVEPPVSHTAGGHGGWRPR

SEQ ID NO: 196117 - protein, 1464 aa, Zea Mays
MAPAKRKRAAAAAAAAAAAKWKVGDLVLAKMKGFPAWPAMISEPEQWKMPSTKKKPLVYFYGTKQIAFCNYADLEAFTEEKKRSLLAKRHGKGADFLRAVDEIIEVYDSLKDIGSNKVDLPAEEVKPGVEKFAENNSRMDTEDLVSSSYMHNDRKIEDHYVTTRSHDMVNSDRPSVDERCVVNSAPDEPIENVSILDEMRDISLRTNSFSNKQRDAQPQNCYTRTRVPSLRKSRSSLSLESRKAQDNVWLHSGEGTSNQPVTLGASNGNRMLNTPAEVDSTSNREASENGTTETELKSNGTSDLPMNTAVNFKRKRKSDRKPGPHYRDCTTPNKDDQLCAEYSEILPDSPNSKNEVSKSDGDEHLPLVKRARVRMGRSQLEDSPVDEIDVSNKKPELATALDQCDRNGKPASPANDYSADQVSAVVSSAPNLSCKLDTTILSKEGHLPWKNKEYHPKILALDVEAALPPSKRLHRALEAMSANVAENTKNIPEVTGPNEMTLNGSLLTASSLSNKSADAVVTVSNRPVIVQSPEPSLDTQFVHNPSGKCTSESILQNNSIPDSASVPSKENDHIVLKGDICEETLMDTKTANGSWDCSELNNDSCGKTSALCMKLNRPALNVTQATSVPDRLSSSLEKASENVAASGVKETKTFGSAVCDVDRSAEPIDRSNNNVTSNTMRHSETIVADSVNNVGDTASNSSLATKSSSIQSDADTRTSELLPLEQRFYKTQEYPSMKKFYEVLIASLCFAIFAHGFRHTFSSLALKELNHRKIKDRSTSPDSMPMKELIAVAQARRFSRSTSFPDNFLNAKYIPETSINIPSKEGPHRQLSPSNRIIRSTSGNDNVNSRSPFDNIQQKKLAAHGANAARRSFKDFLSTLTRTKESISRATRLAMECAKFGIAGEAIDIIVEHLEKESNLYKRVDLFFLVDSITQCSRNQKGGAGDVYPSLIQAVLPRILYAAAPPGNSAWENRKQCLKVLKLWLERKTLSEYIIRHHIREIETINEASFGSSRRPSRTERALNDPLRDNEGMLVDEYGSNAGFQLPNLICTKVLEEEEENSSEGRSLSFEAVTPEQDAPYNDDNEESQMPVEKHHHILEEVDGELEMEDVAPPSDIGATTKCQPEQSDTNRAPSDQRPSDAGPPLPVDRPPSPPPLPSSPPPVPVPQSAQMQPKLQMASDPMAPHPQRATYSVQSQQQHSIAEHPGNMNSSVAPLPPPPFNSSGYGGQQNQIPPPPPMAPLNPPGPHGSFPAPPAPYHGNNYHRPPTTSMPNEGYHQQPPPPPPPPNQFPSVPPEHQHRPHHWGNNCPPYPERYRYNGHDRGNHRHDRRHHGHDRQHHYDDRGYHYDDRGYHYDDRGHYFDDRRHHFDDRGHHFDERAIRGPMHNDAADQGRYSFPPGPPRIPDHFEAPPAPMHYGRPSDPPPRPCAGWSRPPRISDNYSPSRHSVEPPVSHTAGGHGGWRPR

SEQ ID NO: 196118 - protein, 741 aa, Zea Mays
MAPAKRKRAAAAAAAAAAAKWKVGDLVLAKMKGFPAWPAMISEPEQWKMPSTKKKPLVYFYGTKQIAFCNYADLEAFTEEKKRSLLAKRHGKGADFLRAVDEIIEVYDSLKDIGSNKVDLPAEEVKPGVEKFAENNSRMDTEDLVSSSYMHNDRKIEDHYVTTRSHDMVNSDRPSVDERCVVNSAPDEPIENVSILDEMRDISLRTNSFSNKQRDAQPQNCYTRTRVPSLRKSRSSLSLESRKAQGSDNVWLHSGEGTSNQPVTLGASNGNRMLNTPAEVDSTSNREASENGTTETELKSNGTSDLPMNTAVNFKRKRKSDRKPGPHYRDCTTPNKDDQLCAEYSEILPDSPNSKNEVSKSDGDEHLPLVKRARVRMGRSQLEDSPVDEIDVSNKKPELATALDQCDRNGKPASPANDYSADQVSAVVSSAPNLSCKLDTTILSKEGHLPWKNKEYHPKILALDVEAALPPSKRLHRALEAMSANVAENTKNIPEVTGPNEMTLNGSLLTASSLSNKSADAVVTVSNRPVIVQSPEPSLDTQFVHNPSGKCTSESILQNNSIPDSASVPSKENDHIVLKGDICEETLMDTKTANGSWDCSELNNDSCGKTSALCMKLNRPALNVTQATSVPDRLSSSLEKASENVAASGVKETKTFGSAVCDVDRSAEPIDRSNNNVTSNTMRHSETIVADSVNNVGDTASNSSLATKSSSIQSDADTRTSELALGSLWNKGFTKHRNIRV

SEQ ID NO: 196119 - protein, 1246 aa, Zea Mays
MRDISLRTNSFSNKQRDAQPQNCYTRTRVPSLRKSRSSLSLESRKAQDNVWLHSGEGTSNQPVTLGASNGNRMLNTPAEVDSTSNREASENGTTETELKSNGTSDLPMNTAVNFKRKRKSDRKPGPHYRDCTTPNKDDQLCAEYSEILPDSPNSKNEVSKSDGDEHLPLVKRARVRMGRSQLEDSPVDEIDVSNKKPELATALDQCDRNGKPASPANDYSADQVSAVVSSAPNLSCKLDTTILSKEGHLPWKNKEYHPKILALDVEAALPPSKRLHRALEAMSANVAENTKNIPEVTGPNEMTLNGSLLTASSLSNKSADAVVTVSNRPVIVQSPEPSLDTQFVHNPSGKCTSESILQNNSIPDSASVPSKENDHIVLKGDICEETLMDTKTANGSWDCSELNNDSCGKTSALCMKLNRPALNVTQATSVPDRLSSSLEKASENVAASGVKETKTFGSAVCDVDRSAEPIDRSNNNVTSNTMRHSETIVADSVNNVGDTASNSSLATKSSSIQSDADTRTSELHTFSSLALKELNHRKIKDRSTSPDSMPMKELIAVAQARRQLSPSNRIIRSTSGNDNVNSRSPFDNIQQKKLAAHGANAARRSFKDFLSTLTRTKESISRATRLAMECAKFGIAGEAIDIIVEHLEKESNLYKRVDLFFLVDSITQCSRNQKGGAGDVYPSLIQAVLPRILYAAAPPGNSAWENRKQCLKVLKLWLERKTLSEYIIRHHIREIETINEASFGSSRRPSRTERALNDPLRDNEGMLVDEYGSNAGFQLPNLICTKVLEEEEENSSEGRSLSFEAVTPEQDAPYNDDNEESQMPVEKHHHILEEVDGELEMEDVAPPSDIGATTKCQPEQSDTNRAPSDQRPSDAGPPLPVDRPPSPPPLPSSPPPVPVPQSAQMQPKLQMASDPMAPHPQRATYSVQSQQQHSIAEHPVQDMEGNKIRYHLPHQWHHSILLVPMAVSLLPQHLTMGTTIIGLQPHPCLTRDIISNHHPLHRLQINSLLCHQNTNIGHITGVITVHRIPRDIGTMDMIEVITDMIEGIMDMTDNTIMMIEDTTTMIEDITMMIEAITLMIEDIILTIEDITLMRELLGGQCTMMPLTREDILFLQVLLGFLTILKLHQPQCTMGDHQILRQGLVQAGLGRLGYLITILPRDILWSLQFHIQLEVMVDGDLDNLFRYRSGALMLSLVCGGLTCGRVCLVSLLQVEGTHGGGALQESGSWYLPPCTDVSHGFYGGRAA

SEQ ID NO: 196120 - protein, 759 aa, Zea Mays
MAPAKRKRAAAAAAAAAAAKWKVGDLVLAKMKGFPAWPAMISEPEQWKMPSTKKKPLVYFYGTKQIAFCNYADLEAFTEEKKRSLLAKRHGKGADFLRAVDEIIEVYDSLKDIGSNKVDLPAEEVKPGVEKFAENNSRMDTEDLVSSSYMHNDRKIEDHYVTTRSHDMVNSDRPSVDERCVVNSAPDEPIENVSILDEMRDISLRTNSFSNKQRDAQPQNCYTRTRVPSLRKSRSSLSLESRKAQGSDNVWLHSGEGTSNQPVTLGASNGNRMLNTPAEVDSTSNREASENGTTETELKSNGTSDLPMNTAVNFKRKRKSDRKPGPHYRDCTTPNKDDQLCAEYSEILPDSPNSKNEVSKSDGDEHLPLVKRARVRMGRSQLEDSPVDEIDVSNKKPELATALDQCDRNGKPASPANDYSADQVSAVVSSAPNLSCKLDTTILSKEGHLPWKNKEYHPKILALDVEAALPPSKRLHRALEAMSANVAENTKNIPEVTGPNEMTLNGSLLTASSLSNKSADAVVTVSNRPVIVQSPEPSLDTQFVHNPSGKCTSESILQNNSIPDSASVPSKENDHIVLKGDICEETLMDTKTANGSWDCSELNNDSCGKTSALCMKLNRPALNVTQATSVPDRLSSSLEKASENVAASGVKETKTFGSAVCDVDRSAEPIDRSNNNVTSNTMRHSETIVADSVNNMSAFEIAYAKLGLCDDLRPRRIHATSFCWHGFRLPLEQRFYKTQEYPSMKKAYILIFGIERTEP

SEQ ID NO: 196121 - protein, 514 aa, Zea Mays
MMRPSPPRRLSLAAPFLILLLLTLLSPPRAAAAGGSSAWVALRGAAGSRKASPAEQEGAAAGLLRRLLPFHSGSFSFQIDSKGGVCGQSSCFRISNVVDGSGKGGAEILIQGTTAVELASGLHWYLKYWCGAHISWDKTGGAQLASIPSPGSLPRVQGKGVKIERPVPWNYYQNVVTSSYSFVWWDWKRWEKEIDWMALQGINLPLAFTGQESIWQKVFKSFNVTDRDLDDFFGGPAFLAWARMGNLHGWGGPLSQNWLDQQLALQKKILSRMIELGMVPVLPSFSGNVPAIFAKLFPSANITRLGDWNTVDANPKWCCTYLLDPSDSLFIDVGQAFIRQQIKEYGDVTNIYNCDTFNENTPPTDEPAYISSLGSAIYEAMSRGNKNAVWLMQGWLFYSDAAFWKEPQMKALLHSVPIGKMIVLDLFADVKPIWKVSSQFYGVPYIWCMLHNFGGNIEMYGILDSISSGPIDARTSYNSTMIGVGMCMEGIEHNPVVYELMSEMAFHNKKVEVE

SEQ ID NO: 196122 - protein, 534 aa, Zea Mays
MMRPSPPRRLSLAAPFLILLLLTLLSPPRAAAAGGSSAWVALRGAAGSRKASPAEQEGAAAGLLRRLLPFHSGSFSFQIDSKGGVCGQSSCFRISNVVDGSGKGGAEILIQGTTAVELASGLHWYLKYWCGAHISWDKTGGAQLASIPSPGSLPRVQGKGVKIERPVPWNYYQNVVTSSYSFVWWDWKRWEKEIDWMALQGINLPLAFTGQESIWQKVFKSFNVTDRDLDDFFGGPAFLAWARMGNLHGWGGPLSQNWLDQQLALQKKILSRMIELGMVPVLPSFSGNVPAIFAKLFPSANITRLGDWNTVDANPKWCCTYLLDPSDSLFIDVGQAFIRQQIKEYGDVTNIYNCDTFNENTPPTDEPAYISSLGSAIYEAMSRGNKNAVWLMQGWLFYSDAAFWKEPQMKALLHSVPIGKMIVLDLFADVKPIWKVSSQFYGVPYIWCMLHNFGGNIEMYGILDSISSGPIDARTSYNSTMIGVGMCMEGIEHNPVVYELMSEMAFHNKKVEVELYRVWSMRCHSRHSLHFIYT

SEQ ID NO: 196123 - protein, 541 aa, Zea Mays
MTHYYSTVLPSFSGNVPAIFAKLFPSANITRLGDWNTVDANPKWCCTYLLDPSDSLFIDVGQAFIRQQIKEYGDVTNIYNCDTFNENTPPTDEPAYISSLGSAIYEAMSRGNKNAVWLMQGWLFYSDAAFWKEPQMKALLHSVPIGKMIVLDLFADVKPIWKVSSQFYGVPYIWCMLHNFGGNIEMYGILDSISSGPIDARTSYNSTMIGVGMCMEGIEHNPVVYELMSEMAFHNKKVEVEDWLKTYSCRRYGQANADIEKAWRYLYHTIYNCTDGIADHNKDYIVEFPDISPSSVTYQVSKRRGMSITRNHRRFFLSEVSGILPQPHLWYSTKEAVKALELFLDAGSTFSESLTYRYDLVDLTRQCLSKLANEVYLDAISLYQKKDSHGLNAHARKFLEIIVDIDTLLAADDNFLLGPWLESAKSLAITEKERQQYEWNARTQVTMWYDNTETEQSKLHDYANKFWSGLLKSYYLPRASKYFAYLTRSLQENRSFQLEEWRKDWISYSNEWQSGKEVYAVKATGDALAIARSLYRKYLRP

SEQ ID NO: 196124 - protein, 318 aa, Zea Mays
MALQGINLPLAFTGQESIWQKVFKSFNVTDRDLDDFFGGPAFLAWARMGNLHGWGGPLSQNWLDQQLALQKKILSRMIELGMVPVLPSFSGNVPAIFAKLFPSANITRLGDWNTVDANPKWCCTYLLDPSDSLFIDVGQAFIRQQIKEYGDVTNIYNCDTFNENTPPTDEPAYISSLGSAIYEAMSRGNKNAVWLMQGWLFYSDAAFWKEPQMKALLHSVPIGKMIVLDLFADVKPIWKVSSQFYGVPYIWCMLHNFGGNIEMYGILDSISSGPIDARTSYNSTMIGVGMCMEGIEHNPVVYELMSEMAFHNKKVEVE

SEQ ID NO: 196125 - protein, 353 aa, Zea Mays
MMRPSPPRRLSLAAPFLILLLLTLLSPPRAAAAGGSSAWVALRGAAGSRKASPAEQEGAAAGLLRRLLPFHSGSFSFQIDSKGGVCGQSSCFRISNVVDGSGKGGAEILIQGTTAVELASGLHWYLKYWCGAHISWDKTGGAQLASIPSPGSLPRVQGKGVKIERPVPWNYYQNVVTSSYSFVWWDWKRWEKEIDWMALQGINLPLAFTGQESIWQKVFKSFNVTDRDLDDFFGGPAFLAWARMGNLHGWGGPLSQNWLDQQLALQKKILSRMIELGMVPVLPSFSGNVPAIFAKLFPSANITRLGDWNTVDANPKWCCTYLLDPSDSLFIDVGQAFIRQQIKEYGDVTNIYN

SEQ ID NO: 196126 - protein, 571 aa, Zea Mays
MGNLHGWGGPLSQNWLDQQLALQKKILSRMIELGMVPVLPSFSGNVPAIFAKLFPSANITRLGDWNTVDANPKWCCTYLLDPSDSLFIDVGQAFIRQQIKEYGDVTNIYNCDTFNENTPPTDEPAYISSLGSAIYEAMSRGNKNAVWLMQGWLFYSDAAFWKEPQMKALLHSVPIGKMIVLDLFADVKPIWKVSSQFYGVPYIWCMLHNFGGNIEMYGILDSISSGPIDARTSYNSTMIGVGMCMEGIEHNPVVYELMSEMAFHNKKVEVEDWLKTYSCRRYGQANADIEKAWRYLYHTIYNCTDGIADHNKDYIVEFPDISPSSVTYQVSKRRGMSITRNHRRFFLSEVSGILPQPHLWYSTKEAVKALELFLDAGSTFSESLTYRYDLVDLTRQCLSKLANEVYLDAISLYQKKDSHGLNAHARKFLEIIVDIDTLLAADDNFLLGPWLESAKSLAITEKERQQYEWNARTQVTMWYDNTETEQSKLHDYANKFWSGLLKSYYLPRASKYFAYLTRSLQENRSFQLEEWRKDWISYSNEWQSGKEVYAVKATGDALAIARSLYRKYLRP

SEQ ID NO: 196127 - protein, 236 aa, Zea Mays
MSITRNHRRFFLSEVSGILPQPHLWYSTKEAVKALELFLDAGSTFSESLTYRYDLVDLTRQCLSKLANEVYLDAISLYQKKDSHGLNAHARKFLEIIVDIDTLLAADDNFLLGPWLESAKSLAITEKERQQYEWNARTQVTMWYDNTETEQSKLHDYANKFWSGLLKSYYLPRASKYFAYLTRSLQENRSFQLEEWRKDWISYSNEWQSGKEVYAVKATGDALAIARSLYRKYLRP

SEQ ID NO: 196128 - protein, 507 aa, Zea Mays
MNTVDANPKWCCTYLLDPSDSLFIDVGQAFIRQQIKEYGDVTNIYNCDTFNENTPPTDEPAYISSLGSAIYEAMSRGNKNAVWLMQGWLFYSDAAFWKEPQMKALLHSVPIGKMIVLDLFADVKPIWKVSSQFYGVPYIWCMLHNFGGNIEMYGILDSISSGPIDARTSYNSTMIGVGMCMEGIEHNPVVYELMSEMAFHNKKVEVEDWLKTYSCRRYGQANADIEKAWRYLYHTIYNCTDGIADHNKDYIVEFPDISPSSVTYQVSKRRGMSITRNHRRFFLSEVSGILPQPHLWYSTKEAVKALELFLDAGSTFSESLTYRYDLVDLTRQCLSKLANEVYLDAISLYQKKDSHGLNAHARKFLEIIVDIDTLLAADDNFLLGPWLESAKSLAITEKERQQYEWNARTQVTMWYDNTETEQSKLHDYANKFWSGLLKSYYLPRASKYFAYLTRSLQENRSFQLEEWRKDWISYSNEWQSGKEVYAVKATGDALAIARSLYRKYLRP

SEQ ID NO: 196129 - protein, 164 aa, Zea Mays
MAAAAADSDPAAAVADMSTCAHCQREIPSSNIDLHSVHCARNLQKCQHCGEMIPRKLMDEHYDANHAPISCSLCKETIERVRWDLHKGEKCPQRIVACEYCEFELPAVDLHEHQDVCGNRTELCQTCRKYIRLCEWIGHEIQCHTSSNGSADTSRFSANLIDVF

SEQ ID NO: 196130 - protein, 149 aa, Zea Mays
MNTMMQTMPRCSLCKETIERVRWDLHKGEKCPQRIVACEYCEFELPAVDLHEHQDVCGNRTELCQTCRKYIRLCEWIGHEIQCHTSSNGSADTSRAIPERELRPPPPVRPARPARPAHASPHKRLLFTIAVTGIAVMVGSILFQRDESF

SEQ ID NO: 196131 - protein, 91 aa, Zea Mays
MRTRGPRIGTGFAESLLRWELCRRFLVVTGNSLAHLAGRLNQQWITSHSTVALLRSLSKTNQLSDCIPLSGQTVFDHAHARLIVIVATRSL

SEQ ID NO: 196132 - protein, 151 aa, Zea Mays
MDHLPFHRGATAGFESEVAEAANEEQKTESLMRLSWALVHSRQPEDVNRGIGMLEASLDRSSSPEETREKLYLLAVGRYRTGDYTRSRQLLERCLEIQHDWRQAITLQRLVEEKTKRDGMIGMAIITGAFGVVGLVAGGIIAAASSSSRKR

SEQ ID NO: 196133 - protein, 196 aa, Zea Mays
MASLSPSLHLPCNSRTGFLGKTRGIRPCVFPAGRVGFVRTVVECKESRIGKQPIEVPSNVTLTLEEQFVKAKGPLGELSLSFPGDLKIVKEESGNLRVYKTAETKRANQMHGLFRQHHRRCVKRIRQEASVSRCRVPCGGGGQRSRDEPGILPPCSDGHSRRPGGQGGREHKDHRERLRQERDRSVRCYHKEVEAT

SEQ ID NO: 196134 - protein, 334 aa, Zea Mays
MAVGCFNPVLSPLVPSPPGRRVRAALRCRWHRHPLTAVSLRRLPCGAAAGRGTRRLAAAAESQAVQEQPARAEEAGGAGAAEASSKLVLVVGGTGGVGQLVVASLLSRNIKSRLLLRDPEKASSLFGKQDESVLQVYKADTRNPNDLDPQMFEGVTHVICCTGTTAFPSKRWDGDNTPERVDWDGIRNLVSALPQTVKRLVLVSSIGVTKYNEIPWSIMNLFGVLKYKKMGEDFVCNSGIPFTIIRAGRLTDGPYTSYDLNTLLKATAGERRAVVIGKGDKLVGEVSRLVVAEACIQALDIESTEGQIYEINSGEGPGTDPEKWEELFRSARSD

SEQ ID NO: 196135 - protein, 217 aa, Zea Mays
MAVGCFNPVLSPLVPSPPGRRVRAALRCRWHRHPLTAVSLRRLPCGAAAGRGTRRLAAAAESQAVQEQPARAEEAGGAGAAEASSKLVLVVGGTGGVGQLVVASLLSRNIKSRLLLRDPEKASSLFGKQDESVLQVYKADTRNPNDLDPQMFEGVTHVICCTGTTAFPSKRWDGDNTPERIGMASEILSVPCHRQSRDWFLCHPLVLQNTMRYHGAS

SEQ ID NO: 196136 - protein, 194 aa, Zea Mays
MAVGCFNPVLSPLVPSPPGRRVRAALRCRWHRHPLTAVSLRRLPCGAAAGRGTRRLAAAAESQAVQEQPARAEEAGGAGAAEASSKLVLVVGGTGGVGQLVVASLLSRNIKSRLLLRDPEKASSLFGKQDESVLQVYKADTRNPNDLDPQMFEGVTHVICCTGTTAFPSKRWDGDNTPERVDKRIFCKDNLDGA

SEQ ID NO: 196137 - protein, 128 aa, Zea Mays
MAVGCFNPVLSPLVPSPPGRRVRAALRCRWHRHPLTAVSLRRLPCGAAAGRGTRRLAAAAESQAVQEQPARAEEAGGAGAAEASSKLVLVVGGTGGVVGCSIIAEQEHQVKVAPKRSRKGVVPVWQAG

SEQ ID NO: 196138 - protein, 118 aa, Zea Mays
MNLFGVLKYKKMGEDFVCNSGIPFTIIRAGRLTDGPYTSYDLNTLLKATAGERRAVVIGKGDKLVGEVSRLVVAEACIQALDIESTEGQIYEINSVKGEGPGTDPEKWEELFRSARSD

SEQ ID NO: 196139 - protein, 512 aa, Zea Mays
MSGHDSKYFSTTKKGEIPELKEELNSQYKDKRKDAVKKVIAAMTVGKDVSSLFTDVVNCMQTENLELKKLVYLYLINYAKSQPDLAILAVNTFVKDSQDPNPLIRALAVRTMGCIRVDKITEYLCDPLQRCLKDDDPYVRKTAAICVAKLYDINAELVEDRGFLEALKDLISDNNPMVVANAVAALAEIQDSSVRPIFEITSHTLSKLLTALNECTEWGQVFILDSLSRYKAADAREAENIVERVTPRLQHANCAVVLSAVKIILLQMELITSTDVVRNLCKKMAPPLVTLLSAEPEIQYVALRNINLIVQKRPTILAHEIKVFFCKYNDPIYVKMEKLEIMIKLASDRNIDQVLLEFKEYATEVDVDFVRKAVRAIGRCAIKLERAAERCISVLLELIKIKVNYVVQEAIIVIKDIFRRYPNTYESIIATLCESLDTLDEPEAKASMIWIIGEYAERIDNADELLESFLETFPEEPALVQLQLLTATVKLFLKKPTEGPQQMIQLKQIILI

SEQ ID NO: 196140 - protein, 226 aa, Zea Mays
MGSRMNRPVKARIDIWSSSAAPKQPYFQKPQKADIVQKDISVKSSRLKDNTDSKPLRQPAVHPAASLKEREAAYRAARERIFSVDDAKGNDRSYVKCRQVPVVAQRMIAHALGQKVQNTTEAVASTESRGKHKQLPNGKSIPTHSRNNFCPVTPDNKEAVRNGRPNSAGCNSYQTPSSQRRHTTNTRAVTAEGLKKEQTGAAKRMFAHALGLSAARGSNGALPKPK

SEQ ID NO: 196141 - protein, 71 aa, Zea Mays
MHMNLRSLFLSISISLLGYYTGYAYFRNIKLMCMVGEEYDSGSSRDWAAKGPMLWVDAVAELYNFDAPDHF

SEQ ID NO: 196142 - protein, 545 aa, Zea Mays
MGCVHGRPPASSPDHPPQLPEPPAPAATQEAAGKAEQPAAPAEKPAWRERRSRSSRNAPAPSFANRARGEQVAAGWPAWLSAVAGEAIDGWTPRRADSFEKIDKIGQGTYSNVYKARDTVSGKIVALKKVRFDNLEPESVRFMAREILILRRLDHPNVVKLDGLVTSRMSCSLYLVFEYMEHDLAGLAASPEIKFTEPQVKCYMHQLLSGLEHCHDRGVLHRDIKGSNLLLDNNGMLKIADFGLASFFDPDRKQPMTSRVVTLWYRPPELLLGATDYGVGVDLWSAGCILAELLAGRPIMPGRTELHKIFKLCGSPTEEYWKKSKLPHATIFKPQQPYRKRIRETFKDFPQSALQLIETLLAIDPADRLTASSALRSDFFTTEPFACEPSSLPKYPPSKEIDVKRRDEEARRLRAAGGRANGDGAKKTRTRDRPKAVPAPEANAELQVNIDKRRFITHANAKSKSEKFPPPHQDGAVGVPLDASNHMDPLYEPPDPSSFSTVFTYEKGAVPTWSGPLVDPAAVVNQKGKHKSGRSSKQPATARAR

SEQ ID NO: 196143 - protein, 849 aa, Zea Mays
MEPESLDFEDNGEHQSSSEASLASDVIYGDSPVCPRIGSEHQAEIPNLATEDERRELMASSHNDSILHGYGYPVVVGLTLPIIWASPREASKTEQVLQMQNYSESGTKGSTGDVQSQVTSTCATSNDTGRCDPTFQDLHAVVPVVQIKSDINQAYNEKMAPCPSQEGQNVTNNSIMQQRETKQLNPLPYSPIALWSDLEAEIFLLGLYIFGKNLNLLSRFLGTKTVGDVLAYYYGKFYRRDAYKRWSDCRKAKTRKCILGERIFQGWRQQELISRLKSKIPKEAHDSLIEVFKSFSDSQTSLKEFVFSLKSTVGAETFVEAVGVGKGKHDLTGFIMDQSKPNQALSVHSDLPTGKDYSSLASEDIIKFLNGDFRRSKTRSNYIFWEAVWPRLLANGWHSEQPKDVSTTKNCLVFLVPGIKKFSRCKLTKGTHYFDSVSDVLKRVAADPVLLELEIDVINNGLTAEENGSITDVKLNQYSPLDGYQELPKFTIIDTSLVEGEVPFNVRELRNLPADSNISFLLSQHPSNMVSYSSSEEEGANDRLSDEQEDYGRVKAVVDEIEMVSAASLQNMVTANGNDDKLDLTGIKTKPEKRKYLSPVSKGRMLNSCSNEQASRRSFSFSKGGDLEKEKSKPPLTSSKPAALEVGDTFQSYSTKDNLSEQKNNALNSLTNYGQNERMVMENLINKSSERKVDAVAEVHSKINADQPKFIKERAEVVGPIDLNNLGTLHGDKASRSIHITSFENLGSVKVVEASSSSDKNMACDPSGTAGMPVSEVPDPALQVNARRHGTRNRPPTVKALEAVAFGLLGSGKRKGDMKNRATSRPSQRARKAAKDSVPVASCGDAKVR

SEQ ID NO: 196144 - protein, 851 aa, Zea Mays
MMMEPESLDFEDNGEHQSSSEASLASDVIYGDSPVCPRIGSEHQAEIPNLATEDERRELMASSHNDSILHGYGYPVVVGLTLPIIWASPREASKTEQVLQMQNYSESGTKGSTGDVQSQVTSTCATSNDTGRCDPTFQDLHAVVPVVQIKSDINQAYNEKMAPCPSQEGQNVTNNSIMQQRETKQLNPLPYSPIALWSDLEAEIFLLGLYIFGKNLNLLSRFLGTKTVGDVLAYYYGKFYRRDAYKRWSDCRKAKTRKCILGERIFQGWRQQELISRLKSKIPKEAHDSLIEVFKSFSDSQTSLKEFVFSLKSTVGAETFVEAVGVGKGKHDLTGFIMDQSKPNQALSVHSDLPTGKDYSSLASEDIIKFLNGDFRRSKTRSNYIFWEAVWPRLLANGWHSEQPKDVSTTKNCLVFLVPGIKKFSRCKLTKGTHYFDSVSDVLKRVAADPVLLELEIDVINNGLTAEENGSITDVKLNQYSPLDGYQELPKFTIIDTSLVEGEVPFNVRELRNLPADSNISFLLSQHPSNMVSYSSSEEEGANDRLSDEQEDYGRVKAVVDEIEMVSAASLQNMVTANGNDDKLDLTGIKTKPEKRKYLSPVSKGRMLNSCSNEQASRRSFSFSKGGDLEKEKSKPPLTSSKPAALEVGDTFQSYSTKDNLSEQKNNALNSLTNYGQNERMVMENLINKSSERKVDAVAEVHSKINADQPKFIKERAEVVGPIDLNNLGTLHGDKASRSIHITSFENLGSVKVVEASSSSDKNMACDPSGTAGMPVSEVPDPALQVNARRHGTRNRPPTVKALEAVAFGLLGSGKRKGDMKNRATSRPSQRARKAAKDSVPVASCGDAKVR

SEQ ID NO: 196145 - protein, 255 aa, Zea Mays
MSGPENVRYWSAPVRLRYDVASATGRPVVLRELRLSVDRRGAGLAVRHASPLQDVDGVLALVEEETLRPTFGGDAEEVVEGPQVHHRELPLKGDDRAVKEVGGGCREHNVVDVEQEVDGVVAAPVDEQGRVRLGLDEADGGQVGGEATVPSPWRLLEAVQGPVQPANQVRTVSVDEASGLAAVDSLRQSAMEEGILDIELMDRPVAGEDGANSGELDDRAEDLVVVHSGALGEAPKDPTGLVAVEGAVRGQLVAK

SEQ ID NO: 196146 - protein, 273 aa, Zea Mays
MGPARRLPPLSFRNIPPSFGGIYLPSSLAPGLPLPARLFPGRSHLVSGPVSRLSFFFPVPRVVLPLPADRSSQLQSWRVRFPLPWLPVRPAEIPPWPRAQPLLCSRCRVPLRVFSPCWRTQIPVLAGALPAVRLQLLRPAKFPCAPQFAQPLCSPSSIRSPWLSFLRVLPYPCTSAVAPSVQQLLSPGVSLCSAQTLLHSLAGRSRALVGFPARRVSSPACSPSGHGALRRSSFSLPRAARPILSARSVVEAFGCARPADLPVSRARIFIAWS

SEQ ID NO: 196147 - protein, 406 aa, Zea Mays
MSAIAASSAAAAAASNSDEEENYEEYIPVAKRRAMEAERLRQLRLSKSAPASAVSSLPMPPPPPLLPAQTSVPDAAAKPSLLVKATQLKRAAPEVTATEQRIQQEKEVIENLSDNKSLRYLTLDEADRLVDLGFEDDIKEVFDHFKDQRQTLLFSATMPQKIQNFAKNALVKPVTVNVGRAGAANLDVIQEVEYVKEDARIIYLLECLQKTPPPVLIFCENKADVDYIHEYLLLKGVEAVAIHGGKDQEERQNAIDSFKTGRKDVLVATDVASKGLDFPDIQHVINYDMPAEIENYVHRIGRTGRCGKTGIATTFINKNQTETTLLDLKHLLKEAKQRIPPVLAELNDPLDDEEIIAKESGVKGCAYCGGLGHRVSDCPKLEHQKSMAIAGSRKDYFGGGGYRGEI

SEQ ID NO: 196148 - protein, 172 aa, Zea Mays
MFTSTDDDTDTTCFWRPRSIHRNRDKDLVVVEEVKGLCKRRQMDDTIECWDQPHVSLGRHLCSSFVRYIFLPFVSTRLRKPNPRTRAAAAAGPHWHCSPRVVVETSNLLASFSSPVTMDRCPYLIHSPLSSCQAGYRPSRRRPEREDRAHCIPQAPPQAVPLQRRDPQAVLH

SEQ ID NO: 196149 - protein, 128 aa, Zea Mays
MFTSTDDDTDTTCFWRPRSIHRNRDKDLVVVEEVKGLCKRRQMDDTIECWDQPHGIDLVAAGRNEKTERTAYLKLLLKLYRFNAVILKRYFISKTNRLSQPRDGGTQATVVSCCQAEEQLPDAFQQET

SEQ ID NO: 196150 - protein, 584 aa, Zea Mays
MSHPIHCSVRVNAISGVTLSRSPLLGANYRTRTRLPSERRRSAPSPAPAFCSLARAGVLLPRPRRSAPSPAASGRPGSTPDEAEAGAASLDPEAEAGAASGSGGGGGRGEPGSGGGGGTGPRRGNLEQAKPYPRSGGLEVGGGEEEVGSAQGSAKGNRKRRRSKEVEASSEESSTARSARPFRRFRMDGTHNSKGDSSQPQGQAGWNPYQPPPPPAWNPYMFPMQPQPGGWYPQPTHHPPHNVSIFPPPSGPNIVSVDHTEANVVLGADEVDVLHPEDSVPSILKRGRTKLGNFSPQEDVNLVKAWLEVSCDPVIGNGQKGDRFWKRVVERYNFRRGANSERSLRSLQSRWTNNIKPEVGKFAGYYAEALRQNPSGMSDADKTSLAATNFAEVEGHAFGFMHCWDRMKDEPKWGNPTQLGTEAHLEGDDLEEDSNRVHGDADKSAGKRPVGRDRAKAANKKSKSVSGDTSSSEYASRMQDLSIQKINIMQEESVRKGERFQQLATIDEKRYQEMRSHNQSVLDIEQEKVRIMREKHDREEKKEDERILSINLDSCTPSLRMYYEALQEDIMAKLAARRQGRHAP

SEQ ID NO: 196151 - protein, 84 aa, Zea Mays
MAFRMKRVWTDGFAAGAVMKQSERREDDSALRSPEAALAVEDPTAEDLESDTTVTTQGRWNASHRRELLPGGRTTSRCVSTGKP

SEQ ID NO: 196152 - protein, 1038 aa, Zea Mays
MDRELASDMELDSVVFQVSSPDNRYEAIACSKGKTELIASGPFDQLVLHLEDAKTFQSCSSSGTFKLLLAGDGKDSSWFTKSTLQRFLHIISSFDTSKSVNGVLDEMSQLEETRKFHQSLYVKEQQNVISGALTGGLFGTGAIAQQGNDGPNSSDTTKNELLRALDLRLTALKEEILVVLNRAVGSNLSAREISDLSAFVQRFGTSEFCWLMRCTLLISDCKPSELPLQQNSTTEKVDKDENAHKPCISPQTNLQMPIANNVSPAKLAQIERESSTESDDSSESSDEGEAIVERSRPLVRSASPRRSASPMRRVQIGRSGSRRSTAIAIKSLSYFPPSQRIPMDKDDESSTFNGETDQPPKKSDTNVRRMSVQDAINLFESKQKDQNPDSQNKKAGLFATKSVLRRWSAGMGDSLNENSEGKVSDSTSESKSNNIASETEKVEAEMKAELEQAKPGLEESSDRAMASAEWNRQKEAELNQMLLKMMEVMPGKFAGANATATGLSSTNQQKAVSHGQHTEKRDTKVRTEKGTRRPAKEPSTKPLKETAGKNKPAMTSKSGSSTERRISPVPQRARRNSSPPVLPKEVASKTPPVRKSSPKPSPAPASVPTTRSSWSGGSLTKATTTQKTKRSPGMASTSTQTSRRTPTTPSSSQPASKAERAIQSVKNKKETITATKPAIKGQEEKKTKTATKTSRITKVSPSEEKSGVKTKQSLQKVSNKSSVVPLESKTLKKTTGISQSIRSGMVKNKVPQPNDFSKDTGSVNQAEDKEQSPVTTEPTTKVLEADLAQPAHDVDENLEISLDNDLNIEKTEKPASSLTATEMGSSIQVEPSTDELDEAIQPPDDDMGISSSAWVEVERQELEVTVSSENVVVEDVTSPGIAPLPSSSPRVRHSLSQMLQADSNEPEIIEWGNAENPPAIVFHKDSPKGFKRLLKFARKNKGDNNANGWASPSVVSEGEDELEEPRGTSDGTNSSRRTFDGSKTNSILSAQSTTGSFNSLNSDKLRERSGAATSTRASRSFFSLSNFRSSRSNESKLR

SEQ ID NO: 196153 - protein, 1005 aa, Zea Mays
MDRELASDMELDSVVFQVSSPDNRYEAIACSKGKTELIASGPFDQLVLHLEDAKTFQSCSSSGTFKLLLAGDGKDSSWFTKSTLQRNELLRALDLRLTALKEEILVVLNRAVGSNLSAREISDLSAFVQRFGTSEFCWLMRCTLLISDCKPSELPLQQNSTTEKVDKDENAHKPCISPQTNLQMPIANNVSPAKLAQIERESSTESDDSSESSDEGEAIVERSRPLVRSASPRRSASPMRRVQIGRSGSRRSTAIAIKSLSYFPPSQRIPMDKDDESSTFNGETDQPPKKSDTNVRRMSVQDAINLFESKQKDQNPDSQNKKAGLFATKSVLRRWSAGMGDSLNENSEGKVSDSTSESKSNNIASETEKVEAEMKAELGNIPNFFVTPEAEDLTFHANSHEIRVSETESAVCSNVCAEQAKPGLEESSDRAMASAEWNRQKEAELNQMLLKMMEVMPGKFAGANATATGLSSTNQQKAVSHGQHTEKRDTKVRTEKGTRRPAKEPSTKPLKETAGKNKPAMTSKSGSSTERRISPVPQRARRNSSPPVLPKEVASKTPPVRKSSPKPSPAPASVPTTRSSWSGGSLTKATTTQKTKRSPGMASTSTQTSRRTPTTPSSSQPASKAERAIQSVKNKKETITATKPAIKGQEEKKTKTATKTSRITKVSPSEEKSGVKTKQSLQKVSNKSSVVPLESKTLKKTTGISQSIRSGMVKNKVPQPNDFSKDTGSVNQAEDKEQSPVTTEPTTKVLEADLAQPAHDVDENLEISLDNDLNIEKTEKPASSLTATEMGSSIQVEPSTDELDEAIQPPDDDMGISSSAWVEVERQELEVTVSSENVVVEDVTSPGIAPLPSSSPRVRHSLSQMLQADSNEPEIIEWGNAENPPAIVFHKDSPKGFKRLLKFARKNKGDNNANGWASPSVVSEGEDELEEPRGTSDGTNSSRRTFDGSKTNSILSAQSTTGSFNSLNSDKLRERSGAATSTRASRSFFSLSNFRSSRSNESKLR

SEQ ID NO: 196154 - protein, 892 aa, Zea Mays
MDRELASDMELDSVVFQVSSPDNSWLMRCTLLISDCKPSELPLQQNSTTEKVDKDENAHKPCISPQTNLQMPIANNVSPAKLAQIERESSTESDDSSESSDEGEAIVERSRPLVRSASPRRSASPMRRVQIGRSGSRRSTAIAIKSLSYFPPSQRIPMDKDDESSTFNGETDQPPKKSDTNVRRMSVQDAINLFESKQKDQNPDSQNKKAGLFATKSVLRRWSAGMGDSLNENSEGKVSDSTSESKSNNIASETEKVEAEMKAELGNIPNFFVTPEAEDLTFHANSHEIRVSETESAVCSNVCAEQAKPGLEESSDRAMASAEWNRQKEAELNQMLLKMMEVMPGKFAGANATATGLSSTNQQKAVSHGQHTEKRDTKVRTEKGTRRPAKEPSTKPLKETAGKNKPAMTSKSGSSTERRISPVPQRARRNSSPPVLPKEVASKTPPVRKSSPKPSPAPASVPTTRSSWSGGSLTKATTTQKTKRSPGMASTSTQTSRRTPTTPSSSQPASKAERAIQSVKNKKETITATKPAIKGQEEKKTKTATKTSRITKVSPSEEKSGVKTKQSLQKVSNKSSVVPLESKTLKKTTGISQSIRSGMVKNKVPQPNDFSKDTGSVNQAEDKEQSPVTTEPTTKVLEADLAQPAHDVDENLEISLDNDLNIEKTEKPASSLTATEMGSSIQVEPSTDELDEAIQPPDDDMGISSSAWVEVERQELEVTVSSENVVVEDVTSPGIAPLPSSSPRVRHSLSQMLQADSNEPEIIEWGNAENPPAIVFHKDSPKGFKRLLKFARKNKGDNNANGWASPSVVSEGEDELEEPRGTSDGTNSSRRTFDGSKTNSILSAQSTTGSFNSLNSDKLRERSGAATSTRASRSFFSLSNFRSSRSNESKLR

SEQ ID NO: 196155 - protein, 453 aa, Zea Mays
MIDTIVKRLKDQLFVARSYYPSIAKLKGKETLTRELKQNIQEHERVLSESIVDADLPSFIKTKVERMDQSIARAKSCTVDCNNVDRKLRQILHMTEDEAHFHMKQSAYLYNLGVHTMPKSHHCLNMRLTVEYFKSMPLDPNDSSAHTFNIPDNRHYVILSKNVLAASVVINSTVSSSEDTENIVFHVLTDAQNFYAMKHWFARNSYRESAVNVINYEQIIFENFPEFGTQQLYLPEEFRVFISSLERPTEKSRMEYLSVFSHSHFFLAEIFKDLKKVIVLDDDLVVQHDLSFLWNLDMGDKVHGAVRFCGLKLGQLRNLLGRTMYDQQSCAWMSGVNVIDLEKWRDHNVTENYLQLLRKFGNNGDEASLRSSALPISLLLFQHLLYPLDERLTLSGLGYDYGIKEKLVQSSASLHYNGNMKPWLELGIPDYRKYWKRFLTRDERFMDECNVSP

SEQ ID NO: 196156 - protein, 300 aa, Zea Mays
MKATAPPAKRRRGPRLAVLALVFCSLLVPIAFLFNRFPAVYVTDERPQQEIDLPSFDRVAFESGGSVNEINVDKIRPPRVQSADEVEKAKACQLEFGSYCLWSIEHKEVMIDTIVKRLKDQLFVARSYYPSIAKLKGKETLTRELKQNIQEHERVLSESIVDADLPSFIKTKVERMDQSIARAKSCTVDCNNVDRKLRQILHMTEDEAHFHMKQSAYLYNLGVHTMPKSHHCLNMRLTVEYFKSMPLDPNDSSAHTFNIPDNRHYVILSKNVLAASVVINSTVSSSEVCRKFFISPLKLL

SEQ ID NO: 196157 - protein, 394 aa, Zea Mays
MSMYGRDPWGGPLEICHDSATDDDRSRNLDIDRAALSRTLDETQQSWLLAGTADQPRKKNKYVDIGCLLVSRKLFVWTLGVLLAAAVFAGAVAGIAKAIPRRHRPLPPPDDYTVALHKALMFFHAQRSGKLPKHNNIHWRGNSCMKDGLSDPAVRRSLVGGYYDAGDAVKFNFPAAFSMTLLSWSVIEYSAKYDAVGELGHVRDIIKWGSDYFLKTFNSTADSIDRVIAQVGGGATSPGSTQPNDRYCWMRPEDIDYPRPVVECHTCSDLAAEMAAALAAASIVFKDNKAYSQKLVHGATTLFQFARDRRGRYSAGGSYAAKFYNSTSYWDEFLWGSSWMYLATGNSSYLTLATNPKLAKHAGAFWGGPDYGVFSWDNKLTGAQDQCFELQYYI

SEQ ID NO: 196158 - protein, 371 aa, Zea Mays
MRPEDIDYPRPVVECHTCSDLAAEMAAALAAASIVFKDNKAYSQKLVHGATTLFQFARDRRGRYSAGGSYAAKFYNSTSYWDEFLWGSSWMYLATGNSSYLTLATNPKLAKHAGAFWGGPDYGVFSWDNKLTGAQVLLSRLRLFLSPGYPYEEILRTFHNQTSIIMCSYLPVFKSFNRTRGGLIQLNHGKPRPLQYVVNAAFLASVFSDYLEAADTPGWYCGPHFYSVEVLRSFARTQIDYILGKNPLKMSYVVGFGKRYPRHVHHRGASIPKNGVHYGCKGGWKWRDAKKPNPNTIAGAMVAGPDRHDGFKDARRNYNYTEATLAGNAGLVAALVALSGDGHGGVDKNTMFSAVPPMFPSPPPPPAPWKP

SEQ ID NO: 196159 - protein, 365 aa, Zea Mays
MRVPGSWTCRRGSASTPPTRRSSRTTSPIRPSTTASSPVSSARSTSTSASHGTCQGQDGGEGVVLLLPQGSQVPDGHADQPRHGDRLLEGHRQGQGDLQGPRRPRGHEEDARLLPRPRAARGEDRLGHARVPPRGQASRAAPALRQGRVGRVQGVQQGAGGEDRANNGGGRRGRARARRLAGLPQRAPRLRRAAGPHRRRRRRGDRLQRPRVHLRRAGHEPQPPPGQDGGARAAAHAVPAAAAPDVLLLEPVLLSAGDELRRRPSPGDPEVLQGGAAGGVGADGGVGGQPVPRDRAERRPQRGDLVGGDPVVVAPVPARVRRPGPEPRGPLEVLKPSPGRLDDDRSVDRGARPPASIPWFGWLIA

SEQ ID NO: 196160 - protein, 316 aa, Zea Mays
MGPARQGQDGGEGVVLLLPQGSQVPDGHADQPRHGDRLLEGHRQGQGDLQGPRRPRGHEEDARLLPRPRAARGEDRLGHARVPPRGQASRAAPALRQGRVGRVQGVQQGAGGEDRANNGGGRRGRARARRLAGLPQRAPRLRRAAGPHRRRRRRGDRLQRPRVHLRRAGHEPQPPPGQDGGARAAAHAVPAAAAPDVLLLEPVLLSAGDELRRRPSPGDPEVLQGGAAGGVGADGGVGGQPVPRDRAERRPQRGDLVGGDPVVVAPVPARVRRPGPEPRGPLEVLKPSPGRLDDDRSVDRGARPPASIPWFGWLIA

SEQ ID NO: 196161 - protein, 204 aa, Zea Mays
MNMNLAIGKSMRWWEKGLQPNMREIESAQDLVDSLTNAGERLVVVDFFSPGCGGCRALHPKICQFAERNPDVLFLQVNYEEHKSMCYSLRVHVLPFFRFYRGAQGRLCSFSCTNATIKKFKDALAKHKPDRCTFGPTRGLDESELLALAANKELQFTYTREPELTPMGDTPGEVIAPEPAKLPAATKPLVKLGSEERSLVSPGR

SEQ ID NO: 196162 - protein, 111 aa, Zea Mays
MDPTEPRWRINSSFSPPTSRRWDCRYSSDGLPHRVHDAPHDHPPYVSSLSSHSKGSRNAFGSDQYLSHHHSVSDGALSYFGSPADSLQAPRWTPSLQRFDLGEFSTPAGEL

SEQ ID NO: 196163 - protein, 418 aa, Zea Mays
MDPTEPRWRINSSFSPPTSRRWDCRYSSDGLPHRVHDAPHDHPPYVSSLSSHSKGSRNAFGSDQYLSHHHSVSDGALSYFGSPADSLQAPRWTPSLQRFDLGSRPETSDYPQSSERPLTATSSFSSASPFSESSQLASSKSEACRMLEVGNAGRATPSDDSQASPLWRRSLASPDLKFHNAPNELGKMETSPEPNTSSRREGFRWSNASSYDFGYDGDAIDISDHISIESQRSPTSSARFLKCGLCERFLHQKSPWTSNRIVRNADMPVAAVLPCRHVFHADCLEESTAKTEVHEPPCPLCARATDDEGHVSFSEPLHVALRSARRNLLLGTGAGGNSGISDPPRTDRGLKRNNSAVMPRRSGGALFRNRFKKQFPFKARIGKELFGGRVLNKVGLSLSSGQHDDHRQQAPKHDRPMK

SEQ ID NO: 196164 - protein, 90 aa, Zea Mays
MKTDLTRTITVFINGVPMEVPSGPIDMRAIFGQDVLLVHSTGALLPVDDYGILTQSLQTGESYFLVISHIDSLMYSLHSKLSWSYYASRY

SEQ ID NO: 196165 - protein, 344 aa, Zea Mays
MASRQNTREARAEADARRAVEELARARDEHLEKAEVNARSAADEIARSRADRGAAGGGGILESVQEGARSLASAVGRTFGGAKDATVDKTSQTAHTAGDKLGEYRDYTADKAREANDSVSRKTGETAEATRNKLGEYKDSAVEKARETKDAVAQKTSETAEATKNKLGEYKDAAAGKAREAADTTAGKAREAKDATMQKAQETRDATADKAREARDVTRQKAGEYTDASREAAQEARDRSRATAQTAADKARETASTHDTDREQGQGLLGALGNVTGAIKEKLTLGQGQHVDVRLGGEDERAAKERAAEKAASVYFEEKDRLMQQRAAERVDQCVEKCVEDVIM

SEQ ID NO: 196166 - protein, 558 aa, Zea Mays
MLYGNLSVARTWGNYLQMVDLSSNRLTGSWPNETTQFLRLTSLRISNNLLSGELPIVLGTYPELIFIDLSINQLHGPLPGNLFTAVKLTFLNLSGNSFTGTLPLRNSDTKNSTSIDLSILPVQTSNLSYVDLSSNFLHGSLPMGIGDLSALTLLNLRQNNFTGEIPRTITKLKNLLYIDLSSNNFNGSIPDGLPDDLVEFNVSYNYLSGSVPSNLLKFPDSSFHPGNELLVLPRSESLNGSDKSDEARHGLKRGILYALIICVVVFVTGIIALLLVHWKISSWKSREKGTGQGKHVGQVQSAQRSAEISTTEMHDVALESSPSAEYGAVSLPGKERRHEAQDAPIDAAYFNEPAGSSSARKDSTKSSMPSLSSSPPDARSQHHHSILRVHSPDKLVGDLHLFDNSVVFTAEELSCAPAEIIGRSCHGTSYKATLDNGYMLTVKWLKEGFAKSKKEFSREIKKLGSVRHPNLVPLRGYYWGPKEHERIMISDYADATSLSTYLSEFDERNLPPLSAGQRLNIAIDIARCLDYLHNERADDSNRHGGAGPKRRRARIFPS

SEQ ID NO: 196167 - protein, 267 aa, Zea Mays
MAMGLPGLRCHRLLARGSLPPLGPALYRRPLERTSALRYSSLQAQAGDSIGEEALRMFLEDRQLHGDFVTKVSDMVWRRNGANVGAAEATTGQGSAIDVAQPEDVREDAVDEGMLRLAAITSDWVSGDSSPPLSKRLSAEERQNESNKRKELNLLKYEALKDELLLLTAGTGAACSLYCLLVFSLETAVSYALGVGFSCLYLQLLYQHADNLSKEDIPEVFLKKKVKKFEEYNREDIGWCRTSSFISKAYNSCRDLWIVSFITSLPK

SEQ ID NO: 196168 - protein, 531 aa, Zea Mays
MVSAILGFLWVFAAWAYAEVLFHRKNTASIKTRHSDVNLAVMDDSSVKAEDQTMLLEEGGQAMAAKPAYTSLTSQILRLIFMDQLLLLENRLTLRALSEFGGYLLYFYICDRTNLLGESAKNYSRDLFLFLYFLLIIVAAMTSFKVHQDKSSFTGKSVLYLNRHQTEEWKGWMQVLFLMYHYFNAKEIYNAIRVFIAAYVWMTGFGNFSYYYVRKDFSLGRFAQMMWRLNFFVIFCCIVLNNDYTLYYICPMHTLFTLMVYGALGILNKYNEIRSVMAMKFVACFLVVVLVWEVPGVFDIVWSPFTFLLGYTDPSKPDLPRLHEWQFRSGLDRYIWIVGMIYAYYHPTVEKWLEKLEETEMRTKLYIKTSIVTVSMMAGYLWYEYIYKLDKITYNKLHPYTSWIPITVYICLRNFTQEFRGFSLTLFAWLGKITLETYISQFHIWLRSSVPNGQPKWLLSIIPNYPLLNFMLTTAIYVAVSHRLFELTNTLKMVFVPNRDNKRLSYNFVAGTAISAALYFVSFVLIGIAGY

SEQ ID NO: 196169 - protein, 211 aa, Zea Mays
MQFPSQERLDEMINFPELKMKLSGAKIYVSSWSSQAKPKSKLHSVWIVAKNVPEELQNYQAICELGSTKLGLLKKWTFLSLDSKDIVRFKVYVKSVAMIPPIIEVGVKPFLYDIYFKIDNITDEGWNDDSINLDKRASIDRQGFGDPSFEKSVKKAKSGGEKSGIDDKGKSPLEDPSIHGNEAGFQSGHSDGMKSGKISERCQRISRQSRK

SEQ ID NO: 196170 - protein, 121 aa, Zea Mays
MWRVIQVALNLVEILKSISNLCDNWLSKPKDKIANMILFGCGAVFWAIWRTRNYWCFGNKTILDPSNIIFLCCFWLDSWAIRQRKREQKMVVQGSKLIRKIASEAFGRAFGWCPRYRRISG

SEQ ID NO: 196171 - protein, 408 aa, Zea Mays
MALDLAIGGSAARRAETQTLAPVLLMGPPPPPPIPPMTGMYFVGPPTTGALLPLPIPVALPHEVIMYMDECRSRSLLKFISNAGIEPSLEDERRRERVVRELGKIVMDWARRVAYEQGKQHWITSATVLTFGSYALGAYGPESDIDVLCIGPYIASLQHHFFVVLRQMLEGRPEVSELHSIEGAKVPLMRFKFNGILVDFPYVQLPVINAAEAMHAFDPHVLENVDGPSWRCLSGVRANRQIIQLVPNMKKFQYLLRCLKLWARKRGLDCHDTRSTDSDWSWLFAPFPYGARYKCFLRIVLSAPMEDELRDWVGWVKSRFRNLLLKLESLGVYCDPDPSKQVDHTITDPNVVFFWGLIYRRSIQICTNSLKEDFMKSVCNNIYGKEKCAHSDITMAVVGPPQLPKKCL

SEQ ID NO: 196172 - protein, 157 aa, Zea Mays
MHAFDPHVLENVDGPSWRCLSGVRANRQIIQLVPNMKKFQYLLRCLKLWARKRGLDCHLLGFFAGIHLAILAAYVCRRHPNASINTLLSLFFDIFVHWPWPLPNFAPLVQQKVLSAKSKKNFGVVMLLARIPEVLILTGVGSLHLFHMVQDTNAFSA

SEQ ID NO: 196173 - protein, 176 aa, Zea Mays
MEEDRVRTQASTAAAAARVERPVKLLLLLAPSHPTCTTPARRNLSKAAHLPAPGRGEAKAGAEAAGCVKRLIGTNPPVDDESGSDRSSPHELVPGSCAAIPHYLGATASLHHRAFSPAKCYGWQHPLGSGGLPAYVPATSPQGLALSRLREATPVRSDATLSHVDGQVYFTEQDCF

SEQ ID NO: 196174 - protein, 122 aa, Zea Mays
MCLDVTKHHITAQINIKEPISYSNLTTCYYLVLSRHHITAQSTIEEPLATIAQQAHKLNHSLPNYASHSSSCLAGIRTRLQLRSVADGGPSRSKHRVPTVLMIASALTCTFSERTGRRLPHW

SEQ ID NO: 196175 - protein, 52 aa, Zea Mays
MLSGPSECTGCDFVFFPKHYNTFVTFFYNIITYLYMSYRDILSSRCNARAST

SEQ ID NO: 196176 - protein, 84 aa, Zea Mays
MIHQPLGGAQGQETDLEIQANEMLHHKANLNGYLAYHTGQPLDKINVDTDRDYFMSAKEAKEYGLIDGVIMNPLKALQPLPASS

SEQ ID NO: 196177 - protein, 891 aa, Zea Mays
MASSSKASDSSQRSKRSDQGMGKDAAAASVVPIHANLTQLIRQVQSGRLAYIKEKLEVNRKTLQRHSCSLFDVAAAAEVASRGTDGGNALSQRAAERQCGSDLANGIGERDVVSVQEENLATGTLALSSSGATAQRTIVRFVKLPLVEKIPPYTTWIFLDKNQRMADDQSVVGRRRIYYDTVGNEALICSDSDEEIPEPEEEKHFFTKGEDHLIWRATQDHGLNQEVVNVLCQFIGATPSEIEERSEVLFEKNEKHSGSSDKIESRLSLDKTMDAVLDSFDNLFCRRCLVFDCRLHGCSQNLVFPCEKQPYSFDPDENKKPCGHLCYLRWREGFKEMHDDGLAGGATYTMESGTASQRVDVNVMYESEDSNRQKGNIRSMTLVGTSGSKIISSVSAEESTTTPSADISETENVSSDLPPSSLRKHKISKHGPRYREHSPGKRQKVFTSDISFEGNIMNKLSIPEIRDTRLESRESGGDKLRILDESTKKTSRKDMCGESPATTMENVGRQSNKVSSTKNFLESTLSCWSALERDLYLKGIEIFGKNSCLIARNLLSGLKTCIEVANYMYNNGAAMAKRPLLNKSISGDFAENEQDYMEQDMAARTRIYRRRGRNRKLKYTWKSAGHPTVRKRTDDGKQCYTQYSPCACQQMCGKDCPCADKGTCCEKYCGCSKSCKNKFRGCHCAKSQCRSRQCPCFAASRECDPDVCRNCWVSCGDGSLGEPLARGDGYQCGNMKLLLKQQQRILLGRSDVAGWGAFIKNPVNKNDYLGEYTGELISHKEADKRGKIYDRANSSFLFDLNDQYVLDAYRKGDKLKFANHSSNPNCYAKVMLVAGDHRVGIYAKEHIEASEELFYDYRYGPDQAPAWARRPEGSKKDEASVSHRRAHKVAR

SEQ ID NO: 196178 - protein, 459 aa, Zea Mays
MADDQSVVGRRRIYYDTVGNEALICSDSDEEIPEPEEEKHFFTKGEDHLIWRATQDHGLNQEVVNVLCQFIGATPSEIEERSEVLFEKNEKHSGSSDKIESRLSLDKTMDAVLDSFDNLFCRRCLVFDCRLHGCSQNLVFPCEKQPYSFDPDENKKPCGHLCYLREQDMAARTRIYRRRGRNRKLKYTWKSAGHPTVRKRTDDGKQCYTQYSPCACQQMCGKDCPCADKGTCCEKYCGCSKSCKNKFRGCHCAKSQCRSRQCPCFAASRECDPDVCRNCWVSCGDGSLGEPLARGDGYQCGNMKLLLKQQQRILLGRSDVAGWGAFIKNPVNKNDYLGEYTGELISHKEADKRGKIYDRANSSFLFDLNDQYVLDAYRKGDKLKFANHSSNPNCYAKVMLVAGDHRVGIYAKEHIEASEELFYDYRYGPDQAPAWARRPEGSKKDEASVSHRRAHKVAR

SEQ ID NO: 196179 - protein, 888 aa, Zea Mays
MASSSKASDSSQRSKRSDQGMGKDAAAASVVPIHANLTQLIRQVQSGRLAYIKEKLEVNRKTLQRHSCSLFDVAAAAEVASRGTDGGNALSQRAAERQCGSDLANGIGERDVVSVQEENLATGTLALSSSGATAQRTIVRFVKLPLVEKIPPYTTWIFLDKNQRMADDQSVVGRRRIYYDTVGNEALICSDSDEEIPEPEEEKHFFTKGEDHLIWRATQDHGLNQEVVNVLCQFIGATPSEIEERSEVLFEKNEKHSGSSDKIESRLSLDKTMDAVLDSFDNLFCRRCLVFDCRLHGCSQNLCEKQPYSFDPDENKKPCGHLCYLRWREGFKEMHDDGLAGGATYTMESGTASQRVDVNVMYESEDSNRQKGNIRSMTLVGTSGSKIISSVSAEESTTTPSADISETENVSSDLPPSSLRKHKISKHGPRYREHSPGKRQKVFTSDISFEGNIMNKLSIPEIRDTRLESRESGGDKLRILDESTKKTSRKDMCGESPATTMENVGRQSNKVSSTKNFLESTLSCWSALERDLYLKGIEIFGKNSCLIARNLLSGLKTCIEVANYMYNNGAAMAKRPLLNKSISGDFAENEQDYMEQDMAARTRIYRRRGRNRKLKYTWKSAGHPTVRKRTDDGKQCYTQYSPCACQQMCGKDCPCADKGTCCEKYCGCSKSCKNKFRGCHCAKSQCRSRQCPCFAASRECDPDVCRNCWVSCGDGSLGEPLARGDGYQCGNMKLLLKQQQRILLGRSDVAGWGAFIKNPVNKNDYLGEYTGELISHKEADKRGKIYDRANSSFLFDLNDQYVLDAYRKGDKLKFANHSSNPNCYAKVMLVAGDHRVGIYAKEHIEASEELFYDYRYGPDQAPAWARRPEGSKKDEASVSHRRAHKVAR

SEQ ID NO: 196180 - protein, 614 aa, Zea Mays
MSATCWGYQLITCSSGGTGGGGHRRTRRGHRRRRPTGAAGVVDTSVPPEFPQWREGFKEMHDDGLAGGATYTMESGTASQRVDVNVMYESEDSNRQKGNIRSMTLVGTSGSKIISSVSAEESTTTPSADISETENVSSDLPPSSLRKHKISKHGPRYREHSPGKRQKVFTSDISFEGNIMNKLSIPEIRDTRLESRESGGDKLRILDESTKKTSRKDMCGESPATTMENVGRQSNKVSSTKNFLESTLSCWSALERDLYLKGIEIFGKNSCLIARNLLSGLKTCIEVANYMYNNGAAMAKRPLLNKSISGDFAENEQDYMEQDMAARTRIYRRRGRNRKLKYTWKSAGHPTVRKRTDDGKQCYTQYSPCACQQMCGKDCPCADKGTCCEKYCGCSKSCKNKFRGCHCAKSQCRSRQCPCFAASRECDPDVCRNCWVSCGDGSLGEPLARGDGYQCGNMKLLLKQQQRILLGRSDVAGWGAFIKNPVNKNDYLGEYTGELISHKEADKRGKIYDRANSSFLFDLNDQYVLDAYRKGDKLKFANHSSNPNCYAKVMLVAGDHRVGIYAKEHIEASEELFYDYRYGPDQAPAWARRPEGSKKDEASVSHRRAHKVAR

SEQ ID NO: 196181 - protein, 400 aa, Zea Mays
MPFWILLIISSAADAWFLIAAFMVVHRIWYFHVRSNPTALTLMKTRSHVVICATFDCLIARNLLSGLKTCIEVANYMYNNGAAMAKRPLLNKSISGDFAENEQDYMEQDMAARTRIYRRRGRNRKLKYTWKSAGHPTVRKRTDDGKQCYTQYSPCACQQMCGKDCPCADKGTCCEKYCGCSKSCKNKFRGCHCAKSQCRSRQCPCFAASRECDPDVCRNCWVSCGDGSLGEPLARGDGYQCGNMKLLLKQQQRILLGRSDVAGWGAFIKNPVNKNDYLGEYTGELISHKEADKRGKIYDRANSSFLFDLNDQYVLDAYRKGDKLKFANHSSNPNCYAKVMLVAGDHRVGIYAKEHIEASEELFYDYRYGPDQAPAWARRPEGSKKDEASVSHRRAHKVAR

SEQ ID NO: 196182 - protein, 256 aa, Zea Mays
MTGSNVTHNIAHVRASKCVVKIAPVRTRELAVRSTVGVRRAAKTSLEAVIVQKANAEADSAPVLQPVVNVIQMFVGIAGCGDGSLGEPLARGDGYQCGNMKLLLKQQQRILLGRSDVAGWGAFIKNPVNKNDYLGEYTGELISHKEADKRGKIYDRANSSFLFDLNDQYVLDAYRKGDKLKFANHSSNPNCYAKVMLVAGDHRVGIYAKEHIEASEELFYDYRYGPDQAPAWARRPEGSKKDEASVSHRRAHKVAR

SEQ ID NO: 196183 - protein, 195 aa, Zea Mays
MKDLVQRTVQKRTQLSQLLSQDYLFVREFVAFIASVLLKCCKQEDSSDMEIILGGVASISDEISWFKNEATVWGVDLASVSPLKANLEYHRFLRSFTEPEISYAVAVTTFWTIETVYQDSFGFCIQDGNKTPPELLGTCQRWGSAGFRQYCQSLQSIVDRCLANAPADAVQSAEEAFVRVLELEIGFWDMSSSRS

SEQ ID NO: 196184 - protein, 191 aa, Zea Mays
MDGGGVDTATTAAWMEKHRHMYERATRHPFTVSIRDGTVDMSAFKRWLSQDYLFVREFVAFIASVLLKCCKQEDSSDMEIILGGVASISDEISWFKNEATVWGVDLASVSPLKANLEYHRTALVSAYKTATRRRRSSWAPARDGAAPGSDSTASLCRASWIVAWLTHRLMLSRVLKRPSSGYSSWKLVSGI

SEQ ID NO: 196185 - protein, 75 aa, Zea Mays
MLALMVAMRSRNKSLACLIWSKLPSSSMFFRLWLDSWSRMDSLTLVTLLSVDPTLVDYATGQRGVQTDLSIYEIK

SEQ ID NO: 196186 - protein, 290 aa, Zea Mays
MATSSVAADMELDRPNLEDYLPPDSLPQEAPRNLHLRDLLDISPVLTEAAGAIVDDSFTRCFKSNSPEPWNWNIYLFPLWCFGVVIRYGILFPLRSLTLAIGWLAFFAAFFPVHFLLKGQDKLRSKIERKLVEMMCSVFVASWTGVIKYHGPRPSTRPHQVFVANHTSMIDFIILEQMTAFAVIMQKHPGWVGFIQKTILESVGCIWFNRNDLRDREVTARKLRDHVQQPDNNPLLIFPEGTCVNNQYTVMFKKGAFELGCAVCPIAIKYNKIFVDAFWNSNLLQCTWSG

SEQ ID NO: 196187 - protein, 105 aa, Zea Mays
MSSELSSEHRTFLATDAEESNCSMVLHVNGFYTGRPEAGTSYSCPKLNRGGGGGRETTWSLARPRERTVVRPRATAPTLPGAPTCPRQQPHVRPRAAVAVAVPAR

SEQ ID NO: 196188 - protein, 638 aa, Zea Mays
MSTWRPLKMLVSAVLSDKRPDEVPQLLESMLSKLVEEFENRLNSQNELVKAALKNGIDNTRSFSKSKVLVETTPNTSGRKMDTADIYCNHKQTKKVASSELALKQYSILQQQSKNVEELKSDLINTRDGMEYMQMKYAEDLNLLGRHLFSLAHAASGYHKVLEENRKLYNQVQDLKGSIRVYCRVRPFLPGQASPSTVASIDEGNITLVIPSKSGKEVRKTFSFNKVFGSSATQDEVFLDTQPLIRSVLDGYNVCIFAYGQTGSGKTYTMSGPKNMTEQTQGVNYRALGDLFKLAEQRKRTFIYDIAVQMIEIYNEQVRDLLVTDGLNKKLEIRNNSQNGLNVPDASLVRVASTMDVMELMNVGHKNRAVGATALNDRSSRSHSCLTVHVKGRDLTSGTILRGCMHLVDLAGSERVDKSEVTGERLKEAQHINKSLSALGDVIASLAQKNSHVPYRNSKLTQLLQDSLGGQAKTLMFVHISPESDAVGETISTLKFAERVSTVELGAAQLNKESGEVRELKIAQLKSALAAKDLGSEQIISHDTEAFNIKMPSPGFSIKRQGSCDLLSTQTNFRQPLDAVGNIEARANPTLRQKKPSFDLQDLLTANDSPSWPDSNLRVNFQTGDEREVIGGDWIDKV

SEQ ID NO: 196189 - protein, 772 aa, Zea Mays
MSTWRPLKMLVSAVLSDKRPDEVPQLLESMLSKLVEEFENRLNSQNELVKAALKNGIDNTRSFSKSKVLVETTPNTSGRKMDTADIYCNHKQTKKVASSELALKQYSILQQQSKNVEELKSDLINTRDGMEYMQMKYAEDLNLLGRHLFSLAHAASGYHKVLEENRKLYNQVQDLKGSIRVYCRVRPFLPGQASPSTVASIDEGNITLVIPSKSGKEVRKTFSFNKVFGSSATQDEVFLDTQPLIRSVLDGYNVCIFAYGQTGSGKTYTMSGPKNMTEQTQGVNYRALGDLFKLAEQRKRTFIYDIAVQMIEIYNEQVRDLLVTDGLNKKLEIRNNSQNGLNVPDASLVRVASTMDVMELMNVGHKNRAVGATALNDRSSRSHSCLTVHVKGRDLTSGTILRGCMHLVDLAGSERVDKSEVTGERLKEAQHINKSLSALGDVIASLAQKNSHVPYRNSKLTQLLQDSLGGQAKTLMFVHISPESDAVGETISTLKFAERVSTVELGAAQLNKESGEVRELKAQIAQLKSALAAKDLGSEQIISHDTEAFNIKMPSPGFSIKRQGSCDLLSTQTNFRQPLDAVGNIEARANPTLRQKKPSFDLQDLLTANDSPSWPDSNLRVNFQTGDEREVIGGDWIDKRYHSGMREKQYQRNNTRQKDDHEYEEQRSRFYSTNTDDSDDIDMATSDSSESDALWQQLNVQSMDNSISLSGSKVKKPQIKLRDGSDARTPIHSQIPSASRKVANGSNRSVRQPLSRSDSRRLSSNGRQSGAK

SEQ ID NO: 196190 - protein, 528 aa, Zea Mays
MSGPKNMTEQTQGVNYRALGDLFKLAEQRKRTFIYDIAVQMIEIYNEQVRDLLVTDGLNKKLEIRNNSQNGLNVPDASLVRVASTMDVMELMNVGHKNRAVGATALNDRSSRSHSCLTVHVKGRDLTSGTILRGCMHLVDLAGSERVDKSEVTGERLKEAQHINKSLSALGDVIASLAQKNSHVPYRNSKLTQLLQDSLGGQAKTLMFVHISPESDAVGETISTLKFAERVSTVELGAAQLNKESGEVRELKAQIAQLKSALAAKDLGSEQIISHDTEAFNIKMPSPGFSIKRQGSCDLLSTQTNFRQPLDAVGNIEARANPTLRQKKPSFDLQDLLTANDSPSWPDSNLRVNFQTGDEREVIGGDWIDKVVVNNNNSVGDWEGDNAALPDFFYQRYHSGMREKQYQRNNTRQKDDHEYEEQRSRFYSTNTDDSDDIDMATSDSSESDALWQQLNVQSMDNSISLSGSKVKKPQIKLRDGSDARTPIHSQIPSASRKVANGSNRSVRQPLSRSDSRRLSSNGRQSGAK

SEQ ID NO: 196191 - protein, 262 aa, Zea Mays
MQLLESMLSKLVEEFENRLNSQNELVKAALKNGIDNTRSFSKSKVLVETTPNTSGRKMDTADIYCNHKQTKKVASSELALKQYSILQQQSKNVEELKSDLINTRDGMEYMQMKYAEDLNLLGRHLFSLAHAASGYHKVLEENRKLYNQVQDLKGSIRVYCRVRPFLPGQASPSTVASIDEGNITLVIPSKSGKEVRKTFSFNKVFGSSATQDEVFLDTQPLIRSVLDGYNVCIFAYGQTGSGKTYTMMQVLFVWHQQWMSWN

SEQ ID NO: 196192 - protein, 401 aa, Zea Mays
MAFAASEGNLSPALPLATLIGRELRGDGTERPHVRYGHSGFAKRGEDYFLVKPDCLRVPGDPSSSFSVFAVFDGHNGVSAAVFSKEKLLEHVMSAVPEGISREDWLQALPRALVAGFVKTDIDFQRKGETSGTTATLVVVDGFTVTVASVGDSRCILDTQGGEVSLLTVDHRLEENAEERERVTASGGEVSRLNLCGGQEVGPLRCWPGGLCLSRSIGDTDVGEFIVPIPHVKQVKLPNTGGRLIIASDGIWDALSSESAAQACRGLRAELAAKLVVKQALKTSGLKDDTTCVVVDIIPSDHCSTPPALSPKKNQNKLKHLIFGKRSHSSVGKLSKSASLGSVEEIFEEGSAMLEERYSWMFQSWCPGNSILCSHFLHWHNLFFHGIAIFPLYYFDALVGK

SEQ ID NO: 196193 - protein, 211 aa, Zea Mays
METSTKKLSSLRITSLDDDDDETEIPHQPPQAGLSTAEADYEDDDDEEEEAEVTLGVLSKPKHPGLLLRHLFPSKAGGIPAWLDPVNLPSGKSSYCGFCGEPLQFVLQIYAPIEDNVAAFHRTLFMFMCPSMACLLRDQHEQWKHKYGNPCRSVKIFRCQLPRNNAFYSAQPPKHDGSDKPLCPGAPVCHWCGTWKGDKICSSCKKSKVLF

SEQ ID NO: 196194 - protein, 413 aa, Zea Mays
METSTKKLSSLRITSLDDDDDETEIPHQPPQAGLSTAEADYEDDDDEEEEAEVTLGVLSKPKHPGLLLRHLFPSKAGGIPAWLDPVNLPSGKSSYCGFCGEPLQFVLQIYAPIEDNVAAFHRTLFMFMCPSMACLLRDQHEQWKHKYGNPCRRFSGANCHGIMPSTQLNLQSMMALTNHSVQELLYATGVVPGKVIKYVVAARKARYCSEKHQALHWRTGHKNDCLQIISSAASNSVLPAVGIVPASISWPEFEIKIDYEGTFDSDSGDENNSKSLVMQRHGKLDAMMQSWMDHFEADADNKCWASFQERVSRAPNQVLRYCREPNAKPLWALSFGCPSDADIPSCSYCRGPLCYEFQVMPQLLYFFGVGNQPDSLDWATIVVYTCQGSCDQTVSYKEEFAWVQLYPTTTTRR

SEQ ID NO: 196195 - protein, 214 aa, Zea Mays
METSTKKLSSLRITSLDDDDDETEIPHQPPQAGLSTAEADYEDDDDEEEEAEVTLGVLSKPKHPGLLLRHLFPSKAGGIPAWLDPVNLPSGKSSYCGFCGEPLQFVLQIYAPIEDNVAAFHRTLFMFMCPSMACLLRDQHEQWKHKYGNPCRSVKIFRCQLPRNNAFYSAQPPKHDGSDKPLCPGAPVCHWCGTWKGDKIWTCTQQTNVAVLCW

SEQ ID NO: 196196 - protein, 140 aa, Zea Mays
MRQPPRARPRTNLAVGYPAREPAHQAPSPRQAPSPATRLPPRPRSPPQLSPHPAIPAAHAPLSTRPRSSPLFAWIGYRSQLSPWIARPRQPNLLPVSMEEGNSCLSQLQKALIFVKLMVVVLNWNTRGGKSNMVCVTARY

SEQ ID NO: 196197 - protein, 261 aa, Zea Mays
MDKLGNLPIIDWIGGVGNKVSRIQERGFSPTYNMERSSMHGCGTEVINKRAPPKLAKESMEDFLDASLVRETMMEGTKEEVWERESMSGLPTKKGMSSAQVFGHSWRPINPTWCWVPRSGIHTKSCYPARPDEVRRLRLSAKSVSRVRHQSLEARSYAQVVREGRMAWRRDHGGSNWKRRQDEWMEEDDLLEGDPCREQDLRAKLQRGSGDSTDRIPAEQSWSVLLKTKDQAMLEDILDSMKNWLREQHSVEENCSDIGVI

SEQ ID NO: 196198 - protein, 302 aa, Zea Mays
MEGAIGNGAKMNGWRKMTFWKGIPAENKICALNFRGDQEILLTGSQQSRGGFGGRRGLGRSEFDGQGSRQFETKEKFRGAQFSGDSGLITENRLGTHFEKDFRLQEDQGKEIKCFRCTQSGHHQSECSNEPLCYKCKGFGHMAAECHMQRKLRLFGFGMPEQGFFGIDISENKEQMAGLVASIHVLEGEPNEEKLEEELKNLVQENWEFRVRRVDKFDFIASFPDKGSLETYAKLNSLEMPIYRFRVKIGKTSVDPKASAELQSVWVKIFNIPEKAREKIIVKEVASLVGKPVTVDELSLIK

SEQ ID NO: 196199 - protein, 535 aa, Zea Mays
MFLKGWHRRLLGYKKKEKNDLIQELDQIDILIEDQVNLWENWSKRLAIEKKLEHIYHLDEVFWQQRAGRKWTVKGDSNSRFFHLYANGRRRKNTIAYLETDKGVCMDQKALIAHIVNFYKILFGPNTPCNMKLSEDFWRDRSMTSKEEMESLAKPFEVSEIKQAIDQMHNESAPGPNGFGASFFKKFWNLIKEDLIMMFSDFYAGKLDIQRLNFGVITLIPKIKEASNIRQYRPICLLNVDFKIFTKVLTNRLSLVAKEVIGGSQTGFIKDRNILEGVVILHEIIHELKTKKKKGLILKIDFEKAYDKVSWVFLEEVMKTKKFPDRWIDMVMRTVKGRKVCVNINGERSNFFKTFRGLRQGDPLSPLLFNLVADALSALLDKGVEKGHISGVLGDLVPGGISHIQYADDTVIMIDGSDRSILNLKLILYCFEWMSGLKINFHKSEVFVFGAVQQERERMANMLNCSLGSWPMKYLGIPISDGRLKPSVFDHIVEKMEKRLDPWKELERATQDKGSSDVGRYSGLNEELVTGTALG

SEQ ID NO: 196200 - protein, 392 aa, Zea Mays
MWAERVVGERRMRQIQRFARNAKLTVVCLLLTVVVLRGTVGAGRFGTPQQDLIELRQHFVSHPHRALAEHHDARSRASTTTTSSSSSSSSGRRDEPDPPPRSLRDPPYTLGPKISDWDEQRAAWHRRHPETPPFLNDIKPRVLLVTGSSPKPCENPVGDHYLLKSIKNKMDYCRVHGIEVFYNLIMHGWDEMVYDDKNWIGLNTGSFLLRNCQWSLDMLDTWAPMGPKGPVRIEAGKVLTKSLKDRPVFEADDQSAMVYILATQREKWGDKVYLENGYYLHGYWGILVDRYEEMLENYKPGLGDHRWPLVTHFVGCKPCGKFGDYPVERCLKNMDRAFNFGDNQILQMYGFTHKSLASRRVKRIRNETSNPLETKDELGLLHPAFKAVKTST

SEQ ID NO: 196201 - protein, 145 aa, Zea Mays
MLSADIPPNQTIYLNNLNEKVKKEELKRSLYALCSQYGRILDVVALKTQKLRGQAWVVFSEITAATNAFRGLQDFDFYGKKMRVQYAKTKSDCIAKEDGTYAPKEKRKKQEEKAAEKKRRAEEAQQAGPNAAAAQSNGTVVVVHV

SEQ ID NO: 196202 - protein, 152 aa, Zea Mays
MRVQYAKTKSDCIAKEDGTYAPKEKRKKQEEKAAEKKRRAEEAQQAGPNAAAAQSNGTGYQASRLGKASQEPPAPPNNILFIQNLPDQTTSMMLQILFQQYPGFREVRMIEAKPGIAFVEFEDDGQSMVAMQALQGFKITPENPMAISYAKK

SEQ ID NO: 196203 - protein, 203 aa, Zea Mays
MTSTLTSKEYQSYQSSTAALRELSLDRLCPSLQATTIEVLSDGNLVFRKIANHLSKVASPFVRNTATIGGNIIMAQRLPFESDIATVLLAAAPRPFGNAASYVNAALLARTSTDAASGKNIMEDICLVFGAYGADHAIRASKVEDFLKGKSLSSSVILKAVQLLKETVSPPEGTTHPEYRVSLAVSFLFTFLSNTLKTRNGFR

SEQ ID NO: 196204 - protein, 204 aa, Zea Mays
MTSTLTSKEYQSYQSSTAALRELSLDRLCPSLQATTIEVLSDGNLVFRKIANHLSKVASPFVRNTATIGGNIIMAQRLPFESDIATVLLAAAPRPFGNAASYVNAALLARTSTDAASGKNIMEDICLVFGAYGADHAIRASKVEDFLKGKSLSSSVILKAVQLLKETVSPPEGTTHPEYRVSLAVSFLFTFLSSNTLKTRNGFR

SEQ ID NO: 196205 - protein, 198 aa, Zea Mays
MTSTLTSKEYQSYQSSTAALRELSLDRLCPSLQATTIEVLSDGNLVFRKIANHLSKVASPFVRNTATIGGNIIMAQRLPFESDIATVLLAAAPRPFGNAASYVNAALLARTSTDAASGKNIMEDICLVFGAYGADHAIRASKVEDFLKGKSLSSSVILKAVQLLKETVSPPEGTTHPEYRVSLAVSFLFTFLSSLTNS

SEQ ID NO: 196206 - protein, 651 aa, Zea Mays
MAKEGAEGDGWRVMDRRRQQVRGRSSGAGIWSLRGRANWEARGRGTWRGRGGRFVASGSSLGLDARVAVERSSGVQSEAAKKRVADVASGVSDMGKKRREELCCEICEDNHVPEECPVFNGPKPQAALCGFAGGESGFFQIPTWGAKGVLPRSDGVTAFITVKEGNVTAELVKSELSRLIPVKWNWSVQKHADGFIVTFPCRVELQRMIAMKYVHTLGGEGILVIQEVNQKIEPISYLQKAWVNVYGVPFEIRSFLPLWAVGSILGATQKVDMRYTRKMGVVRILVAVTDVNHIPESAEIVVGEGLYEIFFKVDKVLKDGRWIDNNNTGTRDRDDKEQGENDDFTENHENDIFQPEEAVEDTVMEDNSLHSDPMKPHDESSDMGIGVQHRKPFINDSVTLESEVLTSVEPTVLNLMTSTCADQHLQPAPEEYGLDSVICIADHASDGLELSTGRVGVDGNLSSLIDLAPDCSVLASGSISEEGLSVSKVSIPSLEATVPFAGREINLAFDDINIPSAADSLLIEKHKTRESTIHLGHVNYFTDVPRSVLQEALKSNSLTKRVKTEKLNQGGVMLSARRTNTDEDILSKAQRLAAKRNLEIMSACESSQAGSDRCGRVVSLPFIHQFAPRSADRHGTRCRSSAIVSRRAGEQ

SEQ ID NO: 196207 - protein, 1257 aa, Zea Mays
MAKEGAEGDGWRVMDRRRQQVRGRSSGAGIWSLRGRANWEARGRGTWRGRGGRFVASGSSLGLDARVAVERSSGVQSEAAKKRVADVASGVSDMGKKRREELCCEICEDNHVPEECPVFNGPKPQAALCGFAGGESGFFQIPTWGAKGVLPRSDGVTAFITVKEGNVTAELVKSELSRLIPVKWNWSVQKHADGFIVTFPCRVELQRMIAMKYVHTLGGEGILVIQEVNQKIEPISYLQKAWVNVYGVPFEIRSFLPLWAVGSILGATQKVDMRYTRKMGVVRILVAVTDVNHIPESAEIVVGEGLYEIFFKVDKVLKDGRWIDNNNTGTRDRDDKEQGENDDFTENHENDIFQPEEAVEDTVMEDNSLHSDPMKPHDESSDMGIGVQHRKPFINDSVTLESEVLTSVEPTVLNLMTSTCADQHLQPAPEEYGLDSVICIADHASDGLELSTGRVGVDGNLSSLIDLAPDCSVLASGSISEEGLSVSKVSIPSLEATVPFAGREINLAFDDINIPSAADSLLIEKHKTRESTIHLGHVNYFTDVPRSVLQEALKSNSLTKRVKTEKLNQGGVMLSARRTNTDEDILSKAQRLAAKRNLEINSPSFSVLQTISRFIQQKNGILVLFWSLSVQSPKTIPPSVAASFPSFKQGEDSAAGKKVRSPAMAAALECWSGRPSTDEETVEHVLMKPHGRSDDSLPTCADSARAAGEPTPTPTPAPPKKWQRLGRNFAGAIAAFKNTLNLDGGGGGSGLPRDPSPRAEKPPPLLLRGLAQLYSRGAANQQLPEKLVADLRRHFDALPNSYAQAGYDMKDVLLHARLAEQATGEDQPAVNIEEVHGRGSCEEGTVFQLTFACTAPLSWQSMSGSLDSPSFCCKKIQIFEKRGLTLGVVMILVQTGNEALFKNQVESALKSVVKKQRKNSGGVKLPFGLCGCQEEGSRNFDEESMFDPDDGRVLDNEPAHRPQLPTPLPQASVFVSVDEWQTIRSGGEELGRWMLRSEEIEFVDWFGANSFRGVYKGKKVWVNKLRGCDMGSAYDVEIRQDLLQLMSCGQRNILQLHGVCFSENHGLCIVTRMMEGGSVHDILVQRNKRLSLRDTVRIALDVADAMAFMNGYGIAYRDLNARKILLDRQGNACLGDMGIVTPCSNVGEVTEYETSGYRWLAPEIIAGDPETVSETWMSNVYSYGMVLWEMITGEEAYSTYSPVQAAVGIAACGLRPEIPRDCPPFLRSLMNRCWDSSPLKRPQFSEITSILQRQNVR

SEQ ID NO: 196208 - protein, 608 aa, Zea Mays
MAKEGAEGDGWRVMDRRRQQVRGRSSGAGIWSLRGRANWEARGRGTWRGRGGRFVASGSSLGLDARVAVERSSGVQSEAAKKRVADVASGVSDMGKKRREELCCEICEDNHVPEECPVFNGPKPQAALCGFAGGESGFFQIPTWGAKGVLPRSDGVTAFITVKEGNVTAELVKSELSRLIPVKWNWSVQKHADGFIVTFPCRVELQRMIAMKYVHTLGGEGILVIQEVNQKIEPISYLQKAWVNVYGVPFEIRSFLPLWAVGSILGATQKVDMRYTRKMGVVRILVAVTDVNHIPESAEIVVGEGLYEIFFKVDKVLKDGRWIDNNNTGTRDRDDKEQGENDDFTENHENDIFQPEEAVEDTVMEDNSLHSDPMKPHDESSDMGIGVQHRKPFINDSVTLESEVLTSVEPTVLNLMTSTCADQHLQPAPEEYGLDSVICIADHASDGLELSTGRVGVDGNLSSLIDLAPDCSVLASGSISEEGLSVSKVSIPSLEATVPFAGREINLAFDDINIPSAADSLLIEKHKTRESTIHLGHVNYFTDVPRSVLQEALKSNSLTKRVKTEKLNQGGVMLSARRTNTDEDILSKAQRLAAKRNLEITTHRQDMT

SEQ ID NO: 196209 - protein, 606 aa, Zea Mays
MAKEGAEGDGWRVMDRRRQQVRGRSSGAGIWSLRGRANWEARGRGTWRGRGGRFVASGSSLGLDARVAVERSSGVQSEAAKKRVADVASGVSDMGKKRREELCCEICEDNHVPEECPVFNGPKPQAALCGFAGGESGFFQIPTWGAKGVLPRSDGVTAFITVKEGNVTAELVKSELSRLIPVKWNWSVQKHADGFIVTFPCRVELQRMIAMKYVHTLGGEGILVIQEVNQKIEPISYLQKAWVNVYGVPFEIRSFLPLWAVGSILGATQKVDMRYTRKMGVVRILVAVTDVNHIPESAEIVVGEGLYEIFFKVDKVLKDGRWIDNNNTGTRDRDDKEQGENDDFTENHENDIFQPEEAVEDTVMEDNSLHSDPMKPHDESSDMGIGVQHRKPFINDSVTLESEVLTSVEPTVLNLMTSTCADQHLQPAPEEYGLDSVICIADHASDGLELSTGRVGVDGNLSSLIDLAPDCSVLASGSISEEGLSVSKVSIPSLEATVPFAGREINLAFDDINIPSAADSLLIEKHKTRESTIHLGHVNYFTDVPRSVLQEALKSNSLTKRVKTEKLNQGGVMLSARRTNTDEDILSKAQRLAAKRNLEIIKVSRE

SEQ ID NO: 196210 - protein, 340 aa, Zea Mays
MARLVLSECCGLAPLRRLRAGRGAIAAPSPPALSAAPRRRPASASIHRDWALRVSAPTRLASAAVEEDKPSAAPGQEEGAAAGGEFDPGAPPPFGLAEIRAAIPKHCWVKDPWRSMSYVLRDVAVVLGLAAAAARLDSWLVWPLYWAAQGTMFWALFVLGHDCGHGSFSNNPKLNSVVGHILHSSILVPYHGWRISHRTHHQNHGHVEKDESWHPLPERLYKSLDFMTRKLRFTMPFPLLAFPLYLFARSPGKSGSHFNPGSDLFQPTEKNDIITSTASWLAMVGVLAGLTFLMGPVPMLKLYGVPYLVFVAWLDMVTYLHHHGHEDKLPWYRGKRVVES

SEQ ID NO: 196211 - protein, 314 aa, Zea Mays
MADAGSGRATSSQHMPRILTARRASFASAIRDATRREARMMDGCVVPNLPDLPDLVEEAEVQHVVEAREEDDAGEAVVLDVPERHVALVVALLARARGGEVVPVRQVAVHEPRGAQLPRRGRRVRGGLHDHPQQRRRHQPQRVRRPRQRGGPLAGRHGRRLRRRDDHQERARRRCPVVARPRAVRQQAPVQGPARRQRPYHVAAAAAAARRRRRGRPVGHGRRREAGEEAHDEAEGGMQQRLLPQLRPLLLAPPTGATVVRGRPHHRSQPAERRLCLAPRSSYRDRDLASCRLIGVASCQSPGLCKRRLNNEVA

SEQ ID NO: 196212 - protein, 401 aa, Zea Mays
MTNDEFLAVLPPPHDQLREAEYSSSLAELQLQVRTERSEMASPAGDLSLLSSPHRAPGQTPIVARARGPDGRLGVGCPVSVVRPPNHHTLPPDYKHSASPHSVASSPSAFLSWPTSSRRRRQERRRHNDDDGASSAATAAGTAAGVRGHHAHQGVRGRPGVGDPRGRPPRALPALRRHPRGRHHLRQAHRPLQGLRLRDVQGGGRSQEGVRGCHPRHQRPSRQLQPRLPRRQAEAPAAAARPPSLAPARARASLSSPAHASHRGGIQERVAGAMVLPPLHDAPSAAAGRAPAVPRRAPVLPRRRHLRVLPELRHGPELQYEGRPSGSCRHGGRVLPTATGALGVPGGASSGRHGAGVPVLPLPVPRLALAGPGRPRRALPPPGLRRRRRLLQAHRRGHSQR

SEQ ID NO: 196213 - protein, 153 aa, Zea Mays
MPPPSSTAVAPTATSPPSAPSRGPSRCSTSSVPRPRTRTRFPLLTSPRQVLPELRHGPELQYEGRPSGSCRHGGRVLPTATGALGVPGGASSGRHGAGVPVLPLPVPRLALAGPGRPRRALPPPGLRRRRRLLQAHRRGHSQSSGVERVTGCS

SEQ ID NO: 196214 - protein, 72 aa, Zea Mays
MLLSTNRLRTFIFNSDMCLIHQVSNIFSITNIKPQKAFPHLCMFKVTVVLCTSKFRPYTRCKTPQKRQNTED

SEQ ID NO: 196215 - protein, 78 aa, Zea Mays
MTDPPVLVSSIPLLQSEAAKPGFHSDPIPTPTDLLRKQKTETEQAATYAAGDDDSSNDGHEGEVGDPRLALDGHDVRE

SEQ ID NO: 196216 - protein, 82 aa, Zea Mays
MSVDVLWPLVCNDISLLGECHIVKQLGSPLLSLIHLYVPFLAILSSCTCPFGNLQFLQIRQDQSRQHLHQVHINALVKGVSR

SEQ ID NO: 196217 - protein, 270 aa, Zea Mays
MVQSCASKCASFLAARSLGLTATMHPTRSFPFSHQSSGPPSYKPPGSLSLLAAMAKNYPTVSAEYSEAVEKARRKLRALIAEKSCAPLMLRLAWHSAGTFDVSSRTGGPFGTMKCPAELAHGANAGLDIAVRLLEPIKEEFPTLSYADFYQLAGVVAVEVTGGPEIPFHPGREDKPQPPPEGRLPDATKGSDHLRQVFGKQMGLSDQDIVALSGGHTLGRCHKERSGFEGAWTTKRPTSSSPNWGMLMLKWSISWSGTQTAACMDSCDSG

SEQ ID NO: 196218 - protein, 75 aa, Zea Mays
MFIFYAHSPVIVISAKAIWRTGGGYKAEDGSKQQHPKYCNVNVEGSNIKALIWMQMEKAPADHSVHNFDELDAQY

SEQ ID NO: 196219 - protein, 316 aa, Zea Mays
MALAMTSSSTQPPSPHHRRRRRSQPTTATPNANSKPKPKPRAKALPLLSDVGVGRDPAAIKYYARVASNLAGAGRLRDFLLAAEGLRAAACNDPSFAARISARLLSRGVAAAVRERGLPFMLEFFRDAERVRVPVVEMLDADASNAVAGACRMLLEERRMVEFVEVVEALARYGFYVQDIVNPMDVLKIFVKQRDPDIAIRYARIFPSSQLLLCNTMEAFGKRKELKNALLIFGALKNQLGGINMFACRSIIDICGHCGSSVQARIIFEGLLADKITPNTYVFNSLMNVNAHSLSYNFSVYKHMQVMHFLLYCCCS

SEQ ID NO: 196220 - protein, 241 aa, Zea Mays
MKTHQLKPNLVTYKTLLAARINYGSLQEVQQCLAIYQEMRKAGFQANDYYLKELIVEWCEGVLSSRSDNQDFYNLDLQPETERKESFNLFLEKVVTVLQKDTDQNQIVDVRGLSKVEARIVVLSVLRKIKEQYLLGRVVQDDVVIITGHEKTSTTEAETTTSAVDVVQAIVTVLTDDLGLEVLIGPGSCPPVSSKPKAPTKSRSNLEQISKEFTRRPQGMIKIPINSLNHWLRKKAVRIAE

SEQ ID NO: 196221 - protein, 642 aa, Zea Mays
MDVLKIFVKQRDPDIAIRYARIFPSSQLLLCNTMEAFGKRKELKNALLIFGALKNQLGGINMFACRSIIDICGHCGSSVQARIIFEGLLADKITPNTYVFNSLMNVNAHSLSYNFSVYKHMQNLGVPPDLTSYNILLKTCCSVREFNLAQEIYEEMKKKERDGLLKLDVFTYSTMMKVFADAKMWKMASNIKEDMQANGVRLNLVTWSSLINAYANSGLVDRAIEILKEMIRDGCQPTAPCFNIILTACVKSCQYDRAFRLFYSWKESGIKISLSSEQKRVIDGGFTFCKEYPNNDSTILVVPFRPTVTTYNILMKACGTNAERAKSTMNEMRRNGLCPDLISWSILIDIYGSSQNRDGAVQALRRMQRVGMRLNVSAYTVAIKACVENKDLKLALHLFEEMKTHQLKPNLVTYKTLLAARINYGSLQEVQQCLAIYQEMRKAGFQANDYYLKELIVEWCEGVLSSRSDNQDFYNLDLQPETERKESFNLFLEKVVTVLQKDTDQNQIVDVRGLSKVEARIVVLSVLRKIKEQYLLGRVVQDDVVIITGHEKTSTTEAETTTSAVDVVQAIVTVLTDDLGLEVLIGPGSCPPVSSKPKAPTKSRSNLEQISKEFTRRPQGMIKIPINSLNHWLRKKAVRIAE

SEQ ID NO: 196222 - protein, 757 aa, Zea Mays
MALAMTSSSTQPPSPHHRRRRRSQPTTATPNANSKPKPKPRAKALPLLSDVGVGRDPAAIKYYARVASNLAGAGRLRDFLLAAEGLRAAACNDPSFAARISARLLSRGVAAAVRERGLPFMLEFFRDAERVRVPVVEMLDADASNAVAGACRMLLEERRMVEFVEVVEALARYGFYVQDIVNPMDVLKIFVKQRDPDIAIRYARIFPSSQLLLCNTMEAFGKRKELKNALLIFGALKNQLGGINMFACRSIIDICGHCGSSVQARIIFEGLLADKITPNTYVFNSLMNVNAHSLSYNFSVYKHMQNLGVPPDLTSYNILLKTCCSVREFNLAQEIYEEMKKKERDGLLKLDVFTYSTMMKMQKCGRWLPTSKRICKQTGWKESGIKISLSSEQKRVIDGGFTFCKEYPNNDSTILVVPFRPTVTTYNILMKACGTNAERAKSTMNEMRRNGLCPDLISWSILIDIYGSSQNRDGAVQALRRMQRVGMRLNVSAYTVAIKACVENKDLKLALHLFEEMKTHQLKPNLVTYKTLLAARINYGSLQEVQQCLAIYQEMRKAGFQANDYYLKELIVEWCEGVLSSRSDNQDFYNLDLQPETERKESFNLFLEKVVTVLQKDTDQNQIVDVRGLSKVEARIVVLSVLRKIKEQYLLGRVVQDDVVIITGHEKTSTTEAETTTSAVDVVQAIVTVLTDDLGLEVLIGPGSCPPVSSKPKAPTKSRSNLEQISKEFTRRPQGMIKIPINSLNHWLRKKAVRIAE

SEQ ID NO: 196223 - protein, 539 aa, Zea Mays
MNVNAHSLSYNFSVYKHMQNLGVPPDLTSYNILLKTCCSVREFNLAQEIYEEMKKKERDGLLKLDVFTYSTMMKVFADAKMWKMASNIKEDMQANGVRLNLVTWSSLINAYANSGLVDRAIEILKEMIRDGCQPTAPCFNIILTACVKSCQYDRAFRLFYSWKESGIKISLSSEQKRVIDGGFTFCKEYPNNDSTILVVPFRPTVTTYNILMKACGTNAERAKSTMNEMRRNGLCPDLISWSILIDIYGSSQNRDGAVQALRRMQRVGMRLNVSAYTVAIKACVENKDLKLALHLFEEMKTHQLKPNLVTYKTLLAARINYGSLQEVQQCLAIYQEMRKAGFQANDYYLKELIVEWCEGVLSSRSDNQDFYNLDLQPETERKESFNLFLEKVVTVLQKDTDQNQIVDVRGLSKVEARIVVLSVLRKIKEQYLLGRVVQDDVVIITGHEKTSTTEAETTTSAVDVVQAIVTVLTDDLGLEVLIGPGSCPPVSSKPKAPTKSRSNLEQISKEFTRRPQGMIKIPINSLNHWLRKKAVRIAE

SEQ ID NO: 196224 - protein, 324 aa, Zea Mays
MKKKERDGLLKLDVFTYSTMMKVFADAKMWKMASNIKEDMQANGALRRMQRVGMRLNVSAYTVAIKACVENKDLKLALHLFEEMKTHQLKPNLVTYKTLLAARINYGSLQEVQQCLAIYQEMRKAGFQANDYYLKELIVEWCEGVLSSRSDNQDFYNLDLQPETERKESFNLFLEKVVTVLQKDTDQNQIVDVRGLSKVEARIVVLSVLRKIKEQYLLGRVVQDDVVIITGHEKTSTTEAETTTSAVDVVQAIVTVLTDDLGLEVLIGPGSCPPVSSKPKAPTKSRSNLEQISKEFTRRPQGMIKIPINSLNHWLRKKAVRIAE

SEQ ID NO: 196225 - protein, 232 aa, Zea Mays
MWKMASNIKEDMQANGVRLNLVTWSSLINAYANSGLVDRAIEILKEMIRDGCQPTAPCFNIILTACVKSCQYDRAFRLFYSWKESGIKISLSSEQKRVIDGGFTFCKEYPNNDSTILVVPFRPTVTTYNILMKACGTNAERAKSTMNEMRRNGLCPDLISWSILIDIYGSSQNRDGAVQALRRMQRVGMRLNVSAYTVAIKACVENKDLKLALHLFEEMKTHQLKPNLVSGK

SEQ ID NO: 196226 - protein, 239 aa, Zea Mays
MRGFRFALVRAARSRSRAEHQTVQRRRPSDVAQRFSHTAPAPARPSFGIAFDIDGVILRGRSPIGGAPRAIRRLYSEEGTLKIPFLFLTNGGGVPEHRRALELSQLLGVNISPTQVVHGHSPYRELVKRFEDDLIVAVGKGEPAVVMSAYGFRKVLSIDEYASYYKDIDPLAPFKTWKVGQTDSHMSAKVHPSYDVYSERVKGVFVVSDPVDWGRDLQLMILNTRQHFLLSGLGWAPSG

SEQ ID NO: 196227 - protein, 252 aa, Zea Mays
MRGFRFALVRAARSRSRAEHQTVQRRRPSDVAQRFSHTAPAPARPSFGIAFDIDGVILRGRSPIGGAPRAIRRLYSEEGTLKIPFLFLTNGGGVPEHRRALELSQLLGVNISPTQVVHGHSPYRELVKRFEDDLIVAVGKGEPAVVMSAYGFRKVLSIDEYASYYKDIDPLAPFKTWKVGQTDSHMSAKVHPSYDVYSERVKGVFVVSDPVDWGRDLQVLCDILSTHGLPGTEKGDQPPLYFAADDLEYQVQ

SEQ ID NO: 196228 - protein, 134 aa, Zea Mays
MRGFRFALVRAARSRSRAEHQTVQRRRPSDVAQRFSHTAPAPARPSFGIAFDIDGVILRGRSPIGGAPRAIRRLYSEEGTLKIPFLFLTNGGGVPEHRRALELSQLLGVNISPTQVVHGHSPYRELVKRCAFQF

SEQ ID NO: 196229 - protein, 241 aa, Zea Mays
MSAYGFRKVLSIDEYASYYKDIDPLAPFKTWKVGQTDSHMSAKVHPSYDVYSERVKGVFVVSDPVDWGRDLQVLCDILSTHGLPGTEKGDQPPLYFAADDLEYQAAFPSERLGMGAFRIALESIFNEINDHPLKYTSYGKPNPFVFKNAANILEKLVMSMYPNSQTPMEGKDYQFSTIYMVGDNPKVDINGAMKAGHPWSSVLTRTGVFRGKDNDPQFPADVVVDTVEDAINYILEKERIQ

SEQ ID NO: 196230 - protein, 276 aa, Zea Mays
MRGFRFALVRAARSRSRAEHQTVQRRRPSDVAQRFSHTAPAPARPSFGIAFDIDGVILRGRSPIGGAPRAIRRLYSEEGTLKIPFLFLTNGGGVPEHRRALELSQLLGVNISPTQVVHGHSPYRELVKRFEDDLIVAVGKGEPAVVMSAYGFRKVLSIDEYASYYKDIDPLAPFKTWKVGQTDSHMSAKVHPSYDVYSERVKGVFVVSDPVDWGRDLQVLCDILSTHGLPGTEKGDQPPLYFAADDLEYQAAFPSERLGMGAFRIALESIFNDKHT

SEQ ID NO: 196231 - protein, 385 aa, Zea Mays
MRGFRFALVRAARSRSRAEHQTVQRRRPSDVAQRFSHTAPAPARPSFGIAFDIDGVILRGRSPIGGAPRAIRRLYSEEGTLKIPFLFLTNGVPEHRRALELSQLLGVNISPTQVVHGHSPYRELVKRFEDDLIVAVGKGEPAVVMSAYGFRKVLSIDEYASYYKDIDPLAPFKTWKVGQTDSHMSAKVHPSYDVYSERVKGVFVVSDPVDWGRDLQVLCDILSTHGLPGTEKGDQPPLYFAADDLEYQAAFPSERLGMGAFRIALESIFNEINDHPLKYTSYGKPNPFVFKNAANILEKLVMSMYPNSQTPMEGKDYQFSTIYMVGDNPKVDINGAMKAGHPWSSVLTRTGVFRGKDNDPQFPADVVVDTVEDAINYILEKERIQ

SEQ ID NO: 196232 - protein, 251 aa, Zea Mays
MRGFRFALVRAARSRSRAEHQTVQRRRPSDVAQRFSHTAPAPARPSFGIAFDIDGVILRGRSPIGGAPRAIRRLYSEEGTLKIPFLFLTNGGGVPEHRRALELSQLLGVNISPTQVVHGHSPYRELVKRFEDDLIVAVGKGEPAVVMSAYGFRKVLSIDEYASYYKDIDPLAPFKTWKVGQTDSHMSAKVHPSYDVYSERVKGVFVVSDPVDWGRDLQVLCDILSTHGLPGTEKGDQPPLYFAADDLEYQV

SEQ ID NO: 196233 - protein, 481 aa, Zea Mays
MGSACQAGTDGPSRKDVLGIGNAALENGHHQAEADADEWREKEEDLANNGHSAPPPGMQQVDEHKEEQRQSIHWERFLPVKTLRVLLVENDDSTRQVVSALLRKCCYEVIPAENGLHAWRYLEDLQNNIDLVLTEVFMPCLSGIGLLSKITSHKICKDIPVIMMSTNDSMSMVFKCLSKGAVDFLVKPLRKNELKNLWQHVWRRCHSVSCLFLSSGSESGIQTQKCAKLNTGDEYENGSDSNHDDEENDDGDDDDFSVGLNARDGSDNGSGTQSSWTKRAVEIDSPQPISPDQLVDPPDSTCAQVIHPRSEICSNKWLPTANKRNVKKQKENKDESMGRYLGIGAPRNSSAEYQSSLNDVSVNPIEKGHENHMSKCKSKKETMAEDDCTNMPSATNAETADLISSIARNTEGQQAVQAVDAPDGPSKMANGNDKNHDSHIEVTPHELGLKRSRTNGATAEIHDERNILKRSDQSAFTRCKT

SEQ ID NO: 196234 - protein, 266 aa, Zea Mays
MAAQAAQCRVSGGDGGGGGMRTVECLRGRLLAERVASKAAKEEADQLAKRLDELERKLADEVKERNGPGSLTTDGSAPSAPSGDADRVVSSEGSCTQLNSSSQDGSWCSVASEQSQPGPCMDPAGHTTNCRSAGSGGCDRDSERQHLDASSRGCGPAKPEEAVNESDDTLALVLVDPQLVAAAAGGGPRTQAGEVRRGRSHEEEEEEESDRLAIVLAEPQRQAAAGRGDVESVLLALRRVKEQLRYTIERRSRARLVVAHQELYGH

SEQ ID NO: 196235 - protein, 64 aa, Zea Mays
MRTHRLNWTRSFCLSKQRSGLGLLKACDQGRDFRQKHQRSRSELVLVGCVLGYYIWSSIRHGLL

SEQ ID NO: 196236 - protein, 249 aa, Zea Mays
MAAAAPASPPSFLCSSVKEVLPSPLTSASEPPPLFDGTTRLYVAYLCPFAQRAWIARNYKGLQDKIKIVAIDLADRPAWYKEKVYPENKVPSLEHDNQVKGESLDLVKYIDSNFEGPSLLPEDHAKQQFAEELLGYTDAFNKAFYSCLVDREDVSEEAVAALDKIEDALGKFNDGPFFLGQFSLVDVAYVPFIERFQILYSNIKNYDVTKGRPNLQKFIEEVNKIDAYTQTKLDPQFLLEQTKKRLGIA

SEQ ID NO: 196237 - protein, 107 aa, Zea Mays
MCSSDFKGGKYTRFKEGQFNATFLCPNCTASTGHGNPRPSEDLETKKTSIAVIIIASVLASVLVVTALFGGFKYWQKKKRERDQVRFLKLFEEGDDLEDELGLSNEF

SEQ ID NO: 196238 - protein, 165 aa, Zea Mays
MRWPLAISTRRRPLLFVLLIALYTIPRTFSSRLVTLDTVEIFTTHEWFAKPTVAFRCNGANKTYLPDVTEAHTPYTFKGEESWQSFQKRNASDVVCMRRAHLSLMLSLMNGRCVRVISRAENTPALRKASSMQHSYAQTALPLLDMETLDQAKIWKLRRHLLLSS

SEQ ID NO: 196239 - protein, 137 aa, Zea Mays
MAELPEKKCKRCGLYEEGTFKPDAVFDEWEMCSSDFKGGKYTRFKEGQFNATFLCPNCTASTGHGNPRPSEDLETKKTSIAVIIIASVLASVLVVTALFGGFKYWQKKKRERDQVRFLKLFEEGDDLEDELGLSNEF

SEQ ID NO: 196240 - protein, 60 aa, Zea Mays
MMYRMCVFGDLLVAFAEGVNLATVCTSPVTYIYKSAKMNGFTYSLQFFIECFTFPFFCEF

SEQ ID NO: 196241 - protein, 372 aa, Zea Mays
MSWLRSAVHRAVEASGGHSSLLTRTVRTSLDTVVHHAGQAVAGGARLITGSRSYKSAKVAAKRLEEEALSCKGDERVQLLRRWLVALKETQRATTAVREPQFGDNPDQTAPLLDLYIDYDSGAEPMNFFHVFLYSQALECVVLSLIREAPTEEEVPLVSEVFGMCLSGGKDVHNALLSSVKDLARLFSSYSDEVLAKRDELLQFAQGAISGLKINADIARLDNEITQLQQQINSMDALHATSIVNQNKKAQTATEGFRKAVSEVRLCSRMEELLLKKKSIHPGDSLETHFEKVDKLKVLSESLANSSAKAEKRIMENRLQKEESLIFRVTKTNEVSGIEKELVAEISGLEEQRNQLEAELKKAILFSLFPPS

SEQ ID NO: 196242 - protein, 404 aa, Zea Mays
MSWLRSAVHRAVEASGGHSSLLTRTVRTSLDTVVHHAGQAVAGGARLITGSRSYKSAKVAAKRLEEEALSCKGDERVQLLRRWLVALKETQRATTAVREPQFGDNPDQTAPLLDLYIDYDSGAEPMNFFHVFLYSQALECVVLSLIREAPTEEEVPLVSEVFGMCLSGGKDVHNALLSSVKDLARLFSSYSDEVLAKRDELLQFAQGAISGLKINADIARLDNEITQLQQQINSMDALHATSIVNQNKKAQTATEGFRKAVSEVRLCSRMEELLLKKKSIHPGDSLETHFEKVDKLKVLSESLANSSAKAEKRIMENRLQKEESLIFRVTKTNEVSGIEKELVAEISGLEEQRNQLEAELKKVNTKLKVATVKLKKTREERDQFDEASNQIVLHLKTKTNFQDP

SEQ ID NO: 196243 - protein, 230 aa, Zea Mays
MSWLRSAVHRAVEASGGHSSLLTRTVRTSLDTVVHHAGQAVAGGARLITGSRSYKSAKVAAKRLEEEALSCKGDERVQLLRRWLVALKETQRATTAVREPQFGDNPDQTAPLLDLYIDYDSGAEPMNFFHVFLYSQALECVVLSLIREAPTEEEVPLVSEVFGMCLSGGKDVHNALLSSVKDLARLFSSYSDEVLAKRDELLQFAQGAISGLKINADIARFCLFCWAVED

SEQ ID NO: 196244 - protein, 526 aa, Zea Mays
MSWLRSAVHRAVEASGGHSSLLTRTVRTSLDTVVHHAGQAVAGGARLITGSRSYKSAKVAAKRLEEEALSCKGDERVQLLRRWLVALKETQRATTAVREPQFGDNPDQTAPLLDLYIDYDSGAEPMNFFHVFLYSQALECVVLSLIREAPTEEEVPLVSEVFGMCLSGGKDVHNALLSSVKDLARLFSSYSDEVLAKRDELLQFAQGAISGLKINADIARLDNEITQLQQQINSMDALHATSIVNQNKKAQTATEGFRKAVSEVRLCSRMEELLLKKKSIHPGDSLETHFEKVDKLKVLSESLANSSAKAEKRIMENRLQKEESLIFRVTKTNEVSGIEKELVAEISGLEEQRNQLEAELKKVNTKLKVATVKLKKTREERDQFDEASNQIVLHLKTKEDELSRSIASCKVEASTVSAWINFLKDTWKLQSLFEELREKQANEELDRCGLCFAKLMKYHVSASMEELSTSIDRIKTFVDNLKIFGNRSVSAEDGANGPSKQSNPRRYLEEEYLQTEKKCHIIIQYV

SEQ ID NO: 196245 - protein, 218 aa, Zea Mays
MSSSTVKPSSVLFSPWEAPTEEEVPLVSEVFGMCLSGGKDVHNALLSSVKDLARLFSSYSDEVLAKRDELLQFAQGAISGLKINADIARLDNEITQLQQQINSMDALHATSIVNQNKKAQTATEGFRKAVSEVRLCSRMEELLLKKKSIHPGDSLETHFEKVDKLKVLSESLANSSAKAEKRIMENRLQKEESLIFRVTKTNEVSGIEKKIQHPMISH

SEQ ID NO: 196246 - protein, 307 aa, Zea Mays
MSWLRSAVHRAVEASGGHSSLLTRTVRTSLDTVVHHAGQAVAGGARLITGSRSYKSAKVAAKRLEEEALSCKGDERVQLLRRWLVALKETQRATTAVREPQFGDNPDQTAPLLDLYIDYDSGAEPMNFFHVFLYSQALECVVLSLIREAPTEEEVPLVSEVFGMCLSGGKDVHNALLSSVKDLARLFSSYSDEVLAKRDELLQFAQGAISGLKINADIARLDNEITQLQQQINSMDALHATSIVNQNKKAQTATEGFRKAVSEVRLCSRMEELLLKKKSIHPGDSLETHFEKATKGRISYLPGHQNK

SEQ ID NO: 196247 - protein, 575 aa, Zea Mays
MSWLRSAVHRAVEASGGHSSLLTRTVRTSLDTVVHHAGQAVAGGARLITGSRSYKSAKVAAKRLEEEALSCKGDERVQLLRRWLVALKETQRATTAVREPQFGDNPDQTAPLLDLYIDYDSGAEPMNFFHVFLYSQALECVVLSLIREAPTEEEVPLVSEVFGMCLSGGKDVHNALLSSVKDLARLFSSYSDEVLAKRDELLQFAQGAISGLKINADIARLDNEITQLQQQINSMDALHATSIVNQNKKAQTATEGFRKAVSEVRLCSRMEELLLKKKSIHPGDSLETHFEKVDKLKVLSESLANSSAKAEKRIMENRLQKEESLIFRVTKTNEVSGIEKELVAEISGLEEQRNQLEAELKKVNTKLKVATVKLKKTREERDQFDEASNQIVLHLKTKEDELSRSIASCKVEASTVSAWINFLKDTWKLQSLFEELREKQANEELDRCGLCFAKLMKYHVSASMEELSTSIDRIKTFVDNLKIFGNSRSVSAEDGANGPSKQSNPRRYLEEEYLQTEKKVVAAFSLVDSIRAIYSSNQDYYKTSLCRRDDTEVKNLFTSIDNLRIEFESVPRPVL

SEQ ID NO: 196248 - protein, 269 aa, Zea Mays
MSWLRSAVHRAVEASGGHSSLLTRTVRTSLDTVVHHAGQAVAGGARLITGSRSYKSAKVAAKRLEEEALSCKGDERVQLLRRWLVALKETQRATTAVREPQFGDNPDQTAPLLDLYIDYDSGAEPMNFFHVFLYSQALECVVLSLIREAPTEEEVPLVSEVFGMCLSGGKDVHNALLSSVKDLARLFSSYSDEVLAKRDELLQFAQGAISGLKINADIARLDNEITQLQQQINSMDALHATSIVNQNKKAQTATENGRTSIEEEINTPR

SEQ ID NO: 196249 - protein, 490 aa, Zea Mays
MSWLRSAVHRAVEASGGHSSLLTRTVRTSLDTVVHHAGQAVAGGARLITGSRSYKSAKVAAKRLEEEALSCKGDERVQLLRRWLVALKETQRATTAVREPQFGDNPDQTAPLLDLYIDYDSGAEPMNFFHVFLYSQALECVVLSLIREAPTEEEVPLVSEVFGMCLSGGKDVHNALLSSVKDLARLFSSYSDEVLAKRDELLQFAQGAISGLKINADIARLDNEITQLQQQINSMDALHATSIVNQNKKAQTATEGFRKAVSEVRLCSRMEELLLKKKSIHPGDSLETHFEKVDKLKVLSESLANSSAKAEKRIMENRLQKEESLIFRVTKTNEVSGIEKELVAEISGLEEQRNQLEAELKKVNTKLKVATVKLKKTREERDQFDEASNQIVLHLKTKEDELSRSIASCKVEASTVSAWINFLKDTWKLQSLFEELREKQANEELDRCGLCFAKLMKYHVSASMEELSTSIDRIKTFVDNLKIFGNRGWS

SEQ ID NO: 196250 - protein, 119 aa, Zea Mays
MKYHVSASMEELSTSIDRIKTFVDNLKIFGNRSVSAEDGANGPSKQSNPRRYLEEEYLQTEKKVVAAFSLVDSIRAIYSSNQDYYKTSLCRRDDTEVKNLFTSIDNLRIEFESVPRPVL

SEQ ID NO: 196251 - protein, 195 aa, Zea Mays
MRCVSTVHLLTFNFLTYPQEDELSRSIASCKVEASTVSAWINFLKDTWKLQSLFEELREKQANEELDRCGLCFAKLMKYHVSASMEELSTSIDRIKTFVDNLKIFGNRSVSAEDGANGPSKQSNPRRYLEEEYLQTEKKVVAAFSLVDSIRAIYSSNQDYYKTSLCRRDDTEVKNLFTSIDNLRIEFESVPRPVL

SEQ ID NO: 196252 - protein, 187 aa, Zea Mays
MKQLHRQSSISKQHRPHHHRTSLSRTLASYLLREQRLLFVLLGFLLASSFFFLYPHSAAGSSSATNITAAFARKNPRSSGASSSARRLPVGVRKPSLRIVVTGGAGFVGSHLVDKLLARGDSVIVVDNFFTGRKDNVAHHLGNPRFELIRHDVVEPILLEVLGAVMMRGREQLKLLPWITTAVLVLR

SEQ ID NO: 196253 - protein, 55 aa, Zea Mays
MHSSMLIPNVMHLSIRCCTCIMPCGYKRRDQSRLRLREPWILLGFFLAPDPAVPC

SEQ ID NO: 196254 - protein, 968 aa, Zea Mays
MISRSTSSTNQEGTTLPQVQGNIEFRNVYFSYLSRPEIPILSGFFLTVPARKTVALVGRNGSGKSSIIPLMERFYDPTLGEVLLDGENIKNLKVEWLRSQIGLVTQEPALLSLSIRENIAYGRSATFDQIEEAAKTAHAHGFISSLEKGYETQVGRAGLALTDEQKIKISIARAVLSNPSILLLDEVTGGLDFEAEKAVQEALDVLMLGRSTIIIARRLCLIKNADYIAVMEEGHLVEMGTHDELLNLDGLYAELLRCEEATKLPKRMPTKNSREHKSLQSEDALVSQYFQESSSPKMAKSPSLQRTHGMLQFWRSDANRNSHDSPKDLSPPSEQTMDNGIPMVAIETERTPSIKRQNSFEMKLPDLPKVDVHPIQRQSSKNSEPDSPISPLLTSDPKNERSHSQTFSRPQSEQDDTSSERSELDEIEIRDMRHEVNRWCLFIVGMGVITVLVNWLQHFYFGIMGEKMTERIRRMMFSAMLRNEVGWFDKDENNADTLSMRLANDATFVRAAFSNRLSIFIQDTAAVSVALLIGMLLGWRVALVALATLPVLVISAIAQKLWLAGFSKGIQEMHRKASLVLEDAVRNIYTVVAFCAGDKIMELYRLHLGKILKQSLVQGLAIGFGFGLSQFLLFACNALLLWYTAISVDRQRLTIATGLKEYILFSFASFALVEPFGLAPYILKRRKSLTSVFEIIDREPKIDPDDTTGLKPPNVYGSIEFKSVDFSYPVRPDILVLSNFNLKVSGGQTLAVVGVSGSGKSTIISLIERFYDPVSGQVLLDGRDLKSFNLRWLRSHMGLIQQDPVIFSTTIRENIIYARHIATEAEIKEAARIANAHHFISSLPHGYDTHVGMRGVDLTPGQKQRIAIARVVLKNAPILLLDEASSAIESESSRVVQEALDTLVMGNKTTILIAHRAAMMKHVDNIVVLNGGRIVEQGTHDSLMDQNGLYVRLMQPHFGKGLRQHRLV

SEQ ID NO: 196255 - protein, 1360 aa, Zea Mays
MVPGGLFGWASPHVQPLTPVSEVSEPPESPSPYGDGPAGDAGVGAREGEGAGAGEEEVEDDEVEPPPAAVSFWRLFEFADGVDWALMAAGALAAAAHGAALVVYLHYFGRALNLLDSERVGSSLYGRSDELLSRFKEHALYIVFIAAGVFVAGWIEVSCWILTGERQTAVIRSKYVHVLLNQDMSFFDTYGNNGDIVSQVLSDVLLIQSAISEKVGNYIHNMATFVGGLIVGLLNCWQIALLTLATGPLIVAAGGISNIFLHRLAENIQDAYSEAASIGEQAISYIRTLYAFTNETLAKYSYATSLQATLRYGILISLVQGIGLGFTYGLAICSCALQLWVGRHLIHRGKADGGEVVVALFSVILSGLGLNQAATNFYSFDQGRIAAYRLYEMISRSTSSTNQEGTTLPQVQGNIEFRNVYFSYLSRPEIPILSGFFLTVPARKTVALVGRNGSGKSSIIPLMERFYDPTLGEVLLDGENIKNLKVEWLRSQIGLVTQEPALLSLSIRENIAYGRSATFDQIEEAAKTAHAHGFISSLEKGYETQVGRAGLALTDEQKIKISIARAVLSNPSILLLDEVTGGLDFEAEKAVQEALDVLMLGRSTIIIARRLCLIKNADYIAVMEEGHLVEMGTHDELLNLDGLYAELLRCEEATKLPKRMPTKNSREHKSLQSEDALVSQYFQESSSPKMAKSPSLQRTHGMLQFWRSDANRNSHDSPKDLSPPSEQTMDNGIPMVAIETERTPSIKRQNSFEMKLPDLPKVDVHPIQRQSSKNSEPDSPISPLLTSDPKNERSHSQTFSRPQSEQDDTSSERSELDEIEIRDMRHEVNRWCLFIVGMGVITVLVNWLQHFYFGIMGEKMTERIRRMMFSAMLRNEVGWFDKDENNADTLSMRLANDATFVRAAFSNRLSIFIQDTAAVSVALLIGMLLGWRVALVALATLPVLVISAIAQKLWLAGFSKGIQEMHRKASLVLEDAVRNIYTVVAFCAGDKIMELYRLHLGKILKQSLVQGLAIGFGFGLSQFLLFACNALLLWYTAISVDRQRLTIATGLKEYILFSFASFALVEPFGLAPYILKRRKSLTSVFEIIDREPKIDPDDTTGLKPPNVYGSIEFKSVDFSYPVRPDILVLSNFNLKVSGGQTLAVVGVSGSGKSTIISLIERFYDPVSGQVLLDGRDLKSFNLRWLRSHMGLIQQDPVIFSTTIRENIIYARHIATEAEIKEAARIANAHHFISSLPHGYDTHVGMRGVDLTPGQKQRIAIARVVLKNAPILLLDEASSAIESESSRVVQEALDTLVMGNKTTILIAHRAAMMKHVDNIVVLNGGRIVEQGTHDSLMDQNGLYVRLMQPHFGKGLRQHRLV

SEQ ID NO: 196256 - protein, 1230 aa, Zea Mays
MSFFDTYGNNGDIVSQVLSDVLLIQSAISEKVGNYIHNMATFVGGLIVGLLNCWQIALLTLATGPLIVAAGGISNIFLHRLAENIQDAYSEAASIGEQAISYIRTLYAFTNETLAKYSYATSLQATLRYGILISLVQGIGLGFTYGLAICSCALQLWVGRHLIHRGKADGGEVVVALFSVILSGLGLNQAATNFYSFDQGRIAAYRLYEMISRSTSSTNQEGTTLPQVQGNIEFRNVYFSYLSRPEIPILSGFFLTVPARKTVALVGRNGSGKSSIIPLMERFYDPTLGEVLLDGENIKNLKVEWLRSQIGLVTQEPALLSLSIRENIAYGRSATFDQIEEAAKTAHAHGFISSLEKGYETQVGRAGLALTDEQKIKISIARAVLSNPSILLLDEVTGGLDFEAEKAVQEALDVLMLGRSTIIIARRLCLIKNADYIAVMEEGHLVEMGTHDELLNLDGLYAELLRCEEATKLPKRMPTKNSREHKSLQSEDALVSQYFQESSSPKMAKSPSLQRTHGMLQFWRSDANRNSHDSPKDLSPPSEQTMDNGIPMVAIETERTPSIKRQNSFEMKLPDLPKVDVHPIQRQSSKNSEPDSPISPLLTSDPKNERSHSQTFSRPQSEQDDTSSERSELDEVQHQKPPSFWRLATLSIAEWPYALLGTIGAAIFGSFNPLLAYTIALIVSAYYQIEIRDMRHEVNRWCLFIVGMGVITVLVNWLQHFYFGIMGEKMTERIRRMMFSAMLRNEVGWFDKDENNADTLSMRLANDATFVRAAFSNRLSIFIQDTAAVSVALLIGMLLGWRVALVALATLPVLVISAIAQKLWLAGFSKGIQEMHRKASLVLEDAVRNIYTVVAFCAGDKIMELYRLHLGKILKQSLVQGLAIGFGFGLSQFLLFACNALLLWYTAISVDRQRLTIATGLKEYILFSFASFALVEPFGLAPYILKRRKSLTSVFEIIDREPKIDPDDTTGLKPPNVYGSIEFKSVDFSYPVRPDILVLSNFNLKVSGGQTLAVVGVSGSGKSTIISLIERFYDPVSGQVLLDGRDLKSFNLRWLRSHMGLIQQDPVIFSTTIRENIIYARHIATEAEIKEAARIANAHHFISSLPHGYDTHVGMRGVDLTPGQKQRIAIARVVLKNAPILLLDEASSAIESESSRVVQEALDTLVMGNKTTILIAHRAAMMKHVDNIVVLNGGRIVEQGTHDSLMDQNGLYVRLMQPHFGKGLRQHRLV

SEQ ID NO: 196257 - protein, 396 aa, Zea Mays
MHRKASLVLEDAVRNIYTVVAFCAGDKIMELYRLHLGKILKQSLVQGLAIGFGFGLSQFLLFACNALLLWYTAISVDRQRLTIATGLKEYILFSFASFALVEPFGLAPYILKRRKSLTSVFEIIDREPKIDPDDTTGLKPPNVYGSIEFKSVDFSYPVRPDILVLSNFNLKVSGGQTLAVVGVSGSGKSTIISLIERFYDPVSGQVLLDGRDLKSFNLRWLRSHMGLIQQDPVIFSTTIRENIIYARHIATEAEIKEAARIANAHHFISSLPHGYDTHVGMRGVDLTPGQKQRIAIARVVLKNAPILLLDEASSAIESESSRVVQEALDTLVMGNKTTILIAHRAAMMKHVDNIVVLNGGRIVEQGTHDSLMDQNGLYVRLMQPHFGKGLRQHRLV

SEQ ID NO: 196258 - protein, 122 aa, Zea Mays
MVALDKLYFTPLGKFMDERDAKIRGELGDVKGASEEVKQLEDQAAAIMKAARAEIAAALNKMKKETTAELEAKLDEGRSRVEAELVEALANLEAQKEEAVKALDAQIASLSDEIVKKVLPSA

SEQ ID NO: 196259 - protein, 187 aa, Zea Mays
MRRNQSVGSFAAAGAQSGRQPPRRMAENESKPEGIPPSQGGKYVGFGSSPAPSANRNGGAAQGDVLQGFGRLSLVAASAAQSAASVVQVGTKEIQSKMRDGGYDQKVNETVSVVANKTAEIGSKTWGIMRGVMAMASQKVEEYAKEGGMSGWGEDWQRSEQNGEPYQRFEHATDSNSLNSSQNSSWK

SEQ ID NO: 196260 - protein, 629 aa, Zea Mays
MASYLACSMEACLMMATQTTAAQVIISGLPIHFLQLCPRWQQKPVQILPPLVGGTVDSNRCYDVGHSEQLEAFRGLCGQSSHPLVGASSDASNAVGELEDILITNGGIPEYLFESLPTWDFRRGIEEAQKSLPVSDKLVIDLETGGIARPQEARKDVPMNAKKDDVLKAKKNRQSEDLDLMEGRNIKQSAFCSDEPGWIEMFDDLLRQTEKKATVLRELMRSEASKNSQVTQMKGPSGPRPRGRKPTKNDVVDLRTILIHCAQAVAADDRRTANELLKQIRHHSKPNGDGTQRLAHCFADGLEARLAGTGSQLYRKLIAKRTTASDMLKAYHLFLAASPFKRLSHFLSNQTILSLTKNASKVHIIDFGIYFGFQWPCLIRRLSKREGGPPVLRITGIDVPQPGFRPTERIEETGQRLAEYAEKFKVPFEYQGIASKWESIRVEDLKVGKDEVVIVNCLYRFRNLIDETVAVDSPRNRVLNTIRQVNPAIFIHGIVNGSYSVPFFITRFREALFHFSALFDMLETTVPRDDAQRALIEREMFGREALNVIACEGSDRVERPETYKQWQVRNLRAGFVQSPLNQEIVMKAMDKVKDIYHKDFVIDEDNGWLLQGWKGRILYAISTWKPKNN

SEQ ID NO: 196261 - protein, 97 aa, Zea Mays
MVRDPGAQRVQGVVEVCRREQVRKPLHSVKRQKKKEEEATTERYKNEPGGGVSAGSGAAAYRRAGSRTWAPGPCGSDPRTPCLGTVGKRELQRENRD

SEQ ID NO: 196262 - protein, 123 aa, Zea Mays
MFHALIQILALKITCCRMKAIEHAEQQTHGTTCEDLYQTMSSCGRDLVLLQGWDKKKRRGESSTSLTITSNGRQIGIEGGRERGTAGEEYSLEKASPFFMVTRWQANHANEYRLGKLSGEGVY

SEQ ID NO: 196263 - protein, 91 aa, Zea Mays
MPSTRCLYQVVFQCLCVFAVIRKVPKFEEDDMYRQRMKAIEHAEQQTHGTTCEDLYQTMSSCGRDLVLLQGWDKVPLNLQENFYEWIPLGG

SEQ ID NO: 196264 - protein, 89 aa, Zea Mays
MQRTRKGWRKKQEELATEQQWAEEEKMRRVDTGRRRRSLSMHAVRRKQRRRTPMLLGRKSDLIALSRLGGSTLFKSQTMLYTNALFIVL

SEQ ID NO: 196265 - protein, 70 aa, Zea Mays
MPSTRCLYQVVFQCLCVFAVIRKVPKFEEDDMYRQRMKAIEHAEQQTHGTTCEDLYQTMVKKSSSKSNMP

SEQ ID NO: 196266 - protein, 355 aa, Zea Mays
MGDGASGRGGGGGAGRRVGEYELLRPIGSGAYSQVWLGRHRARGTEVAVKEIAMERLSNKLRESLLSEVDILRRIRHDNVIALHESIKDHGSIYLILEYCRGGDLHAYLQRHKRVSEKVARHFIRQLASGLQMLRDNNVVHRDLKPQNILLVENNENSLLKIADFGFAKFLQPFALAETLCGSPLYMAPEVMQAQKYDAKADLWSVGVILYQLVTGRPPFNGGNQIQLLKNILRTCEIRFPSDCDLSHGCIDLCRKLLRLNSVERLTVEEFVHHPFLSEHAPEKTLSLTQSDIRDGFPRNNSSPTRHSNHSSQEDCMPFPLDDESSGQDEGPVPDSMSWAIIMHLVANTMAILVK

SEQ ID NO: 196267 - protein, 399 aa, Zea Mays
MPFPLDDESSGQDEGPVPDSKSLMKSYGFPMGKRLDKTSGQKSPPKHNSLFSRYVLGNNHAPSSQHHGHSGKVTKESKIHEVQGQKVVYPEDSPIIDSLEFVDQEYVFVSGPHLEGSSSSTNASQQLNVPAKYDNSSVSPPKLTFMSAPMPINGLPINRQQLAGTGSFDSHCSPASGTSQGSADISDAMDQPPSDYLTRIRLLEQYASAIAGLVRDEIKGGRHLEAFSIQLIVLATWKQAIHIGNTFVASPARESPSQDIPMKGHIAGASHLPANSKLADDACMQIEKQFLSEVEYAEELASIVGQIADGTEMPDAIEMIFQSALLIGRRGGVDEMFGKAADAMTGYMRAVSMLRFLLVEAPSLALNPPLTLTRSDRNRLRTYIDALNTRLCQMQSQRH

SEQ ID NO: 196268 - protein, 471 aa, Zea Mays
MFYYCCYHIQLSANINGAVLICVIDPVERLTVEEFVHHPFLSEHAPEKTLSLTQSDIRDGFPRNNSSPTRHSNHSSQEDCMPFPLDDESSGQDEGPVPDSKSLMKSYGFPMGKRLDKTSGQKSPPKHNSLFSRYVLGNNHAPSSQHHGHSGKVTKESKIHEVQGQKVVYPEEFVDQEYVFVSGPHLEGSSSSTNASQQLNVPAKYDNSSVSPPKLTFMSAPMPINGLPINRQQLAGTGSFDSHCSPASGTSQGSADISDAMDQPPSDYLTRIRLLEQYASAIAGLVRDEIKGGRHLEAFSIQLIVLATWKQAIHIGNTFVASPARESPSQDIPMKGHIAGASHLPANSKLADDACMQIEKQFLSEVEYAEELASIVGQIADGTEMPDAIEMIFQSALLIGRRGGVDEMFGKAADAMTGYMRAVSMLRFLLVEAPSLALNPPLTLTRSDRNRLRTYIDALNTRLCQMQSQRH

SEQ ID NO: 196269 - protein, 263 aa, Zea Mays
MGDGASGRGGGGGAGRRVGEYELLRPIGSGAYSQVWLGRHRARGTEVAVKEIAMERLSNKLRESLLSEVDILRRIRHDNVIALHESIKDHGSIYLILEYCRGGDLHAYLQRHKRVSEKVARHFIRQLASGLQMLRDNNVVHRDLKPQNILLVENNENSLLKIADFGFAKFLQPFALAETLCGSPLYMAPEVMQAQKYDAKADLWSVGVILYQLVTGRPPFNGGNQIQLLKNILRTCEIRFPSDCDLSHGCIDLCRKLLRLNSG

SEQ ID NO: 196270 - protein, 583 aa, Zea Mays
MLRDNNVVHRDLKPQNILLVENNENSLLKIADFGFAKFLQPFALAETLCGSPLYMAPEVMQAQKYDAKADLWSVGVILYQLVTGRPPFNGGNQIQLLKNILRTCEIRFPSDCDLSHGCIDLCRKLLRLNSVERLTVEEFVHHPFLSEHAPEKTLSLTQSDIRDGFPRNNSSPTRHSNHSSQEDCMPFPLDDESSGQDEGPVPDSKSLMKSYGFPMGKRLDKTSGQKSPPKHNSLFSRYVLGNNHAPSSQHHGHSGKVTKESKIHEVQGQKVVYPEDSPIIDSLEFVDQEYVFVSGPHLEGSSSSTNASQQLNVPAKYDNSSVSPPKLTFMSAPMPINGLPINRQQLAGTGSFDSHCSPASGTSQGSADISDAMDQPPSDYLTRIRLLEQYASAIAGLVRDEIKGGRHLEAFSIQLIVLATWKQAIHIGNTFVASPARESPSQDIPMKGHIAGASHLPANSKLADDACMQIEKQFLSEVEYAEELASIVGQIADGTEMPDAIEMIFQSALLIGRRGGVDEMFGKAADAMTGYMRAVSMLRFLLVEAPSLALNPPLTLTRSDRNRLRTYIDALNTRLCQMQSQRH

SEQ ID NO: 196271 - protein, 307 aa, Zea Mays
MKYKVKRLFIQKEYVFVSGPHLEGSSSSTNASQQLNVPAKYDNSSVSPPKLTFMSAPMPINGLPINRQQLAGTGSFDSHCSPASGTSQGSADISDAMDQPPSDYLTRIRLLEQYASAIAGLVRDEIKGGRHLEAFSIQLIVLATWKQAIHIGNTFVASPARESPSQDIPMKGHIAGASHLPANSKLADDACMQIEKQFLSEVEYAEELASIVGQIADGTEMPDAIEMIFQSALLIGRRGGVDEMFGKAADAMTGYMRAVSMLRFLLVEAPSLALNPPLTLTRSDRNRLRTYIDALNTRLCQMQSQRH

SEQ ID NO: 196272 - protein, 432 aa, Zea Mays
MEAHASRGRRTLEEIRQKRAAERMQHALPIAASHVDSHGNQRAGAELLARVQELENGNTELIDEKGVEKDALVNRLNDLERNVVPSLQKNLNDISLEKDAAVVAKEDALAQLRSMKKRLKEAEEEQYKAEEDSASLRAQLNTLQQQVMGHSYSGYTMGISTEESVAMEKEIQDLQAQLKQESLLRQQEQQKLAEESQLRQQEQEKLAKEQIHIASLEAEKQQLEDQITMLTKKATEDASEFAAHKAFSMQDREKLENQLHDMALMIERLEGSRQKLLMEIDSQSSEIEKLFEENSALSTSYQEAIAITVQWENQVRDCLKQNEELRSHLEKLRLEQASLLEVSNITTKSDGQIENSISNLPEMVTENISLKGQLIKEQSRSESLLAEIMKLSAELRKAVQAQNNLVRLYRPVLRDIESNLMKMKQETYATIQ

SEQ ID NO: 196273 - protein, 402 aa, Zea Mays
MEAHASRGRRTLEEIRQKRAAERMQHALPIAASHVDSHGNQRAGAELLARVQELENGNTELIDEKGVEKDALVNRLNDLERNVVPSLQKNLNDISLEKDAAVVAKEDALAQLRSMKKRLKEAEEEQYKAEEDSASLRAQLNTLQQQVMGHSYSGYTMGISTEESVAMEKEIQDLQAQLKQESLLRQQEQQKLAEESQLRQQEQEKLAKEQIHIASLEAEKQQLEDQITMLTKKATEDASEFAAHKAFSMIDSQSSEIEKLFEENSALSTSYQEAIAITVQWENQVRDCLKQNEELRSHLEKLRLEQASLLEVSNITTKSDGQIENSISNLPEMVTENISLKGQLIKEQSRSESLLAEIMKLSAELRKAVQAQNNLVRLYRPVLRDIESNLMKMKQETYATIQ

SEQ ID NO: 196274 - protein, 171 aa, Zea Mays
MGHSYSGYTMGISTEESVAMEKEIQDLQAQLKQESLLRQQEQQKLAEESQLRQQEQEKLAKEQIHIASLEAEKQQLEDQITMLTKKATEDASEFAAHKAFSMQDREKLENQLHDMALMIERLEGSRQKLLMEIDSQSSEIEKLFEENSALSTSYQEAIAITVQWENQKIPG

SEQ ID NO: 196275 - protein, 430 aa, Zea Mays
MEAHASRGRRTLEEIRQKRAAERMQHALPIAASHVDSHGNQRAGAELLARVQELENGNTELIDEKGVEKDALVNRLNDLERNVVPSLQKNLNDISLEKDAAVVAKEDALAQLRSMKKRLKEAEEEQYKAEEDSASLRAQLNTLQQQVMGHSYSGYTMGISTEESVAMEKEIQDLQAQLKQESLLRQQEQQKLAEESQLRQQEQEKLAKEQIHIASLEAEKQQLEDQITMLTKKATEDASEFAAHKAFSMQDREKLENQLHDMALMIERLEGSRQKLLMEIDSQSSEIEKLFEENSALSTSYQEAIAITVQWENQVRDCLKQNEELRSHLEKLRLEQASLLEVSNITTKSDGQIENSISNLPEMVTENISLKGQLIKEQSRSESLLAEIMKLSAELRKAVQAQNNLVRLPVLRDIESNLMKMKQETYATIQ

SEQ ID NO: 196276 - protein, 410 aa, Zea Mays
MEAHASRGRRTLEEIRQKRAAERMQHALPIAASHVDSHGNQRAGAELLARVQELENGNTELVRENKMLLSKIDEKGVEKDALVNRLNDLERNVVPSLQKNLNDISLEKDAAVVAKEDALAQLRSMKKRLKEAEEEQYKAEEDSASLRAQLNTLQQQVMGHSYSGYTMGISTEESVAMEKEIQDLQAQLKQESLLRQQEQQKLAEESQLRQQEQEKLAKEQIHIASLEAEKQQLEDQITMLTKKATEDASEFAAHKAFSMIDSQSSEIEKLFEENSALSTSYQEAIAITVQWENQVRDCLKQNEELRSHLEKLRLEQASLLEVSNITTKSDGQIENSISNLPEMVTENISLKLIKEQSRSESLLAEIMKLSAELRKAVQAQNNLVRLYRPVLRDIESNLMKMKQETYATIQ

SEQ ID NO: 196277 - protein, 328 aa, Zea Mays
MEAHASRGRRTLEEIRQKRAAERMQHALPIAASHVDSHGNQRAGAELLARVQELENGNTELVRENKMLLSKIDEKGVEKDALVNRLNDLERNVVPSLQKNLNDISLEKDAAVVAKEDALAQLRSMKKRLKEAEEEQYKAEEDSASLRAQLNTLQQQVMGHSYSGYTMGISTEESVAMEKEIQDLQAQLKQESLLRQQEQQKLAEESQLRQQEQEKLAKEQIHIASLEAEKQQLEDQITMLTKKATEDASEFAAHKAFSMQDREKLENQLHDMALMIERLEGSRQKLLMEIDSQSSEIEKLFEENSALSTSYQEAIAITVQWENQKIPG

SEQ ID NO: 196278 - protein, 449 aa, Zea Mays
MNRGSCSSSLKESPHIRQPNIVPPVDKTGDRSSPNSKGRRSPLRRMLDPILKPRHSSPVRPSFVPKCQLPVNTTKQSLDLGKSVPHNVQRSARYIQKGNDSATTRQALLQLAWKNGLPLFILSYGDSDILAATVRRKGIPEKDGLESTYAVFTVEEPKKKSGAWIKTGGKNKKHHLLSSIVGEIKVARRKSRCHHTTDVHVHREFVLVGSKFLPSSEESGDSNVSGELAAFISTLPQQEAETSKQSSSQNTRQRNSMPIGCGCPPLGNFHPSTRSANSASANVVAVLPDGFHGTITSGQPLPLIERWRSGGACDCGGWDEGCMLSVLTDASEENDAIQANQAKDGSQRFELLDQGRSREERHAFSMTSFKEGLYTVEFRSSIALLQAFAMCIVMLHGRYPRRTQVGSQAEQEHDLLAGHELKAMAASQGRRPPTSYVPHRPPLSPVGRA

SEQ ID NO: 196279 - protein, 266 aa, Zea Mays
MSVQEYLEKHLLSRKIEEAVNAAVRAKAPDPVLFIAGHMRRAAPAVITRVRARQILDGHGAPAVEVELHTNKAIHRASAAGSGALEGAAADAAGAAERRKILAKVVADSVRMINDKVSEALVGMDPQEQSQIDQAIMDLNKARHKAELGVGANAMLAVSIAACKAGAAEKEVPLYKHIANLVGKSATTLPVPAITVINGGKHAGNGLPIQEIMILPIGAKNFEEAMQMGSETYHHLKDVILEKYGSDSCNIGDHGGFAPNISRQHI

SEQ ID NO: 196280 - protein, 313 aa, Zea Mays
MSYSRGSRYGSRSPYSRSTRYRSRSRSVDSSDAENPGNNLYVTGLSARVTDRDLEKHFSTEGEVIDASVVYDPWTRESRGFGFVTMAAVKDADRCIKYLDRSVLQGRVITVEKAKRRRGRTPTPGKYLGTKSSRGRRYSTSYSPDRRGRYSSRYSPDRRDCHGRDRSYSPYDRRRSYSPYGRDESYSPYYGRRSYSPYYSRRYRSRSPYCYRRRRSPSVSPYYRRHRYRSVSKSSSSSPRARGRSYSCSLSPQRSYSRSHSPESERSTSYSPKKGSKREPSRSRYSGKSRHSRESHSHSRSSYSRSVSRERSA

SEQ ID NO: 196281 - protein, 161 aa, Zea Mays
MAVHGGEAVSVALLFSLAFFCARLLLDRLVYKVYPRPDTARFVPGSARSLVSPVSLPRPNAPRSRLASGDAGAGRGIRRRSLHLPYRSADSARPAGDHPSACDVMLPPVVNCVTGGWLAATLLRTNGAGAVCSSMCRCARSRAWINNFVLMQRLFVIEPCT

SEQ ID NO: 196282 - protein, 122 aa, Zea Mays
MSSLMLFYMCQCGFYIYSIGALVAWETRRKDFAVMMSHHVITSTLIGVSYLTGFFRIGTIILALHDASDVFLETAKLCKYTEKELGASLFFGLFAISWLLLRLIYFPFWIIKASRFVFYFSL

SEQ ID NO: 196283 - protein, 338 aa, Zea Mays
MEGESPTREDLGSSKSSARCTALPSTSAPWRDVGWYVPASCNPHALDLGTSNLRTFVLVRPPSMCPQYPTSARVSFTYIHPIPSNMETQIPTAISVHRRVPPSSADSVPSTLSTPIKIHDHCEGCRQIPHQTSTFVVCSAPITIVVGFNAFASELLCSSERVRKKEGRGAWLTQIGWQDIVRGSLQRNDGYRSFSGQVGDEVTDSMGMWFTSLLVLDKYQASIDVECAAKTDDCLKLPGNRPSSTGLFNQVSFHIGQCLGLSLPLPDLGIFFMGAHYVIHHTCLVAHRSYYHRSKARKKERRTIMALVGQVAMVAQLVGVDAFSLFILGKVCIWKNGI

SEQ ID NO: 196284 - protein, 1164 aa, Zea Mays
MGGSADPEAPSPSPTKPSPSSADGKPPRRCVQSKLSWGLVKPAGGGREGGGKGGGGEAGRGDAEAVPPVPAAGEAAATEVREGLEKGKKKRKPRKSEDGKKGSSSKQKQWQDQSNKDGVILVDESPQKKQRKGRKQDAILKEPNASRKRCKTSEAPDGPGSCQQLHISQIEASSPAAAPVIIDVDLMSTPSKAGHANSIDQDISPLKVDLRSEAKIAAEEIRRLSSGKKIHPFFHSRKLNKCASQDQDVINIENMHGLCDSERDPPFYPIHVVYQSEINVDTQNLLRPGASCQASLLDLNVEPEDPQNGCQPACYLWTDKYRPETVAQVCGNSEHVKFLAEWLKSWDEKGHKIGVANGDTNDNSYQDISDSDYSESASDCENTLLITGPVGCGKSAAVFACAREQGFNVIEVNTSDMRNGAYVRQKFEEATKSHGLEKWSQEEVINPLRDDSLDPDSGTPDRTEYQCLMSCATRVMIDCDQQKSPVGYYSGLKACDEPPKQVANKTLILFEDVDTVFDEDRGFISTILKMAETTKWPIILTSNKKDPSLPNLLDQLVLDFKYPSTSELLSHVAMICKSEGVNVTVPQLKHVIDVCLGDIRRVVMFLQFWYQGHQFTERPKECLCGPFSLDLDAVHSTVPKMLPWEFPCKLSETLCMEVDKTILLAEEKKKQMEISDLEGLQLHVTAPLIKGRTSKTRRAKKSKLKRAHSTEHNDISPSDVGTEKHNIFTVTEVGFFPQPSEVPPMHGQGISDQFHFPVESRETCEIADSFQNPPESNMYGSISQVCDTFMSQDVSCVPESSLILDGTSASISGDEFLSRAVSNGFSAFCEGTYTTSRMVLEDSDCVKNLMAERQKDVEDVVGETSETYMESFRRNEQASCSAAGFQLMDECSRAESIWLLSGKKSNDSCKVELVQDTWNRLRSCRLEFTSEANHNRATSGALKLVSEVSDLISESDLMLFRCYPLTKDTLDPSLTPCDEPVDSSWYSNQVEMGSVYAQHALRILSRNSQKIDGGSVDLSQELFASTAAVSFGKITCSGFRNDYGSTDLSHMKNPTTCIFKRRERHVHLCETLSPVVPPKLLQSLRGPAFVDYLSSISQISKLENLRLSENKVINKRRRSRQARHYLSSGALQLSHEDVVLLEESGCFSSRRERVEVVEQAPVST

SEQ ID NO: 196285 - protein, 1248 aa, Zea Mays
MGGSADPEAPSPSPTKPSPSSADGKPPRRCVQSKLSWGLVKPAGGGREGGGKGGGGEAGRGDAEAVPPVPAAGEAAATEVREGLEKGKKKRKPRKSEDGKKGSSSKQKQWQDQSNKDGVILVDESPQKKQRKGRKQDAILKEPNASRKRCKTSEAPDGPGSCQQLHISQIEASSPAAAPVIIDVDLMSTPSKAGHANSIDQDISPLKVDLRSEAKIAAEEIRRLSSGKKIHPFFHSRKLNKCASQDQDVINIENMHGLCDSERDPPFYPIHVVYQSEASMPIHWSNWIITDMSSFDTDTAVPLKKSVSYFEGLVKPLTIETNCKRHSNQLSDPILAECTTSGMPFPSFSGKQSEHSCFSDAINVDTQNLLRPGASCQASLLDLNVEPEDPQNGCQPACYLWTDKYRPETVAQVCGNSEHVKFLAEWLKSWDEKGHKIGVANGDTNDNSYQDISDSDYSESASDCENTLLITGPVGCGKSAAVFACAREQGFNVIEVNTSDMRNGAYVRQKFEEATKSHGLEKWSQEEVINPLRDDSLDPDSGTPDRTEYQCLMSCATRVMIDCDQQKSPVGYYSGLKACDEPPKQVANKTLILFEDVDTVFDEDRGFISTILKMAETTKWPIILTSNKKDPSLPNLLDQLVLDFKYPSTSELLSHVAMICKSEGVNVTVPQLKHVIDVCLGDIRRVVMFLQFWYQGHQFTERPKECLCGPFSLDLDAVHSTVPKMLPWEFPCKLSETLCMEVDKTILLAEEKKKQMEISDLEGLQLHVTAPLIKGRTSKTRRAKKSKLKRAHSTEHNDISPSDVGTEKHNIFTVTEVGFFPQPSEVPPMHGQGISDQFHFPVESRETCEIADSFQNPPESNMYGSISQVCDTFMSQDVSCVPESSLILDGTSASISGDEFLSRAVSNGFSAFCEGTYTTSRMVLEDSDCVKNLMAERQKDVEDVVGETSETYMESFRRNEQASCSAAGFQLMDECSRAESIWLLSGKKSNDSCKVELVQDTWNRLRSCRLEFTSEANHNRATSGALKLVSEVSDLISESDLMLFRCYPLTKDTLDPSLTPCDEPVDSSWYSNQVEMGSVYAQHALRILSRNSQKIDGGSVDLSQELFASTAAVSFGKITCSGFRNDYGSTDLSHMKNPTTCIFKRRERHVHLCETLSPVVPPKLLQSLRGPAFVDYLSSISQISKLENLRLSENKVINKRRRSRQARHYLSSGALQLSHEDVVLLEESGCFSSRRERVEVVEQAPVST

SEQ ID NO: 196286 - protein, 1229 aa, Zea Mays
MGGSADPEAPSPSPTKPSPSSADGKPPRRCVQSKLSWGLVKPAGGGREGGGKGGGGEAGRGDAEAVPPVPAAGEAAATEVREGLEKGKKKRKPRKSEDGKKGSSSKQKQWQDQSNKDGVILVDESPQKKQRKGRKQDAILKEPNASRKRCKTSEAPDGPGSCQQLHISQIEASSPAAAPVIIDVDLMSTPSKAGHANSIDQDISPLKVDLRSEAKIAAEASMPIHWSNWIITDMSSFDTDTAVPLKKSVSYFEGLVKPLTIETNCKRHSNQLSDPILAECTTSGMPFPSFSGKQSEHSCFSDAINVDTQNLLRPGASCQASLLDLNVEPEDPQNGCQPACYLWTDKYRPETVAQVCGNSEHVKFLAEWLKSWDEKGHKIGVANGDTNDNSYQDISDSDYSESASDCENTLLITGPVGCGKSAAVFACAREQGFNVIEVNTSDMRNGAYVRQKFEEATKSHGLEKWSQEEVINPLRDDSLDPDSGTPDRTEYQCLMSCATRVMIDCDQQKSPVGYYSGLKACDEPPKQVANKTLILFEDVDTVFDEDRGFISTILKMAETTKWPIILTSNKKDPSLPNLLDQLVLDFKYPSTSELLSHVAMICKSEGVNVTVPQLKHVIDVCLGDIRRVVMFLQFWYQGHQFTERPKECLCGPFSLDLDAVHSTVPKMLPWEFPCKLSETLCMEVDKTILLAEEKKKQMEISDLEGLQLHVTAPLIKGRTSKTRRAKKSKLKRAHSTEHNDISPCKNELDDFHDLPDISLPSDKQIKRNRHRSLLLSESDDDPADVGTEKHNIFTVTEVGFFPQPSEVPPMHGQGISDQFHFPVESRETCEIADSFQNPPESNMYGSISQVCDTFMSQDVSCVPESSLILDGTSASISGDEFLSRAVSNGFSAFCEGTYTTSRMVLEDSDCVKNLMAERQKDVEDVVGETSETYMESFRRNEQASCSAAGFQLMDECSRAESIWLLSGKKSNDSCKVELVQDTWNRLRSCRLEFTSEANHNRATSGALKLVSEVSDLISESDLMLFRCYPLTKDTLDPSLTPCDEPVDSSWYSNQVEMGSVYAQHALRILSRNSQKIDGGSVDLSQELFASTAAVSFGKITCSGFRNDYGSTDLSHMKNPTTCIFKRRERHVHLCETLSPVVPPKLLQSLRGPAFVDYLSSISQISKLENLRLSENKVINKRRRSRQARHYLSSGALQLSHEDVVLLEESGCFSSRRERVEVVEQAPVST

SEQ ID NO: 196287 - protein, 537 aa, Zea Mays
MGGSADPEAPSPSPTKPSPSSADGKPPRRCVQSKLSWGLVKPAGGGREGGGKGGGGEAGRGDAEAVPPVPAAGEAAATEVREGLEKGKKKRKPRKSEDGKKGSSSKQKQWQDQSNKDGVILVDESPQKKQRKGRKQDAILKEPNASRKRCKTSEAPDGPGSCQQLHISQIEASSPAAAPVIIDVDLMSTPSKAGHANSIDQDISPLKVDLRSEAKIAAEEIRRLSSGKKIHPFFHSRKLNKCASQDQDVINIENMHGLCDSERDPPFYPIHVVYQSEASMPIHWSNWIITDMSSFDTDTAVPLKKSVSYFEGLVKPLTIETNCKRHSNQLSDPILAECTTSGMPFPSFSGKQSEHSCFSDAINVDTQNLLRPGASCQASLLDLNVEPEDPQNGCQPACYLWTDKYRPETVAQVCGNSEHVKFLAEWLKSWDEKGHKIGVANGDTNDNSYQDISDSDYSESASDCENTLLITGPVGCGKSAAVFACAREQGFNVIEVNTSDMRNGAYVRQKFEEATKSHGLEKCSMRETTSAENDGIR

SEQ ID NO: 196288 - protein, 628 aa, Zea Mays
MGGSADPEAPSPSPTKPSPSSADGKPPRRCVQSKLSWGLVKPAGGGREGGGKGGGGEAGRGDAEAVPPVPAAGEAAATEVREGLEKGKKKRKPRKSEDGKKGSSSKQKQWQDQSNKDGVILVDESPQKKQRKGRKQDAILKEPNASRKRCKTSEAPDGPGSCQQLHISQIEASSPAAAPVIIDVDLMSTPSKAGHANSIDQDISPLKVDLRSEAKIAAEEIRRLSSGKKIHPFFHSRKLNKCASQDQDVINIENMHGLCDSERDPPFYPIHVVYQSEINVDTQNLLRPGASCQASLLDLNVEPEDPQNGCQPACYLWTDKYRPETVAQVCGNSEHVKFLAEWLKSWDEKGHKIGVANGDTNDNSYQDISDSDYSESASDCENTLLITGPVGCGKSAAVFACAREQGFNVIEVNTSDMRNGAYVRQKFEEATKSHGLEKWSQEEVINPLRDDSLDPDSGTPDRTEYQCLMSCATRVMIDCDQQKSPVGYYSGLKACDEPPKQVANKTLILFEDVDTVFDEDRGFISTILKMAETTKWPIILTSNKKDPSLPNLLDQLVLDFKYPSTSELLSHVAMICKSEGVNVTVPQLKHVIDVCLGDIRRVVMFLQFWYQGHQFTDLSACKTYYDGT

SEQ ID NO: 196289 - protein, 658 aa, Zea Mays
MGGSADPEAPSPSPTKPSPSSADGKPPRRCVQSKLSWGLVKPAGGGREGGGKGGGGEAGRGDAEAVPPVPAAGEAAATEVREGLEKGKKKRKPRKSEDGKKGSSSKQKQWQDQSNKDGVILVDESPQKKQRKGRKQDAILKEPNASRKRCKTSEAPDGPGSCQQLHISQIEASSPAAAPVIIDVDLMSTPSKAGHANSIDQDISPLKVDLRSEAKIAAEEIRRLSSGKKIHPFFHSRKLNKCASQDQDVINIENMHGLCDSERDPPFYPIHVVYQSEASMPIHWSNWIITDMSSFDTDTAVPLKKSVSYFEGLVKPLTIETNCKRHSNQLSDPILAECTTSGMPFPSFSGKQSEHSCFSDAINVDTQNLLRPGASCQASLLDLNVEPEDPQNGCQPACYLWTDKYRPETVAQVCGNSEHVKFLAEWLKSWDEKGHKIGVANGDTNDNSYQDISDSDYSESASDCENTLLITGPVGCGKSAAVFACAREQGFNVIEVNTSDMRNGAYVRQKFEEATKSHGLEKWSQEEVINPLRDDSLDPDSGTPDRTEYQCLMSCATRVMIDCDQQKSPVGYYSGLKACDEPPKQVANKTLILFEDVDTVFDEDRGFISTILKMAETTKWPIILTSNRSVFAESLGSTCFGFQIPIDLRATFTRCHDL

SEQ ID NO: 196290 - protein, 1090 aa, Zea Mays
MGGLVEVRCRCRDLVMRQVTPWPPEVSGSSSKQKQWQDQSNKDGVILVDESPQKKQRKGRKQDAILKEPNASRKRCKTSEAPDGPGSCQQLHISQIEASSPAAAPVIIDVDLMSTPSKAGHANSIDQDISPLKVDLRSEAKIAAEEIRRLSSGKKIHPFFHSRKLNKCASQDQDVINIENMHGLCDSERDPPFYPIHVVYQSEINVDTQNLLRPGASCQASLLDLNVEPEDPQNGCQPACYLWTDKYRPETVAQVCGNSEHVKFLAEWLKSWDEKGHKIGVANGDTNDNSYQDISDSDYSESASDCENTLLITGPVGCGKSAAVFACAREQGFNVIEVNTSDMRNGAYVRQKFEEATKSHGLEKWSQEEVINPLRDDSLDPDSGTPDRTEYQCLMSCATRVMIDCDQQKSPVGYYSGLKACDEPPKQVANKTLILFEDVDTVFDEDRGFISTILKMAETTKWPIILTSNKKDPSLPNLLDQLVLDFKYPSTSELLSHVAMICKSEGVNVTVPQLKHVIDVCLGDIRRVVMFLQFWYQGHQFTERPKECLCGPFSLDLDAVHSTVPKMLPWEFPCKLSETLCMEVDKTILLAEEKKKQMEISDLEGLQLHVTAPLIKGRTSKTRRAKKSKLKRAHSTEHNDISPSDVGTEKHNIFTVTEVGFFPQPSEVPPMHGQGISDQFHFPVESRETCEIADSFQNPPESNMYGSISQVCDTFMSQDVSCVPESSLILDGTSASISGDEFLSRAVSNGFSAFCEGTYTTSRMVLEDSDCVKNLMAERQKDVEDVVGETSETYMESFRRNEQASCSAAGFQLMDECSRAESIWLLSGKKSNDSCKVELVQDTWNRLRSCRLEFTSEANHNRATSGALKLVSEVSDLISESDLMLFRCYPLTKDTLDPSLTPCDEPVDSSWYSNQVEMGSVYAQHALRILSRNSQKIDGGSVDLSQELFASTAAVSFGKITCSGFRNDYGSTDLSHMKNPTTCIFKRRERHVHLCETLSPVVPPKLLQSLRGPAFVDYLSSISQISKLENLRLSENKVINKRRRSRQARHYLSSGALQLSHEDVVLLEESGCFSSRRERVEVVEQAPVST

SEQ ID NO: 196291 - protein, 696 aa, Zea Mays
MSCATRVMIDCDQQKSPVGYYSGLKACDEPPKQVANKTLILFEDVDTVFDEDRGFISTILKMAETTKWPIILTSNKKDPSLPNLLDQLVLDFKYPSTSELLSHVAMICKSEGVNVTVPQLKHVIDVCLGDIRRVVMFLQFWYQGHQFTERPKECLCGPFSLDLDAVHSTVPKMLPWEFPCKLSETLCMEVDKTILLAEEKKKQMEISDLEGLQLHVTAPLIKGRTSKTRRAKKSKLKRAHSTEHNDISPSDVGTEKHNIFTVTEVGFFPQPSEVPPMHGQGISDQFHFPVESRETCEIADSFQNPPESNMYGSISQVCDTFMSQDVSCVPESSLILDGTSASISGDEFLSRAVSNGFSAFCEGTYTTSRMVLEDSDCVKNLMAERQKDVEDVVGETSETYMESFRRNEQASCSAAGFQLMDECSRAESIWLLSGKKSNDSCKVELVQDTWNRLRSCRLEFTSEANHNRATSGALKLVSEVSDLISESDLMLFRCYPLTKDTLDPSLTPCDEPVDSSWYSNQVEMGSVYAQHALRILSRNSQKIDGGSVDLSQELFASTAAVSFGKITCSGFRNDYGSTDLSHMKNPTTCIFKRRERHVHLCETLSPVVPPKLLQSLRGPAFVDYLSSISQISKLENLRLSENKVINKRRRSRQARHYLSSGALQLSHEDVVLLEESGCFSSRRERVEVVEQAPVST

SEQ ID NO: 196292 - protein, 600 aa, Zea Mays
MFLQFWYQGHQFTERPKECLCGPFSLDLDAVHSTVPKMLPWEFPCKLSETLCMEVDKTILLAEEKKKQMEISDLEGLQLHVTAPLIKGRTSKTRRAKKSKLKRAHSTEHNDISPCKNELDDFHDLPDISLPSDKQIKRNRHRSLLLSESDDDPADVGTEKHNIFTVTEVGFFPQPSEVPPMHGQGISDQFHFPVESRETCEIADSFQNPPESNMYGSISQVCDTFMSQDVSCVPESSLILDGTSASISGDEFLSRAVSNGFSAFCEGTYTTSRMVLEDSDCVKNLMAERQKDVEDVVGETSETYMESFRRNEQASCSAAGFQLMDECSRAESIWLLSGKKSNDSCKVELVQDTWNRLRSCRLEFTSEANHNRATSGALKLVSEVSDLISESDLMLFRCYPLTKDTLDPSLTPCDEPVDSSWYSNQVEMGSVYAQHALRILSRNSQKIDGGSVDLSQELFASTAAVSFGKITCSGFRNDYGSTDLSHMKNPTTCIFKRRERHVHLCETLSPVVPPKLLQSLRGPAFVDYLSSISQISKLENLRLSENKVINKRRRSRQARHYLSSGALQLSHEDVVLLEESGCFSSRRERVEVVEQAPVST

SEQ ID NO: 196293 - protein, 638 aa, Zea Mays
MGGLVEVRCRCRDLVMRQVTPWPPEVSGSSSKQKQWQDQSNKDGVILVDESPQKKQRKGRKQDAILKEPNASRKRCKTSEAPDGPGSCQQLHISQIEASSPAAAPVIIDVDLMSTPSKAGHANSIDQDISPLKVDLRSEAKIAAEEIRRLSSGKKIHPFFHSRKLNKCASQDQDVINIENMHGLCDSERDPPFYPIHVVYQSEASMPIHWSNWIITDMSSFDTDTAVPLKKSVSYFEGLVKPLTIETNCKRHSNQLSDPILAECTTSGMPFPSFSGKQSEHSCFSDAINVDTQNLLRPGASCQASLLDLNVEPEDPQNGCQPACYLWTDKYRPETVAQVCGNSEHVKFLAEWLKSWDEKGHKIGVANGDTNDNSYQDISDSDYSESASDCENTLLITGPVGCGKSAAVFACAREQGFNVIEVNTSDMRNGAYVRQKFEEATKSHGLEKWSQEEVINPLRDDSLDPDSGTPDRTEYQCLMSCATRVMIDCDQQKSPVGYYSGLKACDEPPKQVANKTLILFEDVDTVFDEDRGFISTILKMAETTKWPIILTSNKKDPSLPNLLDQLVLDFKYPSTSELLSHVAMICKSEGVNVTVPQLKHVIDVCLGDIRRVVMFLQFWYQGHQFTDLSACKTYYDGT

SEQ ID NO: 196294 - protein, 345 aa, Zea Mays
MGPPPGAQDPAPSPSGGSGSSRRRFRRLDRRNASKHIAYDATNFCQYPPSPQAASAPGSGRASLASSAACSIDLVNSFRIGGSGDGGGDLRFLCENLGLSGPDDFAVPRADWEAHKAARSSASASSSPNSARPNYDSPQRNSPLSQVGAEEPAQASDAETELPAATGRDGPIEAPERPARLDLPLESTCPDARRAPGQGGIKGVRPPPVLKPPPSMALPAVCGVGSTWDILRSLAPDEKDDAPASRSGRRFGHLDAVEKDDDERAAVLLMLDDLRLEESSESFTGTSSLSTTNDDDTSSTTTESMFYISPNGRFRRRIKSWSRGVLLGSGSFGTVYEGISEKLHF

SEQ ID NO: 196295 - protein, 392 aa, Zea Mays
MGPPPGAQDPAPSPSGGSGSSRRRFRRLDRRNASKHIAYDATNFCQYPPSPQAASAPGSGRASLASSAACSIDLVNSFRIGGSGDGGGDLRFLCENLGLSGPDDFAVPRADWEAHKAARSSASASSSPNSARPNYDSPQRNSPLSQVGAEEPAQASDAETELPAATGRDGPIEAPERPARLDLPLESTCPDARRAPGQGGIKGVRPPPVLKPPPSMALPAVCGVGSTWDILRSLAPDEKDDAPASRSGRRFGHLDAVEKDDDERAAVLLMLDDLRLEESSESFTGTSSLSTTNDDDTSSTTTESMFYISPNGRFRRRIKSWSRGVLLGSGSFGTVYEGISDEGVFFAVKEVNLFDKGSNAKQCIFQLEQEIALLSQFEHENIVQYYGTDKRH

SEQ ID NO: 196296 - protein, 480 aa, Zea Mays
MNVGIRFPANLFGHSTDKRIEAVNSELQYWTNHSNVPVTKVVFGHFPMSFTASSEKGQRYESVLAGQSISAYLCGHLHAKVSKQLWRYHEIRTTEDHKSSFWEWELGDWKDSRLMRILAIDGGAVSFIDHTLKHALQTSILITYPTDSRSMNMLDSEKWSMRNDINVLIFSHQFISNVFVLDSHGVKISSEQRPFSVEGKMAIPTSPWTNYLLFEVQWEGMYQVLLWSNLAFTIVLLFIPKLLYHFVRRSSSYQRWAVSIPSSSIQQRKPYFWLVWFLMEGTRSKPFWFSMVTYVLWLIEMPWFWGHATSENGEIAQMYLSGWSVPIHDGGLTGNKLSNPDVLVITLPFLYLVLVPVIVLTYGLFAEKATVFLQHRRRVVYSLDSTNVHAESPRLLPVAPRASLMKFADKMVSMVIQFCGSWTRRALLLACLITAAIHLKLCSKLMSAYGTVPVALSPPLTWIPLLLLGGAAYCTVLHAD

SEQ ID NO: 196297 - protein, 591 aa, Zea Mays
MPSSPIPAPCCTALVRAYRTDKTRRLDAMNRVIYEVFPEPNRQLLQRILKMMQIVGSHKAENRMSPSALAACMAPLLLRPLLLGECEIDSEFNMAGDGSFQLLQAAAAANHAQAIVIIMLEEYDQIFDDIEDGSYSSDAYTESDIDKEYSTDNDIPEDDGSYGCGEDVEEDLNDDTEHSSGIRIDNADDKVNNNKSSTTCDDNDKVVQPPAARAMRIEHGVPMDDSNQISSLSKVDDTSKMQSNSSFTDHIQKPNADSSYLSAKFTEKTGGSTYESKRNSWGRTSARKGLSTEEAGCCSDNDEAHIAKLENKKTHLQSKLTEEVKENTVLQANLERRKAALHERRVALEKEVENLRDQLQKERNLRASLESGLMNMRRGQVSFPSTIDTKTKADLEEVAAAEADIMNLKQKVSDLRGQLNYQVQLSSTSLCESCNKRAINADKLVEGEQNAGLSPQIGSSVEAPPIQGSNSVVPDMLWATNQMVQKMLYSKGEIAKDGQDGSLTSKWNFAQRPHSNSPVMSRVQGSNAYSSTKNEESGAAPSSALAKLTTRLNFLKERRALLASEMQNLDLGRSQAQRHTAPPKTETPTDK

SEQ ID NO: 196298 - protein, 582 aa, Zea Mays
MSAPEFRTSYQQVSSSQPPENVGQLKVCRCGSGDSNFQITNKSDAGENSPTTCPSCQVLKSGNLLLSSKGIGWTVWKKRWFILTRTSLVFFRSDPSVPPPRGSEPIVTLGGIDLNNSASMIVKEERKVITVIFPDGRDGRTFTLKAETIEDLNEWRSALENALAQAPSVANTAGQHLAVSTDITEPVEAAVEQLEDKSVIGRPAEFALVDADGTTAFLEKALKFIEDYGVKVEGILRQSADVEEVKRRVQDYEKGKNEFSPEEDAHVIGDCIKCILREMPSSPIPAPCCTALVRAYRTDKTRRLDAMNRVIYEVFPEPNRQLLQRILKMMQIVGSHKAENRMSPSALAACMAPLLLRPLLLGECEIDSEFNMAGDGSFQLLQAAAAANHAQAIVIIMLEEYDQIFDDIEDGSYSSDAYTESDIDKEYSTDNDIPEDDGSYGCGEDVEEDLNDDTEHSSGIRIDNADDKVNNNKSSTTCDDNDKVVQPPAARAMRIEHGVPMDDSNQISSLSKVDDTSKMQSNSSFTDHIQKPNADSSYLSAKFTEKTGGSTYESKRNSWGRTSARKGLSTEEAGCCSDNDDF

SEQ ID NO: 196299 - protein, 66 aa, Zea Mays
MSAPEFRTSYQQVSSSQPPENVGQLKVCRCGSGDSNFQITNKSDAGENSPTTCPSCQTYGLLMSIL

SEQ ID NO: 196300 - protein, 795 aa, Zea Mays
MSAPEFRTSYQQVSSSQPPENVGQLKVCRCGSGDSNFQITNKSDAGENSPTTCPSCQVLKSGNLLLSSKGIGWTVWKKRWFILTRTSLVFFRSDPSVPPPRGSEPIVTLGGIDLNNSASMIVKEERKVITVIFPDGRDGRTFTLKAETIEDLNEWRSALENALAQAPSVANTAGQHLAVSTDITEPVEAAVEQLEDKSVIGRPAEFALVDADGTTAFLEKALKFIEDYGVKVEGILRQSADVEEVKRRVQDYEKGKNEFSPEEDAHVIGDCIKCILREMPSSPIPAPCCTALVRAYRTDKTRRLDAMNRVIYEVFPEPNRQLLQRILKMMQIVGSHKAENRMSPSALAACMAPLLLRPLLLGECEIDSEFNMAGDGSFQLLQAAAAANHAQAIVIIMLEEYDQIFDDIEDGSYSSDAYTESDIDKEYSTDNDIPEDDGSYGCGEDVEEDLNDDTEHSSGIRIDNADDKFTEKTGGSTYESKRNSWGRTSARKGLSTEEAGCCSDNDEAHIAKLENKKTHLQSKLTEEVKENTVLQANLERRKAALHERRVALEKEVENLRDQLQKERNLRASLESGLMNMRRGQVSFPSTIDTKTKADLEEVAAAEADIMNLKQKVSDLRGQLNYQVQLSSTSLCESCNKRAINADKLVEGEQNAGLSPQIGSSVEAPPIQGSNSVVPDMLWATNQMVQKMLYSKGEIAKDGQDGSLTSKWNFAQRPHSNSPVMSRVQGSNAYSSTKNEESGAAPSSALAKLTTRLNFLKERRALLASEMQNLDLGRSQAQRHTAPPKTETPTDK

SEQ ID NO: 196301 - protein, 578 aa, Zea Mays
MLHCPGTDKTRRLDAMNRVIYEVFPEPNRQLLQRILKMMQIVGSHKAENRMSPSALAACMAPLLLRPLLLGECEIDSEFNMAGDGSFQLLQAAAAANHAQAIVIIMLEEYDQIFDDIEDGSYSSDAYTESDIDKEYSTDNDIPEDDGSYGCGEDVEEDLNDDTEHSSGIRIDNADDKVNNNKSSTTCDDNDKVVQPPAARAMRIEHGVPMDDSNQISSLSKVDDTSKMQSNSSFTDHIQKPNADSSYLSAKFTEKTGGSTYESKRNSWGRTSARKGLSTEEAGCCSDNDEAHIAKLENKKTHLQSKLTEEVKENTVLQANLERRKAALHERRVALEKEVENLRDQLQKERNLRASLESGLMNMRRGQVSFPSTIDTKTKADLEEVAAAEADIMNLKQKVSDLRGQLNYQVQLSSTSLCESCNKRAINADKLVEGEQNAGLSPQIGSSVEAPPIQGSNSVVPDMLWATNQMVQKMLYSKGEIAKDGQDGSLTSKWNFAQRPHSNSPVMSRVQGSNAYSSTKNEESGAAPSSALAKLTTRLNFLKERRALLASEMQNLDLGRSQAQRHTAPPKTETPTDK

SEQ ID NO: 196302 - protein, 563 aa, Zea Mays
MNRVIYEVFPEPNRQLLQRILKMMQIVGSHKAENRMSPSALAACMAPLLLRPLLLGECEIDSEFNMAGDGSFQLLQAAAAANHAQAIVIIMLEEYDQIFDDIEDGSYSSDAYTESDIDKEYSTDNDIPEDDGSYGCGEDVEEDLNDDTEHSSGIRIDNADDKVNNNKSSTTCDDNDKVVQPPAARAMRIEHGVPMDDSNQISSLSKVDDTSKMQSNSSFTDHIQKPNADSSYLSAKFTEKTGGSTYESKRNSWGRTSARKGLSTEEAGCCSDNDEAHIAKLENKKTHLQSKLTEEVKENTVLQANLERRKAALHERRVALEKEVENLRDQLQKERNLRASLESGLMNMRRGQVSFPSTIDTKTKADLEEVAAAEADIMNLKQKVSDLRGQLNYQVQLSSTSLCESCNKRAINADKLVEGEQNAGLSPQIGSSVEAPPIQGSNSVVPDMLWATNQMVQKMLYSKGEIAKDGQDGSLTSKWNFAQRPHSNSPVMSRVQGSNAYSSTKNEESGAAPSSALAKLTTRLNFLKERRALLASEMQNLDLGRSQAQRHTAPPKTETPTDK

SEQ ID NO: 196303 - protein, 610 aa, Zea Mays
MATPNGLARIETNGATKPDNGVCHDDSSAPVRAQTIDELHSLQRKRSAPTTPIKDGAASTFAAALSEEERHRQQLQSISASLASLTRETGPKVVKGDPARRGEAPATGAPPTPQAHHQHHHPAAPTIAVSDSSLKFTHVLYNLSPAELYEQAIKYEKGSFITSTGALATLSGAKTGRSPRDKRVVKDEVAARDLWWGKGSPNIEMDEHTFLTNRERAVDYLNSLDKVFVNDQFLNWDPENRIKVRIISARAYHSLFMHNMCIRPTDEELESFGTPDFTIYNAGQFPCNRYTHYMTSSTSVDINLARREMVILGTQYAGEMKKGLFGVMHYLMPKRGILSLHSGCNMGKDGDVALFFGLSGTGKTTLSTDHNRLLIGDDEHCWSENGVSNIEGGCYAKCIDLSQEKEPDIWNAIKFGAVLENVVFDEHTREVDYTDKSVTGITHRKKKPFLHRREHSGCLPDRVHPQRQDTMRRSTPQERDPAGVRRLRRAPAGEQAGPGADHVPLHQRIHRPGRRHGGRHQGATGHLLRLLRRGLHHAPPDQVRRHARREDAEVRRHRVARQHRLVWRQVRCGQEDPASLHQEDHRRHPLRRASHRQLPEDRGLWPGDPD

SEQ ID NO: 196304 - protein, 252 aa, Zea Mays
MATPNGLARIETNGATKPDNGVCHDDSSAPVRAQTIDELHSLQRKRSAPTTPIKDGAASTFAAALSEEERHRQQLQSISASLASLTRETGPKVVKGDPARRGEAPATGAPPTPQAHHQHHHPAAPTIAVSDSSLKFTHVLYNLSPAGTGKTTLSTDHNRLLIGDDEHCWSENGVSNIEGGCYAKCIDLSQEKEPDIWNAIKFGAVLENVVFDEHTREVDYTDKSVTGTLGLPTRSSTSPTPRYHASVHTPRT

SEQ ID NO: 196305 - protein, 441 aa, Zea Mays
MATPNGLARIETNGATKPDNGVCHDDSSAPVRAQTIDELHSLQRKRSAPTTPIKDGAASTFAAALSEEERHRQQLQSISASLASLTRETGPKVVKGDPARRGEAPATGAPPTPQAHHQHHHPAAPTIAVSDSSLKFTHVLYNLSPAELYEQAIKYEKGSFITSTGALATLSGAKTGRSPRDKRVVKDEVAARDLWWGKGSPNIEMDEHTFLTNRERAVDYLNSLDKVFVNDQFLNWDPENRIKVRIISARAYHSLFMHNMCIRPTDEELESFGTPDFTIYNAGQFPCNRYTHYMTSSTSVDINLARREMVILGTQYAGEMKKGLFGVMHYLMPKRGILSLHSGCNMGKDGDVALFFGLSGTGKTTLSTDHNRLLIGDDEHCWSENGVSNIEGGCYAKCIDLSQEKEPDIWNAIKFGAVLENVVFDEHTREVDYTDKSVTGK

SEQ ID NO: 196306 - protein, 446 aa, Zea Mays
MATPNGLARIETNGATKPDNGVCHDDSSAPVRAQTIDELHSLQRKRSAPTTPIKDGAASTFAAALSEEERHRQQLQSISASLASLTRETGPKVVKGDPARRGEAPATGAPPTPQAHHQHHHPAAPTIAVSDSSLKFTHVLYNLSPAGTGKTTLSTDHNRLLIGDDEHCWSENGVSNIEGGCYAKCIDLSQEKEPDIWNAIKFGAVLENVVFDEHTREVDYTDKSVTENTRAAYPIEYIPNAKIPCVGPHPKNVILLACDAFGVLPPVSKLDLAQTMYHFISGYTALVAGTEDGIKEPQATFSACFGAAFIMLHPTKYAAMLAEKMQKYGATGWLVNTGWSGGRYGVGKRIRLPYTRKIIDAIHSGELLTANYQKTEVFGLEIPTEIKGVPSEILDPINTWTDKAAYKETLLRLAGLFKKNFEVFASYKIGDDSNLTDEILAAGPNF

SEQ ID NO: 196307 - protein, 455 aa, Zea Mays
MDEHTFLTNRERAVDYLNSLDKVFVNDQFLNWDPENRIKVRIISARAYHSLFMHNMCIRPTDEELESFGTPDFTIYNAGQFPCNRYTHYMTSSTSVDINLARREMVILGTQYAGEMKKGLFGVMHYLMPKRGILSLHSGCNMGKDGDVALFFGLSGTGKTTLSTDHNRLLIGDDEHCWSENGVSNIEGGCYAKCIDLSQEKEPDIWNAIKFGAVLENVVFDEHTREVDYTDKSVTENTRAAYPIEYIPNAKIPCVGPHPKNVILLACDAFGVLPPVSKLDLAQTMYHFISGYTALVAGTEDGIKEPQATFSACFGAAFIMLHPTKYAAMLAEKMQKYGATGWLVNTGWSGGRYGVGKRIRLPYTRKIIDAIHSGELLTANYQKTEVFGLEIPTEIKGVPSEILDPINTWTDKAAYKETLLRLAGLFKKNFEVFASYKIGDDSNLTDEILAAGPNF

SEQ ID NO: 196308 - protein, 95 aa, Zea Mays
MNLESRGRTWSSELEENTAHTTAIGEQRRLLLQYGKAAHPSASPAAIVLALMAVRCQAQGSGEVILLKKCSDFLCGCSNTIGQKPKSVLYTISPL

SEQ ID NO: 196309 - protein, 377 aa, Zea Mays
MTTVPKPQQVAHSRARLAPRAIGALLEFAPASSSLRFAVHRCRTARLEVKASGNTFGNYFQVATYGESHGGGVGCVISGCPPRIPLTEADLQVELDRRRPGQSRITSTRKETDTCKILSGTHEGVTTGTPILVIVPNTDQIGSDHREIANVYRPSHADATYDFKYGVRAVQGGGRSSGRETVGRVAAGALAKKILKLKCGLEILSFVSKVHQVVLPEDAVDYGSVTLEQIESNIVRCPDPEYAEKMIDAIDRVRVRGDSVGGVITCVARNVPRGLGSPVFDKLESELAKAMLSIPASNGFEIGSGFAGTDLTGSEHNDEFYMDKAGSVRTRTNRSGGVQGGISNGEIVHFKVAFKPTPSIGLFLWWNPWPRWSSWTS

SEQ ID NO: 196310 - protein, 1091 aa, Zea Mays
MKYFEDEVVNGNWDEVERYLGGFTKVDDNRYSMKIFFEIRKQKYLEALDKHDRSKAVEILVKDLKVFASFNEELFKEITQLLTLENFRENEQLSKYGDTKSARAIMFVELKKLIEANPLFRDKLQFPSLKNSRLRTLINQSLNWQHQLCKNPRPNPDIKTLFVDHSCGQPNGARAPSPANNPLLGSMPKPGGFPPLGAHGPFQPSPTPVPPLAGWMSNPPAVTHPAVSGGAIGFGTPTNPAALLKHPRTPTTANPGMDYPSGDSDHISKRTRPVGMSEEVNLPVNMLPVTYPQSHNYQQDDFHKTVARTLSQGSTPMSMDFHPLQQTLLLVGTNVGDIGLWDVGTKDRLVVRNFKVWDLSKCTMILQASLVKDPAVSVNRIIWSPDGTLFGVAYSRHIVQIYSYNGGDDIRQHLEIDAHIGGVNDIAFAHPNKQLCIITCGDDKTIKVWEATSGAKQFTFEGHEAPVYSVCPHYKENIQFIFSTALDGKIKAWLYDNMGSRVDYDAPGHWCTTMAYSADGSRLFSCGTSKDGESHLVEWNESEGAVKRTYQGFRKRSMGVVQFDTTRNRFLAAGDEFMIKIWDMDSTGLLTTIDADGGLIASPRIRFNKEGTLLAVSTVDNGIKILANADGLRLLRTLENRSFDASRNASEAVTKPLINPLTAAANAAAASSSGAGAPSAVTAMNGDTRSLVDVKPRIADESLDKSKAWKLMEITESTQCRSIKLADNMRTSKISRLIYTNSGLAILALTSSAVHLLWKWPRSDRNSGKASASVSPTLWQPPSGILMTNDTTDNNPEEAVHCFALSKNDSYVMSASGGKISLFNMMTFKTMTTFMPAPPAATFLAFHPQDNNIIAIGMDDSTIQIYNVRIDEVKSKLRGHSKRITGLAFSNVLNVLVSSGADAQLCVWNTDGWEKQKNRFLQIPSGRQSNILDTRVQFHQDQMHFLVVHETQIAIYETTKLEPVKQWPVRENSPPITHAAFSCDSQLIYASFMDATVGIFNASSLRLQCRILPASYLPPNISPSVHPVVVAAHPSEASQFALGLTDGGVFVLEPLESDRKWGNPPPVENGSASNLSAPPPNGASSSDQPER

SEQ ID NO: 196311 - protein, 523 aa, Zea Mays
MSSLSRELVFLILQFLDEEKFKETVHKLEQESGFYFNMKYFEDEVVNGNWDEVERYLGGFTKVDDNRYSMKIFFEIRKQKYLEALDKHDRSKAVEILVKDLKVFASFNEELFKEITQLLTLENFRENEQLSKYGDTKSARAIMFVELKKLIEANPLFRDKLQFPSLKNSRLRTLINQSLNWQHQLCKNPRPNPDIKTLFVDHSCGQPNGARAPSPANNPLLGSMPKPGGFPPLGAHGPFQPSPTPVPPLAGWMSNPPAVTHPAVSGGAIGFGTPTNPAALLKHPRTPTTANPGMDYPSGDSDHISKRTRPVGMSEEVNLPVNMLPVTYPQSHNYQQDDFHKTVARTLSQGSTPMSMDFHPLQQTLLLVGTNVGDIGLWDVGTKDRLVVRNFKVWDLSKCTMILQASLVKDPAVSVNRIIWSPDGTLFGVAYSRHIVQIYSYNGGDDIRQHLEIDAHIGGVNDIAFAHPNKQLCIITCGDDKTIKVWEATSGAKQFTFEGHEAPVYSVCPHYKENIQVSSSRLL

SEQ ID NO: 196312 - protein, 1111 aa, Zea Mays
MSSLSRELVFLILQFLDEEKFKETVHKLEQESGFYFNMKYFEDEVVNGNWDEVERYLGGFTKVDDNRYSMKIFFEIRKQKYLEALDKHDRSKAVEILVKDLKVFASFNEELFKEITQLLTLENFRENEQLSKYGDTKSARAIMFVELKKLIEANPLFRDKLQFPSLKNSRLRTLINQSLNWQHQLCKNPRPNPDIKTLFVDHSCGQPNGARAPSPANNPLLGSMPKPGGFPPLGAHGPFQPSPTPVPPLAGWMSNPPAVTHPAVSGGAIGFGTPTNPAALLKHPRTPTTANPGMDYPSGDSDHISKRTRPVGMSEEQVNLPVNMLPVTYPQSHNYQQDDFHKTVARTLSQGSTPMSMDFHPLQQTLLLVGTNVGDIGLWDVGTKDRLVVRNFKVWDLSKCTMILQASLVKDPAVSVNRIIWSPDGTLFGVAYSRHIVQIYSYNGGDDIRQHLEIDAHIGGVNDIAFAHPNKQLCIITCGDDKTIKVWEATSGAKQFTFEGHEAPVYSVCPHYKENIQFIFSTALDGKIKAWLYDNMGSRVDYDAPGHWCTTMAYSADGSRLFSCGTSKDGESHLVEWNESEGAVKRTYQGFRKRSMGVVQFDTTRNRFLAAGDEFMIKIWDMDSTGLLTTIDADGGLIASPRIRFNKEGTLLAVSTVDNGIKILANADGLRLLRTLENRSFDASRNASEAVTKPLINPLTAAANAAAASSSGAGAPSAVTAMNGDTRSLVDVKPRIADESLDKSKAWKLMEITESTQCRSIKLADNMRTSKISRLIYTNSGLAILALTSSAVHLLWKWPRSDRNSGKASASVSPTLWQPPSGILMTNDTTDNNPEEAVHCFALSKNDSYVMSASGGKISLFNMMTFKTMTTFMPAPPAATFLAFHPQDNNIIAIGMDDSTIQIYNVRIDEVKSKLRGHSKRITGLAFSNVLNVLVSSGADAQIPSGRQSNILDTRVQFHQDQMHFLVVHETQIAIYETTKLEPVKQWPVRENSPPITHAAFSCDSQLIYASFMDATVGIFNASSLRLQCRILPASYLPPNISPSVHPVVVAAHPSEASQFALGLTDGGVFVLEPLESDRKWGNPPPVENGSASNLSAPPPNGASSSDQPER

SEQ ID NO: 196313 - protein, 346 aa, Zea Mays
MSSLSRELVFLILQFLDEEKFKETVHKLEQESGFYFNMKYFEDEVVNGNWDEVERYLGGFTKVDDNRYSMKIFFEIRKQKYLEALDKHDRSKAVEILVKDLKVFASFNEELFKEITQLLTLENFRENEQLSKYGDTKSARAIMFVELKKLIEANPLFRDKLQFPSLKNSRLRTLINQSLNWQHQLCKNPRPNPDIKTLFVDHSCGQPNGARAPSPANNPLLGSMPKPGGFPPLGAHGPFQPSPTPVPPLAGWMSNPPAVTHPAVSGGAIGFGTPTNPGDSDHISKRTRPVGMSEEVNLPVNMLPVTYPQSHNYQQDDFHKTVARTLSQGSTPMSMDFHPLQQTLLL

SEQ ID NO: 196314 - protein, 178 aa, Zea Mays
MSSLSRELVFLILQFLDEEKFKETVHKLEQESGFYFNMKYFEDEVVNGNWDEVERYLGGFTKVDDNRYSMKIFFEIRKQKYLEALDKHDRSKAVEILVKDLKVFASFNEELFKEITQLLTLENFRENEQLSKYGDTKSARAIMFVELKKLIEANPLFRDKLQFPSLKNSRLRTLINQR

SEQ ID NO: 196315 - protein, 96 aa, Zea Mays
MSLYAFFIQFVLLLSNGCMSQTVYHSPQSKNMTNISHEQWKHPLCSLVTYGIILSKIYLLSLNLSSCDKFCACRRKLNNTNLIYIPNELIETTPGE

SEQ ID NO: 196316 - protein, 482 aa, Zea Mays
MGILKQQRTTNQELPIQEPYPQEAWTDVKVTSPQLSRVATYKLSLNKTTLQLTSSRESTNPFVEQAIQFSVAAAKATIIDKERKDVVDKLLLQGLNITIIGHNDFYSYRKQIEARGLPLTPEVLLSLPPFSSITFNSEVANGTMTGEKCKPEVAKTGLGSSAAMTTSVVAALLHYLGAVNLSCSGQSSGDNASGRELDLVHAIAQSAHCLAQGKIGSGFDVSAAVYGSQRYVRFSPEILSSAQAIGGTVLPDVVSDVLTQRWDHENKQFSLPPLMTLLLGEPGTGGSSTPSMVGSVKRWLKSDPEKSRDTWSKLAIANSTLENQLRILKGLSENHHEAYESMVRSCSRLTYGKWAEVATNQHQELIIRSLLAARDACLEIRLHMREMGIAAGVPIEPDSQTRLLDATMNMEGVLLAGVPGAGGFDAVFSVVLGDASNAVAHAWSSVGVLPLPVREDCRGVSLEDADPRTREVSAAVWSIQIN

SEQ ID NO: 196317 - protein, 131 aa, Zea Mays
MTLLLGEPGTGGSSTPSMVGSVKRWLKSDPEKSRDTWSKLAIANSTLENQLRILKGLSENHHEAYESMVRSCSRLTYGKWAEVATNQHQELIIRSLLAARDACLEIRLHMREMGIAAGVPVRLSQIHKHGY

SEQ ID NO: 196318 - protein, 197 aa, Zea Mays
MTLLLGEPGTGGSSTPSMVGSVKRWLKSDPEKSRDTWSKLAIANSTLENQLRILKGLSENHHEAYESMWAEVATNQHQELIIRSLLAARDACLEIRLHMREMGIAAGVPIEPDSQTRLLDATMNMEGVLLAGVPGAGGFDAVFSVVLGDASNAVAHAWSSVGVLPLPVREDCRGVSLEDADPRTREVSAAVWSIQIN

SEQ ID NO: 196319 - protein, 180 aa, Zea Mays
MVGSVKRWLKSDPEKSRDTWSKLAIANSTLENQLRILKGLSENHHEAYESMWAEVATNQHQELIIRSLLAARDACLEIRLHMREMGIAAGVPIEPDSQTRLLDATMNMEGVLLAGVPGAGGFDAVFSVVLGDASNAVAHAWSSVGVLPLPVREDCRGVSLEDADPRTREVSAAVWSIQIN

SEQ ID NO: 196320 - protein, 358 aa, Zea Mays
MDMALPVVNATAAVLARVSAAFNGPLARAVVFGVHIDGHLVVEGLLIAVIVFQLSRKSYKPPKKPLTEKEIDELCDEWEPEPLCPPIKEGAKIDAPTLESAAGPHTIVDGKEVVNFASANYLGLIGNEKIIDSCISSLEKYGVGSCGPRGFYGTIDVHLDCESKIAKFLGTPDSILYSYGISTIFSVIPAFCKKGDIIVADEGVHWAVQNGLHLSRSTVVYFKHNDMASLASTLEKLTRGNKRAEKIRRYIVVESIYQNSGQIAPLDEIVRLKEKYRFRVILEESHSFGVLGKSGRGLAEHYGVPIEKIDIITAGMGNALATDGGFCTGSVRVVDHQLWVCFLCISATLSCQCCCFCR

SEQ ID NO: 196321 - protein, 323 aa, Zea Mays
MDMALPVVNATAAVLARVSAAFNGPLARAVVFGVHIDGHLVVEGLLIAVIVFQLSRKSYKPPKKPLTEKEIDELCDEWEPEPLCPPIKEGAKIDAPTLESAAGPHTIVDGKEVVNFASANYLGLIGNEKIIDSCISSLEKYGVGSCGPRGFYGTIDVHLDCESKIAKFLGTPDSILYSYGISTIFSVIPAFCKKGDIIVADEGVHWAVQNGLHLSRSTVVYFKHNDMASLASTLEKLTRGNKRAEKIRRYIVVESIYQNSGQIAPLDEIVRLKEKYRFRVILEESHSFGVLGKSGRGLAEHYGVPVSVWPQLFLMFHRVTPFQ

SEQ ID NO: 196322 - protein, 357 aa, Zea Mays
MASNQTNQTLRSEHTAGGGISMGSVAPAELVLKAACERCGAASGLYATSCRHTTLCSDCGMTLALARGRCTVCSAPVTRLIREYDVRVDTSAEKEKTHYIGRFTTGLPPLSNERSAGNRWTLRKDVPHGQQLTGNMRDKHYSKMPWILEDETGEHQYQGQTEDPPATYYSLTQKGNDMIAVQVGSWYNFSKIAQYKQLTLEEAEEKMNRRRSSASGYERWMMKAATNGPDAFSSVVKRLDDVNRGATNGVHPKKGDRNENGNQSDKVDDKEEEGAARKNRLGLTMKDMGEDYEDSGNDIEFDLDDEIEKGDDWEHEEIFTDDDEVVDVDIEQRPELADPEAAPPEIKQDQQFAIHKM

SEQ ID NO: 196323 - protein, 430 aa, Zea Mays
MGSVAPAELVLKAACERCGAASGLYATSCRHTTLCSDCGMTLALARGRCTVCSAPVTRLIREYDVRVDTSAEKEKTHYIGRFTTGLPPLSNERSAGNRWTLRKDVPHGQQLTGNMRDKHYSKMPWILEDETGEHQYQGQTEDPPATYYSLTQKGNDMIAVQVGSWYNFSKIAQYKQLTLEEAEEKMNRRRSSASGYERWMMKAATNGPDAFSSVVKRLDDVNRGATNGVHPKKGDRNENGNQSDKVDDKEEEGAARKNRLGLTMKDMGEDYEDSGNDIEFDLDDEIEKGDDWEHEEIFTDDDEVVDVDIEQRPELADPEAAPPEIKQDDNEDELGCSDNLSKSGQELKRLLRRAAGENESDVDDKSTYMTYPRQNLLQNLYPKVNQMIAALLNQHHQGTLRALHLHPNPLKRGNQGVVMQIFLMVHPRKR

SEQ ID NO: 196324 - protein, 447 aa, Zea Mays
MGSVAPAELVLKAACERCGAASGLYATSCRHTTLCSDCGMTLALARGRCTVCSAPVTRLIREYDVRVDTSAEKEKTHYIGRFTTGLPPLSNERSAGNRWTLRKDVPHGQQLTGNMRDKHYSKMPWILEDETGEHQYQGQTEDPPATYYSLTQKGNDMIAVQVGSWYNFSKIAQYKQLTLEEAEEKMNRRRSSASGYERWMMKAATNGPDAFSSVVKRLDDVNRGATNGVHPKKGDRNENGNQSDKVDDKEEEGAARKNRLGLTMKDMGEDYEDSGNDIEFDLDDEIEKGDDWEHEEIFTDDDEVVDVDIEQRPELADPEAAPPEIKQDDNEDELGCSDNLSKSGQELKRLLRRAAGENESDVDDKSTYEDDLPSPKPAPKLVPKSEPDDSSPAKPTPSGHAQSATPSSKSTQKRKSGGGDANISNGAPSKKIKMEHVRQCLHSARYT

SEQ ID NO: 196325 - protein, 332 aa, Zea Mays
MMKAATNGPDAFSSVVKRLDDVNRGATNGVHPKKGDRNENGNQSDKVDDKEEEGAARKNRLGLTMKDMGEDYEDSGNDIEFDLDDEIEKGDDWEHEEIFTDDDEVVDVDIEQRPELADPEAAPPEIKQDDNEDELGCSDNLSKSGQELKRLLRRAAGENESDVDDKSTYEDDLPSPKPAPKLVPKSEPDDSSPAKPTPSGHAQSATPSSKSTQKRKSGGGDANISNGAPSKKIKMEHETGTLAVKDENPSYLEPTSKASLSARRESSPITEEEVRTVLRAISPTTSQDLVSRFKTRLITQEDKKAFLGIVTKISRILKHNGGRYIVLRHEHM

SEQ ID NO: 196326 - protein, 300 aa, Zea Mays
MGSVAPAELVLKAACERCGAASGLYATSCRHTTLCSDCGMTLALARGRCTVCSAPVTRLIREYDVRVDTSAEKEKTHYIGRFTTGLPPLSNERSAGNRWTLRKDVPHGQQLTGNMRDKHYSKMPWILEDETGEHQYQGQTEDPPATYYSLTQKGNDMIAVQVGSWYNFSKIAQYKQLTLEEAEEKMNRRRSSASGYERWMMKAATNGPDAFSSVVKRLDDVNRGATNGVHPKKGDRNENGNQSDKVDDKEEEGAARKNRLGLTMKDMGEDYEDSGNDIEFDLDDEIEKGVYISNTTRKNE

SEQ ID NO: 196327 - protein, 245 aa, Zea Mays
MPCWRSSHVTGVHFLVDAILAKAHLRGANIPNFSIKHALLPCIYPLSKPETPERVRKQLPAMATADRVAATFLSSFPTHHPRPFSSVSLVTNPVLPVSLRAAVTGGPRLASRLRVHRVGAAVAQLPTTNPEVASGEKKIRWSSRAVRSFAMAELEARKMRYPTTGTEGLLMGILVEGTSGAAKLLRANGTTLLKVREEAANVLGKSEMFYFSPMHPPLTEAAQRALDWAVNEKLKSAMTTLGEPT

SEQ ID NO: 196328 - protein, 93 aa, Zea Mays
MFYFSPMHPPLTEAAQRALDWAVNEKLKSGEDGEVTANHLLLGIWSDKESAGHKILYSLGFDDEKASLLAKTAGEEAAMSLREQGEHLIYSST

SEQ ID NO: 196329 - protein, 160 aa, Zea Mays
MPCWRSSHVTGVHFLVDAILAKAHLRGANIPNFSIKHALLPCIYPLSKPETPERVRKQLPAMATADRVAATFLSSFPTHHPRPFSSVSLVTNPVLPVSLRAAVTGGPRLASRLRVHRVGAAVAQLPTTNPEVASGEKKIRLDGHQGLCGLLRWQSWRPGR

SEQ ID NO: 196330 - protein, 288 aa, Zea Mays
MPCWRSSHVTGVHFLVDAILAKAHLRGANIPNFSIKHALLPCIYPLSKPETPERVRKQLPAMATADRVAATFLSSFPTHHPRPFSSVSLVTNPVLPVSLRAAVTGGPRLASRLRVHRVGAAVAQLPTTWSSRAVRSFAMAELEARKMRYPTTGTEGLLMGILVEGTSGAAKLLRANGTTLLKVREEAANVLGKSEMFYFSPMHPPLTEAAQRALDWAVNEKLKSGEDGEVTANHLLLGIWSDKESAGHKILYSLGFDDEKASLLAKTAGEEAAMSLREQGEHLIYSST

SEQ ID NO: 196331 - protein, 347 aa, Zea Mays
MVLEATMICIDNSEWMRNGDYAPSRFQAQADAVNLICGAKTQSNPENTVGVMTMAGKGVRVLVTPTSDLGKILACMHGLEVGAEANLAAAIQVAQLALKHRQNKRQQQRIIAFIGSPVKYDKKILETIGKKLKKNNVALDIVDFGESDDEKPEKLEALIAAVNSSDSSHIVHVPPGENALSDVLLSTPIFTGEEGGSGFAASAAAAVATGASGFEFGVDPNVDPELALALRLSMEEERARQEAIAKKAAEDTSNTENINASSSNSDSVMAEAELASNAAAGDKQEQPKDDDDLLQQALAMSMEGGASGSAAVTDSAMAEAGAVDPDLALAREEGRQVRQNRRREELM

SEQ ID NO: 196332 - protein, 99 aa, Zea Mays
MERSTAQKKKKPLERATPLPPAPVVTEALDDLEQEVARNFVEDLLHVLAPPPSSLPLPRFSVVVKASPAKDARLVARAAAPACNVEAATADSIRGLLRL

SEQ ID NO: 196333 - protein, 261 aa, Zea Mays
MAFASSNAKQSLYPDVDQSHPDLNTPFFSAPTTSTCAGAGAATGNSLYPTVDPNELAQNLFPETVEEDAAPPPPTTEETIIAVPGAQLHLIDPDRSVDLGAGTLSIVRLRQGDHSVAVLARLIHEKPHHRRGLFRLFSSGRSDAGAEQEPVQWPLARDVAAVKLDPAHYFFSLHVPHTDHPDDKDDADGAEADAEAALSYGLTVVGKGQEEVLAELDRVLEEYTTFSVKQVETAAKEKSEVMDARAVAEITPEEAVGDKKE

SEQ ID NO: 196334 - protein, 469 aa, Zea Mays
MCTRMSFTGSAPESSDPNKQPAKKQTRQWAAWTHQEEENFFNALRQVGKNFDKITHRVQSKNKDQVRHYYYRLVRRMKKLLGPRFSLDAKNSKDTIAAMLRWWSLLEKFSCSASKLHLKPRRFKTFVEALGKQLLKDRNKSRKKHSRVDMCISSPSPVISKAPGDETPPVKFLSIDSQNGSRVASPKGTIFKRIAEPISNKSGTTKGDLSATRTVKQKRKAGGAVASAAYKKWERAAMAGVSLVADAAEELERNTINPGMLCNVDARTLTSSSDRLSTGDGISTNHMKETDSQAPVKLKLQLFPINEATRKALEKDDHNPHLELTLSSRKKISSVLEHLNRKWGNSNIASGELILFPYCANQEDLATYQRWTTRDTVAVADVFLSVNSPSVFRLRYGWFSLVELGAGVSDISLTHFEDCMRPEVIQVKSPSGDKACVQKDVQARTLSFRISRLMCPTLGLAAKSKCRFL

SEQ ID NO: 196335 - protein, 737 aa, Zea Mays
MCTRMSFTGSAPESSDPNKQPAKKQTRQWAAWTHQEEENFFNALRQVGKNFDKITHRVQSKNKDQVRHYYYRLVRRMKKLLGPRFSLDAKNSKDTIAAMLRWWSLLEKFSCSASKLHLKPRRFKTFVEALGKQLLKDRNKSRKKHSRVDMCISSPSPVISKAPGDETPPVKFLSIDSQNGSRVASPKGTIFKRIAEPISNKSGTTKGDLSATRTVKQKRKAGGAVASAAYKKWERAAMAGVSLVADAAEELERNTINPGMLCNVDARTLTSSSDRLSTGDGISTNHMKETDSQAPVKLKLQLFPINEATRKALEKDDHNPHLELTLSSRKKISSVLEHLNRKWGNSNIASGELILFPYCANQEDLATYQRWTTRDTVAVADVFLSVNSPSVFRLRYGWFSLVELGAGVSDISLTHFEDCMRPEVIQVKSPSGDKACVQKDGTLLSNCTHESYPCSSMLLHMTPSSTGKNSELPDQPANVPHSRFGSQKQVQVPVTQAFEDDQGMNCVAISEVEWADTLTDISVEHLLTEASKDLDCVGTSVKDPLFLENPCSYDSFDAVVALHASRYQASEQPAHAPHSNIWGAEETCDEFSFNLSASRKQEGSNTSSSSPDTDNEVHPSNSEGFRGFLQDLTGRETDADNPCNDDAKDEEEFYAKSPPRNDKTNELKDQPLADIYWPDSLGPLDLDIPAVRYQTDDILIGDSQSSWNWNRLMANSLDAFRNLSFFSDKNDSIPSIM

SEQ ID NO: 196336 - protein, 711 aa, Zea Mays
MCTRMSFTGSAPESSDPNKQPAKKQTRQWAAWTHQEEENFFNALRQVGKNFDKITHRVQSKNKDQVRHYYYRLVRRMKKLLGPRFSLDAKNSKDTIAAMLRWWSLLEKFSCSASKLHLKPRRFKTFVEALGKQLLKDRNKSRKKHSRVDMCISSPSPVISKAPGDETPPVKFLSIDSQNGSRVASPKGTIFKRIAEPISNKSGTTKGDLSATRTVKQKRKAGGAVASAAYKKWERAAMAGVSLVADAAEELERNTINPGMLCNVDARTLTSSSDRLSTGDGISTNHMKETDSQAPVKLKLQLFPINEATRKALEKDDHNPHLELTLSSRKKISSVLEHLNRKWGNSNIASGELILFPYCANQEDLATYQRWTTRDTVAVADVFLSVNSPSVFRLRYGWFSLVELGAGVSDISLTHFEDCMRPEVIQVKSPSGDKACVQKDGKNSELPDQPANVPHSRFGSQKQVQVPVTQAFEDDQGMNCVAISEVEWADTLTDISVEHLLTEASKDLDCVGTSVKDPLFLENPCSYDSFDAVVALHASRYQASEQPAHAPHSNIWGAEETCDEFSFNLSASRKQEGSNTSSSSPDTDNEVHPSNSEGFRGFLQDLTGRETDADNPCNDDAKDEEEFYAKSPPRNDKTNELKDQPLADIYWPDSLGPLDLDIPAVRYQTDDILIGDSQSSWNWNRLMANSLDAFRNLSFFSDKNDSIPSIM

SEQ ID NO: 196337 - protein, 393 aa, Zea Mays
MKKLLGPRFSLDAKNSKDTIAAMLRWWSLLEKFSCSASKLHLKPRRFKTFVEALGKQLLKDRNKSRKKHSRVDMCISSPSPVISKAPGDETPPVKFLSIDSQNGSRVASPKGTIFKRIAEPISNKSGTTKGDLSATRTVKQKRKAGGAVASAAYKKWERAAMAGVSLVADAAEELERNTINPGMLCNVDARTLTSSSDRLSTGDGISTNHMKETDSQAPVKLKLQLFPINEATRKALEKDDHNPHLELTLSSRKKISSVLEHLNRKWGNSNIASGELILFPYCANQEDLATYQRWTTRDTVAVADVFLSVNSPSVFRLRYGWFSLVELGAGVSDISLTHFEDCMRPEVIQVKSPSGDKACVQKDVQARTLSFRISRLMCPTLGLAAKSKCRFL

SEQ ID NO: 196338 - protein, 725 aa, Zea Mays
MCTRMSFTGSAPESSDPNKQPVFALCLIHVAKKQTRQWAAWTHQEEENFFNALRQVGKNFDKITHRVQSKNKDQVRHYYYRLVRRMKKLLGPRFSLDAKNSKDTIAAMLRWWSLLEKFSCSASKLHLKPRRFKTFVEALGKQLLKDRNKSRKKHSRVDMCISSPSPVISKAPGDETPPVKFLSIDSQNGSRVASPKGTIFKRIAEPISNKSGTTKGDLSATRTVKQKRKAGGAVASAAYKKWERAAMAGVSLVADAAEELERNTINPGMLCNVDARTLTSSSDRLSTGDGISTNHMKETDSQAPVKLKLQLFPINEATRKALEKDDHNPHLELTLSSRKKISSVLEHLNRKWGNSNIASGELILFPYCANQEDLATYQRWTTRDTVAVADVFLSVNSPSVFRLRYGWFSLVELGAGVSDISLTHFEDCMRPEVIQVKSPSGDKACVQKDGTLLSNCTHESYPCSSMLLHMTPSSTGKNSELPDQPANVPHSRFGSQKQVQVPVTQAFEDDQGMNCVAISEVEWADTLTDISVEHLLTEASKDLDCVGTSVKDPLFLENPCSYDSFDAVVALHASRYQASEQPAHAPHSNIWGAEETCDEFSFNLSASRKQEGSNTSSSSPDTDNEVHPSNSEGFRGFLQDLTGRETDADNPCNDDAKDEEEFYAKSPPRNDKTNELKDQPLADIYWVLDEIIMFFCTGIILAELTFFSFLGSLIHSDHWTWTYRP

SEQ ID NO: 196339 - protein, 656 aa, Zea Mays
MCTRMSFTGSAPESSDPNKQPAKKQTRQWAAWTHQEEENFFNALRQVGKNFDKITHRVQSKNKDQVRHYYYRLVRRMKKLLGPRFSLDAKNSKDTIAAMLRWWSLLEKFSCSASKLHLKPRRFKTFVEALGKQLLKDRNKSRKKHSRVDMCISSPSPVISKAPGDETPPVKFLSIDSQNGSRVASPKGTIFKRIAEPISNKSGTTKGDLSATRTVKQKRKAGGAVASAAYKKWERAAMAGVSLVADAAEELERNTINPGMLCNVDARTLTSSSDRLSTGDGISTNHMKETDSQAPVKLKLQLFPINEATRKALEKDDHNPHLELTLSSRKKISSVLEHLNRKWGNSNIASGELILFPYCANQEDLATYQRWTTRDTVAVADVFLSVNSPSVFRLSSMLLHMTPSSTGKNSELPDQPANVPHSRFGSQKQVQVPVTQAFEDDQGMNCVAISEVEWADTLTDISVEHLLTEASKDLDCVGTSVKDPLFLENPCSYDSFDAVVALHASRYQASEQPAHAPHSNIWGAEETCDEFSFNLSASRKQEGSNTSSSSPDTDNEVHPSNSEGFRGFLQDLTGRETDADNPCNDDAKDEEEFYAKSPPRNDKTNELKDQPLADIYWVLDEIIMFFCTGIILAELTFFSFLGSLIHSDHWTWTYRP

SEQ ID NO: 196340 - protein, 306 aa, Zea Mays
MASPIPREWVGLQQFPPATQTELHELLGKLKEEDVSTLTILVMGKGGVGKSSTVNSIVGERIATVSAFQSEGLRPMMWSRTRAGFTLNIIDTPGLIEGGYINEQAVDIIKRMDTLDGQVIRAITNSFGKDIWRRSLVVLTHAQLSPPDGIEYNDFFTRRSEALLRYIHSGAGIKKREYGDFPLPIALVENSGRCKTNEHGEKILPDGTPWVPKLMKEITVVISNGSKPIHVDQKLIDGPNPNNRWKMFIPIILAVEYFLVVKGIRRAIHADIANGKVDDWEQRYRDLVGSRDPVEQKGSTTRNRKA

SEQ ID NO: 196341 - protein, 321 aa, Zea Mays
MASPIPREWVGLQQFPPATQTELHELLGKLKEEDVSTLTILVMGKGGVGKSSTVNSIVGERIATSEGLRPMMWSRTRAGFTLNIIDTPGLIEGGYINEQAVDIIKRFLLGKTIDVLLYVDRLDAYRMDTLDGQVIRAITNSFGKDIWRRSLVVLTHAQLSPPDGIEYNDFFTRRSEALLRYIHSGAGIKKREYGDFPLPIALVENSGRCKTNEHGEKILPDGTPWVPKLMKEITVVISNGSKPIHVDQKLIDGPNPNNRWKMFIPIILAVEYFLVVKGIRRAIHADIANGKVDDWEQRYRDLVGSRDPVEQKGSTTRNRKA

SEQ ID NO: 196342 - protein, 207 aa, Zea Mays
MGKGDVATRSKSQKSSAIQNEPSTPANPPTAYPDWSQFQAYYNAAGTAPVTPPAFFHSSVAPTHQGHPYMWGPQMMPPYGTPPPYATMYAQGTPYQQAPMPPGSYPYGPYPMPSPNGTIQPPTSGAGGTETDRSKNKRKTPLKRSKGSLGSLDVVAVKNNKSAAKPSVSSSNEGSSQSESGSGSSSEGSSTNSKSVCHSIILLHLAS

SEQ ID NO: 196343 - protein, 189 aa, Zea Mays
MNEPSTPANPPTAYPDWSQFQAYYNAAGTAPVTPPAFFHSSVAPTHQGHPYMWGPQMMPPYGTPPPYATMYAQGTPYQQAPMPPGSYPYGPYPMPSPNGTIQPPTSGAGGTETDRSKNKRKTPLKRSKGSLGSLDVVAVKNNKSAAKPSVSSSNEGSSQSESGSGSSSEGSSTNSKSVCHSIILLHLAS

SEQ ID NO: 196344 - protein, 124 aa, Zea Mays
MGKGDVATRSKSQKSSAIQNEPSTPANPPTAYPDWSQFQAYYNAAGTAPVTPPAFFHSSVAPTHQGHPYMWGPQMMPPYGTPPPYATMYAQGTPYQQAPMPPGSYPYGPYPMPSPNGTIQPPVS

SEQ ID NO: 196345 - protein, 407 aa, Zea Mays
MSSTTTSPPPPAAGDHPRVLLRGFLSRETCKELEFVHRSCGAAGYRPSVISTSLPHLAATGCGHLLLPFVPVRERLRDAVESFFDCHFDLFIEFTGLISWCKGASIGWHSDDNKPYLRQRAFTAVCYLNNHGEDYKGGILQFQDGDPSCIVPVAGDVVIYTADTRNVHCVNEVTEGERLTLTLWFTRDRAYDEDPKLLNFLSQTSLSCEPTEQNSYIPVPASDNMYRFSCDQSGFDIRCARVHILGFSFHSSSGECNISASPAEDDPIELLGKQLRLGRGDDVFEKIFSNSLHALQVVQFYYWKKHELAARREQSVVSSGTVCCPVTHHSKGTELPLPCNHALAQTIFGSYNTEEIVQWNDFALAVAMWEKYSEELKKQLLTFLPYWLSNETIYVVDTSELQRAEPI

SEQ ID NO: 196346 - protein, 330 aa, Zea Mays
MSSTTTSPPPPAAGDHPRVLLRGFLSRETCKELEFVHRSCGAAGYRPSVISTSLPHLAATGCGHLLLPFVPVRERLRDAVESFFDCHFDLFIEFTGLISWCKGASIGWHSDDNKPYLRQRAFTAVCYLNNHGEDYKGGILQFQDGDPSCIVPVAGSGFDIRCARVHILGFSFHSSSGECNISASPAEDDPIELLGKQLRLGRGDDVFEKIFSNSLHALQVVQFYYWKKHELAARREQSVVSSGTVCCPVTHHSKGTELPLPCNHALAQTIFGSYNTEEIVQWNDFALAVAMWEKYSEELKKQLLTFLPYWLSNETIYVVDTSELQRAEPI

SEQ ID NO: 196347 - protein, 150 aa, Zea Mays
MVSLPVQSIPSFDVLSLTQVVRCSAAAATVLGARSCCLLVLCARVLDGRCPLRWELATSQRVTGRRPPARHRARLGAPSSPWVLHSGIRRRRRPPCGPACAVQCRPSPAVGSTPCPPQCRAGIHLLLPPPVCHSAAPASRPWSKAATATY

SEQ ID NO: 196348 - protein, 913 aa, Zea Mays
MQREPRCTSWFCVADTAFKCEVFEDAVVIDWHQCLSEPDESYDHFEWAIGTDEGESDIFGFENVGMNAQVHRNGIDLDQFEDYFITLRAWRLDGQCTELCVKAHALKGQSCAHHRLVVGDGFVTMTKGESIRNFFEHAEEAEEEDEDDAMDRDGNDFDGDDAHSQKHAKSPELAREFLLDAAAVIFKEQIEKAFREGTAQQNARSVFVTLALKLLEQRVHVACKEIITLEKQNKLLEEEEKEKREEHERGMKRRTREREKKNRRKERLKEKDHSKGKRLVESKSPDNISSSAPSNSTASINDYSTNTLDSRDSGTEEEYSAEGVNLCTPDSCVNQSSCKKINGENSVHCNAVTEFSPMDNSDISTSDQPKSLRRSPRSRDYFPQDQSCWYDDCGDESGRIGELRWKSREKTRGTDRSCNTASTSNNKTRERHSYNFCSCGHPEDYGVMDSCFLPTVRSVREMKIARKSGVEKPKVQYNRCYTLDSFIVPKGNHAGCTQKNAIPKQVWEPMDARRKTNLHNTVHDSGSINDVDPLKHVVFDNSGSHKFSVRCESQPQASESSRDVCNSDQRCANGGRNQTTSCASTLMVNKQNCYSENDEGSRHDVELMTNSASSDSTSSCMSQGDRESSSSSTTSSSAQNPESSSESEESPERINSTVGTPSSRAASRSLLEACAGNGFREYQPKTTRPAHNDMFGYNVSPVQDQLLHYQITHPPQQPPITMGFHDRSWAAPTNGNFQYARPSHLYSSPLVFGVPGNHFIDYPYMAPAFSHIPPEPIHKAAGSFRAVPLSLPFQNGHRQVAEHTQRDMNLERHPSKLTMLTGKDPPEDKNKSGLKYLPEDKNKSWEADASFSLFQFNLPIASPVTPSSKDKSGKLAARTPLVEVQPQLCLREQADVKQYNLFSSKDNGIFSFM

SEQ ID NO: 196349 - protein, 1154 aa, Zea Mays
MPGVASAAGSGIWSRRRDEITFDRLQKQLSSQLRKWLLFGCELIFFQFWNDLLPQARQELLKLDKQTLIEQARKNFYCSRCNGLLLESFAQIVIYGKSLQQEASDIGHLRTAIELRITHGEQDGAQDPSIHPWGGLSTTKDGFLTLLDCFIKAKSLRVLQNVFDNARAREREREMLYPDACGAGGRGWISQGMANYRGHGIREMCALHTAHLSCTTLVDFWSALGEGTRSSLLRMKEEDFIEKLMYRFDSKRFCRECRRNVIREFKDLKELKRMQREPRCTSWFCVADTAFKCEVFEDAVVIDWHQCLSEPDESYDHFEWAIGTDEGESDIFGFENVGMNAQVHRNGIDLDQFEDYFITLRAWRLDGQCTELCVKAHALKGQSCAHHRLVVGDGFVTMTKGESIRNFFEHAEEAEEEDEDDAMDRDGNDFDGDDAHSQKHAKSPELAREFLLDAAAVIFKEQIEKAFREGTAQQNARSVFVTLALKLLEQRVHVACKEIITLEKQNKLLEEEEKEKREEHERGMKRRTREREKKNRRKERLKEKDHSKGKRLVESKSPDNISSSAPSNSTASINDYSTNTLDSRDSGTEEEYSAEGVNLCTPDSCVNQSSCKKINGENSVHCNAVTEFSPMDNSDISTSDQPKSLRRSPRSRDYFPQDQSCWYDDCGDESGRIGELRWKSREKTRGTDRSCNTASTSNNKTRERHSYNFCSCGHPEDYGVMDSCFLPTVRSVREMKIARKSGVEKPKVQYNRCYTLDSFIVPKGNHAGCTQKNAIPKQVWEPMDARRKTNLHNTVHDSGSINDVDPLKHVVFDNSGSHKFSVRCESQPQASESSRDVCNSDQRCANGGRNQTTSCASTLMVNKQNCYSENDEGSRHDVELMTNSASSDSTSSCMSQGDRESSSSSTTSSSAQNPESSSESEESPERINSTVGTPSSRAASRSLLEACAGNGFREYQPKTTRPAHNDMFGYNVSPVQDQLLHYQITHPPQQPPITMGFHDRSWAAPTNGNFHHIPPEPIHKAAGSFRAVPLSLPFQNGHRQVAEHTQRDMNLERHPSKLTMLTGKDPPEDKNKSGLKYLPEDKNKSWEADASFSLFQFNLPIASPVTPSSKDKSGKLAARTPLVEVQPQLCLREQADVKQYNLFSSKDNGIFSFM

SEQ ID NO: 196350 - protein, 732 aa, Zea Mays
MDRDGNDFDGDDAHSQKHAKSPELAREFLLDAAAVIFKEQIEKAFREGTAQQNARSVFVTLALKLLEQRVHVACKEIITLEKQNKLLEEEEKEKREEHERGMKRRTREREKKNRRKERLKEKDHSKGKRLVESKSPDNISSSAPSNSTASINDYSTNTLDSRDSGTEEEYSAEGVNLCTPDSCVNQSSCKKINGENSVHCNAVTEFSPMDNSDISTSDQPKSLRRSPRSRDYFPQDQSCWYDDCGDESGRIGELRWKSREKTRGTDRSCNTASTSNNKTRERHSYNFCSCGHPEDYGVMDSCFLPTVRSVREMKIARKSGVEKPKVQYNRCYTLDSFIVPKGNHAGCTQKNAIPKQVWEPMDARRKTNLHNTVHDSGSINDVDPLKHVVFDNSGSHKFSVRCESQPQASESSRDVCNSDQRCANGGRNQTTSCASTLMVNKQNCYSENDEGSRHDVELMTNSASSDSTSSCMSQGDRESSSSSTTSSSAQNPESSSESEESPERINSTVGTPSSRAASRSLLEACAGNGFREYQPKTTRPAHNDMFGYNVSPVQDQLLHYQITHPPQQPPITMGFHDRSWAAPTNGNFHHIPPEPIHKAAGSFRAVPLSLPFQNGHRQVAEHTQRDMNLERHPSKLTMLTGKDPPEDKNKSGLKYLPEDKNKSWEADASFSLFQFNLPIASPVTPSSKDKSGKLAARTPLVEVQPQLCLREQADVKQYNLFSSKDNGIFSFM

SEQ ID NO: 196351 - protein, 980 aa, Zea Mays
MLYPDACGAGGRGWISQGMANYRGHGIREMCALHTAHLSCTTLVDFWSALGEGTRSSLLRMKEEDFIEKLMYRFDSKRFCRECRRNVIREFKDLKELKRMQREPRCTSWFCVADTAFKCEVFEDAVVIDWHQCLSEPDESYDHFEWAIGTDEGESDIFGFENVGMNAQVHRNGIDLDQFEDYFITLRAWRLDGQCTELCVKAHALKGQSCAHHRLVVGDGFVTMTKGESIRNFFEHAEEAEEEDEDDAMDRDGNDFDGDDAHSQKHAKSPELAREFLLDAAAVIFKEQIEKAFREGTAQQNARSVFVTLALKLLEQRVHVACKEIITLEKQNKLLEEEEKEKREEHERGMKRRTREREKKNRRKERLKEKDHSKGKRLVESKSPDNISSSAPSNSTASINDYSTNTLDSRDSGTEEEYSAEGVNLCTPDSCVNQSSCKKINGENSVHCNAVTEFSPMDNSDISTSDQPKSLRRSPRSRDYFPQDQSCWYDDCGDESGRIGELRWKSREKTRGTDRSCNTASTSNNKTRERHSYNFCSCGHPEDYGVMDSCFLPTVRSVREMKIARKSGVEKPKVQYNRCYTLDSFIVPKGNHAGCTQKNAIPKQVWEPMDARRKTNLHNTVHDSGSINDVDPLKHVVFDNSGSHKFSVRCESQPQASESSRDVCNSDQRCANGGRNQTTSCASTLMVNKQNCYSENDEGSRHDVELMTNSASSDSTSSCMSQGDRESSSSSTTSSSAQNPESSSESEESPERINSTVGTPSSRAASRSLLEACAGNGFREYQPKTTRPAHNDMFGYNVSPVQDQLLHYQITHPPQQPPITMGFHDRSWAAPTNGNFHHIPPEPIHKAAGSFRAVPLSLPFQNGHRQVAEHTQRDMNLERHPSKLTMLTGKDPPEDKNKSGLKYLPEDKNKSWEADASFSLFQFNLPIASPVTPSSKDKSGKLAARTPLVEVQPQLCLREQADVKQYNLFSSKDNGIFSFM

SEQ ID NO: 196352 - protein, 1012 aa, Zea Mays
MLYPDACGAGGRGWISQGMANYRGHGIREMCALHTAHLSCTTLVDFWSALGEGTRSSLLRMKEEDFIEKLMYRFDSKRFCRECRRNVIREFKDLKELKRMQREPRCTSWFCVADTAFKCEVFEDAVVIDWHQCLSEPDESYDHFEWAIGTDEGESDIFGFENVGMNAQVHRNGIDLDQFEDYFITLRAWRLDGQCTELCVKAHALKGQSCAHHRLVVGDGFVTMTKGESIRNFFEHAEEAEEEDEDDAMDRDGNDFDGDDAHSQKHAKSPELAREFLLDAAAVIFKEQIEKAFREGTAQQNARSVFVTLALKLLEQRVHVACKEIITLEKQNKLLEEEEKEKREEHERGMKRRTREREKKNRRKERLKEKDHSKGKRLVESKSPDNISSSAPSNSTASINDYSTNTLDSRDSGTEEEYSAEGVNLCTPDSCVNQSSCKKINGENSVHCNAVTEFSPMDNSDISTSDQPKSLRRSPRSRDYFPQDQSCWYDDCGDESGRIGELRWKSREKTRGTDRSCNTASTSNNKTRERHSYNFCSCGHPEDYGVMDSCFLPTVRSVREMKIARKSGVEKPKVQYNRCYTLDSFIVPKGNHAGCTQKNAIPKQVWEPMDARRKTNLHNTVHDSGSINDVDPLKHVVFDNSGSHKFSVRCESQPQASESSRDVCNSDQRCANGGRNQTTSCASTLMVNKQNCYSENDEGSRHDVELMTNSASSDSTSSCMSQGDRESSSSSTTSSSAQNPESSSESEESPERINSTVGTPSSRAASRSLLEACAGNGFREYQPKTTRPAHNDMFGYNVSPVQDQLLHYQITHPPQQPPITMGFHDRSWAAPTNGNFQYARPSHLYSSPLVFGVPGNHFIDYPYMAPAFSHIPPEPIHKAAGSFRAVPLSLPFQNGHRQVAEHTQRDMNLERHPSKLTMLTGKDPPEDKNKSGLKYLPEDKNKSWEADASFSLFQFNLPIASPVTPSSKDKSGKLAARTPLVEVQPQLCLREQADVKQYNLFSSKDNGIFSFM

SEQ ID NO: 196353 - protein, 637 aa, Zea Mays
MDRDGNDFDGDDAHSQKHAKSPELAREFLLDAAAVIFKEQIEKAFREGTAQQNARSVFVTLALKLLEQRVHVACKEIITLEKQNKLLEEEEKEKREEHERGMKRRTREREKKNRRKERLKEKDHSKGKRLVESKSPDNISSSAPSNSTASINDYSTNTLDSRDSGTEEEYSAEGVNLCTPDSCVNQSSCKKINGENSVHCNAVTEFSPMDNSDISTSDQPKSLRRSPRSRDYFPQDQSCWYDDCGDESGRIGELRWKSREKTRGTDRSCNTASTSNNKTRERHSYNFCSCGHPEDYGVMDSCFLPTVRSVREMKIARKSGVEKPKVQYNRCYTLDSFIVPKGNHAGCTQKNAIPKQVWEPMDARRKTNLHNTVHDSGSINDVDPLKHVVFDNSGSHKFSVRCESQPQASESSRDVCNSDQRCANGGRNQTTSCASTLMVNKQNCYSENDEGSRHDVELMTNSASSDSTSSCMSQGDRESSSSSTTSSSAQNPESSSESEESPERINSTVGTPSSRAASRSLLEACAGNGFREYQPKTTRPAHNDMFGYNVSPVQDQLLHYQITHPPQQPPITMGFHDRSWAAPTNGNFQYARPSHLYSSPLVFGVPGNHFIDYPYMAPAFSHIPPEPIHKAAGTLRS

SEQ ID NO: 196354 - protein, 1171 aa, Zea Mays
MPGVASAAGSGIWSRRRDEITFDRLQKFWNDLLPQARQELLKLDKQTLIEQARKNFYCSRCNGLLLESFAQIVIYGKSLQQEASDIGHLRTAIELRITHGEQDGAQDPSIHPWGGLSTTKDGFLTLLDCFIKAKSLRVLQNVFDNARAREREREMLYPDACGAGGRGWISQGMANYRGHGIREMCALHTAHLSCTTLVDFWSALGEGTRSSLLRMKEEDFIEKLMYRFDSKRFCRECRRNVIREFKDLKELKRMQREPRCTSWFCVADTAFKCEVFEDAVVIDWHQCLSEPDESYDHFEWAIGTDEGESDIFGFENVGMNAQVHRNGIDLDQFEDYFITLRAWRLDGQCTELCVKAHALKGQSCAHHRLVVGDGFVTMTKGESIRNFFEHAEEAEEEDEDDAMDRDGNDFDGDDAHSQKHAKSPELAREFLLDAAAVIFKEQIEKAFREGTAQQNARSVFVTLALKLLEQRVHVACKEIITLEKQLNLLQNKLLEEEEKEKREEHERGMKRRTREREKKNRRKERLKEKDHSKGKRLVESKSPDNISSSAPSNSTASINDYSTNTLDSRDSGTEEEYSAEGVNLCTPDSCVNQSSCKKINGENSVHCNAVTEFSPMDNSDISTSDQPKSLRRSPRSRDYFPQDQSCWYDDCGDESGRIGELRWKSREKTRGTDRSCNTASTSNNKTRERHSYNFCSCGHPEDYGVMDSCFLPTVRSVREMKIARKSGVEKPKVQYNRCYTLDSFIVPKGNHAGCTQKNAIPKQVWEPMDARRKTNLHNTVHDSGSINDVDPLKHVVFDNSGSHKFSVRCESQPQASESSRDVCNSDQRCANGGRNQTTSCASTLMVNKQNCYSENDEGSRHDVELMTNSASSDSTSSCMSQGDRESSSSSTTSSSAQNPESSSESEESPERINSTVGTPSSRAASRSLLEACAGNGFREYQPKTTRPAHNDMFGYNVSPVQDQLLHYQITHPPQQPPITMGFHDRSWAAPTNGNFQYARPSHLYSSPLVFGVPGNHFIDYPYMAPAFSHIPPEPIHKAAGSFRAVPLSLPFQNGHRQVAEHTQRDMNLERHPSKLTMLTGKDPPEDKNKSGLKYLPEDKNKSWEADASFSLFQFNLPIASPVTPSSKDKSGKLAARTPLVEVQPQLCLREQADVKQYNLFSSKDNGIFSFM

SEQ ID NO: 196355 - protein, 1011 aa, Zea Mays
MPGVASAAGSGIWSRRRDEITFDRLQKFWNDLLPQARQELLKLDKQTLIEQARKNFYCSRCNGLLLESFAQIVIYGKSLQQEASDIGHLRTAIELRITHGEQDGAQDPSIHPWGGLSTTKDGFLTLLDCFIKAKSLRVLQNVFDNARAREREREMLYPDACGAGGRGWISQGMANYRGHGIREMCALHTAHLSCTTLVDFWSALGEGTRSSLLRMKEEDFIEKLMYRFDSKRFCRECRRNVIREFKDLKELKRMQREPRCTSWFCVADTAFKCEVFEDAVVIDWHQCLSEPDESYDHFEWAIGTDEGESDIFGFENVGMNAQVHRNGIDLDQFEDYFITLRAWRLDGQCTELCVKAHALKGQSCAHHRLVEDDAMDRDGNDFDGDDAHSQKHAKSPELAREFLLDAAAVIFKEQIEKAFREGTAQQNARSVFVTLALKLLEQRVHVACKEIITLEKQNKLLEEEEKEKREEHERGMKRRTREREKKNRRKERLKEKDHSKGKRLVESKSPDNISSSAPSNSTASINDYSTNTLDSRDSGTEEEYSAEGVNLCTPDSCVNQSSCKKINGENSVHCNAVTEFSPMDNSDISTSDQPKSLRRSPRSRDYFPQDQSCWYDDCGDESGRIGELRWKSREKTRGTDRSCNTASTSNNKTRERHSYNFCSCGHPEDYGVMDSCFLPTVRSVREMKIARKSGVEKPKVQYNRCYTLDSFIVPKGNHAGCTQKNAIPKQVWEPMDARRKTNLHNTVHDSGSINDVDPLKHVVFDNSGSHKFSVRCESQPQASESSRDVCNSDQRCANGGRNQTTSCASTLMVNKQNCYSENDEGSRHDVELMTNSASSDSTSSCMSQGDRESSSSSTTSSSAQNPESSSESEESPERINSTVGTPSSRAASRSLLEACAGNGFREYQPKTTRPAHNDMFGYNVSPVQDQLLHYQITHPPQQPPITMGFHDRSWAAPTNGNFQYARPSHLYSSPLVFGVPGNHFIDYPYMAPAFSHIPPEPIHKAAGTLRS

SEQ ID NO: 196356 - protein, 952 aa, Zea Mays
MLYPDACGAGGRGWISQGMANYRGHGIREMCALHTAHLSCTTLVDFWSALGEGTRSSLLRMKEEDFIEKLMYRFDSKRFCRECRRNVIREFKDLKELKRMQREPRCTSWFCVADTAFKCEVFEDAVVIDWHQCLSEPDESYDHFEWAIGTDEGESDIFGFENVGMNAQVHRNGIDLDQFEDYFITLRAWRLDGQCTELCVKAHALKGQSCAHHRLVEDDAMDRDGNDFDGDDAHSQKHAKSPELAREFLLDAAAVIFKEQIEKAFREGTAQQNARSVFVTLALKLLEQRVHVACKEIITLEKQNKLLEEEEKEKREEHERGMKRRTREREKKNRRKERLKEKDHSKGKRLVESKSPDNISSSAPSNSTASINDYSTNTLDSRDSGTEEEYSAEGVNLCTPDSCVNQSSCKKINGENSVHCNAVTEFSPMDNSDISTSDQPKSLRRSPRSRDYFPQDQSCWYDDCGDESGRIGELRWKSREKTRGTDRSCNTASTSNNKTRERHSYNFCSCGHPEDYGVMDSCFLPTVRSVREMKIARKSGVEKPKVQYNRCYTLDSFIVPKGNHAGCTQKNAIPKQVWEPMDARRKTNLHNTVHDSGSINDVDPLKHVVFDNSGSHKFSVRCESQPQASESSRDVCNSDQRCANGGRNQTTSCASTLMVNKQNCYSENDEGSRHDVELMTNSASSDSTSSCMSQGDRESSSSSTTSSSAQNPESSSESEESPERINSTVGTPSSRAASRSLLEACAGNGFREYQPKTTRPAHNDMFGYNVSPVQDQLLHYQITHPPQQPPITMGFHDRSWAAPTNGNFHHIPPEPIHKAAGSFRAVPLSLPFQNGHRQVAEHTQRDMNLERHPSKLTMLTGKDPPEDKNKSGLKYLPEDKNKSWEADASFSLFQFNLPIASPVTPSSKDKSGKLAARTPLVEVQPQLCLREQADVKQYNLFSSKDNGIFSFM

SEQ ID NO: 196357 - protein, 240 aa, Zea Mays
MTFRHMLYPAYKSNRTPTPDTVVQGMQYLKASIKAMSIKVIEVPGVEADDVIGTLAINSVSAGYKVRIVSPDKDFFQILSPSLRLLRIAPRGSGMVSFGVEDFVKRYGPLKPSQFVDVVALSGDKADNIPGVEGIGDINAVKLISKFGSLDNLLKSVDEVEDERIKQALISHSEQAILCKNLATLRSDLPHYMVPFKTADLVFKKPQDDGEKFIKLLRALEAYAEGILSRLRVWVQSLVS

SEQ ID NO: 196358 - protein, 313 aa, Zea Mays
MACCFVRVAAAPRLLIYRAAAPRQLPSPLNVFRKGFSEQSVLPVTDSIECFQGPSVPNTPRIPLYDDSVSSSILDTLSNPTGGVPHADPSKSRIMLVDGTSMMYRSYYKILAQLQHGQLEHADGNGDWVLTIFKALSLLLDMLEFIPSHAAVVFDHDGVPYGHYTAMPSKECHMAKGMTFRHMLYPAYKSNRTPTPDTVVQGMQYLKASIKAMSIKVIEVPGVEADDVIGTLAINSVSAGYKVRIVSPDKDFFQILSPSLRLLRIAPRGSGMVSFGVEDFVKRYGPLKPSQFVDVVALSGDKADNIPVKKNYV

SEQ ID NO: 196359 - protein, 110 aa, Zea Mays
MIRLMAQRDATKKAARTVPGMEIVTLFVPSHSVFAHRQPTPKRSRLRGWIPSFRLLRSREPRQGWIPSFRLLRSREPRQSELNKRAPIMPFDGSYPPYCAANITSRYFLL

SEQ ID NO: 196360 - protein, 105 aa, Zea Mays
MVYKHLATLYFVFVFDSSENELAMLDLVQVFVETLDRCFKNVCELDIVFNFNKLHTILDEMISGGQVIETSSEQIMKSVEEIERLEKQSSTTSFIPKSITERFTR

SEQ ID NO: 196361 - protein, 109 aa, Zea Mays
MGTKMVYKHLATLYFVFVFDSSENELAMLDLVQVFVETLDRCFKNVCELDIVFNFNKLHTILDEMISGGQVIETSSEQIMKSVEEIERLEKQSSTTSFIPKSITERFTR

SEQ ID NO: 196362 - protein, 103 aa, Zea Mays
MASGGGSKQLKASLLMVVAALLLLICTCTTRGQAARPEPGSEGHTPQQLKSGSSVAVVEMRREDPDQAARECEDDDGDDEQECLMRRTLLAHTDYIYTQGKHN

SEQ ID NO: 196363 - protein, 117 aa, Zea Mays
MDWSSFTKGYFLNRDTLVGVLLLIDASIPPQKIDLDCANWLGRNNIGLTFVFTKCDKVKKGKGGRPDENIKEFHETISGLYPDPPPWIMTSSVTGLGRDGLLLHMSQLRNYWDNEAV

SEQ ID NO: 196364 - protein, 252 aa, Zea Mays
MEPGVVSLADILGTRVADHVPQTPNKISEDMIRCIAAIYIRLRDVPSAAAQHAFFPSPCSSFSSASGLSSKYTADVWSWSPRCRRESFTEAWQVQDNELGLGGGEARDSGLQYDSVIEVSALCKGDQRSADVKDMLRKYMSLVQLLESVDLGGMKNEEKLAFWINVHNAMMMHAHIEYGIPQSNSKRILLTKVSYIVSGQRVNAELIEYQILCCRAHSSGQVCSFRLLPPSPSCMMFILTPGQSIHAVISSE

SEQ ID NO: 196365 - protein, 603 aa, Zea Mays
MDSAADSSSPRCHHGQYRQDAGELEDQTSTSKMPSSASELPCSLKREVRVLEKRLDDQFVMRRALEKALGYKPCAVHASSVNCIPEPTEELIKEIAVLELEVICLEKHLLTLYRKAFEQQLSPVNSACDAENNKQPARSFSGILSEASVLSFSTPRKHQPVQSSRMVLARKSTPTASTSEASSEKINIGRSHSSLLHRSVRVSPSANNLARALKPCHTSPLSFVEEGKCMEPGVVSLADILGTRVADHVPQTPNKISEDMIRCIAAIYIRLRDVPSAAAQHAFFPSPCSSFSSASGLSSKYTADVWSWSPRCRRESFTEAWQVQDNELGLGGGEARDSGLQYDSVIEVSALCKGDQRSADVKDMLRKYMSLVQLLESVDLGGMKNEEKLAFWINVHNAMMMHAHIEYGIPQSNSKRILLTKVSYIVSGQRVNAELIEYQILCCRAHSSGQWLRLLLHPKWKSGRDRDEELQGFAVDRPEPLVHFALSSGAALQPQEPVPAAGGGEGGAHPRQRRRRRARAGAAQDHPPQGPGAVREGRRAGCAGGGGRGRVPPARRPPGRRAPEPAGRAGARRRGVEAPQPGVPVPAGQGAGRRVARVRAAAT

SEQ ID NO: 196366 - protein, 110 aa, Zea Mays
MALAEADDGAVVFGEEQEALVLKSWAVMKKDAANLGLRFFLKVFEIAPSAKQMFSFLRDSDVPLEKNPKLKTHAMSVFVMTCEAAAQLRKAGKVTVRETTLKRLGATHLR

SEQ ID NO: 196367 - protein, 462 aa, Zea Mays
MPPTMLAPVPTRPRSNPFRRRRGAAPLLLDQTSAKRPAESSTSASSCFYSEVISNSSTSLAPYQRLEKRHRRQDTDAGEARPAGSECSEVIGGARVRPAEVEVSESSCPVSVLESDLACPKQLADDAEAIEKSSACDELTPSSEPDEEEVLSDPSHSGYSPSPLISSPLTEDDSDDAPSATFSLFLDFAKQFVPCLHPKPCTVTSSTLDLLTGRRFEDLDDEESYERFRRRERREAVARDFTEVCSSTSIPDSYRPLVVEQRVIMVNWIIQHSRLMKLQPVTMFMGIGLMDRFLTQGYMKGLRNLQLLGIACITLATRIEENQSYNCVLRKTFQVGINIYSQSEVVAMEWLVQEVLNFKCFVTTTHHFLWFYLKAANADDRVADLANYLAFISLRNHEQLSFWPSTVAAAVVVLACLATNKESSCHLVTETHIRTQDDDLPECLMVHILLFFSSFLGIHWWA

SEQ ID NO: 196368 - protein, 184 aa, Zea Mays
MKLQPVTMFMGIGLMDRFLTQGYMKGLRNLQLLGIACITLATRIEENQSYNCVLRKTFQVGINIYSQSEVVAMEWLVQEVLNFKCFVTTTHHFLWFYLKAANADDRVADLANYLAFISLRNHEQLSFWPSTVAAAVVVLACLATNKESSCHLVTEVNTQTHIRTQDDDLPECLMSLEWLIKYVS

SEQ ID NO: 196369 - protein, 62 aa, Zea Mays
MLCLLKIYLKYVEITTKSTKFFIICLKHVEIATKSSECCIIASQINGVFKEWYDMCRNCYYN

SEQ ID NO: 196370 - protein, 277 aa, Zea Mays
MKANVAADDPGAVLRVFRQVSVTGTFLVNKEHVESHRWSCMFGDVEVPAEVLTDGTLRCYAPAHQSGRVPFYVTCSNMVACSEVREFEYRDSEAHYMETSRSQANGVNEMHLHIRLEKLLTLGPDDHQMLAINSLMLDGKWSNQESSVKEVVSTARVQSLKKLVKEKLHQWLICKVNDDGKGPNVLCKEGQGVIHLVAALGYDWAIRPIIIAGVNVNFRDAHGWTTLHWVASLGRERTVSVLIANGHKIPMRQWRTATGAQRHRASCEPMVRCVVSI

SEQ ID NO: 196371 - protein, 86 aa, Zea Mays
MGTPTLPHARCSKKYSSWKLASRRGLRAVATIFNNGWSNEVMKKVEDLSLEMARVGKFLEREFRPLVFNQSGIFGPYPSASARPPA

SEQ ID NO: 196372 - protein, 179 aa, Zea Mays
MAEILVRRAGSTDEFTRLTSITWINEFVKLGGEQLVPYYADILGAVLPCISDEEEKIRVVARETNEELRAIKADPAEGFDIGAILSIAKRELNSEHEATRIEALHWFFTLLDRYCAEFLAYLNDIFDPLLNALSDPSDAVVLLVLEVHARIAEESHHFHHLVSYLIRTFHNNHFVLEKC

SEQ ID NO: 196373 - protein, 181 aa, Zea Mays
MAADALSIIPGAVLRNLSDKLYEKRKNAALEIEGIVKQLATFGEHEKISAVISLLTNDFTYSPQANHRKGGLIGLAAVTVGLTSEAAQHLEQIVPPVLTSFLDQDSRVRYYACEALYNIAKVVRGDFIIYFNKIFDALCKLSADSDANVQSAAHLLDKLVKDIVTESDQFRYAVYYLPFPY

SEQ ID NO: 196374 - protein, 682 aa, Zea Mays
MAADALSIIPGAVLRNLSDKLYEKRKNAALEIEGIVKQLATFGEHEKISAVISLLTNDFTYSPQANHRKGGLIGLAAVTVGLTSEAAQHLEQIVPPVLTSFLDQDSRVRYYACEALYNIAKVVRGDFIIYFNKIFDALCKLSADSDANVQSAAHLLDKLVKDIVTESDQFSIEEFIPLLRERMNVLNPYVRQFLVGWITVLDSVPDIDMLGFLPDFLDGLFNMLSDSSHEIRQQADAALSEFLQEIKNSPINEFVKLGGEQLVPYYADILGAVLPCISDEEEKIRVVARETNEELRAIKADPAEGFDIGAILSIAKRELNSEHEATRIEALHWFFTLLDRYCAEFLAYLNDIFDPLLNALSDPSDAVVLLVLEVHARIAEESHHFHHLVSYLIRTFHNNHFVLEKRGALIVRRLCVLLGAEKVYREFSTILESEVDLDFASVMVQVLNLILLTSTELGELRSPLKKSLVDSCGKDLFQSLYASWRHSPMATISLCLLAQAYNHASCVIQSLGEEDINVNFLVQLDKLIRLLETPVFAYLRLQLLEPGKHTWLLKTLYGLLMLLPQQSAAFKILRTRLKTVPFSENLKRTSSANPYSQILQVTEDGNRNQDMQNYSAINFPFLLQQFENMQLQHRNHLKDQLQSRKSASTLTLSQEIQRYEEAHSSSLSEINRPPSRTSKGIL

SEQ ID NO: 196375 - protein, 660 aa, Zea Mays
MAADALSIIPGAVLRNLSDKLYEKRKNAALEIEGIVKQLATFGEHEKISAVISLLTNDFTYSPQANHRKGGLIGLAAVTVGLTSEAAQHLEQIVPPVLTSFLDQDSRVRYYACEALYNIAKVVRGDFIIYFNKIFDALCKLSADSDANVQSAAHLLDKLVKDIVTESDQFSIEEFIPLLRERMNVLNPYVRQFLVGWITVLDSVPDIDMLGFLPDFLDGLFNMLSDSSHEIRQQADAALSEFLQEIKNSPINEFVKLGGEQLVPYYADILGAVLPCISDEEEKIRVVARETNEELRAIKADPAEGFDIGAILSIAKRELNSEHEATRIEALHWFFTLLDRYCAEVVLLVLEVHARIAEESHHFHHLVSYLIRTFHNNHFVLEKRGALIVRRLCVLLGAEKVYREFSTILESEVDLDFASVMVQVLNLILLTSTELGELRSPLKKSLVDSCGKDLFQSLYASWRHSPMATISLCLLAQAYNHASCVIQSLGEEDINVNFLVQLDKLIRLLETPVFAYLRLQLLEPGKHTWLLKTLYGLLMLLPQQSAAFKILRTRLKTVPFSENLKRTSSANPYSQILQVTEDGNRNQDMQNYSAINFPFLLQQFENMQLQHRNHLKDQLQSRKSASTLTLSQEIQRYEEAHSSSLSEINRPPSRTSKGIL

SEQ ID NO: 196376 - protein, 357 aa, Zea Mays
MAEILVRRAGSTDEFTRLTSITWINEFVKLGGEQLVPYYADILGAVLPCISDEEEKIRVVARETNEELRAIKADPAEGFDIGAILSIAKRELNSEHEATRIEALHWFFTLLDRYCAEFLAYLNDIFDPLLNALSDPSDAVVLLVLEVHARIAEESHHFHHLVSYLIRTFHNNHFVLEKRGALIVRRLCVLLGAEKVYREFSTILESEVDLDFASVMVQVLNLILLTSTELGELRSPLKKSLVDSCGKDLFQSLYASWRHSPMATISLCLLAQAYNHASCVIQSLGEEDINVNFLVQLDKLIRLLETPVFAYLRLQVTWSDNPFLQIYLSVSQAHLNSETWRVLPGFFNLISSATLMA

SEQ ID NO: 196377 - protein, 584 aa, Zea Mays
MAADALSIIPGAVLRNLSDKLYEKRKNAALEIEGIVKQLATFGEHEKISAVISLLTNDFTYSPQANHRKGGLIGLAAVTVGLTSEAAQHLEQIVPPVLTSFLDQDSRVRYYACEALYNIAKVVRGDFIIYFNKIFDALCKLSADSDANVQSAAHLLDKLVKDIVTESDQFSIEEFIPLLRERMNVLNPYVRQFLVGWITVLDSVPDIDMLGFLPDFLDGLFNMLSDSSHEIRQQADAALSEFLQEIKNSPINEFVKLGGEQLVPYYADILGAVLPCISDEEEKIRVVARETNEELRAIKADPAEGFDIGAILSIAKRELNSEHEATRIEALHWFFTLLDRYCAEFLAYLNDIFDPLLNALSDPSDAVVLLVLEVHARIAEESHHFHHLVSYLIRTFHNNHFVLEKRGALIVRRLCVLLGAEKVYREFSTILESEVDLDFASVMVQVLNLILLTSTELGELRSPLKKSLVDSCGKDLFQSLYASWRHSPMATISLCLLAQAYNHASCVIQSLGEEDINVNFLVQLDKLIRLLETPVFAYLRLQVTWSDNPFLQIYLSVSQAHLNSETWRVLPGFFNLISSATLMA

SEQ ID NO: 196378 - protein, 688 aa, Zea Mays
MAADALSIIPGAVLRNLSDKLYEKRKNAALEIEGIVKQLATFGEHEKISAVISLLTNDFTYSPQANHRKGGLIGLAAVTVGLTSEAAQHLEQIVPPVLTSFLDQDSRVRYYACEALYNIAKVVRGDFIIYFNKIFDALCKLSADSDANVQSAAHLLDKLVKDIVTESDQFSIEEFIPLLRERMNVLNPYVRQFLVGWITVLDSVPDIDMLGFLPDFLDGLFNMLSDSSHEIRQQADAALSEFLQEIKNSPNVDYGRMAEILVRRAGSTDEFTRLTSITWINEFVKLGGEQLVPYYADILGAVLPCISDEEEKIRVVARETNEELRAIKADPAEGFDIGAILSIAKRELNSEHEATRIEALHWFFTLLDRYCAEFLAYLNDIFDPLLNALSDPSDAVVLLVLEVHARIAEESHHFHHLVSYLIRTFHNNHFVLEKRGALIVRRLCVLLGAEKVYREFSTILESEVDLDFASVMVQVLNLILLTSTELGELRSPLKKSLVDSCGKDLFQSLYASWRHSPMATISLCLLAQAYNHASCVIQSLGEEDINVNFLVQLDKLIRLLETPVFAYLRLQLLEPGKHTWLLKTLYGLLMLLPQQSAAFKILRTRLKTVPFSENLKRTSSANPYSQILQVTEDGNRNQDMQNYSAINFPFLLQQFENMQLQHRNHLKDQLQSRDTKIRRSAFLIAVRD

SEQ ID NO: 196379 - protein, 406 aa, Zea Mays
MAADALSIIPGAVLRNLSDKLYEKRKNAALEIEGIVKQLATFGEHEKISAVISLLTNDFTYSPQANHRKGGLIGLAAVTVGLTSEAAQHLEQIVPPVLTSFLDQDSRVRYYACEALYNIAKVVRGDFIIYFNKIFDALCKLSADSDANVQSAAHLLDKLVKDIVTESDQFSIEEFIPLLRERMNVLNPYVRQFLVGWITVLDSVPDIDMLGFLPDFLDGLFNMLSDSSHEIRQQADAALSEFLQEIKNSPINEFVKLGGEQLVPYYADILGAVLPCISDEEEKIRVVARETNEELRAIKADPAEGFDIGAILSIAKRELNSEHEATRIEALHWFFTLLDRYCAEFLAYLNDIFDPLLNALSDPSDAVVLLVLEVHARIAEESHHFHHLVSYLIRTFHNNHFVLEKC

SEQ ID NO: 196380 - protein, 621 aa, Zea Mays
MQIVPPVLTSFLDQDSRVRYYACEALYNIAKVVRGDFIIYFNKIFDALCKLSADSDANVQSAAHLLDKLVKDIVTESDQFSIEEFIPLLRERMNVLNPYVRQFLVGWITVLDSVPDIDMLGFLPDFLDGLFNMLSDSSHEIRQQADAALSEFLQEIKNSPNVDYGRMAEILVRRAGSTDEFTRLTSITWINEFVKLGGEQLVPYYADILGAVLPCISDEEEKIRVVARETNEELRAIKADPAEGFDIGAILSIAKRELNSEHEATRIEALHWFFTLLDRYCAEFLAYLNDIFDPLLNALSDPSDAVVLLVLEVHARIAEESHHFHHLVSYLIRTFHNNHFVLEKRGALIVRRLCVLLGAEKVYREFSTILESEVDLDFASVMVQVLNLILLTSTELGELRSPLKKSLVDSCGKDLFQSLYASWRHSPMATISLCLLAQAYNHASCVIQSLGEEDINVNFLVQLDKLIRLLETPVFAYLRLQLLEPGKHTWLLKTLYGLLMLLPQQSAAFKILRTRLKTVPFSENLKRTSSANPYSQILQVTEDGNRNQDMQNYSAINFPFLLQQFENMQLQHRNHLKDQLQSRKSASTLTLSQEIQRYEEAHSSSLSEINRPPSRTSKGIL

SEQ ID NO: 196381 - protein, 313 aa, Zea Mays
MASLTDLVNLDLSDCTDRIIAEYIWVGGSGIDLRSKARVMCDCYTPQGEPIPSNKRYKAATVFSHPDVAAEVPWYGIEQEYTLLQKDVSWPLGWPVGGYPGPQGPYYCAAGADKAFGRDVVDAHYKACLYAGINISGINGEVMPGQWEFQVGPSVGISAGDEIWVARYILERITEMAGIVLSLDPKPIKGDWNGAGAHTNYSTKSMREAGGYEVIKEAIEKLGKRHREHIAAYGEGNERRLTGRHETADINTFKWGVANRGASIRVGRDTEKEGKGYFEDRRPASNMDPYVVTGMIADTTILLLASAASASHT

SEQ ID NO: 196382 - protein, 311 aa, Zea Mays
MLMSFAGSAPDPTILMFSESWPGLPRGVEFNPSDSDLLWHLAAEVGNALAERHPFINEFIKFVDDVREFICTHPQHIPGVRQDGRASYFFHRSFEPYINENDVNNCWKKIGSPRSIILDGTLTGCKEVFALYADMPSDKRSQETDWRLHQYHLQNTVKAESEIVASKIFLASRNSLCELAEETHIESEWDVSTHKDSSVECAKGFNPEICTETDELDHISLKERYRILLADKSLGLTTVSAGKSIMHVETSRASPKRNHEGKISKEDIFSMLQEISSAPSIIESNPMDDDSNRRILGEDLPGNRWHCNLYG

SEQ ID NO: 196383 - protein, 434 aa, Zea Mays
MLMSFAGSAPDPTILMFSESWPGLPRGVEFNPSDSDLLWHLAAEVGNALAERHPFINEFIKFVDDVREFICTHPQHIPGVRQDGRASYFFHRSFEPYINENDVNNCWKKIGSPRSIILDGTLTGCKEVFALYADMPSDKRSQETDWRLHQYHLQNTVKAESEIVASKIFLASRNSLCELAEETHIESEWDVSTHKDSSVECAKGFNPEICTETDELDHISLKERYRILLADKSLGLTTVSAGKSIMHVETSRASPKRNHEGKISKEDIFSMLQEISSAPSIIESNPMDDDSNRRILGEDLPGNSGFLNVFGMSSNSKPCLFELGYCHDPVEGSENQIGGTATCMGENSELVARKQGAHLADVKLEPALGGYEIGPSELPQENSTHAEGSVLSLGIKDELTDCELPGLCENVSFSSRQRRKRKTSYSTEKTLKED

SEQ ID NO: 196384 - protein, 351 aa, Zea Mays
MSEVLQHVFSAAVGREVIDLCLDRIRKLADNCTGLQGFLVFNAVGGGTGSGLGSLLLERLSVDYGRKSKLGFTIYPSPQISTAVVEPYNSVLSTHSLIEHTDVVVLLDNEAIYDICKRSLDIERPTYTNLNRLISQVISSLTTSLRFEGAINVDITEFQTNLVPYPRIHFMLSSYAPIISVEKAYHEQHSVPEITNSVFEPSSVMAKCDPRHGKYMACCLMYRGDVVPKDVNAAVHSIKTKRAVQFVDWCPTGFKCGINYQPPTVVPGGDLAKVQRAVCMISNNTAVAEVFSRIDRKFDLMYAKRAFVHWYVGEGMEEGEFSEAREDLAALEKDYEEVGAEVEDEDEEAEY

SEQ ID NO: 196385 - protein, 466 aa, Zea Mays
MREIISIHIGQAGIQVGNSCWELYCLEHGIQPDGLMPSDTSVGIARDAFNTFFSETGAGKHVPRALFVDLEPTVIDEVKTGAYRQLFHPEQLISHKEDAANNFARGHYTVGREVIDLCLDRIRKLADNCTGLQGFLVFNAVGGGTGSGLGSLLLERLSVDYGRKSKLGFTIYPSPQISTAVVEPYNSVLSTHSLIEHTDVVVLLDNEAIYDICKRSLDIERPTYTNLNRLISQVISSLTTSLRFEGAINVDITEFQTNLVPYPRIHFMLSSYAPIISVEKAYHEQHSVPEITNSVFEPSSVMAKCDPRHGKYMACCLMYRGDVVPKDVNAAVHSIKTKRAVQFVDWCPTGFKCGINYQPPTVVPGGDLAKVQRAVCMISNNTAVAEKGSSQRQGRILQHWRRIMRKSELKLKMRTRKLSIESSIWMHGYFPLVSVNQACLSCMVVPPIYSMFAIALHLFMVGIVEV

SEQ ID NO: 196386 - protein, 182 aa, Zea Mays
MREIISIHIGQAGIQVGNSCWELYCLEHGIQPDGLMPSDTSVGIARDAFNTFFSETGAGKHVPRALFVDLEPTVIDEVKTGAYRQLFHPEQLISHKEDAANNFARGHYTVGREVIDLCLDRIRKLADNCTGLQGFLVFNAVGGGTGSGLGSLLLERLSVDYGRKSKLGFTIYPSPQELQKCS

SEQ ID NO: 196387 - protein, 181 aa, Zea Mays
MLSSYAPIISVEKAYHEQHSVPEITNSVFEPSSVMAKCDPRHGKYMACCLMYRGDVVPKDVNAAVHSIKTKRAVQFVDWCPTGFKCGINYQPPTVVPGGDLAKVQRAVCMISNNTAVAEVFSRIDRKFDLMYAKRAFVHWYVGEGMEEGEFSEAREDLAALEKDYEEVGAEVEDEDEEAEY

SEQ ID NO: 196388 - protein, 488 aa, Zea Mays
MAEQFYTVASDSETTGEDKSQASFPDVAVGIDIGTSKCSVAIWNGHQVELLKNTRNQKGMRSYVMFKDDTLSAGVTGGAAKENAHEERDILSGSAIFNMKRLIGRMDTDEVVQASKTLPFLVQTLGIGVRPFIAALVNNMWRSTTPEEVLAIFLLELKALVEMHLKHPVRNAVLTIPVAFSRFQQTRIERACAMAGLHVLRLMPEPTAVALLYAQQQQQLVHDNMGSGIEKIALIFNMVSKVLDHSEFEQVNRAIFDKCEKIINQCLADAKLVPEDINDVILVGGCSKIPRIRSLVLGLCKKEVSYKNIDALEAAVSGAALEGAIASGVNDPSGSLDLLTIQATPMNLGIRADGDSFAAIIPRNTTVPARRDMLFTTTHDKQTEALIAVYEGEGERAEDNHLLGYFKITGIPAAPKGAVDISVCMDIDAANVLRVFAGVVKPQGPAIPPFIEVRMPTLDDGHGWCGQALAKMYGRILDLAVLPKKLQP

SEQ ID NO: 196389 - protein, 323 aa, Zea Mays
MGKDNVPFHTIMFPSTLLGTGEKWTMMKTISVTEYLNYEAGKFSKSKGIGVFGNDAKDTNIPPEVWRYYLLMNRPEASDTLFTWADLQAKLNSELLNNLGNFINRVLSFVAKPAGAGYGSVVPDAPNAGAHTLTKTLAEKTSKWVEQYLDAMEKVKLKQGLKSAMGISSDGNAYLQESQFWKLYKEDPAACAIVMKTSVGLVYLLACLLEPFMPSFSDEVLRQLNLSPEENLSLSEEKGEIAKAKTPWNFVPAGHRIGKPAPLFKELKDEDVALHREKYAGSQAERSSKAAADAEANKVANQLKGTKLSGLLNSEAHEAELVL

SEQ ID NO: 196390 - protein, 448 aa, Zea Mays
MGKDNVPFHTIMFPSTLLGTGEKWTMMKTISVTEYLNYEAGKFSKSKGIGVFGNDAKDTNIPPEVWRYYLLMNRPEASDTLFTWADLQAKLNSELLNNLGNFINRVLSFVAKPAGAGYGSVVPDAPNAGAHTLTKTLAEKTSKWVEQYLDAMEKVKLKQGLKSAMGISSDGNAYLQESQFWKLYKEDPAACAIVMKTSVGLVYLLACLLEPFMPSFSDEKDEDVALHREKYAGSQAERSSKAAADAEANKVANQLKGTKLSDGGTKKEPKKQSGGSKSKTAEADITVAKLDIRVGLIRKAEKHPDADSLYVEEIDVGEDAPRTVVSGLVKFIPLEEMQSRKVCVLCNLKPVAMRGIKSHAMVLAASNEDHTKVELVEPPESAAVGERVTFAGYAGEPEASLSGKSKTWEKLAAELHSNGELVACYRDVPFTTSAGVCRVKTIANGEIR

SEQ ID NO: 196391 - protein, 253 aa, Zea Mays
MRTSSLPAVIEASGNDDWKKRKEAQSLKRLEVKKKRIERRNSLACNTSKEAAGQSPKEMNANTDKLVSSDETIVSANESHSSGKHLVKGLPPKYQATITSEDSSSAMRKKPNSAFKGTAITEEQNSSSSVPSSGEAISSVTAPSLPLLSLVPITATLGSREDQSILGRAGARANGMGDVERRMMQEMPGVFTKGLSNGSRVEGFLYKYSKGEVRIVCICHGSFLTPSEFVEHAGAGKVDNPLRHIVVSATPNL

SEQ ID NO: 196392 - protein, 264 aa, Zea Mays
MASPSLLRATCTLMRTSSLPAVIEASGNDDWKKRKEAQSLKRLEVKKKRIERRNSLACNTSKEAAGQSPKEMNANTDKLVSSDETIVSANESHSSGKHLVKGLPPKYQATITSEDSSSAMRKKPNSAFKAITEEQNSSSSVPSSGEAISSVTAPSLPLLSLVPITATLGSREDQSILGRAGARANGMGDVERRMMQEMPGVFTKGLSNGSRVEGFLYKYSKGEVRIVCICHGSFLTPSEFVEHAGAGKVDNPLRHIVVSATPNL

SEQ ID NO: 196393 - protein, 232 aa, Zea Mays
MRGTLLEIGMSYSRASSVQLLGKEESNGKRCRSTKRGGTKDNPRMVERSRGRTTQRSPPSCPRTTSMSGQGVASKAWRGDGLSQPRGEDLAMANQGIVTHRGFSKCYSSGSLLAKQLKNVNEHKCQIYGDTVGFLATGDIFVACNECAFPVCRSRYEYERKEGNQCCPQCKTRYKRHKGSPQVRGDEEDGVDLDNELNYTVYTRQCPRACVAAVGIRGDVDISSYSRHEPHH

SEQ ID NO: 196394 - protein, 250 aa, Zea Mays
MRGTLLEIGMSYSRASSVQLLGKEESNGKRCRSTKRGGTKDNPRMVERSRGRTTQRSPPSCPRTTSMSGQGVASKAWRGDGLSQPRGEDLAMANQGIVTHRGFSKCYSSGSLLAKQLKNVNEHKCQIYGDTVGFLATGDIFVACNECAFPVCRSRYEYERKEGNQCCPQCKTRYKRHKALVALYLYPFLNTVYKTREYEFLRLTSLGVIDALVKVRNLRQLRRAIDFYWSVGRCVGYQFGILDTYSSLAD

SEQ ID NO: 196395 - protein, 151 aa, Zea Mays
MWTCCTSSCFLTQVFHSVHNSTAQCIDLEIKIQQRHKPNIIDTTARSRRQGGAGAVVDAAGQNVAVVAGDGEVVVHAAIPALLVLQQQPRVVERRQLHEPKVAVPHVAPSRPRGRVVGEAGAAAAHHDVRRRREGAGVEVGPLGHARVLRS

SEQ ID NO: 196396 - protein, 198 aa, Zea Mays
MLSRAICISGGDFYVRRFHKDGPIVWRLLALSPFRRLSKMDEKAIILPYRDTSLNSEEPMAEISSQKIQIAVLDMIAAISSNKRNVVALESVLKKVCGLVVGIAYSSLTGLQEATIRALAGLACMDADLVWLLLADVYYSLNQRESLLPDQDLALVSDLLPPQVSSREYLFVQYGGEGVRCDVDPSSVYYVFRRMQGV

SEQ ID NO: 196397 - protein, 231 aa, Zea Mays
MANQGIVTHRGFSKCYSSGSLLAKQLKNVNEHKCQIYGDTVGFLATGDIFVACNECAFPVCRSRYEYERKEGNQCCPQCKTRYKRHKALVALYLYPFLNTVYKTREYEFLRLTSLGVIDALVKPVVRKCTEMLSRAICISGGDFYVRRFHKDGPIVWRLLALSPFRRLSKMDEKAIILPYRDTSLNSEEPMAEISSQKIQIAVLDMIAAISSNKRNVVALESVLKKMCTTH

SEQ ID NO: 196398 - protein, 283 aa, Zea Mays
MLMDLLSPLFPSSLIVIMCLGSLSRSFTGVASGATRAALTQHFALANNAADISAKEGSQETLATMLGMGLGMLLAQITRGHALSVWASFLSLTMFHMYANYKAVQSLSLTTLNYERASILLQYFKECGEVLVPRKVSQQEHILPSWSNWRKLNRIKLPHERVHLGAKASMLTHSDMLVIAKTRYHYENANYFLLDKQGIVYVFIHKEATPADVLRSFVHGLVLASSTQNSKPQHLEARRWMDEMYTSFISKLQTEGYSTERLLSHSILWRAHWLHGQLDEKLK

SEQ ID NO: 196399 - protein, 268 aa, Zea Mays
MDASHPEGEATAGWLTVEEWSGSSASALSRTAVLTASASSLTAHRFGSRWERIGSRMLGAFVPEGFPGSVTPDYVPFQMWDTLQGLSTYIRAMLSTQALLGAIGVGEQSATVIGATFQWFLRDLTGMLGGILFTFYQGSNLDSNAKMWRLVADFMNDLGMLMDLLSPLFPSSLIVIMCLGSLSRSFTGVASGATRAALTQHFALANNAADISAKEGSQETLATMLGMGLGMLLAQITRGHALSVWASFLSLTMFHMYVLKRSLFANTL

SEQ ID NO: 196400 - protein, 139 aa, Zea Mays
MDASHPEGEATAGWLTVEEWSGSSASALSRTAVLTASASSLTAHRFGSRWERIGSRMLGAFVPEGFPGSVTPDYVPFQMWDTLQGLSTYIRAMLSTQALLGAIGVGEQSATVIGATFQWFLRDLTGMLGGILFTFYQEC

SEQ ID NO: 196401 - protein, 1826 aa, Zea Mays
MLAPLPRLTSALRGHYDADQAYLLRKSALQALTLPRPHDEWKFARKIVPGWDDASSEVRQAYKQFIGAVVELLSGEAVSEELYQVAQTVYTLFGGDDTEYVGAKKVLSKRNELESLVGYTVQDSVLKKLAQLAQKLDSLQRASAYESVHRIADDVNENDRIEFGADFDFKPLARFIVDVSLDAPLESAELGSGPFEKWQYDAWSTSTTSHSTAVRGSVSLRWLKDQCALITKSGGSMLSGDELAMTLCRVLLSNKAGDQIAGELLDLVGDTAFEIVQDLLLHRKELVDAIQHGLSILKSEKMTSGNQPKMPTYGTQVTVQTESERQLDKIRRKEERRSKRSADSGNNDIGVDDFSSLLLASERKEAFDDVIGSGEGSDSFTVTSLPQGTTRKHMKGYEEVKIPPTPTASLKPNEKLIEIKELDEFAQAAFQGYKSLNRVQSRIFQATYYTNENILVCAPTGAGKTNIAMIAVLHEVKQHFRDGILHKNEFKIVYVAPMKALAAEVTATFSRRLSPLNLVVRELTGDMQLTKNEIEETQMIVTTPEKWDVITRKSSDMSLSMLVKLIIIDEVHLLNDDRGSVIEALVARTLRQVESMQSMIRIVGLSATLPTYLEVAHFLRVNPDTGLFFFDSSYRPVPLAQQYIGISERDYTKRSELFNTLCYEKVVESIKQGHQALVFVHTRKDTGKTARTLIDLAAKAGELELFSSADHPQFPLIKKDVSKAKSREVVEFFESGFGIHNAGMMRSDRSLMERLFGDGLLKVLVCTATLAWGVNLPAHTVVIKGTQLYDPKAGGWRDLGMLDVMQIFGRAGRPQFDKSGEGIIITTHDKLAYYLRLLTSQLPIESQFLGSLKDNLNAEVALGTVTNVREACTWLGYTYLFIRMKTNPLVYGITWEEVMGDPSMGAKQRTFIIDAARALDKAKMMRFDEKSGNFYCTELGRIASHFYLQYSSVETYNEMLRRHMSESELITMVAHSSEFENIVVREEEQDELEALARKACPLEIKGGPTDKHGKISILIQVYISRAPIDSSSLHSDAQYISQSLARIMRALFEICLRRGWSEMSSLLLQYCKAVDRKIWPHLHPLRQFDKDLSPQVLWKLEERNVDLDHLYEMEENEIGALIRFSHQGKLVKQYVGYFPYVNLSATVSPITRTVLKVDLHITPEFVWKDRYHGMSERWWIIVEDSENDTIYHSELFTLTKKMARGTPTKISFNVPIFEPHPPQYYIHAISDSWLHAETLFTVSFHNLTLPQTQITHTELLDLKPLPLSALGNKTYEDLYRFSHFNPIQTQAFHVLYHTDNNVLLGAPTGSGKTISAELAMLHLFSTQPDMKVVYIAPLKAIVRERMNDWRKRLVIQLGKKMVEMTGDFTPDLMALLSADIIISTPEKWDGISRNWHSRSYVMKVGLMILDEIHLLGADRGPILEVIVSRMRYISSQTERSIRFVGLSTALANARDLADWLGVTDDGLFNFKPSVRPVPLEVHIQGYPGKFYCPRMNSMNKPAYAAICTHSPNKPVLIFVSSRRQTRLTALDIIQLAASDEKPRQFLSIEDNSLDMVLSQVSDSNLRHTLQFGIGLHHAGLNDRDRSLVEELFSNNKIQVLVCTSTLAWGVNLPAHLVIIKGTEYYDGKTKRYIDYDITDILQMMGRAGRPQYDQHGKAVILVHEPKKSFYKKFLYEPFPVESNLREHLHDHINAEIVSGTISNKEEAIIYLTWTYLYRRLVVNPAYYGLEDTETNTLNSYLSRLVETTFEDLEDSGCIKVDDHSVKYLILGKIASQYYLSYLTVSMFGSNIGPNTTLEVFLHILSAASEFDELPVRHNERKCPVSS

SEQ ID NO: 196402 - protein, 1672 aa, Zea Mays
MLAPLPRLTSALRGHYDADQAYLLRKSALQALTLPRPHDEWKFARKIVPGWDDASSEVRQAYKQFIGAVVELLSGEAVSEELYQVAQTVYTLFGGDDTEYVGAKKVLSKRNELESLVGYTVQDSVLKKLAQLAQKLDSLQRASAYESVHRIADDVNENDRIEFGADFDFKPLARFIVDVSLDAPLESAELGSGPFEKWQYDAWSTSTTSHSTAVRGSIAGELLDLVGDTAFEIVQDLLLHRKELVDAIQHGLSILKSEKMTSGNQPKMPTYGTQVTVQTESERQLDKIRRKEERRSKRSADSGNNDIGVDDFSSLLLASERKEAFDDVIGSGEGSDSFTVTSLPQGTTRKHMKGYEEVKIPPTPTASLKPNEKLIEIKELDEFAQAAFQGYKSLNRVQSRIFQATYYTNENILVCAPTGAGKTNIAMIAVLHEVKQHFRDGILHKNEFKIVYVAPMKALAAEVTATFSRRLSPLNLVVRELTGDMQLTKNEIEETQMIVTTPEKWDVITRKSSDMSLSMLVKLIIIDEVHLLNDDRGSVIEALVARTLRQVESMQSMIRIVGLSATLPTYLEVAHFLRVNPDTGLFFFDSSYRPVPLAQQYIGISERDYTKRSELFNTLCYEKVVESIKQGHQALVFVHTRKDTGKTARTLIDLAAKAGELELFSSADHPQFPLIKKDVSKAKSREVVEFFESGFGIHNAGMMRSDRSLMERLFGDGLLKVLVCTATLAWGVNLPAHTVVIKGTQLYDPKAGGWRDLGMLDVMQIFGRAGRPQFDKSGEGIIITTHDKLAYYLRLLTSQLPIESQFLGSLKDNLNAEVALGTVTNVREACTWLGYTYLFIRMKTNPLVYGITWEEVMGDPSMGAKQRTFIIDAARALDKAKMMRFDEKSGNFYCTELGRIASHFYLQYSSVETYNEMLRRHMSESELITMVAHSSEFENIVVREEEQDELEALARKACPLEIKGGPTDKHGKISILIQVYISRAPIDSSSLHSDAQYISQSLARIMRALFEICLRRGWSEMSSLLLQYCKAVDRKIWPHLHPLRQFDKDLSPQVLWKLEERNVDLDHLYEMEENEIGALIRFSHQGKLVKQYVGYFPYVNLSATVSPITRTVLKVDLHITPEFVWKDRYHGMSERWWIIVEDSENDTIYHSELFTLTKKMARGTPTKISFNVPIFEPHPPQYYIHAISDSWLHAETLFTVSFHNLTLPQTQITHTELLDLKPLPLSALGNKTYEDLYRFSHFNPIQTQAFHVLYHTDNNVLLGAPTGSGKTISAELAMLHLFSTQPDMKVVYIAPLKAIVRERMNDWRKRLVIQLGKKMVEMTGDFTPDLMALLSADIIISTPEKWDGISRNWHSRSYVMKVGLMILDEIHLLGADRGPILEVIVSRMRYISSQTERSIRFVGLSTALANARDLADWLGVTDDGLFNFKPSVRPVPLEVHIQGYPGKFYCPRMNSMNKPAYAAICTHSPNKPVLIFVSSRRQTRLTALDIIQLAASDEKPRQFLSIEDNSLDMVLSQVSDSNLRHTLQFGIGLHHAGLNDRDRSLVEELFSNNKIQVLVCTSTLAWGVNLPAHLVIIKGTEYYDGKTKRYIDYDITDILQMMGRAGRPQYDQHGKAVILVHEPKKSFYKKKLFLAPSATRRRRLFISPGLTYIADWLLIRPIMDWRILKQTH

SEQ ID NO: 196403 - protein, 2042 aa, Zea Mays
MLAPLPRLTSALRGHYDADQAYLLRKSALQALTLPRPHDEWKFARKIVPGWDDASSEVRQAYKQFIGAVVELLSGEAVSEELYQVAQTVYTLFGGDDTEYVGAKKVLSKRNELESLVGYTVQDSVLKKLAQLAQKLDSLQRASAYESVHRIADDVNENDRIEFGADFDFKPLARFIVDVSLDAPLESAELGSGPFEKWQYDAWSTSTTSHSTAVRGSIAGELLDLVGDTAFEIVQDLLLHRKELVDAIQHGLSILKSEKMTSGNQPKMPTYGTQVTVQTESERQLDKIRRKEERRSKRSADSGNNDIGVDDFSSLLLASERKEAFDDVIGSGEGSDSFTVTSLPQGTTRKHMKGYEEVKIPPTPTASLKPNEKLIEIKELDEFAQAAFQGYKSLNRVQSRIFQATYYTNENILVCAPTGAGKTNIAMIAVLHEVKQHFRDGILHKNEFKIVYVAPMKALAAEVTATFSRRLSPLNLVVRELTGDMQLTKNEIEETQMIVTTPEKWDVITRKSSDMSLSMLVKLIIIDEVHLLNDDRGSVIEALVARTLRQVESMQSMIRIVGLSATLPTYLEVAHFLRVNPDTGLFFFDSSYRPVPLAQQYIGISERDYTKRSELFNTLCYEKVVESIKQGHQALVFVHTRKDTGKTARTLIDLAAKAGELELFSSADHPQFPLIKKDVSKAKSREVVEFFESGFGIHNAGMMRSDRSLMERLFGDGLLKVLVCTATLAWGVNLPAHTVVIKGTQLYDPKAGGWRDLGMLDVMQIFGRAGRPQFDKSGEGIIITTHDKLAYYLRLLTSQLPIESQFLGSLKDNLNAEVALGTVTNVREACTWLGYTYLFIRMKTNPLVYGITWEEVMGDPSMGAKQRTFIIDAARALDKAKMMRFDEKSGNFYCTELGRIASHFYLQYSSVETYNEMLRRHMSESELITMVAHSSEFENIVVREEEQDELEALARKACPLEIKGGPTDKHGKISILIQVYISRAPIDSSSLHSDAQYISQSLARIMRALFEICLRRGWSEMSSLLLQYCKAVDRKIWPHLHPLRQFDKDLSPQVLWKLEERNVDLDHLYEMEENEIGALIRFSHQGKLVKQYVGYFPYVNLSATVSPITRTVLKVDLHITPEFVWKDRYHGMSERWWIIVEDSENDTIYHSELFTLTKKMARGTPTKISFNVPIFEPHPPQYYIHAISDSWLHAETLFTVSFHNLTLPQTQITHTELLDLKPLPLSALGNKTYEDLYRFSHFNPIQTQAFHVLYHTDNNVLLGAPTGSGKTISAELAMLHLFSTQPDMKVVYIAPLKAIVRERMNDWRKRLVIQLGKKMVEMTGDFTPDLMALLSADIIISTPEKWDGISRNWHSRSYVMKVGLMILDEIHLLGADRGPILEVIVSRMRYISSQTERSIRFVGLSTALANARDLADWLGVTDDGLFNFKPSVRPVPLEVHIQGYPGKFYCPRMNSMNKPAYAAICTHSPNKPVLIFVSSRRQTRLTALDIIQLAASDEKPRQFLSIEDNSLDMVLSQVSDSNLRHTLQFGIGLHHAGLNDRDRSLVEELFSNNKIQVLVCTSTLAWGVNLPAHLVIIKGTEYYDGKTKRYIDYDITDILQMMGRAGRPQYDQHGKAVILVHEPKKSFYKKFLYEPFPVESNLREHLHDHINAEIVSGTISNKEEAIIYLTWTYLYRRLVVNPAYYGLEDTETNTLNSYLSRLVETTFEDLEDSGCIKVDDHSVKYLILGKIASQYYLSYLTVSMFGSNIGPNTTLEVFLHILSAASEFDELPVRHNEDNLNRILSGNVPYPVDQHHLDDPHVKANLLFQAHFSRAELPISDYVTDLKSVLDQSIRIIQAMIDVCANSGWLTSALTCMHLLQMIIQGLWFERDYESLWMLPSMNDDILDHLKSRGVSTVPSLLDLSREELRRVLQPFSASELYQDLQHFPHVDVKVKLHNEQERSKPPTLNIRLQLKNSRRSASRAFAPRFPKAKQEAWWLVLGNATSSELYGLKRISFADRVINTRMELPQTFNVQETKLILVSDCYLGFDLEYSLEHLTKG

SEQ ID NO: 196404 - protein, 1291 aa, Zea Mays
MMRSDRSLMERLFGDGLLKVLVCTATLAWGVNLPAHTVVIKGTQLYDPKAGGWRDLGMLDVMQIFGRAGRPQFDKSGEGIIITTHDKLAYYLRLLTSQLPIESQFLGSLKDNLNAEVALGTVTNVREACTWLGYTYLFIRMKTNPLVYGITWEEVMGDPSMGAKQRTFIIDAARALDKAKMMRFDEKSGNFYCTELGRIASHFYLQYSSVETYNEMLRRHMSESELITMVAHSSEFENIVVREEEQDELEALARKACPLEIKGGPTDKHGKISILIQVYISRAPIDSSSLHSDAQYISQSLARIMRALFEICLRRGWSEMSSLLLQYCKAVDRKIWPHLHPLRQFDKDLSPQVLWKLEERNVDLDHLYEMEENEIGALIRFSHQGKLVKQYVGYFPYVNLSATVSPITRTVLKVDLHITPEFVWKDRYHGMSERWWIIVEDSENDTIYHSELFTLTKKMARGTPTKISFNVPIFEPHPPQYYIHAISDSWLHAETLFTVSFHNLTLPQTQITHTELLDLKPLPLSALGNKTYEDLYRFSHFNPIQTQAFHVLYHTDNNVLLGAPTGSGKTISAELAMLHLFSTQPDMKVVYIAPLKAIVRERMNDWRKRLVIQLGKKMVEMTGDFTPDLMALLSADIIISTPEKWDGISRNWHSRSYVMKVGLMILDEIHLLGADRGPILEVIVSRMRYISSQTERSIRFVGLSTALANARDLADWLGVTDDGLFNFKPSVRPVPLEVHIQLAASDEKPRQFLSIEDNSLDMVLSQVSDSNLRHTLQFGIGLHHAGLNDRDRSLVEELFSNNKIQVLVCTSTLAWGVNLPAHLVIIKGTEYYDGKTKRYIDYDITDILQMMGRAGRPQYDQHGKAVILVHEPKKSFYKKFLYEPFPVESNLREHLHDHINAEIVSGTISNKEEAIIYLTWTYLYRRLVVNPAYYGLEDTETNTLNSYLSRLVETTFEDLEDSGCIKVDDHSVKYLILGKIASQYYLSYLTVSMFGSNIGPNTTLEVFLHILSAASEFDELPVRHNEDNLNRILSGNVPYPVDQHHLDDPHVKANLLFQAHFSRAELPISDYVTDLKSVLDQSIRIIQAMIDVCANSGWLTSALTCMHLLQMIIQGLWFERDYESLWMLPSMNDDILDHLKSRGVSTVPSLLDLSREELRRVLQPFSASELYQDLQHFPHVDVKVKLHNEQERSKPPTLNIRLQLKNSRRSASRAFAPRFPKAKQEAWWLVLGNATSSELYGLKRISFADRVINTRMELPQTFNVQETKLILVSDCYLGFDLEYSLEHLTKG

SEQ ID NO: 196405 - protein, 1284 aa, Zea Mays
MLDVMQIFGRAGRPQFDKSGEGIIITTHDKLAYYLRLLTSQLPIESQFLGSLKDNLNAEVALGTVTNVREACTWLGYTYLFIRMKTNPLVYGITWEEVMGDPSMGAKQRTFIIDAARALDKAKMMRFDEKSGNFYCTELGRIASHFYLQYSSVETYNEMLRRHMSESELITMVAHSSEFENIVVREEEQDELEALARKACPLEIKGGPTDKHGKISILIQVYISRAPIDSSSLHSDAQYISQSLARIMRALFEICLRRGWSEMSSLLLQYCKAVDRKIWPHLHPLRQFDKDLSPQVLWKLEERNVDLDHLYEMEENEIGALIRFSHQGKLVKQYVGYFPYVNLSATVSPITRTVLKVDLHITPEFVWKDRYHGMSERWWIIVEDSENDTIYHSELFTLTKKMARGTPTKISFNVPIFEPHPPQYYIHAISDSWLHAETLFTVSFHNLTLPQTQITHTELLDLKPLPLSALGNKTYEDLYRFSHFNPIQTQAFHVLYHTDNNVLLGAPTGSGKTISAELAMLHLFSTQPDMKVVYIAPLKAIVRERMNDWRKRLVIQLGKKMVEMTGDFTPDLMALLSADIIISTPEKWDGISRNWHSRSYVMKVGLMILDEIHLLGADRGPILEVIVSRMRYISSQTERSIRFVGLSTALANARDLADWLGVTDDGLFNFKPSVRPVPLEVHIQGYPGKFYCPRMNSMNKPAYAAICTHSPNKPVLIFVSSRRQTRLTALDIIQLAASDEKPRQFLSIEDNSLDMVLSQVSDSNLRHTLQFGIGLHHAGLNDRDRSLVEELFSNNKIQVLVCTSTLAWGVNLPAHLVIIKGTEYYDGKTKRYIDYDITDILQMMGRAGRPQYDQHGKAVILVHEPKKSFYKKFLYEPFPVESNLREHLHDHINAEIVSGTISNKEEAIIYLTWTYLYRRLVVNPAYYGLEDTETNTLNSYLSRLVETTFEDLEDSGCIKVDDHSVKYLILGKIASQYYLSYLTVSMFGSNIGPNTTLEVFLHILSAASEFDELPVRHNEDNLNRILSGNVPYPVDQHHLDDPHVKANLLFQAHFSRAELPISDYVTDLKSVLDQSIRIIQAMIDVCANSGWLTSALTCMHLLQMIIQGLWFERDYESLWMLPSMNDDILDHLKSRGVSTVPSLLDLSREELRRVLQPFSASELYQDLQHFPHVDVKVKLHNEQERSKPPTLNIRLQLKNSRRSASRAFAPRFPKAKQEAWWLVLGNATSSELYGLKRISFADRVINTRMELPQTFNVQETKLILVSDCYLGFDLEYSLEHLTKG

SEQ ID NO: 196406 - protein, 2085 aa, Zea Mays
MLAPLPRLTSALRGHYDADQAYLLRKSALQALTLPRPHDEWKFARKIVPGWDDASSEVRQAYKQFIGAVVELLSGEAVSEELYQVAQTVYTLFGGDDTEYVGAKKVLSKRNELESLVGYTVQDSVLKKLAQLAQKLDSLQRASAYESVHRIADDVNENDRIEFGADFDFKPLARFIVDVSLDAPLESAELGSGPFEKWQYDAWSTSTTSHSTAVRGSVSLRWLKDQCALITKSGGSMLSGDELAMTLCRVLLSNKAGDQIAGELLDLVGDTAFEIVQDLLLHRKELVDAIQHGLSILKSEKMTSGNQPKMPTYGTQVTVQTESERQLDKIRRKEERRSKRSADSGNNDIGVDDFSSLLLASERKEAFDDVIGSGEGSDSFTVTSLPQGTTRKHMKGYEEVKIPPTPTASLKPNEKLIEIKELDEFAQAAFQGYKSLNRVQSRIFQATYYTNENILVCAPTGAGKTNIAMIAVLHEVKQHFRDGILHKNEFKIVYVAPMKALAAEVTATFSRRLSPLNLVVRELTGDMQLTKNEIEETQMIVTTPEKWDVITRKSSDMSLSMLVKLIIIDEVHLLNDDRGSVIEALVARTLRQVESMQSMIRIVGLSATLPTYLEVVAHFLRVNPDTGLFFFDSSYRPVPLAQQYIGISERDYTKRSELFNTLCYEKVVESIKQGHQALVFVHTRKDTGKTARTLIDLAAKAGELELFSSADHPQFPLIKKDVSKAKSREVVEFFESGFGIHNAGMMRSDRSLMERLFGDGLLKVLVCTATLAWGVNLPAHTVVIKGTQLYDPKAGGWRDLGMLDVMQIFGRAGRPQFDKSGEGIIITTHDKLAYYLRLLTSQLPIESQFLGSLKDNLNAEVALGTVTNVREACTWLGYTYLFIRMKTNPLVYGITWEEVMGDPSMGAKQRTFIIDAARALDKAKMMRFDEKSGNFYCTELGRIASHFYLQYSSVETYNEMLRRHMSESELITMVAHSSEFENIVVREEEQDELEALARKACPLEIKGGPTDKHGKISILIQVYISRAPIDSSSLHSDAQYISQSLARIMRALFEICLRRGWSEMSSLLLQYCKAVDRKIWPHLHPLRQFDKDLSPQVLWKLEERNVDLDHLYEMEENEIGALIRFSHQGKLVKQYVGYFPYVNLSATVSPITRTVLKVDLHITPEFVWKDRYHGMSERWWIIVEDSENDTIYHSELFTLTKKMARGTPTKISFNVPIFEPHPPQYYIHAISDSWLHAETLFTVSFHNLTLPQTQITHTELLDLKPLPLSALGNKTYEDLYRFSHFNPIQTQAFHVLYHTDNNVLLGAPTGSGKTISAELAMLHLFSTQPDMKVVYIAPLKAIVRERMNDWRKRLVIQLGKKMVEMTGDFTPDLMALLSADIIISTPEKWDGISRNWHSRSYVMKVGLMILDEIHLLGADRGPILEVIVSRMRYISSQTERSIRFVGLSTALANARDLADWLGVTDDGLFNFKPSVRPVPLEVHIQGYPGKFYCPRMNSMNKPAYAAICTHSPNKPVLIFVSSRRQTRLTALDIIQLAASDEKPRQFLSIEDNSLDMVLSQVSDSNLRHTLQFGIGLHHAGLNDRDRSLVEELFSNNKIQVLVCTSTLAWGVNLPAHLVIIKGTEYYDGKTKRYIDYDITDILQMMGRAGRPQYDQHGKAVILVHEPKKSFYKKFLYEPFPVESNLREHLHDHINAEIVSGTISNKEEAIIYLTWTYLYRRLVVNPAYYGLEDTETNTLNSYLSRLVETTFEDLEDSGCIKVDDHSVKYLILGKIASQYYLSYLTVSMFGSNIGPNTTLEVFLHILSAASEFDELPVRHNEDNLNRILSGNVPYPVDQHHLDDPHVKANLLFQAHFSRAELPISDYVTDLKSVLDQSIRIIQAMIDVCANSGWLTSALTCMHLLQMIIQGLWFERDYESLWMLPSMNDDILDHLKSRGVSTVPSLLDLSREELRRVLQPFSASELYQDLQHFPHVDVKVKLHNEQERSKPPTLNIRLQLKNSRRSASRAFAPRFPKAKQEAWWLVLGNATSSELYGLKRISFADRVINTRMELPQTFNVQETKLILVSDCYLGFDLEYSLEHLTKG

SEQ ID NO: 196407 - protein, 698 aa, Zea Mays
MLAPLPRLTSALRGHYDADQAYLLRKSALQALTLPRPHDEWKFARKIVPGWDDASSEVRQAYKQFIGAVVELLSGEAVSEELYQVAQTVYTLFGGDDTEYVGAKKVLSKRNELESLVGYTVQDSVLKKLAQLAQKLDSLQRASAYESVHRIADDVNENDRIEFGADFDFKPLARFIVDVSLDAPLESAELGSGPFEKWQYDAWSTSTTSHSTAVRGSVSLRWLKDQCALITKSGGSMLSGDELAMTLCRVLLSNKAGDQIAGELLDLVGDTAFEIVQDLLLHRKELVDAIQHGLSILKSEKMTSGNQPKMPTYGTQVTVQTESERQLDKIRRKEERRSKRSADSGNNDIGVDDFSSLLLASERKEAFDDVIGSGEGSDSFTVTSLPQGTTRKHMKGYEEVKIPPTPTASLKPNEKLIEIKELDEFAQAAFQGYKSLNRVQSRIFQATYYTNENILVCAPTGAGKTNIAMIAVLHEVKQHFRDGILHKNEFKIVYVAPMKALAAEVTATFSRRLSPLNLVVRELTGDMQLTKNEIEETQMIVTTPEKWDVITRKSSDMSLSMLVKLIIIDEVHLLNDDRGSVIEALVARTLRQVESMQSMIRIVGLSATLPTYLEVAHFLRVNPDTGLFFFDSSYRPVPLAQQYIGISERDYTKRSELFNTLCYEKVVESIKQGHQALVFVHTRKDTGKTARTLGAYAT

SEQ ID NO: 196408 - protein, 768 aa, Zea Mays
MLAPLPRLTSALRGHYDADQAYLLRKSALQALTLPRPHDEWKFARKIVPGWDDASSEVRQAYKQFIGAVVELLSGEAVSEELYQVAQTVYTLFGGDDTEYVGAKKVLSKRNELESLVGYTVQDSVLKKLAQLAQKLDSLQRASAYESVHRIADDVNENDRIEFGADFDFKPLARFIVDVSLDAPLESAELGSGPFEKWQYDAWSTSTTSHSTAVRGSVSLRWLKDQCALITKSGGSMLSGDELAMTLCRVLLSNKAGDQIAGELLDLVGDTAFEIVQDLLLHRKELVDAIQHGLSILKSEKMTSGNQPKMPTYGTQVTVQTESERQLDKIRRKEERRSKRSADSGNNDIGVDDFSSLLLASERKEAFDDVIGSGEGSDSFTVTSLPQGTTRKHMKGYEEVKIPPTPTASLKPNEKLIEIKELDEFAQAAFQGYKSLNRVQSRIFQATYYTNENILVCAPTGAGKTNIAMIAVLHEVKQHFRDGILHKNEFKIVYVAPMKALAAEVTATFSRRLSPLNLVVRELTGDMQLTKNEIEETQMIVTTPEKWDVITRKSSDMSLSMLVKLIIIDEVHLLNDDRGSVIEALVARTLRQVESMQSMIRIVGLSATLPTYLEVAHFLRVNPDTGLFFFDSSYRPVPLAQQYIGISERDYTKRSELFNTLCYEKVVESIKQGHQALVFVHTRKDTGKTARTLIDLAAKAGELELFSSADHPQFPLIKKDVSKAKSREVVEFFESGFGIHNAGMMRSDRSLMERLFGDGLLKQLWLGE

SEQ ID NO: 196409 - protein, 1405 aa, Zea Mays
MLAPLPRLTSALRGHYDADQAYLLRKSALQALTLPRPHDEWKFARKIVPGWDDASSEVRQAYKQFIGAVVELLSGEAVSEELYQVAQTVYTLFGGDDTEYVGAKKVLSKRNELESLVGYTVQDSVLKKLAQLAQKLDSLQRASAYESVHRIADDVNENDRIEFGADFDFKPLARFIVDVSLDAPLESAELGSGPFEKWQYDAWSTSTTSHSTAVRGSVSLRWLKDQCALITKSGGSMLSGDELAMTLCRVLLSNKAGDQIAGELLDLVGDTAFEIVQDLLLHRKELVDAIQHGLSILKSEKMTSGNQPKMPTYGTQVTVQTESERQLDKIRRKEERRSKRSADSGNNDIGVDDFSSLLLASERKEAFDDVIGSGEGSDSFTVTSLPQGTTRKHMKGYEEVKIPPTPTASLKPNEKLIEIKELDEFAQAAFQGYKSLNRVQSRIFQATYYTNENILVCAPTGAGKTNIAMIAVLHEVKQHFRDGILHKNEFKIVYVAPMKALAAEVTATFSRRLSPLNLVVRELTGDMQLTKNEIEETQMIVTTPEKWDVITRKSSDMSLSMLVKLIIIDEVHLLNDDRGSVIEALVARTLRQVESMQSMIRIVGLSATLPTYLEVAHFLRVNPDTGLFFFDSSYRPVPLAQQYIGISERDYTKRSELFNTLCYEKVVESIKQGHQALVFVHTRKDTGKTARTLIDLAAKAGELELFSSADHPQFPLIKKDVSKAKSREVVEFFESGFGIHNAGMMRSDRSLMERLFGDGLLKVLVCTATLAWGVNLPAHTVVIKGTQLYDPKAGGWRDLGMLDVMQIFGRAGRPQFDKSGEGIIITTHDKLAYYLRLLTSQLPIESQFLGSLKDNLNAEVALGTVTNVREACTWLGYTYLFIRMKTNPLVYGITWEEVMGDPSMGAKQRTFIIDAARALDKAKMMRFDEKSGNFYCTELGRIASHFYLQYSSVETYNEMLRRHMSESELITMVAHSSEFENIVVREEEQDELEALARKACPLEIKGGPTDKHGKISILIQVYISRAPIDSSSLHSDAQYISQSLARIMRALFEICLRRGWSEMSSLLLQYCKAVDRKIWPHLHPLRQFDKDLSPQVLWKLEERNVDLDHLYEMEENEIGALIRFSHQGKLVKQYVGYFPYVNLSATVSPITRTVLKVDLHITPEFVWKDRYHGMSERWWIIVEDSENDTIYHSELFTLTKKMARGTPTKISFNVPIFEPHPPQYYIHAISDSWLHAETLFTVSFHNLTLPQTQITHTELLDLKPLPLSALGNKTYEDLYRFSHFNPIQTQAFHVLYHTDNNVLLGAPTGSGKTISAELAMLHLFSTQPDMKVVYIAPLKAIVRERMNDWRKRLVIQLGKKMVEMTGDFTPDLMALLSADIIISTPEKWDGISRNWHSRSRAHDIG

SEQ ID NO: 196410 - protein, 622 aa, Zea Mays
MLDDGLFNFKPSVRPVPLEVHIQGYPGKFYCPRMNSMNKPAYAAICTHSPNKPVLIFVSSRRQTRLTALDIIQLAASDEKPRQFLSIEDNSLDMVLSQVSDSNLRHTLQFGIGLHHAGLNDRDRSLVEELFSNNKIQVLVCTSTLAWGVNLPAHLVIIKGTEYYDGKTKRYIDYDITDILQMMGRAGRPQYDQHGKAVILVHEPKKSFYKKFLYEPFPVESNLREHLHDHINAEIVSGTISNKEEAIIYLTWTYLYRRLVVNPAYYGLEDTETNTLNSYLSRLVETTFEDLEDSGCIKVDDHSVKYLILGKIASQYYLSYLTVSMFGSNIGPNTTLEVFLHILSAASEFDELPVRHNEDNLNRILSGNVPYPVDQHHLDDPHVKANLLFQAHFSRAELPISDYVTDLKSVLDQSIRIIQAMIDVCANSGWLTSALTCMHLLQMIIQGLWFERDYESLWMLPSMNDDILDHLKSRGVSTVPSLLDLSREELRRVLQPFSASELYQDLQHFPHVDVKVKLHNEQERSKPPTLNIRLQLKNSRRSASRAFAPRFPKAKQEAWWLVLGNATSSELYGLKRISFADRVINTRMELPQTFNVQIVQLRLRHLLLHSWLFTCRDTITSC

SEQ ID NO: 196411 - protein, 721 aa, Zea Mays
MTGDFTPDLMALLSADIIISTPEKWDGISRNWHSRSYVMKVGLMILDEIHLLGADRGPILEVIVSRMRYISSQTERSIRFVGLSTALANARDLADWLGVTDDGLFNFKPSVRPVPLEVHIQGYPGKFYCPRMNSMNKPAYAAICTHSPNKPVLIFVSSRRQTRLTALDIIQLAASDEKPRQFLSIEDNSLDMVLSQVSDSNLRHTLQFGIGLHHAGLNDRDRSLVEELFSNNKIQVLVCTSTLAWGVNLPAHLVIIKGTEYYDGKTKRYIDYDITDILQMMGRAGRPQYDQHGKAVILVHEPKKSFYKKFLYEPFPVESNLREHLHDHINAEIVSGTISNKEEAIIYLTWTYLYRRLVVNPAYYGLEDTETNTLNSYLSRLVETTFEDLEDSGCIKVDDHSVKYLILGKIASQYYLSYLTVSMFGSNIGPNTTLEVFLHILSAASEFDELPVRHNEDNLNRILSGNVPYPVDQHHLDDPHVKANLLFQAHFSRAELPISDYVTDLKSVLDQSIRIIQAMIDVCANSGWLTSALTCMHLLQMIIQGLWFERDYESLWMLPSMNDDILDHLKSRGVSTVPSLLDLSREELRRVLQPFSASELYQDLQHFPHVDVKVKLHNEQERSKPPTLNIRLQLKNSRRSASRAFAPRFPKAKQEAWWLVLGNATSSELYGLKRISFADRVINTRMELPQTFNVQETKLILVSDCYLGFDLEYSLEHLTKG

SEQ ID NO: 196412 - protein, 2084 aa, Zea Mays
MLAPLPRLTSALRGHYDADQAYLLRKSALQALTLPRPHDEWKFARKIVPGWDDASSEVRQAYKQFIGAVVELLSGEAVSEELYQVAQTVYTLFGGDDTEYVGAKKVLSKRNELESLVGYTVQDSVLKKLAQLAQKLDSLQRASAYESVHRIADDVNENDRIEFGADFDFKPLARFIVDVSLDAPLESAELGSGPFEKWQYDAWSTSTTSHSTAVRGSVSLRWLKDQCALITKSGGSMLSGDELAMTLCRVLLSNKAGDQIAGELLDLVGDTAFEIVQDLLLHRKELVDAIQHGLSILKSEKMTSGNQPKMPTYGTQVTVQTESERQLDKIRRKEERRSKRSADSGNNDIGVDDFSSLLLASERKEAFDDVIGSGEGSDSFTVTSLPQGTTRKHMKGYEEVKIPPTPTASLKPNEKLIEIKELDEFAQAAFQGYKSLNRVQSRIFQATYYTNENILVCAPTGAGKTNIAMIAVLHEVKQHFRDGILHKNEFKIVYVAPMKALAAEVTATFSRRLSPLNLVVRELTGDMQLTKNEIEETQMIVTTPEKWDVITRKSSDMSLSMLVKLIIIDEVHLLNDDRGSVIEALVARTLRQVESMQSMIRIVGLSATLPTYLEVAHFLRVNPDTGLFFFDSSYRPVPLAQQYIGISERDYTKRSELFNTLCYEKVVESIKQGHQALVFVHTRKDTGKTARTLIDLAAKAGELELFSSADHPQFPLIKKDVSKAKSREVVEFFESGFGIHNAGMMRSDRSLMERLFGDGLLKVLVCTATLAWGVNLPAHTVVIKGTQLYDPKAGGWRDLGMLDVMQIFGRAGRPQFDKSGEGIIITTHDKLAYYLRLLTSQLPIESQFLGSLKDNLNAEVALGTVTNVREACTWLGYTYLFIRMKTNPLVYGITWEEVMGDPSMGAKQRTFIIDAARALDKAKMMRFDEKSGNFYCTELGRIASHFYLQYSSVETYNEMLRRHMSESELITMVAHSSEFENIVVREEEQDELEALARKACPLEIKGGPTDKHGKISILIQVYISRAPIDSSSLHSDAQYISQSLARIMRALFEICLRRGWSEMSSLLLQYCKAVDRKIWPHLHPLRQFDKDLSPQVLWKLEERNVDLDHLYEMEENEIGALIRFSHQGKLVKQYVGYFPYVNLSATVSPITRTVLKVDLHITPEFVWKDRYHGMSERWWIIVEDSENDTIYHSELFTLTKKMARGTPTKISFNVPIFEPHPPQYYIHAISDSWLHAETLFTVSFHNLTLPQTQITHTELLDLKPLPLSALGNKTYEDLYRFSHFNPIQTQAFHVLYHTDNNVLLGAPTGSGKTISAELAMLHLFSTQPDMKVVYIAPLKAIVRERMNDWRKRLVIQLGKKMVEMTGDFTPDLMALLSADIIISTPEKWDGISRNWHSRSYVMKVGLMILDEIHLLGADRGPILEVIVSRMRYISSQTERSIRFVGLSTALANARDLADWLGVTDDGLFNFKPSVRPVPLEVHIQGYPGKFYCPRMNSMNKPAYAAICTHSPNKPVLIFVSSRRQTRLTALDIIQLAASDEKPRQFLSIEDNSLDMVLSQVSDSNLRHTLQFGIGLHHAGLNDRDRSLVEELFSNNKIQVLVCTSTLAWGVNLPAHLVIIKVTEYYDGKTKRYIDYDITDILQMMGRAGRPQYDQHGKAVILVHEPKKSFYKKFLYEPFPVESNLREHLHDHINAEIVSGTISNKEEAIIYLTWTYLYRRLVVNPAYYGLEDTETNTLNSYLSRLVETTFEDLEDSGCIKVDDHSVKYLILGKIASQYYLSYLTVSMFGSNIGPNTTLEVFLHILSAASEFDELPVRHNEDNLNRILSGNVPYPVDQHHLDDPHVKANLLFQAHFSRAELPISDYVTDLKSVLDQSIRIIQAMIDVCANSGWLTSALTCMHLLQMIIQGLWFERDYESLWMLPSMNDDILDHLKSRGVSTVPSLLDLSREELRRVLQPFSASELYQDLQHFPHVDVKVKLHNEQERSKPPTLNIRLQLKNSRRSASRAFAPRFPKAKQEAWWLVLGNATSSELYGLKRISFADRVINTRMELPQTFNVQETKLILVSDCYLGFDLEYSLEHLTKG

SEQ ID NO: 196413 - protein, 1341 aa, Zea Mays
MMRSDRSLMERLFGDGLLKVLVCTATLAWGVNLPAHTVVIKGTQLYDPKAGGWRDLGMLDVMQIFGRAGRPQFDKSGEGIIITTHDKLAYYLRLLTSQLPIESQFLGSLKDNLNAEVALGTVTNVREACTWLGYTYLFIRMKTNPLVYGITWEEVMGDPSMGAKQRTFIIDAARALDKAKMMRFDEKSGNFYCTELGRIASHFYLQYSSVETYNEMLRRHMSESELITMVAHSSEFENIVVREEEQDELEALARKACPLEIKGGPTDKHGKISILIQVYISRAPIDSSSLHSDAQYISQSLARIMRALFEICLRRGWSEMSSLLLQYCKAVDRKIWPHLHPLRQFDKDLSPQVLWKLEERNVDLDHLYEMEENEIGALIRFSHQGKLVKQYVGYFPYVNLSATVSPITRTVLKVDLHITPEFVWKDRYHGMSERWWIIVEDSENDTIYHSELFTLTKKMARGTPTKISFNVPIFEPHPPQYYIHAISDSWLHAETLFTVSFHNLTLPQTQITHTELLDLKPLPLSALGNKTYEDLYRFSHFNPIQTQAFHVLYHTDNNVLLGAPTGSGKTISAELAMLHLFSTQPDMKVVYIAPLKAIVRERMNDWRKRLVIQLGKKMVEMTGDFTPDLMALLSADIIISTPEKWDGISRNWHSRSYVMKVGLMILDEIHLLGADRGPILEVIVSRMRYISSQTERSIRFVGLSTALANARDLADWLGVTDDGLFNFKPSVRPVPLEVHIQGYPGKFYCPRMNSMNKPAYAAICTHSPNKPVLIFVSSRRQTRLTALDIIQLAASDEKPRQFLSIEDNSLDMVLSQVSDSNLRHTLQFGIGLHHAGLNDRDRSLVEELFSNNKIQVLVCTSTLAWGVNLPAHLVIIKGTEYYDGKTKRYIDYDITDILQMMGRAGRPQYDQHGKAVILVHEPKKSFYKKFLYEPFPVESNLREHLHDHINAEIVSGTISNKEEAIIYLTWTYLYRRLVVNPAYYGLEDTETNTLNSYLSRLVETTFEDLEDSGCIKVDDHSVKYLILGKIASQYYLSYLTVSMFGSNIGPNTTLEVFLHILSAASEFDELPVRHNEDNLNRILSGNVPYPVDQHHLDDPHVKANLLFQAHFSRAELPISDYVTDLKSVLDQSIRIIQAMIDVCANSGWLTSALTCMHLLQMIIQGLWFERDYESLWMLPSMNDDILDHLKSRGVSTVPSLLDLSREELRRVLQPFSASELYQDLQHFPHVDVKVKLHNEQERSKPPTLNIRLQLKNSRRSASRAFAPRFPKAKQEAWWLVLGNATSSELYGLKRISFADRVINTRMELPQTFNVQETKLILVSDCYLGFDLEYSLEHLTKG

SEQ ID NO: 196414 - protein, 883 aa, Zea Mays
MARGTPTKISFNVPIFEPHPPQYYIHAISDSWLHAETLFTVSFHNLTLPQTQITHTELLDLKPLPLSALGNKTYEDLYRFSHFNPIQTQAFHVLYHTDNNVLLGAPTGSGKTISAELAMLHLFSTQPDMKVVYIAPLKAIVRERMNDWRKRLVIQLGKKMVEMTGDFTPDLMALLSADIIISTPEKWDGISRNWHSRSYVMKVGLMILDEIHLLGADRGPILEVIVSRMRYISSQTERSIRFVGLSTALANARDLADWLGVTDDGLFNFKPSVRPVPLEVHIQGYPGKFYCPRMNSMNKPAYAAICTHSPNKPVLIFVSSRRQTRLTALDIIQLAASDEKPRQFLSIEDNSLDMVLSQVSDSNLRHTLQFGIGLHHAGLNDRDRSLVEELFSNNKIQVLVCTSTLAWGVNLPAHLVIIKGTEYYDGKTKRYIDYDITDILQMMGRAGRPQYDQHGKAVILVHEPKKSFYKKFLYEPFPVESNLREHLHDHINAEIVSGTISNKEEAIIYLTWTYLYRRLVVNPAYYGLEDTETNTLNSYLSRLVETTFEDLEDSGCIKVDDHSVKYLILGKIASQYYLSYLTVSMFGSNIGPNTTLEVFLHILSAASEFDELPVRHNEDNLNRILSGNVPYPVDQHHLDDPHVKANLLFQAHFSRAELPISDYVTDLKSVLDQSIRIIQAMIDVCANSGWLTSALTCMHLLQMIIQGLWFERDYESLWMLPSMNDDILDHLKSRGVSTVPSLLDLSREELRRVLQPFSASELYQDLQHFPHVDVKVKLHNEQERSKPPTLNIRLQLKNSRRSASRAFAPRFPKAKQEAWWLVLGNATSSELYGLKRISFADRVINTRMELPQTFNVQETKLILVSDCYLGFDLEYSLEHLTKG

SEQ ID NO: 196415 - protein, 1237 aa, Zea Mays
MQQVESMQSMIRIVGLSATLPTYLEVAHFLRVNPDTGLFFFDSSYRPVPLAQQYIGISERDYTKRSELFNTLCYEKVVESIKQGHQALVFVHTRKDTGKTARTLIDLAAKAGELELFSSADHPQFPLIKKDVSKAKSREVVEFFESGFGIHNAGMMRSDRSLMERLFGDGLLKVLVCTATLAWGVNLPAHTVVIKGTQLYDPKAGGWRDLGMLDVMQIFGRAGRPQFDKSGEGIIITTHDKLAYYLRLLTSQLPIESQFLGSLKDNLNAEVALGTVTNVREACTWLGYTYLFIRMKTNPLVYGITWEEVMGDPSMGAKQRTFIIDAARALDKAKMMRFDEKSGNFYCTELGRIASHFYLQYSSVETYNEMLRRHMSESELITMVAHSSEFENIVVREEEQDELEALARKACPLEIKGGPTDKHGKISILIQVYISRAPIDSSSLHSDAQYISQSLARIMRALFEICLRRGWSEMSSLLLQYCKAVDRKIWPHLHPLRQFDKDLSPQVLWKLEERNVDLDHLYEMEENEIGALIRFSHQGKLVKQYVGYFPYVNLSATVSPITRTVLKVDLHITPEFVWKDRYHGMSERWWIIVEDSENDTIYHSELFTLTKKMARGTPTKISFNVPIFEPHPPQYYIHAISDSWLHAETLFTVSFHNLTLPQTQITHTELLDLKPLPLSALGNKTYEDLYRFSHFNPIQTQAFHVLYHTDNNVLLGAPTGSGKTISAELAMLHLFSTQPDMKVVYIAPLKAIVRERMNDWRKRLVIQLGKKMVEMTGDFTPDLMALLSADIIISTPEKWDGISRNWHSRSYVMKVGLMILDEIHLLGADRGPILEVIVSRMRYISSQTERSIRFVGLSTALANARDLADWLGVTDDGLFNFKPSVRPVPLEVHIQGYPGKFYCPRMNSMNKPAYAAICTHSPNKPVLIFVSSRRQTRLTALDIIQLAASDEKPRQFLSIEDNSLDMVLSQVSDSNLRHTLQFGIGLHHAGLNDRDRSLVEELFSNNKIQVLVCTSTLAWGVNLPAHLVIIKGTEYYDGKTKRYIDYDITDILQMMGRAGRPQYDQHGKAVILVHEPKKSFYKKFLYEPFPVESNLREHLHDHINAEIVSGTISNKEEAIIYLTWTYLYRRLVVNPAYYGLEDTETNTLNSYLSRLVETTFEDLEDSGCIKVDDHSVKYLILGKIASQYYLSYLTVSMFGSNIGPNTTLEVFLHILSAASEFDELPVRHNERKCPVSS

SEQ ID NO: 196416 - protein, 609 aa, Zea Mays
MGTRPTVHFQVMGDPSMGAKQRTFIIDAARALDKAKMMRFDEKSGNFYCTELGRIASHFYLQYSSVETYNEMLRRHMSESELITMVAHSSEFENIVVREEEQDELEALARKACPLEIKGGPTDKHGKISILIQVYISRAPIDSSSLHSDAQYISQSLARIMRALFEICLRRGWSEMSSLLLQYCKAVDRKIWPHLHPLRQFDKDLSPQVLWKLEERNVDLDHLYEMEENEIGALIRFSHQGKLVKQYVGYFPYVNLSATVSPITRTVLKVDLHITPEFVWKDRYHGMSERWWIIVEDSENDTIYHSELFTLTKKMARGTPTKISFNVPIFEPHPPQYYIHAISDSWLHAETLFTVSFHNLTLPQTQITHTELLDLKPLPLSALGNKTYEDLYRFSHFNPIQTQAFHVLYHTDNNVLLGAPTGSGKTISAELAMLHLFSTQPDMKVVYIAPLKAIVRERMNDWRKRLVIQLGKKMVEMTGDFTPDLMALLSADIIISTPEKWDGISRNWHSRSYVMKVGLMILDEIHLLGADRGPILEVIVSRMRYISSQTERSIRFVGLSTALANARDLADWLGVTDDGLFNFKPSVRPVPLEVHIQGISWEILLSKNE

SEQ ID NO: 196417 - protein, 1197 aa, Zea Mays
MGTRPTVHFQVMGDPSMGAKQRTFIIDAARALDKAKMMRFDEKSGNFYCTELGRIASHFYLQYSSVETYNEMLRRHMSESELITMVAHSSEFENIVVREEEQDELEALARKACPLEIKGGPTDKHGKISILIQVYISRAPIDSSSLHSDAQYISQSLARIMRALFEICLRRGWSEMSSLLLQYCKAVDRKIWPHLHPLRQFDKDLSPQVLWKLEERNVDLDHLYEMEENEIGALIRFSHQGKLVKQYVGYFPYVNLSATVSPITRTVLKVDLHITPEFVWKDRYHGMSERWWIIVEDSENDTIYHSELFTLTKKMARGTPTKISFNVPIFEPHPPQYYIHAISDSWLHAETLFTVSFHNLTLPQTQITHTELLDLKPLPLSALGNKTYEDLYRFSHFNPIQTQAFHVLYHTDNNVLLGAPTGSGKTISAELAMLHLFSTQPDMKVVYIAPLKAIVRERMNDWRKRLVIQLGKKMVEMTGDFTPDLMALLSADIIISTPEKWDGISRNWHSRSYVMKVGLMILDEIHLLGADRGPILEVIVSRMRYISSQTERSIRFVGLSTALANARDLADWLGVTDDGLFNFKPSVRPVPLEVHIQGYPGKFYCPRMNSMNKPAYAAICTHSPNKPVLIFVSSRRQTRLTALDIIQLAASDEKPRQFLSIEDNSLDMVLSQVSDSNLRHTLQFGIGLHHAGLNDRDRSLVEELFSNNKIQVLVCTSTLAWGVNLPAHLVIIKGTEYYDGKTKRYIDYDITDILQMMGRAGRPQYDQHGKAVILVHEPKKSFYKKFLYEPFPVESNLREHLHDHINAEIVSGTISNKEEAIIYLTWTYLYRRLVVNPAYYGLEDTETNTLNSYLSRLVETTFEDLEDSGCIKVDDHSVKYLILGKIASQYYLSYLTVSMFGSNIGPNTTLEVFLHILSAASEFDELPVRHNEDNLNRILSGNVPYPVDQHHLDDPHVKANLLFQAHFSRAELPISDYVTDLKSVLDQSIRIIQAMIDVCANSGWLTSALTCMHLLQMIIQGLWFERDYESLWMLPSMNDDILDHLKSRGVSTVPSLLDLSREELRRVLQPFSASELYQDLQHFPHVDVKVKLHNEQERSKPPTLNIRLQLKNSRRSASRAFAPRFPKAKQEAWWLVLGNATSSELYGLKRISFADRVINTRMELPQTFNVQETKLILVSDCYLGFDLEYSLEHLTKG

SEQ ID NO: 196418 - protein, 126 aa, Zea Mays
MFGSNIGPNTTLEVFLHILSAASEFDELPVRHNEDNLNRILSGNVPYPVDQHHLDDPHVKANLLFQAHFSRAELPISDYVTDLKSVLDQSIRIIQAMIDVCANSGWLTSALTCMHLLQMIIQLFYF

SEQ ID NO: 196419 - protein, 298 aa, Zea Mays
MFGSNIGPNTTLEVFLHILSAASEFDELPVRHNEDNLNRILSGNVPYPVDQHHLDDPHVKANLLFQAHFSRAELPISDYVTDLKSVLDQSIRIIQAMIDVCANSGWLTSALTCMHLLQMIIQGLWFERDYESLWMLPSMNDDILDHLKSRGVSTVPSLLDLSREELRRVLQPFSASELYQDLQHFPHVDVKVKLHNEQERSKPPTLNIRLQLKNSRRSASRAFAPRFPKAKQEAWWLVLGNATSSELYGLKRISFADRVINTRMELPQTFNVQIVQLRLRHLLLHSWLFTCRDTITSC

SEQ ID NO: 196420 - protein, 50 aa, Zea Mays
MIVNRSIRRFMRHMVPSLGWRPYDMLKTGKVWVIHCSISIAGRWRRTCIF

SEQ ID NO: 196421 - protein, 77 aa, Zea Mays
MHTNMDDERNHQNQEFLGAHPRLIVSPRIQAQITYNKQAKQNKHRYNVTFQKFPKLKYPQKNHPCIQWEAGGGSPDR

SEQ ID NO: 196422 - protein, 65 aa, Zea Mays
MSQSFLIELNRKQGLRPYENVICITEPCSNPPLDQDYLEGIQDMQQQNIPSQYHNVKNLLVLILK

SEQ ID NO: 196423 - protein, 378 aa, Zea Mays
MQLRISPSMRSITISSSNGVVDSMKVRVAPQPPPPPPPPHGAARRGGGGGGGWYWRAVAFPLVVALGCLLPFAFILAAVPALEAGGSKCSSVDCLGRRIGPSFLGRQGGDSTRLVQDLYRFFDQVNKEEFPSDEKLPESFRDFLLEMKDNHYDARTFAVRLKATMETMDKEVKRSRLAEQLYKHYAATAIPKGIHCLSLRLTDEYSSNAHARKQLPPPELLPLLSDNSLQHYILASDNILAASVVVSSIVRSSSLPEKVVFHVITDKKTYPGMHSWFALNSIAPAIVEVKGVHQFAWLTRENVPVLEAIENHRGVRNHYHGDHGTVSSASDNPRVLASKLQARSPKYISLLNHLRIYLPEVPGHQLSICHVSFFYRFI

SEQ ID NO: 196424 - protein, 325 aa, Zea Mays
MKDNHYDARTFAVRLKATMETMDKEVKRSRLAEQLYKHYAATAIPKGIHCLSLRLTDEYSSNAHARKQLPPPELLPLLSDNSLQHYILASDNILAASVVVSSIVRSSSLPEKVVFHVITDKKTYPGMHSWFALNSIAPAIVEVKGVHQFAWLTRENVPVLEAIENHRGVRNHYHGDHGTVSSASDNPRVLASKLQARSPKYISLLNHLRIYLPELFPNLNKVVFLDDDIVVQRDLSPLWAINLEGKVNGAVETCRGEDSWVMSKRFRTYFNFSHPVIARSLDPDECAWAYGMNIFDLAAWRKTNIRDTYHFWLKEILYCVQCSKI

SEQ ID NO: 196425 - protein, 264 aa, Zea Mays
MNSSGEFDAAFAATIAAAAFAIAAREEKLAAQKKSVPIEEVPRALSLVKRAGSTKKPAGGNKISRWFSGKEPLEHDDDGPVSRPLKPAPGKPEGMPADHKVAPKILETSLSVRKGSGSSGKTTDRKGSKKFEQEHVQKAPSIIRPSTSYHSRRNGEDAAGVAAIGGTRSKADEWEKAKLAKVREEYEKMMETIAEWETEKKTVLDRKRAKALEEYNQEMTRISKIAGGARSMAEERKYNDENKIKEKAHKIRSTRKPPRTCACF

SEQ ID NO: 196426 - protein, 275 aa, Zea Mays
MNSSGEFDAAFAATIAAAAFAIAAREEKLAAQKKSVPIEEVPRALSLVKRAGSTKKPAGGNKISRWFSGKEPLEHDDDGPVSRPLKPAPGKPEGMPADHKVAPKILETSLSVRKGSGSSGKTTDRKGSKKFEQEHVQKAPSIIRPSTSYHSRRNGEDAAGVAAIGGTRSKADEWEKAKLAKVREEYEKMMETIAEWETEKKVKARRHKEQRETVLDRKRAKALEEYNQEMTRISKIAGGARSMAEERKYNDENKIKEKAHKIRSTRKPPRTCACF

SEQ ID NO: 196427 - protein, 349 aa, Zea Mays
MAVGGLQGAKKRKREHAEGKAKPRKQVKGGGDGAKRKSHSAAGGYTAHGGAGEVVARKKTPVTPKEKRLAAKTLYEFDDLESIIDRTLKRDFDTEEALWLLKIGLVCIPDSPKIKPSMSMVAKILQGPFGGPGCQNQEHEKHFEHFTPNMSKTRNESAFPQDEIDSHREHIYNELTSDSIASKKPKIRKRENNNSVSSSAPNIPNTQDFITTFCEVVEDFCGKTEIPEDGNCGDWLSIPLGDVKVLVNEITSVRSKRILHEVPMDTVTRLLDVIDRQIRYSQVSMNKVEALYRLFKKIGNTFIDDGLINKALSNGKPTVVEFYANWYEVCRELALDIYKAEQQYKSAGN

SEQ ID NO: 196428 - protein, 293 aa, Zea Mays
MAVGGLQGAKKRKREHAEGKAKPRKQVKGGGDGAKRKSHSAAGGYTAHGGAGEVVARKKTPVTPKEKRLAAKTLYEFDDLESIIDRTLKRDFDTEEALWLLKIGLVCIPDSPKIKPSMSMVAKILQGPFGGPGCQNQEHEKHFEHFTPNMSKTRNESAFPQDEIDSHREHIYNELTSDSIASKKPKIRKRENNNSVSSSAPNIPNTQDFITTFCEVVEDFCGKTEIPEDGNCGDWLSIPLGDVKVLVNEITSVRSKRILHEVPMDTVTRLLDVIDRQIRYSQGLSIDVKENSA

SEQ ID NO: 196429 - protein, 67 aa, Zea Mays
MSMVAKILQGECAVSDRIMRPGLITDAMDLKVRMVEPIQFNLTSCSSTAAPDLVRSIWRSRMSKSRT

SEQ ID NO: 196430 - protein, 160 aa, Zea Mays
MPPRIGSAPYLSVFIGFYDSAPLCCYCLYRRHVVWELGASSRATAGTRGGLTKHTKSHLGNEWKKPFAGSSHAKGIILEKIGIEAKQPNSAIHKCARVQLVKDGKKIAAFVPNDGCLNYIEENDEVLIVGRGDIPGVRFKVVKVSGVSLLALFKEKKPRS

SEQ ID NO: 196431 - protein, 258 aa, Zea Mays
MSMVAKILQGPFGGPGCQNQEHEKHFEHFTPNMSKTRNESAFPQDEIDSHREHIYNELTSDSIASKKPKIRKRENNNSVSSSAPNIPNTQDFITTFCEVVEDFCGKTEIPEDGNCGDWLSIPLGDVKVLVNEITSVRSKRILHEVPMDTVTRLLDVIDRQIRYSQVSMNKVEALYRLFKKIGNTFIDDGLINKALSNGKPTVVEFYANWELDSENPVADVESIVAKGIRDGAINATIDQANGWMVWKETGDVYSTNEP

SEQ ID NO: 196432 - protein, 322 aa, Zea Mays
MGMVPNGLLPSASAGMTRRLDPERWAVAEDRTAELIACIQPNVYSEGRRLAVYHYVQRLIMNCLSCQVFTFGSVPLKTYLPDGDIDVTAFSNSEELKEIWANLVRDALEREEKDENAEFHVKEVQYIQAEVKIIKCLVENIVVDISFNQVGGLCTLCFLEEIDNLISQNHLFKRSIILIKAWCFYESRILGAHHGLISTYALETLVLYIFHIFNNSFTGPLEVLYRFLEFFSNFDWEKFCLSLWGPVPISSLPDMTAIPPRMDSGELLLNKSFLDTCSSAYGVVPHTQENQGQPFVSKHFNVIDPLRTNNNLGRSVSKEGSF

SEQ ID NO: 196433 - protein, 1062 aa, Zea Mays
MTAIPPRMDSGELLLNKSFLDTCSSAYGVVPHTQENQGQPFVSKHFNVIDPLRTNNNLGRSVSKGNFFRIRSAFAYGAKRLGKLLECPKEALIPELNQFFTNTWIRHGSGSRPDVPIPSLVDVRPMKVVSSVVSSSQRSLAAFKKKVENPKLHVNQDNLRPNQDNLTGVGDIHYRNLPRTVNPSVSHVQHQKSYTPQGNAKVSEQLERNNSDGLMQSARDKRVPNGLFVNDRNGQNRSRFARTRSSPELTDSSTEGFRGRRTNAVGMEKSFGVDYSRRNILIPEVSSNHSTKSSQDESVSSMNGSSHPSALAASDSNSVSSSFRDDNGFVMNEELPSVSESSDMHHDEQVLANLMESMKLHGFNGQIQLPMQIPSHLSVAHPPLLAPTTYSQKHLAGVPPANLIGTPWLPNMQFLHGFVPPMAHYIHNPNFAPNIEDGTETEKPNTSDVNHDAGKTWQEYGVGFSRHFDPEARDPHFYGIDGKEHSSLPNGVPGAPLERQMKFTVENNVVGDETYTGMFQIHTGREPAVDYSKRSGYGNVPSSHASSSKGKTLDSSSWDEMTVNTTIPPRENWGKRPAFVAPATTTHGNTGWQMGNITEHLAAEVNDGPRNGTVVPIITEASEIVTGSDSFSSKSRTSQVPNELDPSQVGMPNPVFTPFLIGSPQHRQADSSGLTFVPTGPPVPFVVLPFVPGNNDGSGPQFERSEGIDQLPANTVGQFFGSLNDVHQQDSSAISTVSSSTMTEPSGEHKPDILHSDFVSHWHNLQYGRLCQNPRPMGPVLYPVPVPPMYLQGHVPWDGPGRPAAPNVNWTQMVGGQRVFPVMPVQPATERTGVFQHYGEDAPRYRGGTGTYLPNPKVHFRDRHSNSRNYRGGYNGDRGDYNDKEGSWINSKQRNPNRGYGRSQSERSGMRSDRQVTDESRSDRQRRTYRNDSYRHEASSQYLVQGQPFGSTSSMRKPGNTVHGVYTPPSTYSNGTSALSGPPGPPFFMVYSYEQGSNHAASSSEPIEFGSLGPLPAADGDDIPRSTRQVMPNGFYGQRRGRYRGGSSHSSPDQPSSPQPRR

SEQ ID NO: 196434 - protein, 395 aa, Zea Mays
MVPNTSFEFLISYMQVIKLYERCVIACASYSEFWIRYVQCMEDKGSLDLANNALARATHVFVKKQPEIHLFSARFKELNGDISGARAEYQHLYSDLCPGFLEAIVKHSNMEHRLGDKELSCSVYEKAIAAEKGKEQSQLLPTLLIQYSRFLFLAIRDLEKAREILTVLHEQLNVTKTVLEAVIHLESIFPCEKRIDFLDSLVEKFVTPESSQGEVASLVDKEEISSIFLEFLDLFGDAKSIKKALTRHTTLFSCKRSILPSKKRKADDTVVSDRDKFAKTVVTQSATGTDPNASNPPVWPATSEASGQQWGASYAQQAAYPAYGTYDYSHQMPQPAPQAAAYGAYPPTYSAQAYTQQSYPQPAVIPAAPVPAPTAPSAYPQQPAAAQPYYGTTYY

SEQ ID NO: 196435 - protein, 736 aa, Zea Mays
MEQDQSPAVDSADSGAAAFDFATGNAPSSAVTSGSAVAPDGGAQAADTSAYQAEHTELNGTTGDMSNYQSAGAAENGTAVTEIGEPVPEPSYEEAVLSAEEARLWSVVTANCLDFNAWTTLIEETEKNAENDILKIRKVYDSFLTEFPLCFGYWKKYADHEARLDGVNKVIEVYERAVLAVTYSVDIWYNYCQFAISTYDDPDIVRRLFERGLAYVGTDYRSNILWDEYIKYEESLEAWSHLAVIYTRVLEHPIQQLDRYFNCLKELASKHSFSEILTAEEASVYVVTSETSAQAPDGDTHPDDIDKAGQPELSSLADAENLAKYVSMREEMYKKAKEYESEIIGFELAIRRPYFHVKPLDNPELENWHSYLDFIEKEEDINKVIKLYERCVIACASYSEFWIRYVQCMEDKGSLDLANNALARATHVFVKKQPEIHLFSARFKELNGDISGARAEYQHLYSDLCPGFLEAIVKHSNMEHRLGDKELSCSVYEKAIAAEKGKEQSQLLPTLLIQYSRFLFLAIRDLEKAREILTVLHEQLNVTKTVLEAVIHLESIFPCEKRIDFLDSLVEKFVTPESSQGEVASLVDKEEISSIFLEFLDLFGDAKSIKKALTRHTTLFSCKRSILPSKKRKADDTVVSDRDKFAKTVVTQSATGTDPNASNPPVWPATSEASGQQWGASYAQQAAYPAYGTYDYSHQMPQPAPQAAAYGAYPPTYSAQSSLSTGIQLRNQELGL

SEQ ID NO: 196436 - protein, 126 aa, Zea Mays
MVSFEMNDLKMDFGQPLLFSSKGFLLLDGFFNNRLSHRSLTATEENEFRFSLLLLYFNILPSQISCGYGYVPSLPFSLTCLVGGRIFCCCVNYPSSVVFHRPECIFPVNTLKKVLMQASLWGEMKS

SEQ ID NO: 196437 - protein, 123 aa, Zea Mays
MALLYSSVDFGQPLLFSSKGFLLLDGFFNNRLSHRSLTATEENEFRFSLLLLYFNILPSQISCGYGYVPSLPFSLTCLVGGRIFCCCVNYPSSVVFHRPECIFPVNTLKKVLMQASLWGEMKS

SEQ ID NO: 196438 - protein, 289 aa, Zea Mays
MLHGMEEAHKKYGGMGTLLVNKVSAESANQFGELVADPETNELLHYTEKPETFVSDLINCGVYIFTPDILSAIEDVLKQKKDRANLRRVSSIEALHSATKALPPDFVRLDQDILSPRAGKKELYTYQTLDFWEQIKTPGMSLRCSGLYLSQFRHTSPHLLASGDGKRTATIVGDVYIHPSAKVHPTSKIGPNVSISANARVGAGARLINCIILDDVEIMENAVVIHSIVGWKSSIGKWSRVQGEGDHNAKLGITILGEAVDVEDEVVVVNSIVLPNKTLNVSVQEEIIL

SEQ ID NO: 196439 - protein, 247 aa, Zea Mays
MAGSEQRVVAVIMVGGPTKGTRFRPLSLNVPKPLFPIAGQPMVHHPISACSRIPHLAQIYLIGFYEEREFALYVSSISHELRIPVRYLREDKPHGSAGGLYSFRDYIMEDSPSHIVLLNCDVCSSFPLPDMLEAHKKYGGMGTLLVNKVSAESANQFGELVADPETNELLHYTEKPETFVSDLINCGVYIFTPDILSAIEDVLKQKKDRGIVSCYITTIFLVNVCDCLKQNILCLFYCFKCQLLLTK

SEQ ID NO: 196440 - protein, 220 aa, Zea Mays
MAGSEQRVVAVIMVGGPTKGTRFRPLSLNVPKPLFPIAGQPMVHHPISACSRIPHLAQIYLIGFYEEREFALYVSSISHELRIPVRYLREDKPHGSAGGLYSFRDYIMEDSPSHIVLLNCDVCSSFPLPDMLEAHKKYGGMGTLLVNKVSAESANQFGELVADPETNELLHYTEKPETFVSDLINCGVYIFTPDILSAIEDVLKQKKDRVLRFSKFAACI

SEQ ID NO: 196441 - protein, 275 aa, Zea Mays
MGTLLVNKVSAESANQFGELVADPETNELLHYTEKPETFVSDLINCGVYIFTPDILSAIEDVLKQKKDRANLRRVSSIEALHSATKALPPDFVRLDQDILSPRAGKKELYTYQTLDFWEQIKTPGMSLRCSGLYLSQFRHTSPHLLASGDGKRTATIVGDVYIHPSAKVHPTSKIGPNVSISANARVGAGARLINCIILDDVEIMENAVVIHSIVGWKSSIGKWSRVQGEGDHNAKLGITILGEAVDVEDEVVVVNSIVLPNKTLNVSVQEEIIL

SEQ ID NO: 196442 - protein, 380 aa, Zea Mays
MAGSEQRVVAVIMVGGPTKGTRFRPLSLNVPKPLFPIAGQPMVHHPISACSRIPHLAQIYLIGFYEEREFALYVSSISHELRIPVRYLREDKPHGSAGGLYSFRDYIMEDSPSHIVLLNCDVCSSFPLPDMLEAHKKYGGMGTLLVNKVSAESANQFGELVADPETNELLHYTEKPETFQICGVYLALKLFIQQLNFVRLDQDILSPRAGKKELYTYQTLDFWEQIKTPGMSLRCSGLYLSQFRHTSPHLLASGDGKRTATIVGDVYIHPSAKVHPTSKIGPNVSISANARVGAGARLINCIILDDVEIMENAVVIHSIVGWKSSIGKWSRVQGEGDHNAKLGITILGEAVDVEDEVVVVNSIVLPNKTLNVSVQEEIIL

SEQ ID NO: 196443 - protein, 57 aa, Zea Mays
MQLKVQQKKGYLLLGVSVIHAINVYVHLHLSRLNFFILAATFEICRSKSNFKRKTKR

SEQ ID NO: 196444 - protein, 464 aa, Zea Mays
MASSDLAESLLPGGGGGASASHDEYEERAYDSEDKISIAVSDSDGEDDGTPASRPPFSWRKLWRFTGPGFLMCIAFLDPGNLEGDLQAGAAAGYQLLWLLLWATIMGALMQLLSARLGVATGKHLAELCRQEYPPWATRALWAMTELALVGADIQEVIGSAIAIKILSGGAIPLWGGVVITALDCFIFLFLENYGVRKLEAFFAVLIATMAVSFAVMFGETKPSGKELLIGLVVPKLSSKTIKQAVGIVGCIIMPHNVFLHSALVQSRKIDTNKKSRVLEAVYYYNIESILALIVSFFINICVTTVFAKGFYGSKQADSIGLENAGQYLQEKYGTAFFPILYIWAVGLLASGQSSTITGTYAGQFVMGGFLNLRLKKWLRAMITRSFAIIPTMIVALFFDTEDPTMDILNEALNVLQSIQIPFALIPLITLVSKEQIMGSFVIGPITKVISWIVTVFLMLINGG

SEQ ID NO: 196445 - protein, 120 aa, Zea Mays
MMALRGVWQLQKLVVNYCDWGGSSRGIRAFMEAHLPAFKEKIPHLEVVTELVRGQHPNLKGIYKNHNERVVCVRNLPPEEILLQATRLRNSLGRKVVKLRTRHVTKRPSVQGTWTTELKM

SEQ ID NO: 196446 - protein, 265 aa, Zea Mays
MSPPRKSRQREDLSPPRKGARHITEEPRDISPRKKRDISPSRKSTKEGASKQVKKSGLMTAEEVKEDIRKIKEAEMIKFASQDPSLVGKGAKAVFRDKEGRRISEEEMCKAKEPEKPKEIHIEWGKGLVQKREAESRLKEIEAEKSKPFARTRDDPELDNMLKERIRWGDPMAHLVKRKDPEFILEDLGDDEKMKESGFIVPQSIPTHSWLKRGVDAPPNRYGIKPGRHWDGVDRSNGFEKDMFKLKNEKQAMEQEAYLWSVSDM

SEQ ID NO: 196447 - protein, 105 aa, Zea Mays
MLKERIRWGDPMAHLVKRKDPEFILEDLGDDEKMKESGFIVPQSIPTHSWLKRGVDAPPNRYGIKPGRHWDGVDRSNGFEKDMFKLKNEKQAMEQEAYLWSVSDM

SEQ ID NO: 196448 - protein, 545 aa, Zea Mays
MVAAAAAATAPDPARPSRPPLTPALDKPNSAAARRNSRSNKPVSSRYLPAAASPASSTSSSSSSSSSSRRSLSAQRARSSTPPPQHSTSPTTTASAAATATATTMRSLSVSFQGESFFYKTSRAPRASSPSSPAARRGPTPERRKSVSSVPEAENARPPGRWPAAKPKASDPLARSLDCSLDRKDSILAAVHLLRRSMAFDSTTSLSPSDPAAAAAPDLYASSDTDSVSSGSNSGASDPPRRGISVPARFWQETNSRLRRLPEPGLPLPSSGRRSFSDSPMSPRLPGRSPSPCRGSRGGASPSRGRSGEASPNGHMVQAPANAPSIISFAAEVRRAKKGENRIEEAHRLRLLDNRYLQWRCINARTDATLLVQSFTAEKTLHSAWKEISRLRDNVSTKRSRLQLQKQKLKLFAILRRQMSFLEDWSHIEKHHSSALSAAIKALKASTLRLPVVDGAKADALAVKEAVNSAVDVMNTMTSSICNLLSKVEGTSSVVSELSKLATQEQMLLDQSKDLLSTVAAIHVKNCSLQTHMLQRNQKQSPAQL

SEQ ID NO: 196449 - protein, 168 aa, Zea Mays
MKTLHSAWKEISRLRDNVSTKRSRLQLQKQKLKLFAILRRQMSFLEDWSHIEKHHSSALSAAIKALKASTLRLPVVDGAKADALAVKEAVNSAVDVMNTMTSSICNLLSKVEGTSSVVSELSKLATQEQMLLDQSKDLLSTVAAIHVKNCSLQTHMLQRNQKQSPAQL

SEQ ID NO: 196450 - protein, 198 aa, Zea Mays
MRGVCSCSWWRACRWRPSWRSSTLRGCRSCRWTRASSRSTARPCCGWSSSSWAPSSGGWSPSPPSPTSAASRRGSGRTSAGRSSCAPWSASSRRSEDELGGVPAVDHRRSIHPRRSRQGDARRQSGRAQGDPGLIISTARHRACVLLLQRNDSGGRQVADAVDVDVDGGGVLGRLCRRARRGERESQPPGRFRVRGRQ

SEQ ID NO: 196451 - protein, 61 aa, Zea Mays
MASLPVPHTLPRVSPAIVGAARGRAAVRVRTATAALGGGCGGGGGMEQRHGDAPHSPESRG

SEQ ID NO: 196452 - protein, 94 aa, Zea Mays
MSNIGKSTNILWHNCLIGQSDRQKLLGQKGCVVWITGLSGSGKSTLACALSRELHCRGHLTYVLDGDNLRHGLNRDLSFKAEDRAENIRRVAKS

SEQ ID NO: 196453 - protein, 191 aa, Zea Mays
MSNIGKSTNILWHNCLIGQSDRQKLLGQKGCVVWITGLSGSGKSTLACALSRELHCRGHLTYVLDGDNLRHGLNRDLSFKAEDRAENIRRVGEVAKLFADAGVICIASLISPYRRDRDACRALLPHSNFIEVFIDLPLKICEARDPKGLYKLARTGKIKGFTGIDDPYEPPINGEVSLKSMPSFIITPYNC

SEQ ID NO: 196454 - protein, 207 aa, Zea Mays
MASLPVPHTLPRVSPAIVGAARGRAAVRVRTATAALGGGCGGGGGMEQRHGDAPHSPGKSTLACALSRELHCRGHLTYVLDGDNLRHGLNRDLSFKAEDRAENIRRVGEVAKLFADAGVICIASLISPYRRDRDACRALLPHSNFIEVFIDLPLKICEARDPKGLYKLARTGKIKGFTGIDDPYEPPINGEVSLKSMPSFIITPYNC

SEQ ID NO: 196455 - protein, 241 aa, Zea Mays
MAVGKNKRISKGKKGGKKKTVDPFSKKDWYDIKAPSVFSVRNIGKTLVSRTQGTRGDEDQAYRKIRLRAEDVQGRNVLTNFWGMNFTTDKLRSLVKKWQTLIEAHVDVKTTDNYMLRLFCIGFTKRRPNQVKRTCYAQASQIRQIRRKMVEIMINQASTCDLKELVSKFIPEVIGKEIEKSTSSIFPLQNVFIRKVKILKAPKFDLGKLMEVHGDYKEDVGVKLERPVEGDEAGQEVAAAE

SEQ ID NO: 196456 - protein, 75 aa, Zea Mays
MVASFVSFTCNSSFVPGAEMQTAPGYHQLLNAVVDLLADGHPDPGQEEDVVSWACGRPHDQKHASMRQQQQIAAN

SEQ ID NO: 196457 - protein, 119 aa, Zea Mays
MYNHNKWRGRCTQGVCLAPKQKIRIKLRSYWVPLIEDSCKKIIEAAQTTNAKTMGPVPLPTKRRVYCVLNSPHVHKDSRFHFEIRTHQRLIDIMYPTAQTIDSLMQLQLPAGVDVEVKL

SEQ ID NO: 196458 - protein, 455 aa, Zea Mays
MAVMNLGYRKILSTPVMAATYQTGLVAEPQLLNTEIITRRATNSVADTNRKDKCVGYLDVFVHQARDIHNVCIYHKQDVYAKLCLTSSPDVSCSTKVINSAGRNPVFEESLRLDVQTVDASLKCEIWMLSRVRNYLEDQLLGFALVPLVDIVIGNGKLVQEFSLTSTDLFHTPAGFVHLSLSYAGCSPDVVLISSPNKSPSTVDDSGNDHVVPAQLEKIVFPDLNVEKEDEIMVSKYLEMTSDSETPIKVENVMSLHSANDDDVPSKLEKIKFIDSESRAKAENGKMLLFGVAVPSTAICADKVEEHRDESPLSCVSTTGSSTTLSATTQSVSEPSETSVEASPRQCHREKSQDVTGGEANSSETPAKDEVIKPVICVNLQPEQSVVQQDIVDMYMKSMQQFTESLAKMKLPLDVENTSPSNDDSYSSTIEKTSPSPSSSAAKGSRVFYGSRAFF

SEQ ID NO: 196459 - protein, 391 aa, Zea Mays
MLVGWGGNNGSTLTAGVIANREGISWATKDKVQQANYYGSLTQASTIRVGSYNGEEIYAPFKSLLPMVNPDDLVFGGWDISSMNLADAMTRAKVLDIDLQKQLRPYMESMVPLPGVYDPDFIAANQGSRANNVIKGTKKEQVEQIIKDIREFKEKNKVDKVVVLWTANTERYSNVCAGLNDTMENLLASVDKNEAEISPSTLYAIACVTEGVPFINGSPQNTFVPGLIDLAIKNNCLIGGDDFKSGQTKMKSVLVDFLVGAGIKPTSIVSYNHLGNNDGMNLSAPQTFRSKEISKSNVVDDMVSSNAILYGPGEHPDHVVVIKYVPYVGDSKRAMDEYTSEIFMGGKSTIVLHNTCEDSLLAAPIILDLVLLAELSTRIQLKPEGTVRAHE

SEQ ID NO: 196460 - protein, 254 aa, Zea Mays
MIRTSSPLTRALVPTMSSRAPRKNRWSRSSKISGLIDLAIKNNCLIGGDDFKSGQTKMKSVLVDFLVGAGIKPTSIVSYNHLGNNDGMNLSAPQTFRSKEISKSNVVDDMVSSNAILYGPGEHPDHVVVIKYVPYVGDSKRAMDEYTSEIFMGGKSTIVLHNTCEDSLLAAPIILDLVLLAELSTRIQLKPEGTDKFHSFHPVATILSYLTKAPLVPPGTPVVNALAKQRAMLENIMRACVGLAPENNMILEYK

SEQ ID NO: 196461 - protein, 448 aa, Zea Mays
MVMLVGWGGNNGSTLTAGVIANREGISWATKDKVQQANYYGSLTQASTIRVGSYNGEEIYAPFKSLLPMVNPDDLVFGGWDISSMNLADAMTRAKVLDIDLQKQLRPYMESMVPLPGVYDPDFIAANQGSRANNVIKGTKKEQVEQIIKDIREFKEKNKVDKVVVLWTANTERYSNVCAGLNDTMENLLASVDKNEAEISPSTLYAIACVTEGVPFINGSPQNTFVPGLIDLAIKNNCLIGGDDFKSGQTKMKSVLVDFLVGAGIKPTSIVSYNHLGNNDGMNLSAPQTFRSKEISKSNVVDDMVSSNAILYGPGEHPDHVVVIKYVPYVGDSKRAMDEYTSEIFMGGKSTIVLHNTCEDSLLAAPIILDLVLLAELSTRIQLKPEGTDKFHSFHPVATILSYLTKAPLVPPGTPVVNALAKQRAMLENIMRACVGLAPENNMILEYK

SEQ ID NO: 196462 - protein, 364 aa, Zea Mays
MNLADAMTRAKVLDIDLQKQLRPYMESMVPLPGVYDPDFIAANQGSRANNVIKGTKKEQVEQIIKDIREFKEKNKVDKVVVLWTANTERYSNVCAGLNDTMENLLASVDKNEAEISPSTLYAIACVTEGVPFINGSPQNTFVPGLIDLAIKNNCLIGGDDFKSGQTKMKSVLVDFLVGAGIKPTSIVSYNHLGNNDGMNLSAPQTFRSKEISKSNVVDDMVSSNAILYGPGEHPDHVVVIKYVPYVGDSKRAMDEYTSEIFMGGKSTIVLHNTCEDSLLAAPIILDLVLLAELSTRIQLKPEGTDKFHSFHPVATILSYLTKAPLVPPGTPVVNALAKQRAMLENIMRACVGLAPENNMILEYK

SEQ ID NO: 196463 - protein, 522 aa, Zea Mays
MRASDSAAAAAAAEAEWTEEIDFLLGVGEIPHVTSPQGRQRGVGVIGDGNGVHRASGSDGYTSPLRLGCRRVHCPPGADGYDAQHAKYPYYMVLNRRDNAAPPHGGGDAGGMGFPTQSSVTGPLVGSAVPSPSPPPPSPLPLGADDPDQQLIANQLRCLRIGDAQGALLHQGRAPIMSTARTDVPAGHDAYHGYTFAASGSSFPRDRVFLDQAKAVGHVAARPHHRFVSDAGLDDFGGFPGALDTSIGSFMYNRAGHATGIGCGQGLVQSDFPESSYLLPSQACVEFPSSSRFALKRHHACGGVPMADNGFGRGRNPCENSLMFDKKNMNSLEREKERRFQRVSSRTLRFNNLVPVKGGSIYHMAKDQNWCRYLQDKLLEGKHHVDVIFEGIINHIADLMISSFGNYLAQEIVEVCDEGQMLRIILVLTQYPLKQLIAVSLNTHGTRVVQKLIEKVSSREQIMLIISALQPSFMLLVNDHNGHHVIQRCLVNFGVEDNKELRGPMCFGTGNSFRKCTLGISV

SEQ ID NO: 196464 - protein, 355 aa, Zea Mays
MDLLDARHRHTPDSSSSPHAASDMGLPLAGAAYQPYVSELLSFSIERLHKEPELLRVDAERVRRQMQEVAVENYGAFIAASEALSFVRAQLESFDGHLEAMIEEIPNLTSGCTEFVESAQQILEERKLNQTLLANHTTLLDLLEIPPLMDTCIRNGNYDEALDLEAFVSKISKLHPDLPVVQGLAAEVKKTVQSLISQLLQKLRSNIQLPECLRIVAHLRRIGVFSESELRLQFLRCREAWLSGILEDLDQRNVYDYLKGMVTCHRVHLFDVVNQYRAIFNNDKSGNDENSEGGLLFSWAMQQVSNHLATLQVMLPSITEGGSLSNILEQCMYCAMGLGLVGLDFRGLLPPIFEE

SEQ ID NO: 196465 - protein, 317 aa, Zea Mays
MDLLDARHRHTPDSSSSPHAASDMGLPLAGAAYQPYVSELLSFSIERLHKEPELLRVDAERVRRQMQEVAVENYGAFIAASEALSFVRAQLESFDGHLEAMIEEIPNLTSGCTEFVESAQQILEERKLNQTLLANHTTLLDLLEIPPLMDTCIRNGNYDEALDLEAFVSKISKLHPDLPVVQGLAAEVKKTVQSLISQLLQKLRSNIQLPECLRIVAHLRRIGVFSESELRLQFLRCREAWLSGILEDLDQRNVYDYLKGMVTCHRVHLFDVVNQYRAIFNNDKSGNDENSEGGLLFSWAMQQRGSKFILKEYEYGG

SEQ ID NO: 196466 - protein, 441 aa, Zea Mays
MATSRPWCIRNGNYDEALDLEAFVSKISKLHPDLPVVQGLAAEVKKTVQSLISQLLQKLRSNIQLPECLRIVAHLRRIGVFSESELRLQFLRCREAWLSGILEDLDQRNVYDYLKGMVTCHRVHLFDVVNQYRAIFNNDKSGNDENSEGGLLFSWAMQQVSNHLATLQVMLPSITEGGSLSNILEQCMYCAMGLGLVGLDFRGLLPPIFEDAVLNLFSKNMSMAVENFQVVLDSHRWVPMPSVGFVANGVVDDTSDDVTPPSVLMEHPPLAVFVNGVSAAMNELRPCTPLSLKVILAQEVVKGLHAVSDSLVRYKAMRMLRGNESALFLSLCQAFIEVVHPYCAACFGRCYPNGATLISECQGTLDAVRQLLTIPARSNSSSIERKQSGAIERKQSVESPGTAVTNNELSADGPGLEINDAATTTTPPVEDDVSTHPPASK

SEQ ID NO: 196467 - protein, 250 aa, Zea Mays
MGLGLVGLDFRGLLPPIFEDAVLNLFSKNMSMAVENFQVVLDSHRWVPMPSVGFVANGVVDDTSDDVTPPSVLMEHPPLAVFVNGVSAAMNELRPCTPLSLKVILAQEVVKGLHAVSDSLVRYKAMRMLRGNESALFLSLCQAFIEVVHPYCAACFGRCYPNGATLISECQGTLDAVRQLLTIPARSNSSSIERKQSGAIERKQSVESPGTAVTNNELSADGPGLEINDAATTTTPPVEDDVSTHPPASK

SEQ ID NO: 196468 - protein, 264 aa, Zea Mays
MDLLDARHRHTPDSSSSPHAASDMGLPLAGAAYQPYVSELLSFSIERLHKEPELLRVDAERVRRQMQEVAVENYGAFIAASEALSFVRAQLESFDGHLEAMLPECLRIVAHLRRIGVFSESELRLQFLRCREAWLSGILEDLDQRNVYDYLKGMVTCHRVHLFDVVNQYRAIFNNDKSGNDENSEGGLLFSWAMQQVSNHLATLQVMLPSITEGGSLSNILEQCMYCAMGLGLVGLDFRGLLPPIFEELFWIRTAGFRCHLLAL

SEQ ID NO: 196469 - protein, 263 aa, Zea Mays
MPWFEMWLPPVPGEGAVAAAGGLFLDGADAAAHGALLAAMPGCSLSFVLRHQRCRGSPPGFLSLTMSVKGGRGFVPAPVGLLAGAEEKSGAEESDALVAGKRAVEAEAEAEAEGVILLQEKEKKKKKLDDCAGAGAMNMTKHLWAGAVAAMISRTAVAPLERLKLEYIVRGEQRNLFELMHAIATTQGLKGFWKGNFVNILRTAPFKAVNFYAYDSYRKQLVKWAGNEEATNFERFIAGAFAGVTATIMCIPMDTDKDGSSWR

SEQ ID NO: 196470 - protein, 422 aa, Zea Mays
MPWFEMWLPPVPGEGAVAAAGGLFLDGADAAAHGALLAAMPGCSLSFVLRHQRCRGSPPGFLSLTMSVKGGRGFVPAPVGLLAGAEEKSGAEESDALVAEAEGVILLQEKEKKKKKLDDCAGAGAMNMTKHLWAGAVAAMISRTAVAPLERLKLEYIVRGEQRNLFELMHAIATTQGLKGFWKGNFVNILRTAPFKAVNFYAYDSYRKQLVKWAGNEEATNFERFIAGAFAGVTATIMCIPMDTIRTKMVAPGGEALGGVIGVARHMIQTEGFFSLYKGLVPSLISMAPSGAVFYGVYDILKMAYLHSPEGKKRVSMMKQQKQEANALDQLELGTVRTLLYGAIAGCCAEAATYPFEVVRRQLQMQVKATRMNAFATCLKIVDQGGVPALYAGLIPSMLQVLPSASISYFVYELMKIVLKVE

SEQ ID NO: 196471 - protein, 283 aa, Zea Mays
MASGTAVAPLERLKLEYIVRGEQRNLFELMHAIATTQGLKGFWKGNFVNILRTAPFKAVNFYAYDSYRKQLVKWAGNEEATNFERFIAGAFAGVTATIMCIPMDTIRTKMVAPGGEALGGVIGVARHMIQTEGFFSLYKGLVPSLISMAPSGAVFYGVYDILKMAYLHSPEGKKRVSMMKQQKQEANALDQLELGTVRTLLYGAIAGCCAEAATYPFEVVRRQLQMQVKATRMNAFATCLKIVDQGGVPALYAGLIPSMLQVLPSASISYFVYELMKIVLKVE

SEQ ID NO: 196472 - protein, 355 aa, Zea Mays
MAPVDLTPRQPRKAYGGDAGAYYEWSPADLPMLGVASIGAAKLSLAAGGLSLPSYSDSSKVAYVLEGTGTCGIVLPEATKEKVLAVKEGDALALPFGVVTWWHNGPAAPTQLTVLFLGDTSKGHRPGQFTNFQLTGASGIFTGFSTEFVSRAWDLPEANAAALVSSQPASGIVRASSPLPAPSAQDREGVALNCLEAPLDVDIPGGGRVVVLNTANLPLVREVGLGADLVRIDAHSMCSPGFSCDSAYQVTYIVRGSGRVQVVGPDGVRVLETRVEGGFLFIVPRFHVVSKIADASGMEWFSIITTPNHLAGKTSVWKAISAEVLQASFNTTPEMEKLFRSKRLDSEIFFAPPSN

SEQ ID NO: 196473 - protein, 691 aa, Zea Mays
MSATRADRRQRLYRSLWPTSPAGPSTTARSIKQLPFQSPLKHRRISSRERVRWRRGRVAGMGKMNCFSGLLSGKSKAFKGGNKGAYAKKAASGGNDCPKVKPVEFVDMAGTAVDDFVGRRGGGSVHASACSSSFVVHAATELPRHATAENGEDEAAVNKDSSSAGAGSPGYSIGRMSPTASPKLTRSCSNMETARSVPPPGSDSDLPARSRSHNDLLKNLPPGRPTTARSGLSPTASFRSSCSADRVLLKKRSSRQVLPSRSRKLWWQTFLWSHRNLHRPGASATTPTLPSAWKDGRPVHHGYTSDTLGTATADAKNKGVVAVEEDPVPNQWVAFSAEASPLDRVSAWVNSLGDASFHAVDEEDDATLHGARPRPRPRRSEIVELWTAGGKRQPQAKRRAADEAAPAQASGVVHTLNAFSSVAHIAGMGLRTVPMIAAFSTLRAVNLSGNMIVQITAGSLPKGLHSLDLSRNSIAVIEGLRELTRLRVLNLSYNRISRIGHGLSSCTAIRELYLAGNKISDVEGLHRLLKLAVLDVSFNKISTAKSLGQLVANYGSLRAISLLGNPVQANTGEDTLRKAVSGLLPRIDYLNKQAVKPQRAREVAKDSVAQAALGNNAGGSSRRRLARRLSQSPGSSSGKGRGRGGREGNGSRRGSRSRFVARPQSSSYQGDEAKHDNGVGLEEGEETSPCV

SEQ ID NO: 196474 - protein, 375 aa, Zea Mays
MAAWVSCLHLWPLSLSLSLSLSTPSLTPVLQSCSARKEIGITANSFVRATRLLLFQDPCRSLTIESPPFPNPFQSSAAKCRSQMKRQSKRPTASRDSPETVDKQLALAESLTARKTEPDELGEKKRRLAPDQVRALERCFEADNRLDPDRKARVARDLALNPRQVAVWFQNRRARWKAKALHRDFAALRARHDALRRDKDALAAEIRELRQKLAEPAAVKTEATGSDTAEARPTTTTTAGAPAPPAGGCKDGSSDSDSSVVLNDDVDASPYSGAAFEQPGAFAGFGAPFLAASAAAAPPPTGCSSPPVFETKWQHGPTTYAFESYKSCCAGYGFTEEWLASSDVVGSDGAAGFFSEDHASSLNFSWCASGAQDWE

SEQ ID NO: 196475 - protein, 559 aa, Zea Mays
MSEEDEDQPPPKRPCASPPADQVLDNVLETVLQFLDAPRDRSAASLVCRSWHRAESATRDSVAVRNLLAASATRAARRFPNARSLLLKGRPRFADFNLLPHGWDASAFRPWAAAVAAGSFPALTSLYLKRIPVTDADLDLLSRPLPASFRDLTLHLCDGFTSRGLASIASHCRGLRVLDVVECDMAEEQEVVDWVAAFPPEPTNLESLSFECYEPPVAFATLEALVARSPRLSRLGVNLHVSLGQLRRLMAHAPRLSHLGTGSFRPAEGGEGEAEFGEVVSAFVSAGRARTLVSLSGFRDLAQEYLPIIDVVCSHLKSLDLSYAAVTPNQILMFIGQCYNLETLWVLDSVRDEGLDAVGIYCKKLQTLRVLPLDAHEDADELVSEVFRLCIMGRHQPDHATEEPMDEGFGAIVKNCRKLTRLSTSGQLTDRAFEYIGRHGKSLRTLSVAFAGNSDVALQYILRGCSKLEKLEIRDCPFGDAGLLSGMHQFYNMRFVWMSGCNLTLRGCKEVARGLPRMVVELINGQPDESERKESVDILYMYRSLDGPREDVPPFVKIL

SEQ ID NO: 196476 - protein, 137 aa, Zea Mays
MAVAKVKSVAVSVSHKCRNILATGWEAHLNTVKADNKGSKNEIYTSRVHYMIHKGTPYLIVPENDMHNINIIIDERGSLAVFSLIRDRVASLLKPSKTPPRVGMTGDVLRLKDSKVNLFCSHPACINMLHCLLLVVR

SEQ ID NO: 196477 - protein, 170 aa, Zea Mays
MDQIGYNVGRTPFTDISNTIITGNQNESNSLGPIVDAKECKRQRDRERYAMTVEEKNEKNRQRREARQRNKGLSIEPLSSRAFCKWVIYEEDVNTDQACEVVSFPDDCSTIDFTNLSTQDIAGGDEQVNLDAYDDNDWLHRNETFQANNIVTSKDLLTPAEDYLCSAKWT

SEQ ID NO: 196478 - protein, 257 aa, Zea Mays
MGLGNSMCSAMGNADCISVEEVGEDMNTTAFTSKIDGQVFLKPNRPALVVSSTSWTPDEDFSILLEAALMYDRRVAAALGEDDSMDEGQLWIDIKNGKQFVYPRLLFIITGKGPDRKKYEDQIKRLKLRRVALRTMWLASEDYPLLLGSADLGVSLHTSSSGLDLPMKVVDMFGCGLPVCAASFSCIEELVKVNKNGLLFSTSSELADELMMLFKGFPEECNALKSLKEGAMKSASSSKWSTEWETNALPLVDQVIG

SEQ ID NO: 196479 - protein, 466 aa, Zea Mays
MATERRRASVVVLGDIGRSPRMQYHSLSLANQASMEVDIVANGGSDPHLSLRENPSIHIHEMKTVQLTGISKISGALSLLLKAAVQFILLVWFLCFKIPRPDVFFVQNPPSVPTLAAVKLASWLRGAKFIVDWHNFGYTLLGLSHGRSHIIVKIYFWFEKYFGQMADGAFCVTKAMQHELAQNWGIRATVLYDQSPDFFHPASLMEKHGLFSRLGNSMCSAMGNADCISVEEVGEDMNTTAFTSKIDGQVFLKPNRPALVVSSTSWTPDEDFSILLEAALMYDRRVAAALGEDDSMDEGQLWIDIKNGKQFVYPRLLFIITGPDRKKYEDQIKRLKLRRVALRTMWLASEDYPLLLGSADLGVSLHTSSSGLDLPMKVVDMFGCGLPVCAASFSCIEELVKVNKNGLLFSTSSELADELMMLFKGFPEECNALKSLKEGAMKSASSSKWSTEWETNALPLVDQVIG

SEQ ID NO: 196480 - protein, 258 aa, Zea Mays
MGRLGNSMCSAMGNADCISVEEVGEDMNTTAFTSKIDGQVFLKPNRPALVVSSTSWTPDEDFSILLEAALMYDRRVAAALGEDDSMDEGQLWIDIKNGKQFVYPRLLFIITGKGPDRKKYEDQIKRLKLRRVALRTMWLASEDYPLLLGSADLGVSLHTSSSGLDLPMKVVDMFGCGLPVCAASFSCIEELVKVNKNGLLFSTSSELADELMMLFKGFPEECNALKSLKEGAMKSASSSKWSTEWETNALPLVDQVIG

SEQ ID NO: 196481 - protein, 310 aa, Zea Mays
MATERRRASVVVLGDIGRSPRMQYHSLSLANQASMEVDIVANGGSDPHLSLRENPSIHIHEMKTVQLTGISKISGALSLLLKAAVQFILLVWFLCFKIPRPDVFFVQNPPSVPTLAAVKLASWLRGAKFIVDWHNFGYTLLGLSHGRSHIIVKIYFWFEKYFGQMADGAFCVTKAMQHELAQNWGIRATVLYDQSPDFFHPASLMEKHGLFSRLGNSMCSAMGNADCISVEEVGEDMNTTAFTSKIDGQVFLKPNRPALVVSSTSWTPDEDFSILLEAALMYDRRVAAALGEDDSMDEGQLWIDIKNGKQ

SEQ ID NO: 196482 - protein, 138 aa, Zea Mays
MSRGTGAGYDRHITIFSPEGRLYQVEYAFKAVKSAGVTSIGVRGADSVCVVTQKKVPDKLLDQTSVTHLFPITKYVGLLATGLTADARSLVSQARNEAAEFRFKWGYEMPVDVLAKWIADKAQVYTQHAYMRPLGVGN

SEQ ID NO: 196483 - protein, 105 aa, Zea Mays
MAFLKRYCGSAAQTTTRMHHWPKRGNSQQTRRLYICHVIMIKPDVTAAASGADAYKGNTCVCSSRKRQPNTELKKSRPLMVSWLPTRACVSYLHALPQSGQYVTS

SEQ ID NO: 196484 - protein, 111 aa, Zea Mays
MAVAGTSYEGFVAYALARGGAWQDRLHGDIQLRPAQDGRRRQGVAQARRCWVHTHGRPAHAVGHTRHAAAYGAVLLPEKDHHRAARHRDWMGCAGNTQQPGFYFERRRLNW

SEQ ID NO: 196485 - protein, 83 aa, Zea Mays
MLDAVSWLASLHGIFHYPVDSFREPIPAMPSQTPLMILNHSHSLNVRLRFLMTQDNTCFYSVAAELCQQNPYNLFGQNGLARS

SEQ ID NO: 196486 - protein, 74 aa, Zea Mays
MILCDILYEQNILQPRSSDKSNEQIKRRFLSHTATRQIYFSLCCVLHLFFNAWNSCNEMTDSHTFDANFLLKLS

SEQ ID NO: 196487 - protein, 215 aa, Zea Mays
MPVPMTETGAMIGLATLTGQGTLTGEGRTCKTTRTEMGLLPKVSMAPHLHLARTRCHPTIVRATCLRNHHMLVVANQTISPKCKTHRRATTLAVLLTTSKVLLLATKVDLRGIKVVTKGTQALPTKVVTLVIKVATHHLPTKEATHHLLTREAAHQGHHLPTEEAAHQGHHLPTEEATPTYRHIRVVAILATLVAALATRVKEATPTSSEHDHEY

SEQ ID NO: 196488 - protein, 370 aa, Zea Mays
MASASRALLLSRALQAGASRRVPALLRPVAAAASLLPAVAGPAGAALGARVRCFATQPATSSLRDSSPNWSNRPPKETILLDGCDFEHWLVIMEPPPGDASNPDITRDEIIDSYIKTLAQVVGSEEEARQKIYSVSTRHYFGFGALVSEELSYKLKEIPKVRWVLPDSYLDVKNKDYGGEPFINGQAVPYDPKYHEEWVRNNARANDRNRCHPTIVRATCLRNHHMLVVANQTISPKCKTHRRATTLAVLLTTSKVLLLATKVDLRGIKVVTKGTQALPTKVVTLVIKVATHHLPTKEATHHLLTREAAHQGHHLPTEEAAHQGHHLPTEEATPTYRHIRVVAILATLVAALATRVKEATPTSSEHDHEY

SEQ ID NO: 196489 - protein, 61 aa, Zea Mays
MSSKFYTINLNLPRVLTYWEEKKHLDRDPLPPLYVLHKSISCNISGKENCRRAHSLELGSF

SEQ ID NO: 196490 - protein, 230 aa, Zea Mays
MPSVLLVTAITWLSWFPFILYDTDWMGREIYHGDPKGSNAQISAFNEGVRVGAFGLLLNSVILGFSSFLIEPMCRKVGPRVVWVTSNFMVCVAMAATALISFWSLRDYHGYVQDAITANASIKAVCLVLFAFLGVPLAILYSVPFAVTAQLAATRGGGQGLCTGVLNISIVIPQVIIALGAGPWDALFGKGNIPAFGVASAFALVGGVVGVFLLPKISKRQFRAVSAGGH

SEQ ID NO: 196491 - protein, 349 aa, Zea Mays
MMADLCDHHGPSAANSIFCSWMALGNILGYSSGSTNNWHKWFPFLKTSACCEACANLKGAFLVAVVFLVLCLTVTLIFAKEVPYRANENLPTTKAGGEVETEPTGPLAVLKGFKDLPPGMPSVLLVTAITWLSWFPFILYDTDWMGREIYHGDPKGSNAQISAFNEGVRVGAFGLLLNSVILGFSSFLIEPMCRKVGPRVVWVTSNFMVCVAMAATALISFWSLRDYHGYVQDAITANASIKAVCLVLFAFLGVPLAILYSVPFAVTAQLAATRGGGQGLCTGVLNISIVIPQVIIALGAGPWDALFGKGNIPAFGVASAFALVGGVVGVFLLPKISKRQFRAVSAGGH

SEQ ID NO: 196492 - protein, 504 aa, Zea Mays
MARGDGGQLAELSAGVRGAAAVVDHVAPISLGRLILAGMVAGGVQYGWALQLSLLTPYVQTLGLSHALTSFMWLCGPIAGLVVQPLVGLYSDRCTSRWGRRRPFILTGCMLICVAVIVVGFSSDIGAALGDTKEHCSLYHGPRWHAAIVYVLGFWLLDFSNNTVQGPARAMMADLCDHHGPSAANSIFCSWMALGNILGYSSGSTNNWHKWFPFLKTSACCEACANLKGAFLVAVEVPYRANENLPTTKAGGEVETEPTGPLAVLKGFKDLPPGMPSVLLVTAITWLSWFPFILYDTDWMGREIYHGDPKGSNAQISAFNEGVRVGAFGLLLNSVILGFSSFLIEPMCRKVGPRVVWVTSNFMVCVAMAATALISFWSLRDYHGYVQDAITANASIKAVCLVLFAFLGVPLAILYSVPFAVTAQLAATRGGGQGLCTGVLNISIVIPQVIIALGAGPWDALFGKGNIPAFGVASAFALVGGVVGVFLLPKISKRQFRAVSAGGH

SEQ ID NO: 196493 - protein, 90 aa, Zea Mays
MDHPPPPPPHHAAGGGLIPFYPSVGGRHSIAAGVGMDQLLHASTPKLEQHGDGCAVAVQAAETAGSFGNLLCGVDETPPFWPWADHHHFH

SEQ ID NO: 196494 - protein, 322 aa, Zea Mays
MVVAVKKLKPEGFQGHKEWLTEVDYLGQLHHKNLVKLIGYCSDGDNRLLVYEFMPKGSLENHLFRRGADPLSWAIRLKVAIGAARGLSFLHDAENQVIYRDFKASNILLDSEFNAKLSDFGLAKAGPTGDKTHVSTQVMGTHGYAAPEYIATGRLSAKADVYSFGVVLLELLTGRRALDKSKPGFEQNLVDWARPHLGDKRRLYRIMDTKLGGQYPKKGANAIASIASQCICGDAKLRPPMSQVLEELEQLQDAKYGAPSPLVDIRKASHAAPKSPMTSTPKSPLSSTPKSPMRAQPAARPSPRRSLGAAAPLAGYRTAQVH

SEQ ID NO: 196495 - protein, 135 aa, Zea Mays
MDNLKESSHRALVRACVQQRGHDAAGANSGVWMTVPAFGDWDTKNGALPDYSMDFSKIRETRKQNKKELSRASLGGDDDLFAHAHAHAQKPQANSAQPKLGRPCPAADRRPLHARDHSPTVNLRVPARFVPESLK

SEQ ID NO: 196496 - protein, 268 aa, Zea Mays
MLRCGLQVLELQEQLCWPGRFVQANGLAAGLAASNLVLYAFVYTPLKQIHPVNTWVGAVVGAIPPLLGWAAASTELSLNAMILPAALYFWQIPHFMALAYLCRNDYLAGGYRMFSFADPTGRRTAWVSLRNCLYMLPLGLFAYNWGLTSEWFSFEASLLTLGLTIGALSFVLEPSPKTARRMFYGSLLYLPAFMSGLLLHRLPSEQKAHNLAENNELDGVLYGADLQDEERARQKRQDTKPSRVQSLPPVSYASVAPFPFLPVPIYES

SEQ ID NO: 196497 - protein, 301 aa, Zea Mays
MVRSRPRVWLVAGCAAVLLWASVAQLVAVGRLLLLFGLAGDAVSSPPPTALPPPRIYKSNGYLKISCNGGLNQMRSEICDMVAVARLLNLTMVVPELDKRSFWADQSNFGDIFDVKHFIDSLRDEVHIIEQLPEKLGPRDSDIIILEMSPVSWSDEKYYLHQILPLFSKYSVIHFNKTDARLANNGNELVHKLRAKGSFVALHLRYEMDMLAFSGCNHGLSPEEAEELKKMRYAYPWWRDKEIDSQAKRLQGLCPLTPEEASLVLKALGFQKDALIYIAAGEIYGGDRRLEPLRAAFPNLR

SEQ ID NO: 196498 - protein, 127 aa, Zea Mays
MLLNSEVLRQFQNHSSQMAALDFIVSTASDVFIPTFDGNMAKLVEGHRRFLGFRRSVVLDRRKLVELLDLYTNKTMSWDNFASSVQEAHKNCVAQPSCRRELKNRPKEEDYFYANPHECLANSTLCS

SEQ ID NO: 196499 - protein, 204 aa, Zea Mays
MERAAPAHPVPVPVGVAGHRHALRQQVRREGVPAQRPRPRHQPPPHGSDRLQAEWSGQQRHAVAPGPHRPRPHVPAAAAGGEEEPQGPRRDDRRLRPPAGARLGPGEHHQRRRRDGAEADGGADEAGHGHRTCSRFQQVQEGEANREALIALNSETHFTITSRPVSMYHQQVAMTRNFFRLALSSSRVVNLLHYLFIHKLDDIK

SEQ ID NO: 196500 - protein, 171 aa, Zea Mays
MSSSSSSMLRLPPCRPAVHPVCRGAGSSGGSSSTHPLRSSSRSRPSSLTAACALKTPSNGGSRGKVNPRDLFTFSHKFSTDIPMSETQGASIDEYLRNSPRIVGAVFPDQRKRRKINDEEWSVQLLPIRFLFLSASPVIVMRFVSKSGGKEYPPNVPVHATSLLLMEVTTS

SEQ ID NO: 196501 - protein, 174 aa, Zea Mays
MEPMNVDNGGSGGLDAQIEQLMQCRPLAEQEVKALCEKAKEILMEESNVQPVKSPVTICGDIHGQFHDLVELFRIGGKCPDTNYLFMGDYVDRGYYSVETVTMLVALKVRYPHRITILRGNHESRQITQVYGFYDECLRKYGNANVWKTFTDLFDYFPLTALCAQLRSSPRGSP

SEQ ID NO: 196502 - protein, 301 aa, Zea Mays
MEPMNVDNGGSGGLDAQIEQLMQCRPLAEQEVKALCEKAKEILMEESNVQPVKSPVTICGDIHGQFHDLVELFRIGGKCPDTNYLFMGDYVDRGYYSVETVTMLVALKVRYPHRITILRGNHESRQITQVYGFYDECLRKYGNANVWKTFTDLFDYFPLTALVESEIFCLHGGLSPSIENLDSVRSLDRVQEVPHEGPMCDLLWSDPDDRCGWGISPRGAGYTFGQDISEQFNHTNNLKLVARAHQLVMEGYNWAHEQKVVTIFSAPNYCYRCGNMASILEVDDCNSHTFIQVLARARDAC

SEQ ID NO: 196503 - protein, 347 aa, Zea Mays
MRTSSPPSPTTRQGPMREGRSRRMWPTATRTASPSRTCLSLPATSTTPISSEKMVAVKQLTQDGVQGRNEFLVEVLMLTMLNHRNLVSLVGFCAQGDERLLVYDYMPFGSLESHLFDVPLGKKPLDWNTRVRIAVGVAEGLSYLHNVADPPVIYRDMKAANILLGEDFSPRLSDFGLAKVGPVGDRTHVSTRVMGTYGYCAPDYVVSGKLTMKSDIYSFGVLLLELITGRRIYDASRPKPEQSLLTWSRPFLHDKRKFHRLADPSLLGCYPSSALNQLVVISIMCLQDQPHVRPIISDVVIGLNHVASQPCTAERTLPACMTSPPSSGSPQLVSTPARRRGGRLIGQ

SEQ ID NO: 196504 - protein, 167 aa, Zea Mays
MAVPVGRLAASTLLQLLVWLPLPASACDRCVRHSKAAYYYTSSLTLAGGLVQLEVHDAPQRRAGVEHEAGAGGAAPAQGGGDGRLRRQVGVGGARGAAAAAARRRGLRHGRPDHRRRPGGMLPLRHARVGVMRMWTNHASDGRSRSRSRKPNAEASTQLKSLPVELL

SEQ ID NO: 196505 - protein, 506 aa, Zea Mays
MGCCGSSLRAGTQPEKKPAAGALPPRRPSYSLSQNQNQAPPAARAGAHQVPPLREFSLAELRAATAGFAPDNIVSESGDKAPNFVYRGRLEPSRRAIAVKKFAKMAWPDPKQFAEEAKGVGKLRHRRLANLIGYCCDGEERLLVAEFMPNDTLAKHLFHWENQTIEWAMRLRVAYYIAEALEYCSTEGRPLYHDLNAYRVLFDENGDPRLSCFGLMKNSRDGKSYSTNLAYTPPEYLRNGRVTSESVIFSFGTILLDLLSGKRIPPSRALDMIKGNNIQVLMDSHLEGNYSTEEATTLVDLASQCLQYEPRDRPNTKKLVSVLEPLQIKSEVPSYEMLGIPKHEEEAPPPPQPQHPLSPMGEACSRMDLTAIHQILVNTHYRDDEGSNEEWTQQMRDMLEARKRGDFAFRDKDFKAAIDCYTQFVDVGTMVSPTVYARRSLCHLMCDQPDAALRDAMQAQCAYPDWPTAFYMQAVALSKLNMQSDATDMLNEASQLEEKRQKNTKP

SEQ ID NO: 196506 - protein, 111 aa, Zea Mays
MVSPWVGKDEQPRLAEGGLELVSEGTRGVPPSDGMSASVLSELEDSTLAIGAGGLDDDVLRVLDGNDNPRCKLQFLPCLAKVDVGGEHHLYVLLLLGQRTHRASACCRCHD

SEQ ID NO: 196507 - protein, 429 aa, Zea Mays
MAACSRGLAWPPFDLTTARGAASWPRRRATIRCCCAGTDPEPRRRLSRAAAAAPERAEEWRVDGNKPSAAAPARRRASLTAMPPLPFPAPRSRRQFKQQDFYPRCTPRGPAPQSCDSPPKRDTGIASEKEWGINLLDEAVKESGINEDGSTWYRESGEDTGENGYRCRWARMGGQNHDGSTEWKETWWEKSDWTGYKELEKSGKNAEGDSWWEKWKEVLYQDEWSNLARIEKSAEKQAKSGAENAGWYEKWWEKYDAKGWTEKGAHKYGRLNEQSWWERWGEHYDGRGFVLKWTDKWAETDLGTKWGDKWEEKFFAGIGSRQGETWHVSPGRERWSRTWGEEHFGNGKVHKYGKSTTGESWDLVVDEETYYEAEPHYGWADVVGDSTQLLSIQPVERPPGVFPAIDFSSAPPPKDAPPGMPPSPLDGGN

SEQ ID NO: 196508 - protein, 127 aa, Zea Mays
MAACSRGLAWPPFDLTTARGAASWPRRRATIRCCCAGTDPEPRRRLSRAAAAAPERAEEWRVDGNKPSAAAPARRRASLTAMPPLPFPAPRIVLEDSSSNRTSTHGARRGARLLNPVIPHPRETLIW

SEQ ID NO: 196509 - protein, 246 aa, Zea Mays
MAACSRGLAWPPFDLTTARGAASWPRRRATIRCCCAGTDPEPRRRLSRAAAAAPERAEEWRVDGNKPSAAAPARRRASLTAMPPLPFPAPRSRRQFKQQDFYPRCTPRGPAPQSCDSPPKRDTGIASEKEWGINLLDEAVKESGINEDGSTWYRESGEDTGENGYRCRWARMGGQNHDGSTEWKETWWEKSDWTGYKELGAEKSGKNAEGDSWWEKWKEVLYQDEWRVVYRLSSSLAFFKATLKQW

SEQ ID NO: 196510 - protein, 265 aa, Zea Mays
MAACSRGLAWPPFDLTTARGAASWPRRRATIRCCCAGTDPEPRRRLSRAAAAAPERAEEWRVDGNKPSAAAPARRRASLTAMPPLPFPAPRIVLEDSSSNRTSTHGARRGARLLNPVIPHPREISDLLRKCMCLFGTCLIDTGIASEKEWGINLLDEAVKESGINEDGSTWYRESGEDTGENGYRCRWARMGGQNHDGSTEWKETWWEKSDWTGYKELGAEKSGKNAEGDSWWEKWKEVLYQDEWRVVYRLSSSLAFFKATLKQW

SEQ ID NO: 196511 - protein, 386 aa, Zea Mays
MGTSRLPRHRPGGALVSPPCPRSPSRHLVLEDSSSNRTSTHGARRGARLLNPVIPHPREISDLLRKCMCLFGTCLIDTGIASEKEWGINLLDEAVKESGINEDGSTWYRESGEDTGENGYRCRWARMGGQNHDGSTEWKETWWEKSDWTGYKELGAEKSGKNAEGDSWWEKWKEVLYQDEWSNLARIEKSAEKQAKSGAENAGWYEKWWEKYDAKGWTEKGAHKYGRLNEQSWWERWGEHYDGRGFVLKWTDKWAETDLGTKWGDKWEEKFFAGIGSRQGETWHVSPGRERWSRTWGEEHFGNGKVHKYGKSTTGESWDLVVDEETYYEAEPHYGWADVVGDSTQLLSIQPVERPPGVFPAIDFSSAPPPKDAPPGMPPSPLDGGN

SEQ ID NO: 196512 - protein, 237 aa, Zea Mays
MEDSNTICKQMISYIIVLDTYLEIQSIHWCICHNLARIEKSAEKQAKSGAENAGWYEKWWEKYDAKGWTEKGAHKYGRLNEQSWWERWGEHYDGRGFVLKWTDKWAETDLGTKWGDKWEEKFFAGIGSRQGETWHVSPGRERWSRTWGEEHFGNGKVHKYGKSTTGESWDLVVDEETYYEAEPHYGWADVVGDSTQLLSIQPVERPPGVFPAIDFSSAPPPKDAPPGMPPSPLDGGN

SEQ ID NO: 196513 - protein, 371 aa, Zea Mays
MAACSRGLAWPPFDLTTARGAASWPRRRATIRCCCAGTDPEPRRRLSRAAAAAPERAEEWRVDGNKPSAAAPARRRASLTAMPPLPFPAPRSRRQFKQQDFYPRCTPRGPAPQSCDSPPKRDTGIASEKEWGINLLDEAVKESGINEDGSTWYRESGEDTGENGYRCRWARMGGQNHDGSTEWKETWWEKSDWTGYKELGAEKSGKNAEGDSWWEKWKEVLYQDEWSNLARIEKSAEKQAKSGAENAGWYEKWWEKYDAKGWTEKGAHKYGRLNEQSWWERWGEHYDGRGFVLKWTDKWAETDLGTKWGDKWEEKFFAGIGSRQGETWHVSPGRERWSRTWGEEHFGNGPQVWKEHNWRELGFGSRRGDIL

SEQ ID NO: 196514 - protein, 82 aa, Zea Mays
MDPISCVHWLVHSLLRFPFLPNMPLRSSGWRPGECNNQTAHPWFVLLAEDKAFVLPSRQCWKLGHFPRVRDRDFHSEPNGER

SEQ ID NO: 196515 - protein, 180 aa, Zea Mays
MPFPDASFDGAYSIEATCHAPRLQDVYGEVYRVLKPGGLYVSYEWVTTPLYRAEDPDHVECIHGIERGDALPGLRRQDEIASIAKEVGFEVLKEQDLALPPALPWWTRLKMGRIAYWRNSLVVRVLTMLRVAPKGVSEVHEMLYETAQHLTRGGETGIFTPMHMVLLRKPAAAASTEEAN

SEQ ID NO: 196516 - protein, 77 aa, Zea Mays
MISTPGSTTKSKTSNSTTSRRRMETSVCRFIPSSLEMEEFFSAAEQQEQHNFREKYNFCPVNDCPLPGRYEWARLDC

SEQ ID NO: 196517 - protein, 267 aa, Zea Mays
MQETRQQKDVEKETNEIARLGFIKTSSSQKVGRGEQKTVLGQRSKITATMWQQSSGSMAGTNDLQRMEMIRLARGAASRRGGACVRARWAENKPVLAMQMHMHDFLSLFFFLAKMTTPRSKEASQLPEVSLLQLRSGERLLIPAWEEVLKEFGHSSDPDERGRLSWLYGRVGHIIKLGREGDDLQCTRHLGWPWRLRPPRTTSSLFVYDGTRAARSIMEAGGEWRVDGVPHGERMSSILIYAEGRTRTTARASFFLFLCFSLPNLLL

SEQ ID NO: 196518 - protein, 310 aa, Zea Mays
MGQRWQSPRQRGHRPGRRRSRSRVYVQLWGLKFPPANFRAGQDMQAPVVLGNVTDRTCCHFNYNSTWASACVDAYIGTMQETRQQKDVEKETNEIARLGFIKTSSSQKVGRGEQKTVLGQRSKITATMWQQSSGSMAGTNDLQRMEMIRLARGAASRMTTPRSKEASQLPEVSLLQLRSGERLLIPAWEEVLKEFGHSSDPDERGRLSWLYGRVGHIIKLGREGDDLQCTRHLGWPWRLRPPRTTSSLFVYDGTRAARSIMEAGGEWRVDGVPHGERMSSILIYAEGRTRTTARASFFLFLCFSLPNLLL

SEQ ID NO: 196519 - protein, 345 aa, Zea Mays
MGQRWQSPRQRGHRPGRRRSRSRVYVQLWGLKFPPANFRAGQDMQAPVVLGNVTDRTCCHFNYNSTWASACVDAYIGTMQETRQQKDVEKETNEIARLGFIKTSSSQKVGRGEQKTVLGQRSKITATMWQQSSGSMAGTNDLQRMEMIRLARGAASRRGGACVRARWAENKPVLAMQMHMHDFLSLFFFLAKMTTPRSKEASQLPEVSLLQLRSGERLLIPAWEEVLKEFGHSSDPDERGRLSWLYGRVGHIIKLGREGDDLQCTRHLGWPWRLRPPRTTSSLFVYDGTRAARSIMEAGGEWRVDGVPHGERMSSILIYAEGRTRTTARASFFLFLCFSLPNLLL

SEQ ID NO: 196520 - protein, 232 aa, Zea Mays
MQETRQQKDVEKETNEIARLGFIKTSSSQKVGRGEQKTVLGQRSKITATMWQQSSGSMAGTNDLQRMEMIRLARGAASRMTTPRSKEASQLPEVSLLQLRSGERLLIPAWEEVLKEFGHSSDPDERGRLSWLYGRVGHIIKLGREGDDLQCTRHLGWPWRLRPPRTTSSLFVYDGTRAARSIMEAGGEWRVDGVPHGERMSSILIYAEGRTRTTARASFFLFLCFSLPNLLL

SEQ ID NO: 196521 - protein, 206 aa, Zea Mays
MQAPVVLGNVTDRTCCHFNYNSTWASACVDAYIGTMQETRQQKDVEKETNEIARLGFIKTSSSQKVGRGEQKTVLGQRSKITATMWQQSSGSMAGTNDLQRMEMIRLARGAASRRGGACVRARWAENKPVLAMQMHMHDFLSLFFFLAKMTTPRSKEASQLPEVSLLQLRSGERLLIPAWEEVLKEFGHSSDPDERGRLSWLPLLL

SEQ ID NO: 196522 - protein, 243 aa, Zea Mays
MQAPVVLGNVTDRTCCHFNYNSTWASACVDAYIGTMQETRQQKDVEKETNEIARLGFIKTSSSQKVGRGEQKTVLGQRSKITATMWQQSSGSMAGTNDLQRMEMIRLARGAASRRLLIPAWEEVLKEFGHSSDPDERGRLSWLYGRVGHIIKLGREGDDLQCTRHLGWPWRLRPPRTTSSLFVYDGTRAARSIMEAGGEWRVDGVPHGERMSSILIYAEGRTRTTARASFFLFLCFSLPNLLL

SEQ ID NO: 196523 - protein, 198 aa, Zea Mays
MKKQNHARHVAVAGGPSPQPGTPPARASRPSTASERRSPPDAARLLVTPFRFAFLPLSPFIPIGARPPSRTNPLAPAFPGASLRFARDSIQASLVGGMASSPASSYDCSFKVLLIGDSAVGKSSLLVSFVSAAHIDDDIAPTIGVDFKINFLSVGGKKLKLTIWDTAGQERFRTITSSYYRGAHGIILGNLISFKIHI

SEQ ID NO: 196524 - protein, 89 aa, Zea Mays
MLVGNKVDKDEDRMVTKEEGLAFAQERGCLFVESSAKTRENVEKCFEELALKILQVPSLLEEGSSVVKRNTLTLKQKQENANRSGGCCQ

SEQ ID NO: 196525 - protein, 94 aa, Zea Mays
MNSKKMSDTSKYRKQIFDIKQKGRGRPTGGSRWAVAHPKPGPPRPQPNSNRFSLHFTPACDANEGTSAGPRGQSPPPHRVWPLALAPRAVAPRP

SEQ ID NO: 196526 - protein, 118 aa, Zea Mays
MKKKMKEKVKREMIRWICVHFKAHPAHSKHCQDTTLHIYTLMLMHTQLAGGRAPAPPGTGREGGAAPLCKGGLTGGAGGPRAHAKAEGRGGSPPPIGKLLPPPPPPPKLSLQDQQQLR

SEQ ID NO: 196527 - protein, 109 aa, Zea Mays
MKKKMKEKVKREMIRWICVHFKAHPAHSKHCQDTTLHIYTLMLMHTQLAGGRAPAPPGTGREGGAAPLCKGGLTGGAGGPRAHAKAEGRGGSPPPIGKLLPPPPPPPKI

SEQ ID NO: 196528 - protein, 117 aa, Zea Mays
MKKKMKEKVKREMIRWICVHFKAHPAHSKHCQDTTLHIYTLMLMHTQLAGGRAPAPPGTGREGGAAPLCKGGLTGGAGGPRAHAKAEGRGGSPPPIGKLLPPPPPPPKYIAVAPLKD

SEQ ID NO: 196529 - protein, 74 aa, Zea Mays
MLMHTQLAGGRAPAPPGTGREGGAAPLCKGGLTGGAGGPRAHAKAEGRGGSPPPIGKLLPPPPPPPKVLAVSVP

SEQ ID NO: 196530 - protein, 679 aa, Zea Mays
MSPPPAVATGGSGEPTVPAWLRGLPRAPEYRPTESEFADPIAFLSRVEREAAAYGICKVIPPYPRPSRRFVFAHLNRSLVSSSEAANPTTASGSSATAPSLPESAAVFTTRHQELGTPRRGRPPPQVLKQVWQSGERYTLDQFEAKSRAFSKIHLAGLREPTPLEVESLFWKASADRPIYIEYANDVPGSGFAAPKQSQRHKKRRRESDQVEEGEKGSGWRLSGSPWNLQAIARAPGSLTRFMPDDVPGVTSPMVYIGMLFSWFAWHVEDHELHSLNFLHTGAPKTWYAVPGDRASELEEVIRVHGYGGNPDRLGICPFSCSPSECFGCGLAGTSSEMASVSIGSNVHDIIQTSDSYEFFADMYCFSFIELIVMCYLLTMFIPALLDFHLHGFNCGEAANFATPQWLKFAKEAAVRRAVMNYLPMLSHQQLLYLLAVSFITRTPNVLSGIRSRLRDRKKEERELLVKQEFLQDMISENKLLCSFLEKKSIRHVVLWEPDLLPSSTALHSCSSGSKAPEKKSEDGCRIESSERGTKDNSSDGSAHMIGAQTKFMSGNSKSSGTASASMDEVNADTDDEDDLPFDLSIDSGSLTCVACGILGYPFMAILQPSREVLEGISLAHTSRYKMSSEKDNCSNTIPCCPTDSKFGCSFVPSRPSWPAEQQCLATPLGQANISHQNK

SEQ ID NO: 196531 - protein, 122 aa, Zea Mays
MAVEVDARWEPMGAQEYYDYWRAMYNARGNSLNFIFMVLFVQVHRLVKHVCPKVNIQKDNGVQMKIIGTHVDATEIVYDEDSYNKIHASTQVPSTLKACLFLYHVSISSLNSWNPSMVWNSV

SEQ ID NO: 196532 - protein, 57 aa, Zea Mays
MLLISFQHLFHLSCVYCLALHPTIDILLTGGRDSICRAQNICNLFFDKSSKIWLVAS

SEQ ID NO: 196533 - protein, 189 aa, Zea Mays
MAMDIISKDKKEIQWKGLPRTSISDIEELKTELVGLKGRIEKKSVYLQELQDQYVGLQNLIQRNEQLYGSGNTPSGGVALPFILVQTRPHATVEVEISEDMQLVHFDFNSTPFELHDDSYVLKEMRFCGREQHDGTQESISNGGESSNVSNIYWQQAQRMEMPNNGTVRLSSSPPIPGILKGRVKHEQH

SEQ ID NO: 196534 - protein, 351 aa, Zea Mays
MVSGAAHNPGGGAAAQTTQRSPPQLGARTALATPPPVSGGAAHSASTSGGTAGSPPSSRSEQHAPDGAVKGPALGTAPAAAAASTPASDSTFLRLNNLDINGDDAPSSQAPTSKKKRRGTRAVGPDKGNRGLRQFSMKVCEKVESKGRTTYNEVADELVAEFTDPNNNIEAPDPDNPNAIKRRSSGRACRGLTELVGLKGRIEKKSVYLQELQDQYVGLQNLIQRNEQLYGSGNTPSGGVALPFILVQTRPHATVEVEISEDMQLVHFDFNSTPFELHDDSYVLKEMRFCGREQHDGTQESISNGGESSNVSNIYWQQAQRMEMPNNGTVRLSSSPPIPGILKGRVKHEQH

SEQ ID NO: 196535 - protein, 194 aa, Zea Mays
MVSGAAHNPGGGAAAQTTQRSPPQLGARTALATPPPVSGGAAHSASTSGGTAGSPPSSRSEQHAPDGAVKGPALGTAPAAAAASTPASDSTFLRLNNLDINGDDAPSSQAPTSKKKRRGTRAVGPDKGNRGLRQFSMKVCEKVESKGRTTYNEVADELVAEFTDPNNNIEAPDPDNPNANNMMKKIFDEEFMML

SEQ ID NO: 196536 - protein, 220 aa, Zea Mays
MVSGAAHNPGGGAAAQTTQRSPPQLGARTALATPPPVSGGAAHSASTSGGTAGSPPSSRSEQHAPDGAVKGPALGTAPAAAAASTPASDSTFLRLNNLDINGDDAPSSQAPTSKKKRRGTRAVGPDKGNRGLRQFSMKVCEKVESKGRTTYNEVADELVAEFTDPNNNIEAPDPDNPNAQQYDEKNIRRRVYDALNVLMAMDIISKDKKEIQWKGLPRTN

SEQ ID NO: 196537 - protein, 396 aa, Zea Mays
MASNADQHAAVVSAAPSDSPVGAKKAGAAAAVWKLPAAAAVPVAEVVENPIMDAHSWPALPGLSSPPPPPPPHAGPTAKASPKAASPAPTGAATSPVSLGNPGAPDASHGNDARVRNPVARRALVMPAADGLEKSAPAPEPSPVYVPNARSNGADPHQNGRPGSHHHGRGGGYGGGNRRGNGGGGGRRGSEHHGGFDGQRRGGGRRDGHGPVHQLRGHQPTYIKAPVVAGAPPPPPPFVSPATPQTPPYGPPMGFHDMSAHVYYFPAPTSEGIQGLPFVPLPASPQAVLIDPSRKNLLEQIEYYFSDDNLCKDLYLRQHMDGQGWVPLSLIAGFRQVQKITNNIQFILETVMLSNIVEVQGDKLRRRGAWENCFVLLDLRGQRTIQACLGCLVKLS

SEQ ID NO: 196538 - protein, 469 aa, Zea Mays
MASNADQHAAVVSAAPSDSPVGAKKAGAAAAVWKLPAAAAVPVAEVVENPIMDAHSWPALPGLSSPPPPPPPHAGPTAKASPKAASPAPTGAATSPVSLGNPGAPDASHGNDARVRNPVARRALVMPAADGLEKSAPAPEPSPVYVPNARSNGADPHQNGRPGSHHHGRGGGYGGGNRRGNGGGGGRRGSEHHGGFDGQRRGGGRRDGHGPVHQLRGHQPTYIKAPVVAGAPPPPPPFVSPATPQTPPYGPPMGFHADMSAHVYYFPAPTSEGIQGLPFVPLPASPQAVLIDPSRKNLLEQIEYYFSDDNLCKDLYLRQHMDGQGWVPLSLIAGFRQVQKITNNIQFILETVMLSNIVEVQGDKLRRRGAWENWLLPKLNYSAGSSSGSMTPVTSNIDALASQFRSVGLEGATYHPSMPGMSGEALLTRSATSVSLGYHASTFGGLQSNGSEPLFGPKSARNLLRSDTF

SEQ ID NO: 196539 - protein, 394 aa, Zea Mays
MASNADQHAAVVSAAPSDSPVGAKKAGAAAAVWKLPAAAAVPVAEVVENPIMDAHSWPALPGLSSPPPPPPPHAGPTAKASPKAASPAPTGAATSPVSLGNPGAPDASHGNDARVRNPVARRALVMPAADGLEKSAPAPEPSPVYVPNARSNGADPHQNGRPGSHHHGRGGGYGGGNRRGNGGGGGRRGSEHHGGFDGQRRGGGRRDGHGPVHQLRGHQPTYIKAPVVAGAPPPPPPFVSPATPQTPPYGPPMGFHADMSAHVYYFPAPTSEGIQGLPFVPLPASPQAVLIDPSRKNLLEQIEYYFSDDNLCKDLYLRQHMDGQGWVPLSLIAGFRQVQKITNNIQFILETVMLSNIVEVQVMFSLYNYCYMISNMIPFGQKTYRLFTNHICFH

SEQ ID NO: 196540 - protein, 216 aa, Zea Mays
MGFHDMSAHVYYFPAPTSEGIQGLPFVPLPASPQAVLIDPSRKNLLEQIEYYFSDDNLCKDLYLRQHMDGQGWVPLSLIAGFRQVQKITNNIQFILETVMLSNIVEVQGDKLRRRGAWENWLLPKLNYSAGSSSGSMTPVTSNIDALASQFRSVGLEGATYHPSMPGMSGEALLTRSATSVSLGYHASTFGGLQSNGSEPLFGPKSARNLLRSDTF

SEQ ID NO: 196541 - protein, 86 aa, Zea Mays
MIQFINLLLWSALYFLLVLMNLICRRVQVCADSTLFLLAMLVIGKSSKCLKPTYFSINILGHWTSIQQSQPSSDCVFIQSPLQQVS

SEQ ID NO: 196542 - protein, 81 aa, Zea Mays
MALVVVILTWVTVPLCMCGAEVQKITNNIQFILETVMLSNIVEVQGDKLRRRGAWENCFVLLDLRGQRTIQACLGCLVKLS

SEQ ID NO: 196543 - protein, 80 aa, Zea Mays
MTPVTSNIDALASQFRSVGLEGATYHPSMPGMSGEALLTRSATSVSLGYHASTFGGLQSNGSEPLFGPKSARNLLRSDTF

SEQ ID NO: 196544 - protein, 117 aa, Zea Mays
MLSNIVEVQGDKLRRRGAWENWLLPKLNYSAGSSSGSMTPVTSNIDALASQFRSVGLEGATYHPSMPGMSGEALLTRSATSVSLGYHASTFGGLQSNGSEPLFGPKSARNLLRSDTF

SEQ ID NO: 196545 - protein, 227 aa, Zea Mays
MQSPEPSSSSPVLLNIGGKKYATTVETLMQREPDSMLAAMFSGRHTLHDHPTTGKGVVFVDRDGKHFRHVLNWLRDGAIPVLSESDYQQLLREAEYYQLLGLVDYINERLGWKETDNSEAELTRKDVIKCIQTQRVRFRGVNLSGLDLSKLDLSEVDFSYACIKNTDFSYANLYKAKFGVNQLHQNYLLLFAVFLAVAGCRNYVNLLVCDLYKCFKSVSDFLKRVLV

SEQ ID NO: 196546 - protein, 96 aa, Zea Mays
MQSPEPSSSSPVLLNIGGKKYATTVETLMQREPDSMLAAMFSGRHTLHDHPTTGKGVVFVDRDGKHFRHVLNWLRDGAIPVLSESDYQQLLREAEV

SEQ ID NO: 196547 - protein, 222 aa, Zea Mays
MQSPEPSSSSPVLLNIGGKKYATTVETLMQREPDSMLAAMFSGRHTLHDHPTTGKGVVFVDRDGKHFRHVLNWLRDGAIPVLSESDYQQLLREAEYYQLLGLVDYINERLGWKETDNSEAELTRKDVIKCIQTQRVRFRGVNLSGLDLSKLDLSEVDFSYACIKNTDFSYANLYKAKFGQQVEASSSSFQNAILRVSLLELILKNLFWMEQTFEVPIYKMLA

SEQ ID NO: 196548 - protein, 214 aa, Zea Mays
MQSPEPSSSSPVLLNIGGKKYATTVETLMQREPDSMLAAMFSGRHTLHDHPTTGKGVVFVDRDGKHFRHVLNWLRDGAIPVLSESDYQQLLREGLVDYINERLGWKETDNSEAELTRKDVIKCIQTQRVRFRGVNLSGLDLSKLDLSEVDFSYACIKNTDFSYANLYKAKFGQVEASSSSFQNAILRVSLLELILKNLFWMEQTFEVPIYKMLA

SEQ ID NO: 196549 - protein, 347 aa, Zea Mays
MDRADGPTQPGTIQCMRTRGPAMDMGFVESQPELTAAPAAGPGTGSRLPGGGGGRKRKHLSSIANHVLRQCSLTLDRSVDDLVADFELGLKTAAVDSYSRKLVEFCSLQALQIITSRDIGEKISEGSLGRFTFDMMLAWETPTPSDQQITMESVAKEREDRKETLGEGEAVMGDETSLFYSDIMPLLVNEEPTVGEEAYVWFGSVFPLACDVVNARFTFEALTATTANRLHYPAYDRFLKEMDKSFKFFQDLPTPTGVEFAEDEFILHMEGTAGTQRVVRHIGTTSWPGRVTLTNKALYFEASGKFSYESAIKVDLSDTGVEHQISTASTGPFGVPLFDKAIVFESL

SEQ ID NO: 196550 - protein, 507 aa, Zea Mays
MDRADGPTQPGTIQCMRTRGPAMDMGFVESQPELTAAPAAGPGTGSRLPGGGGGRKRKHLSSIANHVLRQCSLTLDRSVDDLVADFELGLKTAAVDSYSRKLVEFCSLQALQIITSRDIGEKISEGSLGRFTFDMMLAWETPTPSDQQITMESVAKEREDRKETLGEGEAVMGDETSLFYSDIMPLLVNEEPTVGEEAYVWFGSVFPLACDVVNARFTFEALTATTANRLHYPAYDRFLKEMDKSFKFFQDLPTPTGVEFAEDEFILHMEGTAGTQRVVRHIGTTSWPGRVTLTNKALYFEASGKFSYESAIKVDLSDTGVEHQISTASTGPFGVPLFDKAIVFESLACGLGVPGDDQLDKAQHVARSDQGSAVHPPFHLSVQHSVPRPQMGGALQNHTRSGTSPRREGDATDVAAAGFQLPSVLAVRRHAQGRLRARAAGEQPEADLHHHPAERVLRVQGSEQVFFCPTSERGGGRRRPWRGRRRQWPRARAAPGVPGGQDRPGAR

SEQ ID NO: 196551 - protein, 372 aa, Zea Mays
MTSSTRRNTWLALIREVLSIHRFISAYSIVSPVHRWEVHSRTILGVVRLHAAREMLRMSPPPASSFLVFSLYGDMPKGDFVLEQLASNLKRTSTITRLSASYVFKGLSRSSSVPPLSAEVAAEGRGADDDASGREHERPLASLEDKIGRVRDEAREVTAANAAVEGMKDEGISDSLLVLVGLVGPVGKLRPAIQRITSWERPLVTGSILAAASLIIYNEWFSYVLAASLVLAAGVMVWARQRKIGELCSEVIIDASSSSSSDKTTMDSIVEAQRSLQKVHRYIVTANVAILRLWSIALARSPKHTETVIWMLAVSAAVVAVVPFRYILIGLVAGSFALNTRVARAVMNPQGGRRWREWWESIPAVPVRTVHS

SEQ ID NO: 196552 - protein, 561 aa, Zea Mays
MKADILSWKGNSLNSNRKLGLNRTAGSSSTVDANVDPTVLPLEPKGGQLPLFSSGDWMSDIDSGYEAAEIAASTQTSSGVTPSVSAGSVFGSSWMLVNHDQSDGPSTSAGTSSQQKVVPQSEHQRNLNRLPDLQEIPESKYLFADLVPSGDNKSKKTSVPFKGPDHRNNELQKRRENIVPNAGRPQQRLVMKNWSPYNDVSNNKQYNYVEDSFARRNVGNNAASSSSQMPRPAVRSNLNSGLHNDASYHNYDSIMAGTSAMKITSTAETGKVPERVLRGDLDKGQTNYRLEDQHVIVQPPQGRLPWGNPAEGRVPMNRVQSQAKQHLENMDAKQDHKKLLPDPKKSPLDRFMDTSLPSRNMDMRSQRLDFDDVSECEIPWEDLVIGERIGLGSYGEVYRADWNGTEVAVKKFLDQDFYGDALDEFRSEVRIMRRLRHPNIVLFMGAVTRPPNLSIVSEYLPRGSLYKILHRPNCLIDEKRRIKMALDVAKGMNCLHTSMPTIVHRDLKSPNLLVDNNWNVKVCDFGLSRLKHSTFLSSKSTAGTPEWMAPEVLRNEQSNEK

SEQ ID NO: 196553 - protein, 789 aa, Zea Mays
MKSLFKSKIRWQHRSNDPASPAAPPPQTSGPPPASSPSGTAPAPALSVSTPVSPSPSSAAATPTGAAAAAAAAGAGGEDYISSEEEFQMQLAMALSASSNSDCAGGLDGEQIRKAKLMSLDRFAAHRDETHTAEFLSRRYWDYNFLDYHEKVIDGFYDIFGSSIESSRQGKMPSLADLQTGIGDLGFEVIVVNRAIDSTLQEMEQVAQCILLDFPVANIALLVQRIAELVTDNMGGPVKDANDMLTRWLEKSTELRTSLQTSLLPIGCIKIGLSRHRALLFKILADSVGIPCKLVKGSNYTGGDDDDAINIIKMDNEREFLVDLMAAPGALIPADILSWKGNSLNSNRKLGLNRTAGSSSTVDANVDPTVLPLEPKGGQLPLFSSGDWMSDIDSGYEAAEIAASTQTSSGVTPSVSAGSVFGSSWMLVNHDQSDGPSTSAGTSSQQKVVPQSEHQRNLNRLPDLQEIPESKYLFADLVPSGDNKSKKTSVPFKGPDHRNNELQKRRENIVPNAGRPQQRLVMKNWSPYNDVSNNKQYNYVEDSFARRNVGNNAASSSSQMPRPAVRSNLNSGLHNDASYHNYDSIMAGTSAMKITSTAETGKVPERVLRGDLDKGQTNYRLEDQHVIVQPPQGRLPWGNPAEGRVPMNRVQSQAKQHLENMDAKQDHKKLLPDPKKSPLDRFMDTSLPSRNMDMRSQRLDFDDVSECEIPWEDLVIGERIGLGSYGEVYRADWNGTEVAVKKFLDQDFYGDALDEFRSEVGSNYASAAPSKYCSLYGCCYTPSELIYCI

SEQ ID NO: 196554 - protein, 458 aa, Zea Mays
MKADILSWKGNSLNSNRKLGLNRTAGSSSTVDANVDPTVLPLEPKGGQLPLFSSGDWMSDIDSGYEAAEIAASTQTSSGVTPSVSAGSVFGSSWMLVNHDQSDGPSTSAGTSSQQKVVPQSEHQRNLNRLPDLQEIPESKYLFADLVPSGDNKSKKTSVPFKGPDHRNNELQKRRENIVPNAGRPQQRLVMKNWSPYNDVSNNKQYNYVEDSFARRNVGNNAASSSSQMPRPAVRSNLNSGLHNDASYHNYDSIMAGTSAMKITSTAETGKVPERVLRGDLDKGQTNYRLEDQHVIVQPPQGRLPWGNPAEGRVPMNRVQSQAKQHLENMDAKQDHKKLLPDPKKSPLDRFMDTSLPSRNMDMRSQRLDFDDVSECEIPWEDLVIGERIGLGSYGEVYRADWNGTEVAVKKFLDQDFYGDALDEFRSEVGSNYASAAPSKYCSLYGCCYTPSELIYCI

SEQ ID NO: 196555 - protein, 820 aa, Zea Mays
MKSLFKSKIRWQHRSNDPASPAAPPPQTSGPPPASSPSGTAPAPALSVSTPVSPSPSSAAATPTGAAAAAAAAGAGGEDYISSEEEFQMQLAMALSASSNSDCAGGLDGEQIRKAKLMSLDRFAAHRDETHTAEFLSRRYWDYNFLDYHEKVIDGFYDIFGSSIESSRQGKMPSLADLQTGIGDLGFEVIVVNRAIDSTLQEMEQVAQCILLDFPVANIALLVQRIAELVTDNMGGPVKDANDMLTRWLEKSTELRTSLQTSLLPIGCIKIGLSRHRALLFKILADSVGIPCKLVKGSNYTGGDDDDAINIIKMDNEREFLVDLMAAPGALIPADILSWKGNSLNSNRKLGLNRTAGSSSTVDANVDPTVLPLEPKGGQLPLFSSGDWMSDIDSGYEAAEIAASTQTSSGVTPSVSAGSVFGSSWMLVNHDQSDGPSTSAGTSSQQKVVPQSEHQRNLNRLPDLQEIPESKYLFADLVPSGDNKSKKTSVPFKGPDHRNNELQKRRENIVPNAGRPQQRLVMKNWSPYNDVSNNKQYNYVEDSFARRNVGNNAASSSSQMPRPAVRSNLNSGLHNDASYHNYDSIMAGTSAMKITSTAETGKVPERVLRGDLDKGQTNYRLEDQHVIVQPPQGRLPWGNPAEGRVPMNRVQSQAKQHLENMDAKQDHKKLLPDPKKSPLDRFMDTSLPSRNMDMRSQRLDFDDVSECEIPWEDLVIGERIGLGSYGEVYRADWNGTEVAVKKFLDQDFYGDALDEFRSEVRIMRRLRHPNIVLFMGAVTRPPNLSIVSEYLPRGSLYKILHRPNCLIDEKRRIKMALDVV

SEQ ID NO: 196556 - protein, 334 aa, Zea Mays
MGVGGLTISHVKSHLQMYRNMRNDLGMQGTEDQEHVYVGGGGMHTNIQQQRDHGCGDAPCCICCRHSPNKPAKEEEEATLFQRQLKRSRTETRRGRGQREEIDDGSASPKRRLLLLRGGRGRPGICESDGSGSPSSGTLASGYDNYMRMMQAAMGVAAAAGAAAAAAPHHHHHHHAETVEPGRGPRIKQHLARPGADGGEHAPPSSRQLFTFLGFVVAPGPPPPPCCSRDHPFEAERLNLHAHSLAPEQARRHKHGLQTPPTKAAVAQQVGGDPCWSSAAASEHDDHHHDRDRDGCWLSLSLALETRSSRSADEGGRLSPTGSRISLDLSLSTI

SEQ ID NO: 196557 - protein, 101 aa, Zea Mays
MARCRDHVVLNISWREITGMYKDTVKYHAAAAGRHKTQEIYVHWMNLYRSKVYRVQNLHGVRKHILPIDPGCSKDTCCGNKLKDDKISLAVSPASIAEVMQ

SEQ ID NO: 196558 - protein, 161 aa, Zea Mays
MYRVPPAYGLSPPPPPLRSGANQARTFFPARRRSGAEGTTGRGAMPTETVTPTVGVTMTRAGSMVGPPVSAGTLERTAASPRHDGPPTNAMTFAPPKAVEDGVEDAPSESEEEAIPSPNSIGCKAFLPFFCTRRRLWRPQGIILTERRPPQGAVEDWALEV

SEQ ID NO: 196559 - protein, 610 aa, Zea Mays
MAPDPCGDLVVTPKTAAKDEASCSVPTPPKVTPDEVRAVARKFADQPIQETEPDVWAVLTAISKKARLRPQGMNILLSADEHCLGRSVEERFRIFAQQISGMHCKIYRDTVLGELNRHEPVPVFLKDTSSNGTFINWKRLKKNSSPVKLNHGDIISLSSPPHDDNSFVFVYREVNAISRVENGAPILKRKSVEGGSGSKRLKGLGIGSPDGPVSLDDVRRLEKSNADLREQLEAHVVTIETLRAEIKTAQVQHGKELEELRETISSSYLDQTKSLRSALEEKQKQIDSLSTSNTELQNSIKDLDERLNASKQSRADADEIISSQKGMICELEGQLNEERNLRREERDKAAHDMKSALHKVQAEAQEEIKKQAESYLRQQREQKEVISKLQESEKETRLFVETLRSKLEDARDNLVTSEKRVRELEAQLQDEQMVSANNRKKTENLEAELRKLKKELDNEKAAREEAWAKVSALELEIAATIRDLSIEKQRYQGARERIILRETQLRAFYSTTEEISSLFAKQQEQLKAMQRTLEDEENYESTLMGVDLNKVPLTTDNAGMKPVDCSKNTVGASSASPENTQHSRSRMHQSRKVRGEIEVRFSWQSGFYSS

SEQ ID NO: 196560 - protein, 115 aa, Zea Mays
MANGCGYVWALAAGFNAALAAISAKFFSTLLLKYGMVILFNVTMWGCYVNSLKALSSLQATVTNFAANFISSGLAGCFLFDEPLPSKVPVLSFLASLSSASQASRRNRTQIRRKF

SEQ ID NO: 196561 - protein, 433 aa, Zea Mays
MAEPKAAAAARKTRVGPYEVGKTIGEGSFAKVKHARDSRTGAVRAIKIKREISTMKLIKHPNVVQLHEVMASKTKIYMVLEFVDGGELFDKIVNSGRLGEDEARIYFHQLINAVDYCHSRGVYHRDLKPENLLLDSNGALKVSDFGLSAFAPQTNEDGLLHTTCGTPNYVAPEVLADKGYDGMAADVWSCGIILFVLMAGYLPFDDANLMRLYKLICQAYFSCPPWFSSGAKKFIKRILDPNPDTRITIAEILEDEWFKKDYKPPRFEQGEDVSLDDIDAAFNDSEDRLVAEKREKPESMNAFALISRSQGFNLGNLFEKEMMGMVKRETSFTSQCTAQEIMTKIEDACGPLGFNVRKQNYKMKLKGDKSGRKGHLSVATEVFEVAPSLHMVELRKTGGDTLEFHSFYKNFSSELKDIVWKAESDANNKQTNK

SEQ ID NO: 196562 - protein, 367 aa, Zea Mays
MWYSCMRLWRAKRRYTWFLNLLMEASYSIRSLGEDEARIYFHQLINAVDYCHSRGVYHRDLKPENLLLDSNGALKVSDFGLSAFAPQTNEDGLLHTTCGTPNYVAPEVLADKGYDGMAADVWSCGIILFVLMAGYLPFDDANLMRLYKLICQAYFSCPPWFSSGAKKFIKRILDPNPDTRITIAEILEDEWFKKDYKPPRFEQGEDVSLDDIDAAFNDSEDRLVAEKREKPESMNAFALISRSQGFNLGNLFEKEMMGMVKRETSFTSQCTAQEIMTKIEDACGPLGFNVRKQNYKMKLKGDKSGRKGHLSVATEVFEVAPSLHMVELRKTGGDTLEFHSFYKNFSSELKDIVWKAESDANNKQTNK

SEQ ID NO: 196563 - protein, 330 aa, Zea Mays
MWYSCMRLWRAKRRYTWFLNLLMEASYSIRSLGEDEARIYFHQLINAVDYCHSRGVYHRDLKPENLLLDSNGALKVSDFGLSAFAPQTNEDGLLHTTCGTPNYVAPEVLADKGYDGMAADVWSCGIILFVLMAGYLPFDDANLMRLYKLICQAYFSCPPWFSSGAKKFIKRILDPNPDTRITIAEILEDEWFKKDYKPPRFEQGEDVSLDDIDAAFNDSEGMVKRETSFTSQCTAQEIMTKIEDACGPLGFNVRKQNYKMKLKGDKSGRKGHLSVATEVFEVAPSLHMVELRKTGGDTLEFHSFYKNFSSELKDIVWKAESDANNKQTNK

SEQ ID NO: 196564 - protein, 227 aa, Zea Mays
MAADVWSCGIILFVLMAGYLPFDDANLMRLYKLICQAYFSCPPWFSSGAKKFIKRILDPNPDTRITIAEILEDEWFKKDYKPPRFEQGEDVSLDDIDAAFNDSEGFNLGNLFEKEMMGMVKRETSFTSQCTAQEIMTKIEDACGPLGFNVRKQNYKMKLKGDKSGRKGHLSVATEVFEVAPSLHMVELRKTGGDTLEFHSFYKNFSSELKDIVWKAESDANNKQTNK

SEQ ID NO: 196565 - protein, 134 aa, Zea Mays
MNAFALISRSQGFNLGNLFEKEMMGMVKRETSFTSQCTAQEIMTKIEDACGPLGFNVRKQNYKMKLKGDKSGRKGHLSVATEVFEVAPSLHMVELRKTGGDTLEFHSFYKNFSSELKDIVWKAESDANNKQTNK

SEQ ID NO: 196566 - protein, 348 aa, Zea Mays
MAAASLKFASPKPLASAPSALLCGRRAQARPLPATLKLLLDEKDEARISAFLVLLRAKGETFEEIVGLAKAMLSCCIRVDGLDDAVDIVGTGGDGADTVNISTGSTILAAAAGAKVAKQGSRASSSACGSADVLEALGVNIELGPEGIKRCVNEVGVGFMMSANYHPAMKIVRPVRKKLKIKTVFNILGPLLNPARVPHAVIGVYHENIVTKMAKAAQKFGMKRALVVHSKGLDEISPLGPGYILDVTPEKIEKMFFDPLDFGIPRCTLEDLKGGDPAFNAKVLQDVLAGQRGAIADALVLNAAASLLVSGKVKNLHDGVALAQETQRSGKAINTLESWIKKSNSSRD

SEQ ID NO: 196567 - protein, 94 aa, Zea Mays
MFFDPLDFGIPRCTLEDLKGGDPAFNAKVLQDVLAGQRGAIADALVLNAAASLLVSGKVKNLHDGVALAQETQRSGKAINTLESWIKKSNSSRD

SEQ ID NO: 196568 - protein, 272 aa, Zea Mays
MAVARLVSAPFPLAPLRVRAPRPALPPGAHAGPRPPVLALAPPAASAAPRRAVPARAAPEDGGRGDAAAAAARAARKQSERRTYLVAAVMSSLGITSMAAAAVYYRFAWQMEVGMEFWARWAHRALWHASLWHMHESHHRARDDGPFELNDVFAIVNAVPAMSLLAYGFFNRGLVPGLCFGAGLGITLFGMAYMFVHDGLVHRRFPVGPIENVPYFRRVAAAHQIHHMDKFQGVPYGLFLGPKELKEVGGTEELEKEIKRRIRRREALDATQ

SEQ ID NO: 196569 - protein, 309 aa, Zea Mays
MASSQANLDKMQLRQSYRNVWHTDMTNAIQADFPYCCLALWCGPCVSYMLRKRALYNDMSRYVCCAGYMPCSGKCGESRCPEFCLATEVFLCFGNSVASTRFLLQDEFNIQTTQCDNCIIGFMLCLQQVACIFSIVAAIVGSEELSEASQILNCLSDLVYWTVCACMQTQHKVEMDKRDGKFSPQPMAVPPVQQMSRIDQPMPPPAGYAPQPAYGQPYGGYPSPPGQGYPPPPGQGYPPAGYSQGGAYPPPAQGYPHGGGYPPPGQGYPQGQGGAYPPPGSYPPQGSYPPAQGSYPAQGSYPPQAYPGK

SEQ ID NO: 196570 - protein, 163 aa, Zea Mays
MVRGKTQMKRIENPTSRQVTFSKRRNGLLKKAFELSVLCDAEVALVVFSPRGKLYEFASGSAQKTIERYRTYTKDNVSNKTVQQDIERVKADADGLSKRLEALEAYKRKLLGERLEDCSIEELHSLEVKLEKSLHCIRGRKLTTSYLLILHGRLSCWRSKSVS

SEQ ID NO: 196571 - protein, 141 aa, Zea Mays
MIYVIQILLWLLMWWKPVQAVVILSKMFFAATSLFAAFGFLLYGGRLFLMLQRFPVESKGRRKKLNEVGYVTTICFGCFLIRCIMMCLSAFNKDADLDVLNHPILNFFYYLLAEIAPSSLVLFILRKLPPRRGIAQYHPIH

SEQ ID NO: 196572 - protein, 373 aa, Zea Mays
MEYERIHGPLPRHQSGGFSPAKLRAMLRGIEKRQRNNGEDSSPEANDSGELDDRRSLECSTSTEMSSNSGHRSRNRAPDDDSFDSESSSSGPPTVKRSAAVAALLPPFSRPTPSKWDDAEKWISSPTSNRTGRTGPTAGAVPKKSALAFPDYGGRPPAVAKVVADVPTNAGPDGLAHPDLLKPGHNASVVVDGTAPAVRSVCMRDMGTEMTPIASQEPSRTATPIIASSPTSSRTPTPQRTAEFSVSNIDPKKIEMPEEEEVQMSTRQEIMDLGERLGKTTIAAWASKEEKSAARFTDTTAYKAADIGRENRAADWQETEKAKYLARGRPRRRGGTRKPRGRRSRRPGSDTPGIRLRPSPAGAGARDTQHGQW

SEQ ID NO: 196573 - protein, 347 aa, Zea Mays
MEYERIHGPLPRHQSGGFSPAKLRAMLRGIEKRQRNNGEDSSPEANDSGELDDRRSLECSTSTEMSSNSGHRSRNRAPDDDSFDSESSSSGPPTVKRSAAVAALLPPFSRPTPSKWDDAEKWISSPTSNRTGRTGPTAGAVPKKSALAFPDYGGRPPAVAKVVADVPTNAGPDGLAHPDLLKPGHNASVVVDGTAPAVRSVCMRDMGTEMTPIASQEPSRTATPIIASSPTSSRTPTPQRTAEFSVSNIDPKKIEMPEEEEVQMSTRQEIMDLGERLGKTTIAAWASKEEKSAARFTDTTAYKAADIGRENRAADWQETEKAKYLARGRKQRSKLGKICRKRKLKLR

SEQ ID NO: 196574 - protein, 91 aa, Zea Mays
MLLHKSISFSLKDRPGAVVRGLSTEPKGLGLTQPLRKNVGLRIASVITSPDPTHAGAVSTGRYTWSVRIICASTRTVTTILHQVGVHTYQM

SEQ ID NO: 196575 - protein, 298 aa, Zea Mays
MPIRFYPCGPPCPSPDFPACALSLRRRRAWATSAAAPSPGLHRTLRQVLFRPTAGNEQLLHSFDFSYRIPHRGMLAKGRKVAGRREEMSANYAFGPQDDDAIIKHRLLTRTTTTRGEPPLKKLQKKFMSFATEIEKDADNISDCERLYKAFLHEINTFELPLLKSKAVVDANIREKESFNELQVEIERQILHAKTDIEDLKKQLEQSKIERQHKEECEAIRKLISLQPPRSETEKLIADLEKEITDLKAENVACIRTLELRKKQFALLLHVDYLQHQFSFVKSTMKCLDSAFIWYLDN

SEQ ID NO: 196576 - protein, 237 aa, Zea Mays
MISFIYRIPHRGMLAKGRKVAGRREEMSANYAFGPQDDDAIIKHRLLTRTTTTRGEPPLKKLQKKFMSFATEIEKDADNISDCERLYKAFLHEINTFELPLLKSKAVVDANIREKESFNELQVEIERQILHAKTDIEDLKKQLEQSKIERQHKEECEAIRKLISLQPPRSETEKLIADLEKEITDLKAENVACIRTLELRKKQFALLLHVDYLQHQFSFVKSTMKCLDSAFIWYLDN

SEQ ID NO: 196577 - protein, 52 aa, Zea Mays
MLWSHYISIHCRRWSQLPYMVLLDTMKPSRYAIKNPASHYGFKLYHVCSIFS

SEQ ID NO: 196578 - protein, 711 aa, Zea Mays
MRTQRNLLPLLLLLSAALLAVADAQERKNYVVHLEPRDDDGGGGSVEEWHRSFLPEATLDSAADDGPRIIHSYSHVLTGFAASLTDAEAQTLRRKEGCLRLYPEEFLPLATTHSPGFLGLHMGKHGFWGRSGFGRGVVIGLLDTGILPTHPSFGDAGMPPPPKKWKGACQFRSVHRGGQLRAERRRAGQRARQGVRDGAARAPGHLQGVHAEPVLHLGHRRRPGRRRQGRRGRALLLHRRHRRRAVQLRPHRHRHVQGHGARHLRQRRGRQRRPRRGVHHQRRAVDAHGRGGHHGPRDTHNREARQRAGVPRRVAVPAPEQHRGAPAAARLPGVPRLQRAGGGRGEGQGGAVREPLHQRARRAGADGGRVRRRRHGPDEQGGGGVHHLRRRARAGRVAREPRRGVEDRGVRQVGAQAHGVHRVPGHGDGVVPGAVRGLLLVARAQQGEPGHPEAGHHGARHEHPGGVGAQRDAPGVRGRREPALLRGVRDVHVDAAPERDRGRHQEPAPELVPRGGEVGDHDVVGRGGPRGRAHQGRAVPAGELLQHGRRVREPVPRRGPGAGVRPRRRRLRRLPLRPGHRGRRREGDNGAPRRLRRQAAEGHHRGGAQLPVAGGEAAVPPGHRPPHRDQCREGQLRVQGRGGHAQQGRVRGGAAPDAAVRQGEREAELHRDGAVERAAGRRRRRGQPEVGVEGSRSPQPDRDTAGEGHRV

SEQ ID NO: 196579 - protein, 333 aa, Zea Mays
MGLLGRRPWLLLLALASAAVAVAVAVEASEGDADPLYRACVEGCQKTGSLKEASIKHCMVPTDGQPADKSWYAHEPLYLQWKDWNCKSECRYHCMMEREGERAKLGLQPEPLSAALSALTLVVQFNGWLSFFLLLYYKLPLRPETHKTYYEYTGLWHIYGLLAMNSWFWSAIYHSCDTIWTEKLYFSSAAAFLGYSLILAILRTSSLRDEASRVMVAAPILAFVTTHILYLNFYELDKGLNMKVCTVISIAQCLLWALWAVMSGHRSRLKIISVAVGGAVAVLVEAYDIPPRWGYADGRAICLAVAIPLSYLWWSFAKEDAEMRTSAILKKTR

SEQ ID NO: 196580 - protein, 66 aa, Zea Mays
MELAKLLDRVPIPVKEGLEEPSAKINGLLQAYISRLKLEGLSLSSDIVYIRQSVAGLDLNRSEAHH

SEQ ID NO: 196581 - protein, 84 aa, Zea Mays
MVDFISYNFYRCKTLFGVSGTISLYEFTISHCNLNTIKILSLFSYVEGIQIPSKSTTQCRQRSRSNKAPLRNHLHKLLPSRCHT

SEQ ID NO: 196582 - protein, 79 aa, Zea Mays
MELAKLLDRVPIPVKEGLEEPSAKINGLLQAYISRLKLEGLSLSSDIVYIRQVALIAILLSHGALLASTDAINYFYSEC

SEQ ID NO: 196583 - protein, 677 aa, Zea Mays
MLLQRRGGLLCCGCGASAVAVAVSGRVPEDDGGAVVDGQPPDAKSVSGTSVSAAVTTANARQLSWAQVEAMTGGFTSAIVGEGGFSTVYLARLAGSLAAVKVHRSSERLHRAFRQELDALLRVRHPHIVRLLAFCDQRDEGVLVLEFAPNGSLHEQLHGGGAGAAPMPWARRVPVALQVARALEYLHERCEPQVVHGDVKASNVLLDAGMGARLCDFGSARAGFSAAVAVAAAGPRPRAVFGSPGYVDPHYLRSGVSPADRSSQPAAAQVKPPRVSLGSHAHTEISPTELNCRCRRATGGTHARSSRMATTLTPTQRYAAGTLLALALRQAQIHQSEPLGSGPDDEERASSASGSSSSTISSTGSDTTSGAGLWTHDSRGLLRPVFRFLEIEPKAWAGMEETAASPDAAKHHIGAFISILFEEDGESSSDRLEQEIALAKAVDVMVMSLGSDTAPDENIKDEFKYSTACTYATLESTEAGSSENLLGIVKLSLENVPVNEHRKMVLLYALLSACIADKPVSQEEEDRKSSHFRKGYDARHRVALRLIAAWLDVKWIKMEAMEVMVACSAMAAAKEQEQERENASPRSKWEKWKRGGIIGAAALTGGALLAITGGLAAPAIAAGFGALAPTLGTLVPFIGASGFAAMAAAAGSVAGSVAVAASFGAPCCWHLGFWICF

SEQ ID NO: 196584 - protein, 329 aa, Zea Mays
MLNILASFGHTTPGASGFAAMAAAAGSVAGSVAVAASFGAAGAGLTGTKMARRIGKVKEFEFKPIGDNHNQGRLAVGILVSGFAFDEEDFWKPWEGWKDNLEKYILQWESKHIIAVSTAIQDWLTSRLAMELMKQGAMRTVLSGLLAAFAWPATLLAATDFIDSKWSVAIDRSDKAGKMLAEVLLKGLQGNRPVTLVGFSLGARVIFKCLQELALSSDNEGLVERVVLLGAPVSVKGERWEPARKMVAGRFVNVYSRDDWILGVTFRASLLTQGLAGIQAIDVPGVENVDVTGLVDGHSSYLSAAQQILEHLELNTYYPVFVPLPEVNK

SEQ ID NO: 196585 - protein, 510 aa, Zea Mays
MVMSLGSDTAPDENIKDEFKYSTACTYATLESTEAGSSENLLGIVKLSLENVPVNEHRKMVLLYALLSACIADKPVSQEEEDRKSSHFRKGYDARHRVALRLIAAWLDVKWIKMEAMEVMVACSAMAAAKEQEQERENASPRSKWEKWKRGGIIGAAALTGGALLAITGGLAAPAIAAGFGALAPTLGTLVPFIGASGFAAMAAAAGSVAGSVAVAASFGAAGAGLTGTKMARRIGKVKEFEFKPIGDNHNQGRLAVGILVSGFAFDEEDFWKPWEGWKDNLEKYILQWESKHIIAVSTAIQDWLTSRLAMELMKQGAMRTVLSGLLAAFAWPATLLAATDFIDSKWSVAIDRSDKAGKMLAEVLLKGLQGNRPVTLVGFSLGARVIFKCLQELALSSDNEGLVERVVLLGAPVSVKGERWEPARKMVAGRFVNVYSRDDWILGVTFRASLLTQGLAGIQAIDVPGVENVDVTGLVDGHSSYLSAAQQILEHLELNTYYPVFVPLPEVNK

SEQ ID NO: 196586 - protein, 182 aa, Zea Mays
MVMSLGSDTAPDENIKDEFKYSTACTYATLESTEAGSSENLLGIVKLSLENVPVNEHRKMVLLYALLSACIADKPVSQEEEDRKSSHFRKGYDARHRVALRLIAAWLDVKWIKMEAMEVMVACSAMAAAKEQEQERENASPRSKWEKWKRGGIIGAAALTGGALLAITGGRTAFQIMYLMKC

SEQ ID NO: 196587 - protein, 104 aa, Zea Mays
MCIEGGAPDLHHDRRQDEAEGHGGRRGHLRHRLDRGGREGEQDDGDRRHGHGGRRQEAEEARQGRHRLGGPSQGGEEARQETRGEEAGGGGGEEGRQEVSAEAV

SEQ ID NO: 196588 - protein, 661 aa, Zea Mays
MRHCGARGAHHGAAGSVTNPHLRPPTGTPLACSTTLMRSRPALAAHLRRLLLLSPSAHLIIIRRAMASAAAAQAQPGGAPPATAEYEEVLGRLSSLITQKVRANSANRGNQWDLMEHYVKILELEESIARMKVIHVAGTKGKGSTCTFTESILRSCGFHTGLFTSPHLMDVRERFQLDGVNISEEKFLKYFWWCWNKLKEKTDDDIPMPAYFRFLALLAFKIFSAEQVDVAVLEVGLGGKFDATNVVKAPVVCGISSLGYDHMEILGNTLGEIAGEKAGIFKKGVPAYTAPQPEEAMTALKQRASELGVSLQVVDPLEPHHLKDQHLGLHGEHQYINAGLAVALASTWLEKQGHKDTLPLNRTDPLPDHFIRGLSSASLQGRAQIVPDSQVNSEEDKDCSLVFYLDGAHSPESMEVCGKWFSHVTKDDTRLPSSLEQSHTSRSQKILLFNCMSVRDPMRLLPCLLDASTQNGVHFDLALFVPNQSQHTKLGSNTSAPAEPEQIDLSWQLSLQTVWEKLLQDKGINTTKSSDTSKVFDSLPVAIEWLRRNARENQSTSFQSREASSATADGFRNPTPRGRRLSGSTVNRNLAGGESCRCRICPRLREGCRRGQTRCTTELSRGTSTRSVLSIYLSIYLSELLSDKGGYFLLFFLFFFCRDVM

SEQ ID NO: 196589 - protein, 295 aa, Zea Mays
MRHCGARGAHHGAAGSVTNPHLRPPTGTPLACSTTLMRSRPALAAHLRRLLLLSPSAHLIIIRRAMASAAAAQAQPGGAPPATAEYEEVLGRLSSLITQKVRANSANRGNQWDLMEHYVKILELEESIARMKVIHVAGTKGKGSTCTFTESILRSCGFHTGLFTSPHLMDVRERFQLDGVNISEEKFLKYFWWCWNKLKEKTDDDIPMPAYFRFLALLAFKIFSAEQVDVAVLEVGLGGKFDATNVVKAPVVCGISSLGYDHMEILGNTLGEIAGEKAGIFKEFRPILLHNQKRQ

SEQ ID NO: 196590 - protein, 282 aa, Zea Mays
MTALKQRASELGVSLQVVDPLEPHHLKDQHLGLHGEHQYINAGLAVALASTWLEKQGHKDTLPLNRTDPLPDHFIRGLSSASLQGRAQIVPDSQVNSEEDKDCSLVFYLDGAHSPESMEVCGKWFSHVTKDDTRLPSSLEQSHTSRSQKILLFNCMSVRDPMRLLPCLLDASTQNGVHFDLALFVPNQSQHTKLGSNTSAPAEPEQIDLSWQLSLQTVWEKLLQDKGINTTKSSDTSKVFDSLPVAIEWLRRNARENQSTSFQVLVTGSLHLVGDVLRIIKK

SEQ ID NO: 196591 - protein, 497 aa, Zea Mays
MRHCGARGAHHGAAGSVTNPHLRPPTGTPLACSTTLMRSRPALAAHLRRLLLLSPSAHLIIIRRAMASAAAAQAQPGGAPPATAEYEEVLGRLSSLITQKVRANSANRGNQWDLMEHYVKILELEESIARMKVIHVAGTKGKGSTCTFTESILRSCGFHTGLFTSPHLMDVRERFQLDGVNISEEKFLKYFWWCWNKLKEKTDDDIPMPAYFRFLALLAFKIFSAEQVDVAVLEVGLGGKFDATNVVKAPVVCGISSLGYDHMEILGNTLGEIAGEKAGIFKKGVPAYTAPQPEEAMTALKQRASELGVSLQVVDPLEPHHLKDQHLGLHGEHQYINAGLAVALASTWLEKQGHKDTLPLNRTDPLPDHFIRGLSSASLQGRAQIVPDSQVNSEEDKDCSLVFYLDGAHSPESMEVCGKWFSHVTKDDTRLPSSLEQSHTSRSQKESTLTWPYLCRTNHNTRSLVLTLQHQRSLSKSICHGSCHFKQCGRSYFRIKV

SEQ ID NO: 196592 - protein, 316 aa, Zea Mays
MEILGNTLGEIAGEKAGIFKKGVPAYTAPQPEEAMTALKQRASELGVSLQVVDPLEPHHLKDQHLGLHGEHQYINAGLAVALASTWLEKQGHKDTLPLNRTDPLPDHFIRGLSSASLQGRAQIVPDSQVNSEEDKDCSLVFYLDGAHSPESMEVCGKWFSHVTKDDTRLPSSLEQSHTSRSQKILLFNCMSVRDPMRLLPCLLDASTQNGVHFDLALFVPNQSQHTKLGSNTSAPAEPEQIDLSWQLSLQTVWEKLLQDKGINTTKSSDTSKVFDSLPVAIEWLRRNARENQSTSFQVLVTGSLHLVGDVLRIIKK

SEQ ID NO: 196593 - protein, 81 aa, Zea Mays
MIVRGERERERERERERESKPGDAIGVVPWGIGGKRRWCGGGLVAPVERDPESLVREHLQVGVEAVGALHVRHLYGAAVGT

SEQ ID NO: 196594 - protein, 372 aa, Zea Mays
MKPPVSRAAFASVLIGPRTLGASLVAARCASSSAAAAVTAYDHASFVKEIAATDPPEHLNSLLNVLQARGEKIVSPGAKRGLIPCVVPLSESPAGDLTSLLRWPTAPTGMEMPVVEVRKHGLWLLAKNYIHRILVEADFSAGTGDDLWAAVGEAGKNLYAKGEFKESQVADLDVYLLKKVGLFPDVIERKTLRHLEKGDNVSALITGEFYTRDQFPGFGRPFVFNAEIFKRVGRTSEAKDSARVALKSPWWTLGCSYEEAAELAGWEDEQLEFIREKVTEEGKREDLKRGKAPEQVADESLLNLSHDRVQLFLGWLHCLCCSGALQVILDEAAFLMDLASVDGNWDEVVDRIAECYREAGLHDIANFIAYRE

SEQ ID NO: 196595 - protein, 227 aa, Zea Mays
MQAKFLALLIVVPWVIDFLVHDYVMMPFLERYVQKVPLAAELLDVRRSQKLQMVKDLNIEKARYRLEVEIGKSPPLSDEEVWHELREKAIELRDDWRLENRNAFANIWSDTVYGIVLFLLMCFNQSKVAMLKFTGYKVLNNISDSGKAFLIILVSDILLGYHSESGWHTLVEVILEHYGLEADEAAVTFFVCLVPVAFDVYIKYWVYKYLPRLSPSVGNVLDEIKRH

SEQ ID NO: 196596 - protein, 374 aa, Zea Mays
MTFMSCSAAVSNRTLCGGHGAVCARGVLALGSHSSRRRARRRHAVVFAKRRRRRLSKWQRPWWKTFFSDWNEDDESLAGWREEDELLEEIGANQELSDNEKFKVWMSKAEAIVEMREAQQDAMNAEERSWEDWISGGGTSGTGGGGDWNREDSLLDQITDDPAEIVRDKSIIQIFRDSINEDYEDMLFEDRVFMYASTNSAKFLALLIVVPWVIDFLVHDYVMMPFLERYVQKVPLAAELLDVRRSQKLQMVKDLNIEKARYRLEVEIGKSPPLSDEEVWHELREKAIELRDDWRLENRNAFANIWSDTVYGIVLFLLMCFNQSKVAMLKFTGYKVLNNISDSGKAFLIILVSDILLGVRLAYIGRSYSRALWA

SEQ ID NO: 196597 - protein, 217 aa, Zea Mays
MRITRTCCSKIECLCMPRQTRYVQKVPLAAELLDVRRSQKLQMVKDLNIEKARYRLEVEIGKSPPLSDEEVWHELREKAIELRDDWRLENRNAFANIWSDTVYGIVLFLLMCFNQSKVAMLKFTGYKVLNNISDSGKAFLIILVSDILLGYHSESGWHTLVEVILEHYGLEADEAAVTFFVCLVPVAFDVYIKYWVYKYLPRLSPSVGNVLDEIKRH

SEQ ID NO: 196598 - protein, 205 aa, Zea Mays
MTFMSCSAAVSNRTLCGGHGAVCARGVLALGSHSSRRRARRRHAVVFAKRRRRRLSKWQRPWWKTFFSDWNEDDESLAGWREEDELLEEIGANQELSDNEKFKVWMSKAEAIVEMREAQQDAMNAEERSWEDWISGGGTSGTGGGGDWNREDSLLDQITDDPAEIVRDKSIIQIFRDSINEDYEDMLFEDRVFMYASTNSDRVEG

SEQ ID NO: 196599 - protein, 154 aa, Zea Mays
MLLSSFRTLKCKHPFLQIHGWLVEYPRQKVCKTFCHQLSTNWALITWTTLRSWLRFSRGRYLVLKQLHRMMTTSLSLSKERHLRRLQRRSLNWSRMRTKNRDFVVKGRRFNCWHQPCERPYLLIWRASLHVLQLCVKCALGSKSITALCFLKTV

SEQ ID NO: 196600 - protein, 107 aa, Zea Mays
MNVEKLKKMAGAVRTGGKGSMRRKKKAVHKTTTTDDKRLQSTLKRIGGNTIPGIEEVNIFKDDVVIQFQNPKVQASIPANTWVVSGVPQTKSLQDLLPSIINQLEAG

SEQ ID NO: 196601 - protein, 145 aa, Zea Mays
MFKLHRHRSSDRVGERFDFRFSNFRAVQVPAISDRLFLSIVSVDNGKTIAKSTKVASRSGICQWPDTILEPIWFSKDQVSKEFQECQYRIIVSLGSAKSGILGEILLNLSNFLNLADPTAISLPLKRCNSGTVLQLKAIKKGRWF

SEQ ID NO: 196602 - protein, 305 aa, Zea Mays
MAYGPILEGRSCVVADQSGSGKTLAYLCPIIQNLRNEEVQGLHKSSPRNPRVIVLTPTAELASQVLNNCRLISKSGVPFRSMVATGGFRQKTQLESLDQELDVIIATPGRFLYLLQEGFVQLANLRCVVLDEVDILFGEEGFEQVLHQLITVAPVTTQYLFVTATLPLDIYNKVVETFPDCEVIMGPGVHRTSSRLEEILVDCSGDDNEEKNPETAFSNKKTALLKIIEESPVRKTIVFCNKIETCRKVENALRRVDRKASQIKVLPFHAALDQAQRIANIKEFLNKQTADSMFLVCTDSADATI

SEQ ID NO: 196603 - protein, 321 aa, Zea Mays
MKLLSPLFSSVQHCNTCVGGGTGIGNFGRFKAQKIKSLVTRSAHRKRESSNRSSTAWSDESSFNGSDDEEESYFERRKHVSDSERHPKMSSGSRDGRTRSAHSLSSVLSQYRGDDDTDFPGSEATSGSKRWGNVADVTYGRQNQKQREPLNFPQRKGPLDGGFFSRRSFKEIGCSDEMLGALRNFDFPRPSHIQAMAYGPILEGRSCVVADQSGSGKTLAYLCPIIQNLRNEEVQGLHKSSPRNPRVIVLTPTAELASQVLNNCRLISKSGVPFRSMVATGGFRQKTQLESLDQELDVIIATPGRFLYLLQEGFVQLANLR

SEQ ID NO: 196604 - protein, 311 aa, Zea Mays
MSESELAVIKPEVLKTYIWLQCFDGSIQQVEEEVAMFCPMICQEIVKNGTGSSKNHAIALPERVNPANLSLILDYCRFHQITGRSNMERKSFDEKFVRIETERLCELTSAADSLQLKPLVDLTGRALARIIEGKTPEEIRDIFHLPDDLTEEEKLEPLKNINDGPARIRLLNRLYAKKRKELQERHKLKDVQVQKEQKDERSLDELLSFINGDGGSGGRKATKSKKKNKRKDHVENPPKADSEPVNANPDMQDDAEYPFEDADLDDGLDPAMKEELDREVEAFAKRLDSVWKESHIGGNGSARRFPGFNHM

SEQ ID NO: 196605 - protein, 333 aa, Zea Mays
MSESELAVIKPEVLKTYIWLQCFDGSIQQVEEEVAMFCPMICQEIVKNGTGSSKNHAIALPERVNPANLSLILDYCRFHQITGRSNMERKSFDEKFVRIETERLCELTSAADSLQLKPLVDLTGRALARIIEGKTPEEIRDIFHLPDDLTEEEKLEPLKNINDGPARIRLLNRLYAKKRKELQERHKLKDVQVQKEQKDERSLDELLSFINGDGGSGGRKATKSKKKNKRKDHVENPPKADSEPVNAEGAACVVPCKVDRSNVSRLPCQNPDMQDDAEYPFEDADLDDGLDPAMKEELDREVEAFAKRLDSVWKESHIGGNGSARRFPGFNHM

SEQ ID NO: 196606 - protein, 276 aa, Zea Mays
MCARPPEVLKTYIWLQCFDGSIQQVEEEVAMFCPMICQEIVKNGTGSSKNHAIALPERVNPANLSLILDYCRFHQITGRSNMERKSFDEKFVRIETERLCELTSAADSLQLKPLVDLTGRALARIIEGKTPEEIRDIFHLPDDLTEEEKLEPLKNINDGPARIRLLNRLYAKKRKELQERHKLKKEQKDERSLDELLSFINGDGGSGGRKATKSKKKNKRKDHVENPPKADSEPVNANPDMQDDAEYPFEDADLDDGLDPAMKEELDRFVFNMQRS

SEQ ID NO: 196607 - protein, 306 aa, Zea Mays
MSESELAVIKPEVLKTYIWLQCFDGSIQQVEEEVAMFCPMICQEIVKNGTGSSKNHAIALPERVNPANLSLILDYCRFHQITGRSNMERKSFDEKFVRIETERLCELTSAADSLQLKPLVDLTGRALARIIEGKTPEEIRDIFHLPDDLTEEEKLEPLKNINDGPARIRLLNRLYAKKRKELQERHKLKDVQVQKEQKDERSLDELLSFINGDGGSGGRKATKSKKKNKRKDHVENPPKADSEPVNANIYFLRDLSWEFRKELLVWFRAKSIEVMFLDFHARIQICKMMPSTLLKMLTSMMDLILQ

SEQ ID NO: 196608 - protein, 243 aa, Zea Mays
MCARPPEVLKTYIWLQCFDGSIQQVEEEVAMFCPMICQEIVKNGTGSSKNHAIALPERVNPANLSLILDYCRFHQITGRSNMERKSFDEKFVRIETERLCELTSAADSLQLKPLVDLTGRALARIIEGKTPEEIRDIFHLPDDLTEEEKLEPLKNINDGPARIRLLNRLYAKKRKELQERHKLKDVQVQKEQKDERSLDELLSFINGDGGIATVQEAGKLPRVRKRIKGRIMLRTPQKLTLSL

SEQ ID NO: 196609 - protein, 301 aa, Zea Mays
MAGGCLGSGALVTGTDSLLANQSPAQFISPCDIWLLVTSDIFCSHVLKTYIWLQCFDGSIQQVEEEVAMFCPMICQEIVKNGTGSSKNHAIALPERVNPANLSLILDYCRFHQITGRSNMERKSFDEKFVRIETERLCELTSAADSLQLKPLVDLTGRALARIIEGKTPEEIRDIFHLPDDLTEEEKLEPLKNINDGPARIRLLNRLYAKKRKELQERHKLKKEQKDERSLDELLSFINGDGGSGGRKATKSKKKNKRKDHVENPPKADSEPVNAVRFPDCFPYCVFYVEHLFLTRSIMGV

SEQ ID NO: 196610 - protein, 213 aa, Zea Mays
MFCPMICQEIVKNGTGSSKNHAIALPERVNPANLSLILDYCRFHQITGRSNMERKSFDEKFVRIETERLCELTSAADSLQLKPLVDLTGRALARIIEGKTPEEIRDIFHLPDDLTEEEKLEPLKNINDGPARIRLLNRLYAKKRKELQERHKLKDVQVQKEQKDERSLDELLSFINGDGGIATVQEAGKLPRVRKRIKGRIMLRTPQKLTLSL

SEQ ID NO: 196611 - protein, 697 aa, Zea Mays
MGKRVEYGNQGVGVVSQQLYKSLTSLQMGNVEDWMGDNSRDDLNRETNRSRCQCHWHSGWYGTQGKASASYPVHAGWHSGWYGNWYPGKVSPSSRLQQSLRARGENSNSQRSALILSLRCSAPGSPHQRSLPEQAMKLKINKACDLGSISVLPPRRTGGSGGAGGAGSSAAPVAAGSQQRSQPMSQHSFSQGVVGSGGASSLLHSQSQLSQASLDENLLTLHLASPARDQRFGFHDDLSKKMTSLPVSSASCVREESQLQLAKTSSNPVHRWNPSLPDGRSVGPTEDVERKFQHMASSVHKVGMVLDSVQTDVMQLNRAMKEATLDSGSIQQKIVLLDALLQKNLKGQDDLKALVESNTKSISDQLTVLNSYSNKLDEISSTLSILPKQIETNLKQQQSDTFRIFRKDMEEIVRAVRSLNNKIDAIQMPTDQSCTTNGRPLMNQLPVDRNERPQVNQTPEVTRVSQTPVATMANQRPVAKGRHLVSQTPAANGKPLTNQTSVANGRSLMSQVPAANGKPLTNQIAVPKGRPMMRQKTAEGGRPQMNQIPVADGWPHTNKIHAPEVRHPVPLVCPAAGPRPKVEEGKLRAVPQKLTGCRSRVTPKQEEAATNTKVVVGRAAATEKVVIFIDDDSDDGGSEALASCVILRPAPLGSGAGECDLVKVGAEESQEILRRARKRRRREMQAIVACMPPELGY

SEQ ID NO: 196612 - protein, 779 aa, Zea Mays
MGRWLGKRLWQIGDQRPRGVGPLAVARVKGRAATAAQVGEEAATLARREAVVLVRPAAPSVAPTTSLKPTGARALGMWLSFVVEGGVEYGNQGVGVVSQQLYKSLTSLQMGNVEDWMGDNSRDDLNRETNRSRCQCHWHSGWYGTQGKASASYPVHAGWHSGWYGNWYPGKVSPSSRLQQSLRARGENSNSQRSALILSLRCSAPGSPHQRSLPEQAMKLKINKACDLGSISVLPPRRTGGSGGAGGAGSSAAPVAAGSQQRSQPMSQHSFSQGVVGSGGASSLLHSQSQLSQASLDENLLTLHLASPARDQRFGFHDDLSKKMTSLPVSSASCVREESQLQLAKTSSNPVHRWNPSLPDGRSVGPTEDVERKFQHMASSVHKVGMVLDSVQTDVMQLNRAMKEATLDSGSIQQKIVLLDALLQKNLKGQDDLKALVESNTKSISDQLTVLNSYSNKLDEISSTLSILPKQIETNLKQQQSDTFRIFRKDMEEIVRAVRSLNNKIDAIQMPTDQSCTTNGRPLMNQLPVDRNERPQVNQTPEVTRVSQTPVATMANQRPVAKGRHLVSQTPAANGKPLTNQTSVANGRSLMSQVPAANGKPLTNQIAVPKGRPMMRQKTAEGGRPQMNQIPVADGWPHTNKIHAPEVRHPVPLVCPAAGPRPKVEEGKLRAVPQKLTGCRSRVTPKQEEAATNTKVVVGRAAATEKVVIFIDDDSDDGGSEALASCVILRPAPLGSGAGECDLVKVGAEESQEILRRARKRRRREMQAIVACMPPELGY

SEQ ID NO: 196613 - protein, 896 aa, Zea Mays
MGKRSQKRLIRRHQDGSIGCMAGLIRMFYSRHDANKLLLDRKQPGSRRHSFSAFSGRRGHSRKNSKDLDEIDEYGDYNMEEPSSSKPTVKRLMEDELRKLKQLKLPNDEVERILADLGHGACLDKSSAQNSKAKKGDQNHIRGITTTAAPSGSLDPTASNCIKEAEENELEFALADFLGRIHRNCNNNGELCTEMKALIQTKIAELDNPPCTFAYEQQTSRGDEYDTAGGKHRCSSSKTQPKKFRDALEMLSSDTELFFQKSNSRILESAQRNQNRLIGNNLEPTKIADNTDSNKDPKSLNQHELATRRYGKESRNIFFWKKERSSPRQTAQGTSSSQPVNKIVILKPNPRREIGHAVAVSSTQAPKLGATESSKFSIKEVRRRFRIVTSEATKGIPSVSEDNLQKGQHWLNSSAFTIIKDTRQLAEQTSEGKFSSSVMKDFRSSNSGRQKKRKNDGPTEKNSSIITSSKDESVFYDEARKHLTEILKDKRQTTKQHPTLEISRSLVRMLSFPQSSTSSPRSSPRAKDCIYLSPEEASIRAIYKSNKDLLEEESQSGEFPENVVCDPSEALHEQAVQERWCVKEESQETTQEGAELDTLRTKEIDKLDCMGKNSNAWGTPAKQCTYKPSQDMVGEAEPGQRHVRTFPSSPENDFEKLECQEPTTPRPSAQIEQISQFSPDGNHEKQEQPSPQSVLDVFFLDGELHKDILRTRYNTTGDGSDQGIFWEDKHPRLCYIKELLELSELCANQNLEVWYLEDELISPCLFEEVHGGNQIDGTKLLFDCICEAVTEIQDIYFRNPPCLSSLTHSIRAPPPAGQNLISEINKRVERHLHYRFPSTLDQLVNMDLEGGSWMDLGSESGEVAVVIWDCTLDELLEELVYDLWISGFNLAAGNHL

SEQ ID NO: 196614 - protein, 894 aa, Zea Mays
MGKRSQKRLIRRHQDGSIGCMAGLIRMFYSRHDANKLLLDRKQPGSRRHSFSAFSGRRGHSRKNSKDLDEIDEYGDYNMEEPSSSKPTVKRLMEDELRKLKQLKLPNDEVERILADLGHGACLDKSSAQNSKAKKGDQNHIRGITTTAAPSGSLDPTASNCIKEAEENELEFALADFLGRIHRNCNNNGELCTEMKALIQTKIAELDNPPCTFAYEQQTSRGDEYDTAGGKHRCSSSKTQPKKFRDALEMLSSDTELFFQKSNSRILESAQRNQNRLIGNNLEPTKIADNTDSNKDPKSLNQHELATRRYGKESRNIFFWKKERSSPRQTAQGTSSSQPVNKIVILKPNPRREIGHAVAVSSTQAPKLGATESSKFSIKEVRRRFRIVTSEATKGIPSVSEDNLQKGQHWLNSSAFTIIKDTRQLAEQTSEGKFSSSVMKDFRSSNSGRQKKRKNDGPTEKNSSIITSSKDESVFYDEARKHLTEILKDKRQTTKQHPTLEISRSLVRMLSFPQSSTSSPRSSPRAKDCIYLSPEEASIRAIYKSNKDLLEEESQSGEFPENVVCDPSEALHEQAVQERWCVKEESQETTQEELDTLRTKEIDKLDCMGKNSNAWGTPAKQCTYKPSQDMVGEAEPGQRHVRTFPSSPENDFEKLECQEPTTPRPSAQIEQISQFSPDGNHEKQEQPSPQSVLDVFFLDGELHKDILRTRYNTTGDGSDQGIFWEDKHPRLCYIKELLELSELCANQNLEVWYLEDELISPCLFEEVHGGNQIDGTKLLFDCICEAVTEIQDIYFRNPPCLSSLTHSIRAPPPAGQNLISEINKRVERHLHYRFPSTLDQLVNMDLEGGSWMDLGSESGEVAVVIWDCTLDELLEELVYDLWISGFNLAAGNHL

SEQ ID NO: 196615 - protein, 703 aa, Zea Mays
MFYNMEEPSSSKPTVKRLMEDELRKLKQLKLPNDEVERILADLGHGACLDKSSAQNSKAKKGDQNHIRGITTTAAPSGSLDPTASNCIKEAEENELEFALADFLGRIHRNCNNNGELCTEMKALIQTKIAELDNPPCTFAYEQQTSRGDEYDTAGGKHRCSSSKTQPKKFRDALEMLSSDTELFFQKSNSRILESAQRNQNRLIGNNLEPTKIADNTDSNKDPKSLNQHELATRRYGKESRNIFFWKKERSSPRQTAQGTSSSQPVNKIVILKPNPRREIGHAVAVSSTQAPKLGATESSKFSIKEVRRRFRIVTSEATKGIPSVSEDNLQKGQHWLNSSAFTIIKDTRQLAEQTSEGKFSSSVMKDFRSSNSGRQKKRKNDGPTEKNSSIITSSKDESVFYDEARKHLTEILKDKRQTTKQHPTLEISRSLVRMLSFPQSSTSSPRSSPRAKDCIYLSPEEASIRAIYKSNKDLLEEESQSGEFPENVVCDPSEALHEQAVQERWCVKEESQETTQEGAELDTLRTKEIDKLDCMGKNSNAWGTPAKQCTYKPSQDMVGEAEPGQRHVRTFPSSPENDFEKLECQEPTTPRPSAQIEQISQFSPDGNHEKQEQPSPQSVLDVFFLDGELHKDILRTRYNTTGDGSDQGIFWEDKHPRLCYIKELLELSELCANQNLEQPKTSFLLCLIEGAVSSPSSACGLG

SEQ ID NO: 196616 - protein, 2200 aa, Zea Mays
MHRYSSNSAGFSGGRDGARLEASPFSSSSSGYPVSSRRQQQLVPYKLKCDKDPLNNKLGPPDFYPQTPNCPEETLTKEYAQAGYKETVEGIEEAREIVLSQIPYFCKPDAVIKCKEALKKRLRAINESRAQKRKAGQVYGVPLSGSLLIKPGVYPEQRPCNEDARRKWIEALAQPNKRLRSLSEHVPHGYRRKSLFEGLIRYNVPLLRATWFIKVTYLNQTRQTPNSISVAGSDNQRSNQWTKDVVEYLQHILDEFCSKEGAFVHPSFREQSSPGPTAGTNQIKMKTEASPAAGDIEEPLVHFKWRYMVRLIQWHLTEELLVPSVLIEWLSNQLQERDSVDVLELLLPIMLGLVDTITLSQTYVRMFVELLVRRLNDASVVDSPKGPSVSSVIAELLRYMVLAVPDTFISLDCFPLPSFVVPDVYGRGALLKITSSGGISSSKRCDAYRYLSCGYAVCSIQKRAYDLATVANPNLQARGAAKVVQALDIALVTGNLSVAYSSLFNDLSDTLMEERWIKEVSPSLQSSLMWIGTVELSLICSIFFLCEWATCDYRDCRASPSRNVKFTGRRDLSQIHMAVSILKNKMDEMNNLSRSKSSTRVTLNNITKGSSLTDACLTAAAVDDTSGLQSNAKNVDEKKDTNDIFESPGPLHDIIVCWLDQHEVSSVAGFTRVDVLIVELIRNGIFFPQAYVRQLIISGITDKNDTMLDVERKRRHHRTLKQLPGSSLFDILEETRTVEEQQLYEMMSTYSSERRLVLSELSCDHSFYASGRGEYTASSCIRKQSDLPLASGGDKHGRVPEQVEDVKALLSSLLGFTYPSPVESEPRQIKTSFQESATSTLSQVETGEAKSGCEVCMRSKGQKLDDTATPFQGFSLIQSDEEDIWWVRKGTKLQESFNIEPVQKSVKQTSRGRAKVVRKTQSLAQLAAARIEGSQGTSTSHVCESKMSCPHHKPNIDGDNVKDFDHTRVANLTEIGKSLKRLRLLERRSVSSWLLKTVRQLIEGNETTAAKATNSISILSLQSDDKTTSKWRLGDEELLSVLYLLDTCCDLVSCARFLVWLLAKIRGGMGSSGQPGRSSMHTRNRDHQVCQVSEALVFSSLLRYENILLAADILPDVLSALVNRNSVSAIVRHPGSTAFAYVRYFLKKYRDVAGVAKWEKSFRTTCDQRLLAELDNGRSIDGELISSSGVSAGEEIDEQVRQKLNGRSSRLVQNMKEIVQRQADEIQRSLKEKKVLATPRNPPTFEKEDSYQIAHDIVSGLVECIRQNGGANPDGDLSTVASAVSAIVANAGHVIAKHLDFAGGNYQGVNSVSNSLNFVRHTLRVHINSLCLLKETLGDRFSRAFEIALAVETSGAVTAAFASPKMHRNQFQPSPEAHDAYGNHTSDLSNSGKGFVGRTAKVSAAVSALVVGAVVHGAVSLERMVAALKIKDGLDILQLLRGLKSSSNGVSRPTGTFRIEHSTDVLVHWFRVLLGNCRTVYDGLIADILGDSYILALSRLQQMLPLSVIFPPAYSIFAMVLWRRYIFNREDPQLYQSLSNAISDITRHQPFREICFRNTHRLYNLLASDVGDSEFAAMLETHSPDRNSKILPFIPLRARLFLDALIDCNTPTIQGDGASEPCDPKDNELKLSERLMQLLDTLQPAKFHWQWVEMRLLLDEQALMEKVAAGKTALESLRSLSPKAEGFTLSDSEKGFTEVILSRLLARPDAAPLYSEAVRLLGKLQESLVMDVKWILQGQDAILGRRSTRQQLVHIAQRKGLSTKAQVWKPWGWSSLLSDVIPNKTAKRKLEVTSIEEGEVVDDTVDAKRPSKTPPHSVDRSFEAIRSINKYLTEKALAELVLPCIDRSSADIRGILSVDLIKQMGTISEHIKAIARNGAKQAGSVPSGNEVPSSKSSGRKGIRGGSPNIGRRAPVGNDPSPPSASALRAALWLRLQFIIRLLPVIMADRSMRQTLASAILGLLATRMIYEDADLPLPPTNATALRREVDSLLEPPLDVLLDRPGESLFERLLCVLHALLGSYKPSWLKSRSASRSTIRIQRDFSAFDNEAAEGLQSALDHMELPETIRRRIQAAMPLLPPSRHPSLQCQPPQLSLAALTPLQSSTSGVGPQQKSCSASWVPTNVSGRSKAALPSHDPEMEVDPWNLLEDGTSCPSTASGSHGASGVTGDHANLKACSWLKGAVRVRRTELTYIGSLDDDT

SEQ ID NO: 196617 - protein, 986 aa, Zea Mays
MKEIVQRQADEIQRSLKEKKVLATPRNPPTFEKEDSYQIAHDIVSGLVECIRQNGGANPDGDLSTVASAVSAIVANAGHVIAKHLDFAGGNYQGVNSVSNSLNFVRHTLRVHINSLCLLKETLGDRFSRAFEIALAVETSGAVTAAFASPKMHRNQFQPSPEAHDAYGNHTSDLSNSGKGFVGRTAKVSAAVSALVVGAVVHGAVSLERMVAALKIKDGLDILQLLRGLKSSSNGVSRPTGTFRIEHSTDVLVHWFRVLLGNCRTVYDGLIADILGDSYILALSRLQQMLPLSVIFPPAYSIFAMVLWRRYIFNREDPQLYQSLSNAISDITRHQPFREICFRNTHRLYNLLASDVGDSEFAAMLETHSPDRNSKILPFIPLRARLFLDALIDCNTPTIQGDGASEPCDPKDNELKLSERLMQLLDTLQPAKFHWQWVEMRLLLDEQALMEKVAAGKTALESLRSLSPKAEGFTLSDSEKGFTEVILSRLLARPDAAPLYSEAVRLLGKLQESLVMDVKWILQGQDAILGRRSTRQQLVHIAQRKGLSTKAQVWKPWGWSSLLSDVIPNKTAKRKLEVTSIEEGEVVDDTVDAKRPSKTPPHSVDRSFEAIRSINKYLTEKALAELVLPCIDRSSADIRGILSVDLIKQMGTISEHIKAIARNGAKQAGSVPSGNEVPSSKSSGRKGIRGGSPNIGRRAPVGNDPSPPSASALRAALWLRLQFIIRLLPVIMADRSMRQTLASAILGLLATRMIYEDADLPLPPTNATALRREVDSLLEPPLDVLLDRPGESLFERLLCVLHALLGSYKPSWLKSRSASRSTIRIQRDFSAFDNEAAEGLQSALDHMELPETIRRRIQAAMPLLPPSRHPSLQCQPPQLSLAALTPLQSSTSGVGPQQKSCSASWVPTNVSGRSKAALPSHDPEMEVDPWNLLEDGTSCPSTASGSHGASGVTGDHANLKACSWLKGAVRVRRTELTYIGSLDDDT

SEQ ID NO: 196618 - protein, 1824 aa, Zea Mays
MKTEASPAAGDIEEPLVHFKWRYMVRLIQWHLTEELLVPSVLIEWLSNQLQERDSVDVLELLLPIMLGLVDTITLSQTYVRMFVELLVRRLNDASVVDSPKGPSVSSVIAELLRYMVLAVPDTFISLDCFPLPSFVVPDVYGRGALLKITSSGGISSSKRCDAYRYLSCGYAVCSIQKRAYDLATVANPNLQARGAAKVVQALDIALVTGNLSVAYSSLFNDLSDTLMEERWIKEVSPSLQSSLMWIGTVELSLICSIFFLCEWATCDYRDCRASPSRNVKFTGRRDLSQIHMAVSILKNKMDEMNNLSRSKSSTRVTLNNITKGSSLTDACLTAAAVDDTSGLQSNAKNVDEKKDTNDIFESPGPLHDIIVCWLDQHEVSSVAGFTRVDVLIVELIRNGIFFPQAYVRQLIISGITDKNDTMLDVERKRRHHRTLKQLPGSSLFDILEETRTVEEQQLYEMMSTYSSERRLVLSELSCDHSFYASGRGEYTASSCIRKQSDLPLASGGDKHGRVPEQVEDVKALLSSLLGFTYPSPVESEPRQIKTSFQESATSTLSQVETGEAKSGCEVCMRSKGQKLDDTATPFQGFSLIQSDEEDIWWVRKGTKLQESFNIEPVQKSVKQTSRGRAKVVRKTQSLAQLAAARIEGSQGTSTSHVCESKMSCPHHKPNIDGDNVKDFDHTRVANLTEIGKSLKRLRLLERRSVSSWLLKTVRQLIEGNETTAAKATNSISILSLQSDDKTTSKWRLGDEELLSVLYLLDTCCDLVSCARFLVWLLAKIRGGMGSSGQPGRSSMHTRNRDHQVCQVSEALVFSSLLRYENILLAADILPDVLSALVNRNSVSAIVRHPGSTAFAYVRYFLKKYRDVAGVAKWEKSFRTTCDQRLLAELDNGRSIDGELISSSGVSAGEEIDEQVRQKLNGRSSRLVQNMKEIVQRQADEIQRSLKEKKVLATPRNPPTFEKEDSYQIAHDIVSGLVECIRQNGGANPDGDLSTVASAVSAIVANAGHVIAKHLDFAGGNYQGVNSVSNSLNFVRHTLRVHINSLCLLKETLGDRFSRAFEIALAVETSGAVTAAFASPKMHRNQFQPSPEAHDAYGNHTSDLSNSGKGFVGRTAKVSAAVSALVVGAVVHGAVSLERMVAALKIKDGLDILQLLRGLKSSSNGVSRPTGTFRIEHSTDVLVHWFRVLLGNCRTVYDGLIADILGDSYILALSRLQQMLPLSVIFPPAYSIFAMVLWRRYIFNREDPQLYQSLSNAISDITRHQPFREICFRNTHRLYNLLASDVGDSEFAAMLETHSPDRNSKILPFIPLRARLFLDALIDCNTPTIQGDGASEPCDPKDNELKLSERLMQLLDTLQPAKFHWQWVEMRLLLDEQALMEKVAAGKTALESLRSLSPKAEGFTLSDSEKGFTEVILSRLLARPDAAPLYSEAVRLLGKLQESLVMDVKWILQGQDAILGRRSTRQQLVHIAQRKGLSTKAQVWKPWGWSSLLSDVIPNKTAKRKLEVTSIEEGEVVDDTVDAKRPSKTPPHSVDRSFEAIRSINKYLTEKALAELVLPCIDRSSADIRGILSVDLIKQMGTISEHIKAIARNGAKQAGSVPSGNEVPSSKSSGRKGIRGGSPNIGRRAPVGNDPSPPSASALRAALWLRLQFIIRLLPVIMADRSMRQTLASAILGLLATRMIYEDADLPLPPTNATALRREVDSLLEPPLDVLLDRPGESLFERLLCVLHALLGSYKPSWLKSRSASRSTIRIQRDFSAFDNEAAEGLQSALDHMELPETIRRRIQAAMPLLPPSRHPSLQCQPPQLSLAALTPLQSSTLAL

SEQ ID NO: 196619 - protein, 1954 aa, Zea Mays
MHRYSSNSAGFSGGRDGARLEASPFSSSSSGYPVSSRRQQQLVPYKLKCDKDPLNNKLGPPDFYPQTPNCPEETLTKEYAQAGYKETVEGIEEAREIVLSQIPYFCKPDAVIKCKEKRLRAINESRAQKRKAGQVYGVPLSGSLLIKPGVYPEQRPCNEDARRKWIEALAQPNKRLRSLSEHVPHGYRRKSLFEGLIRYNVPLLRATWFIKVTYLNQTRQTPNSISVAGSDNQRSNQWTKDVVEYLQHILDEFCSKEGAFVHPSFREQSSPGPTAGTNQIKMKTEASPAAGDIEEPLVHFKWRYMVRLIQWHLTEELLVPSVLIEWLSNQLQERDSVDVLELLLPIMLGLVDTITLSQTYVRMFVELLVRRLNDASVVDSPKGPSVSSVIAELLRYMVLAVPDTFISLDCFPLPSFVVPDVYGRGALLKITSSGGISSSKRCDAYRYLSCGYAVCSIQKRAYDLATVANPNLQARGAAKVVQALDIALVTGNLSVAYSSLFNDLSDTLMEERWIKEVSPSLQSSLMWIGTVELSLICSIFFLCEWATCDYRDCRASPSRNVKFTGRRDLSQIHMAVSILKNKMDEMNNLSRSKSSTRVTLNNITKGSSLTDACLTAAAVDDTSGLQSNAKNVDEKKDTNDIFESPGPLHDIIVCWLDQHEVSSVAGFTRVDVLIVELIRNGIFFPQAYVRQLIISGITDKNDTMLDVERKRRHHRTLKQLPGSSLFDILEETRTVEEQQLYEMMSTYSSERRLVLSELSCDHSFYASGRGEYTASSCIRKQSDLPLASGGDKHGRVPEQVEDVKALLSSLLGFTYPSPVESEPRQIKTSFQESATSTLSQVETGEAKSGCEVCMRSKGQKLDDTATPFQGFSLIQSDEEDIWWVRKGTKLQESFNIEPVQKSVKQTSRGRAKVVRKTQSLAQLAAARIEGSQGTSTSHVCESKMSCPHHKPNIDGDNVKDFDHTRVANLTEIGKSLKRLRLLERRSVSSWLLKTVRQLIEGNETTAAKATNSISILSLQSDDKTTSKWRLGDEELLSVLYLLDTCCDLVSCARFLVWLLAKIRGGMGSSGQPGRSSMHTRNRDHQVCQVSEALVFSSLLRYENILLAADILPDVLSALVNRNSVSAIVRHPGSTAFAYVRYFLKKYRDVAGVAKWEKSFRTTCDQRLLAELDNGRSIDGELISSSGVSAGEEIDEQVRQKLNGRSSRLVQNMKEIVQRQADEIQRSLKEKKVLATPRNPPTFEKEDSYQIAHDIVSGLVECIRQNGGANPDGDLSTVASAVSAIVANAGHVIAKHLDFAGGNYQGVNSVSNSLNFVRHTLRVHINSLCLLKETLGDRFSRAFEIALAVETSGAVTAAFASPKMHRNQFQPSPEAHDAYGNHTSDLSNSGKGFVGRTAKVSAAVSALVVGAVVHGAVSLERMVAALKIKDGLDILQLLRGLKSSSNGVSRPTGTFRIEHSTDVLVHWFRVLLGNCRTVYDGLIADILGDSYILALSRLQQMLPLSVIFPPAYSIFAMVLWRRYIFNREDPQLYQSLSNAISDITRHQPFREICFRNTHRLYNLLASDVGDSEFAAMLETHSPDRNSKILPFIPLRARLFLDALIDCNTPTIQGDGASEPCDPKDNELKLSERLMQLLDTLQPAKFHWQWVEMRLLLDEQALMEKVAAGKTALESLRSLSPKAEGFTLSDSEKGFTEVILSRLLARPDAAPLYSEAVRLLGKLQESLVMDVKWILQGQDAILGRRSTRQQLVHIAQRKGLSTKAQVWKPWGWSSLLSDVIPNKTAKRKLEVTSIEEGEVVDDTVDAKRPSKTPPHSVDRSFEAIRSINKYLTEKALAELVLPCIDRSSADIRGILSVDLIKQMGTISEHIKAIARNGAKQAGSVPSGNEVPSSKSSGRKGIRGGSPNIGRRAPVGNDPSPPSASALRAALWLRLQFIIRLLPVIMADRPACNAHDL

SEQ ID NO: 196620 - protein, 1099 aa, Zea Mays
MHRYSSNSAGFSGGRDGARLEASPFSSSSSGYPVSSRRQQQLVPYKLKCDKDPLNNKLGPPDFYPQTPNCPEETLTKEYAQAGYKETVEGIEEAREIVLSQIPYFCKPDAVIKCKEALKKRLRAINESRAQKRKAGQVYGVPLSGSLLIKPGVYPEQRPCNEDARRKWIEALAQPNKRLRSLSEHVPHGYRRKSLFEGLIRYNVPLLRATWFIKVTYLNQTRQTPNSISVAGSDNQRSNQWTKDVVEYLQHILDEFCSKEGAFVHPSFREQSSPGPTAGTNQIKMKTEASPAAGDIEEPLVHFKWRYMVRLIQWHLTEELLVPSVLIEWLSNQLQERDSVDVLELLLPIMLGLVDTITLSQTYVRMFVELLVRRLNDASVVDSPKGPSVSSVIAELLRYMVLAVPDTFISLDCFPLPSFVVPDVYGRGALLKITSSGGISSSKRCDAYRYLSCGYAVCSIQKRAYDLATVANPNLQARGAAKVVQALDIALVTGNLSVAYSSLFNDLSDTLMEERWIKEVSPSLQSSLMWIGTVELSLICSIFFLCEWATCDYRDCRASPSRNVKFTGRRDLSQIHMAVSILKNKMDEMNNLSRSKSSTRVTLNNITKGSSLTDACLTAAAVDDTSGLQSNAKNVDEKKDTNDIFESPGPLHDIIVCWLDQHEVSSVAGFTRVDVLIVELIRNGIFFPQAYVRQLIISGITDKNDTMLDVERKRRHHRTLKQLPGSSLFDILEETRTVEEQQLYEMMSTYSSERRLVLSELSCDHSFYASGRGEYTASSCIRKQSDLPLASGGDKHGRVPEQVEDVKALLSSLLGFTYPSPVESEPRQIKTSFQESATSTLSQVETGEAKSGCEVCMRSKGQKLDDTATPFQGFSLIQSDEEDIWWVRKGTKLQESFNIEPVQKSVKQTSRGRAKVVRKTQSLAQLAAARIEGSQGTSTSHVCESKMSCPHHKPNIDGDNVKDFDHTRVANLTEIGKSLKRLRLLERRSVSSWLLKTVRQLIEGNETTAAKATNSISILSLQSDDKTTSKWRLGDEELLSVLYLLDTCCDLVSCARFLVWLLAKIRGGMGSSGQPGRSSMHTRNRDHQVCQVREHTSCG

SEQ ID NO: 196621 - protein, 659 aa, Zea Mays
MMIDVDLNLEVLGGVGVYKLEEEWRRGEPNASAIHGSKSNPKKLVEVMRARDLHPLCCLPAADGGPPPPPLAHAPPAVAGLLYKWTNIGKGWRPRWFAIRGAVLAYSKIPRRSTSPPSSATSSTATRIIGHARYGHDSPVGLVHLKISSFRESKSDDRRFYLITPAKTLQLRTDSANERAAWIEALVSARAESSPDGGLLTNQNDASFSTERLRNRMHEEGLGEEIIKDCEQIVHSEFSQYHTQMKQRCEEYVSFLSRLPQQFEVLSADDNANMIELHSHLMKPDYCSSGQGKCSESSNTESSDDVGQQELDELLDDDDYQFYDTRQSFSDSAGLSCLNMKCSNSGKDTFLYGDKFVKPKAGTGDSECLPPFFKRRTKLPDPVEKEKSVSLWSMIKDNVGRDLTQVSHHPMVMACHCEGKGWKFWGDSNVKSKFWGQTIQLDPVGVLSVEFDDGEIFQWSKVTTTINNVIIGQIYCNHYGTMSITGNRGYSCKLIFKRQSFVERNPRQVEGLVKDGDGSTVASLMGKWDERMYCSASGQNVILLWEKNEASTNPTRYNLSSFAITLNELTPELKESLPPTDSRLRPDQRHVENGEYSKANAEKLRLERRQRMSRKMQDNGWKPRWFRRDDDTFRYVGGYWEARQQRKWDGCHDIFGEFV

SEQ ID NO: 196622 - protein, 507 aa, Zea Mays
MCLWRCSILAYRRAHPDNLCCLIQVLSADDNANMIELHSHLMKPDYCSSGQGKCSESSNTESSDDVGQQELDELLDDDDYQFYDTRQSFSDSAGLSCLNMKCSNSGKDTFLYGDKFVKPKAGTGDSECLPPFFKRRTKLPDPVEKEKSVSLWSMIKDNVGRDLTQVCLPVYFNEPLSSLQKCFEDLEYSYLLDRAYECGLKGDNLMRILNVAAFAVSGYASSVGRPCKPFNPLLGETYEADYPENGIRFFSEKVSHHPMVMACHCEGKGWKFWGDSNVKSKFWGQTIQLDPVGVLSVEFDDGEIFQWSKVTTTINNVIIGQIYCNHYGTMSITGNRGYSCKLIFKRQSFVERNPRQVEGLVKDGDGSTVASLMGKWDERMYCSASGQNVILLWEKNEASTNPTRYNLSSFAITLNELTPELKESLPPTDSRLRPDQRHVENGEYSKANAEKLRLERRQRMSRKMQDNGWKPRWFRRDDDTFRYVGGYWEARQQRKWDGCHDIFGEFV

SEQ ID NO: 196623 - protein, 157 aa, Zea Mays
MPPPRPQRRRSLPATPPPSTISSRSRSGSGRTPTTTTSSPGSSSAGCSQSPRFLIMSPSRLPLSSRSCLSTTACLMCISQSDLEANLFKLMEKRGYGEEYINRYKMMTRFHHQRVPLVILVCGTACTGKSTIATQLAQRLNLPNVLQVGLLFIFSSL

SEQ ID NO: 196624 - protein, 178 aa, Zea Mays
MDEEKSDGNSRTEKTVTDSENPGISVERKVEHQFKNGLAENRMDSTEDNKNFVKSKKSTLEKGRTSEGLSYAQNHETKVHDSARSQEKNPKDESDGHKDLDQQKNNATKKDKPAAEPIIVPIVLRMSDFDHKALLEEWIATRAFRDNCIPQVSMEALVHIQCTNLHFFEIVVQPLYFL

SEQ ID NO: 196625 - protein, 57 aa, Zea Mays
MVGSSCSSLASTYRRIVTHKRNCVLMAYTKMSIPWRDECFLSRRSIVYHSDRWEPPW

SEQ ID NO: 196626 - protein, 226 aa, Zea Mays
MSCVCCCCRACVSPDGPGPRLPPPAAAFSFVGDRMQRVVVMRHGDRLDHSEPMWPANKPRPWDPPLDDAGLLRAWTVGKCIRAAAAKQGWALHRVLVSPFLRCRQTAARAVAALCAVPDDDALLAVGDPANVSIEYGLSEMMNTQAMGITVSKLAPNVSKWFPDLPELEADFPAGTIDHSAEPIYPEVSAFQLSLQCSIHLLNQILVCSYQSGRNPSWRQEADTQA

SEQ ID NO: 196627 - protein, 220 aa, Zea Mays
MSGPWSVDVAWEPRCWLKKQKDVMAPAVIAKGEDVMWTSGLIFGKGEGIVGLETNLGTLHIQLLPGCAPRSVDHFIELLGLRNCAGCRFYRAEGRGNVWDAKGDHEKNVAFGPPYALLQGTLEVDGVPFKKIPREACPAVKRGSVAWVGSGPEFLISLADHEEWRDAYTVFGNVLPMDMAIAEEMTLLPTSTDVWSNVKVKVLKDPVYFKVKRSSNASAV

SEQ ID NO: 196628 - protein, 288 aa, Zea Mays
MPALPAFPLTRRPSDADCCRGMEGLELWGPAVKWGSDHRLPSAAACCAACKAMCPHPKDGACRCDSWVFCGDERKCKDRLGECWLKKQKDVMAPAVIAKGEDVMWTSGLIFGKGEGIVGLETNLGTLHIQLLPGCAPRSVDHFIELLGLRNCAGCRFYRAEGRGNVWDAKGDHEKNVAFGPPYALLQGTLEVDGVPFKKIPREACPAVKRGSVAWVGSGPEFLISLADHEEWRDAYTVFGNVLPMDMAIAEEMTLLPTSTDVWSNVKVKVLKDPVYFKVKRSSNASAV

SEQ ID NO: 196629 - protein, 252 aa, Zea Mays
MEGLELWGPAVKWGSDHRLPSAAACCAACKAMCPHPKDGACRCDSWVFCGDERKCKDRLGECWLKKQKDVMAPAVIAKGEDVMWTSGLIFGKGELLPGCAPRSVDHFIELLGLRNCAGCRFYRAEGRGNVWDAKGDHEKNVAFGPPYALLQGTLEVDGVPFKKIPREACPAVKRGSVAWVGSGPEFLISLADHEEWRDAYTVFGNVLPMDMAIAEEMTLLPTSTDVWSNVKVKVLKDPVYFKVKRSSNASAV

SEQ ID NO: 196630 - protein, 234 aa, Zea Mays
MEGLELWGPAVKWGSDHRLPSAAACCAACKAMCPHPKDGACRCDSWVFCGDERKCKDRLGEGIVGLETNLGTLHIQLLPGCAPRSVDHFIELLGLRNCAGCRFYRAEGRGNVWDAKGDHEKNVAFGPPYALLQGTLEVDGVPFKKIPREACPAVKRGSVAWVGSGPEFLISLADHEEWRDAYTVFGNVLPMDMAIAEEMTLLPTSTDVWSNVKVKVLKDPVYFKVKRSSNASAV

SEQ ID NO: 196631 - protein, 363 aa, Zea Mays
MTMERLLWASTQALGCGGKRDEAGLVGQLGEWLCRAALPPPRVCGAPGGPPVTVRRVRLRDGRHLAYEESGVPKEVARYRIIFSHGFAGSRLAGSCGGARRVHGGLRPRRLRRERPEPLPLRAERGAGHGGAGRRAGPGRQVLRRGRLPRLPRHVERAPLHPAQAGGRRHAGARGQLLVARAPRGPGGGGVRAAGARGPVGAARGAPRARAPPLVDGPALATHLHRRRQHHPPPQRARRRGPPRARRRRHAPAEAGGGHTAGRARVLPPRHGRHVRQVGVRPHGPAGAALPRAPVAGRRGRPRAGRPSAPRRRNPRVGQLPRAPRHRTLPVRRPWPRGHRSTDTLRFISRPGSVASTKYRIII

SEQ ID NO: 196632 - protein, 203 aa, Zea Mays
MHNDVNQWPSEERLPSWKETMKLYFAAVLDTGTRILSLVALGLDLDADFFHKIGALKCPSTFLRLLHYPGEVHESDSGNYGASAHSDYGMITLLVTDGTPGLQICREKDRNPQLWEDVHHIDGALIINIGDLLERWTNCAFRSTLHRVVAIGKERYSVAFFLDPNPDTLVQCLESCCSEACPPRFPPIKSWDYIAGRLNSTYK

SEQ ID NO: 196633 - protein, 256 aa, Zea Mays
MEDKKGAAPGGANHRGYTPPYAEKLDASSQFVGDLKESFYIGPLDDGDMHNDVNQWPSEERLPSWKETMKLYFAAVLDTGTRILSLVALGLDLDADFFHKIGALKCPSTFLRLLHYPGEVHESDSGNYGASAHSDYGMITLLVTDGTPGLQICREKDRNPQLWEDVHHIDGALIINIGDLLERWTNCAFRSTLHRVVAIGKERYSVAFFLDPNPDTLVQCLESCCSEACPPRFSSLRFPPIKSWDYIAGRLNSTYK

SEQ ID NO: 196634 - protein, 89 aa, Zea Mays
MITLLVTDGTPGLQICREKDRNPQLWEDVHHIDGALIINIGDLLERWTNCAFRWLSFLIQILTHWCSVWKVVAVKHVHQGFHLSRVGTT

SEQ ID NO: 196635 - protein, 84 aa, Zea Mays
MFEPRIKDSFQERRSYVCELDLHVSPPPSVWRSALSGSRVVRKQASKHTRNSRCAIPDRTLLQIFVQVSAPLNATDANPINLFL

SEQ ID NO: 196636 - protein, 161 aa, Zea Mays
MKPARHVRPISTYEGGAIRVPLSSRHRCSLLFFSFFLTLIFSHLIADGSTGVATCVWTGAQPARPHGLLAYGGCGSPVIAAAVLARALVPARGGIGGPAGMLACGAAAAGTVPALSFGGETAAASPRSHACATVLRRRRPAPALQRRRGSALCCGPWSGSD

SEQ ID NO: 196637 - protein, 438 aa, Zea Mays
MHCLGVGWVHALAFWRWCQRPHPCCGGSEVAAWQIVDGGVGGVASKHAHEDGEPLHLLDGLADARVVRGALAVHVEDVREGAQRGCAPGARVQYHHRRPLAWSGSSAFVVDDLQLGEVDVAGGEGGEHLEHDHHGAAPVRDHHAGLGVGVHAQRHGHRRRRPGEEQESRHVPGLVLEPVREDLEPVQVGGARAGDGGCVQHPLGPQHLHGARRVLHGLAVHPEAGQRAPAVRQRHGVADHPPHLGGAHPGHGQQAVVHEQVDLLHHHQAVPQEQVVVAQRRPLHGGLHGEDGAVGAAALHGSQRVREGAARDRVAAGQRRLGRELAVGARRALERHAQAGAVLASAARAHREVDPVRMPVHSLLALAVDACLAVGRRPLGRVTVDLGRGGGDEGGRPVPCPAGAGEEEVLWEVEGGGVGHRTRRRAVGSAVRFGGGYL

SEQ ID NO: 196638 - protein, 177 aa, Zea Mays
MSVHGVEYAFGAHDYSISGVFEVEPRQCPGFKFRKSICMGTTSLDPLQIREFMEIQSVNYNGDTYHLISKNCNHFCEDICKRLTGNFIPKWVNRLARMGAVCNCILPESLKINAAGHDPASRAEDSERKMLTSSFSCFCSISLCQRHFSTSSPSLRSSANGTSWDTKQSNSTRLKKS

SEQ ID NO: 196639 - protein, 461 aa, Zea Mays
MRSSVSERSLIIESDDDDDDHPQSRSSAAARSRRRHHQHEEDSAAGSDSDSGSSSSSCGTPRGPATDSSYTQQWPQSYRQSIDILSSVQSPNLSFLGTPTLSRLSNSFRGKTPEIISNLVKPLLRPTTSDDHHHHHQQQPEERKSSQYLLPSRKPSLQQIPEDQKPVPVAHEVSPYHKCTYTQAVVNGINVLCGVGILSTPYAIKQGGWLGLVILCLFAILAWYTGVLLRRCLDSKEGLETYPDIGHAAFGATGRIAISIILYVELYACCIEYLILEGDNLSKLFPNAHLSVGSLTMNSHVLFTILTTIIVMPTTWLRDLSCLSYLSAGGVFASILGVICLFWVGVVDNVGFENKGTALNLPGIPIAIGLYGYCYSGHGVFPNIYSSLKKRNQFPSILFTCIGLSTILFAGAAVMGYKMFGEATQSQFTLNLPENLVVSKIAVWTTVANPITKYPFLYLAG

SEQ ID NO: 196640 - protein, 197 aa, Zea Mays
MVSHYVVFVAGGVFASILGVICLFWVGVVDNVGFENKGTALNLPGIPIAIGLYGYCYSGHGVFPNIYSSLKKRNQFPSILFTCIGLSTILFAGAAVMGYKMFGEATQSQFTLNLPENLVVSKIAVWTTVANPITKYALTITPLTMSLEELLPPNQQKYSNIVMLRSALVVSTLLIALSVPFFGKFMSVFGTLIRCLV

SEQ ID NO: 196641 - protein, 192 aa, Zea Mays
MNSHVLFTILTTIIVMPTTWLRDLSCLSYLSAGGVFASILGVICLFWVGVVDNVGFENKGTALNLPGIPIAIGLYGYCYSGHGVFPNIYSSLKKRNQFPSILFTCIGLSTILFAGAAVMGYKMFGEATQSQFTLNLPENLVVSKIAVWTTVANPITKYPFLYLAGTCDGLSWFFTYDACDLYSTLRVLFSNS

SEQ ID NO: 196642 - protein, 153 aa, Zea Mays
MGYKMFGEATQSQFTLNLPENLVVSKIAVWTTVANPITKYALTITPLTMSLEELLPPNQQKYSNIVMLRSALVVSTLLIALSVPFFGLVMALVGSLLTMLVTYILPCACFLAILRRKVSWHQVAVCSFIIVVGVCCACVGTYSSLSKIIQNYT

SEQ ID NO: 196643 - protein, 595 aa, Zea Mays
MEGYTWIGSLQLGDYKFTHFREIDLAKRYITSLYFAIVTMATVGYGDIHAVNIREMIFIMIYVSFDMILGAYLIGNMTALIVKGSRTERFRDKMKEVIRYMNRNKLGKEIREQIKGHLRLQYESSYTEASVLQDIPISIRAKISQTLYKPYVESIPLFKGCSAEFIQQIVIRLQEEFFLPGEVILEQGSAVDQLYFVCHGALEGVGIGEDGQEETLLMLEPESSFGEISILCNIPQPYTVRVCELCRLLRLDKQSFTNILEIYFVDGRRILSNLSESEYGGRVKQLESDITFHIGKQEAELTLRVNSAAFYGDLHQLKSLIRAGADPKNTDYDGRSPLHLAASRGYEDVVQFLVNEGVDMDLTDQFGNTPLLEAVKQGQERVAALLFAKGAKLSLKNAGSHLCTAVAKGDSDFIRRTLAYGADPNCRDYDHRTPLHIAAAEGLYLIAKMLVEAGASVFTTDRWGTTPLDEARKCGGRVLGALLEEARANELAMFPERGEEVRDKMHPRRCSVFPYHPWRAATGEERRIEGVVLWIPHTIESLVALAQEKLGLPGPASRLRLLREDGARVLDVDMVNDGQKLYLVGGEDGDQKYGQ

SEQ ID NO: 196644 - protein, 299 aa, Zea Mays
MAEKLKLTESLLESKNLEVKKINDERKAALAAQFAAEATLRRVHAAQKDDDMPPIEAILAPLEAELKLSRQEIANLQDDNRALDRLTKQKEAALLEAERTVQIAMAKAAMVDDLQNKNQELIKQIEICHEENKILDKLHRQKIAEVEKLSQTVRELEEAVLQGGATANVVRDYQRRFQEINEEKRTLDRELARAKVTANRVASVVANEWKDSNDKVMPVKQWLEERRFLQGEMQQLRDKLAVAERTARSEAQLKEKYQLRLKVLEDGLRGPPSGSSRPTTEGKSFSNGPSRRLSLAAWS

SEQ ID NO: 196645 - protein, 615 aa, Zea Mays
MTDGGEDGNAAAPRAPSRRRGPVRASLDADEFMALMHGSDPVRVELTRLENELRDKERELGEAQTEIRALRLSERAREKAVEELTDELEKMAEKLKLTESLLESKNLEVKKINDERKAALAAQFAAEATLRRVHAAQKDDDMPPIEAILAPLEAELKLSRQEIANLQDDNRALDRLTKQKEAALLEAERTVQIAMAKAAMVDDLQNKNQELIKQIEICHEENKILDKLHRQKIAEVEKLSQTVRELEEAVLQGGATANVVRDYQRRFQEINEEKRTLDRELARAKVTANRVASVVANEWKDSNDKVMPVKQWLEERRFLQGEMQQLRDKLAVAERTARSEAQLKEKYQLRLKVLEDGLRGPPSGSSRPTTEGKSFSNGPSRRLSLGGADNISKLSPNGLLSRRSPSFHSRSSLLSNSSLVLKHAKGTSKSFDGGTRSLDRGKIHGSGAHLLNRSTDAVRDKETSDSWKGDMDERTNERADNNTDEKSNETTNKNSAETVSGFLYDMLQKEVISLRKSCHEKDQILKDKDDAIEMLAKKVDTLTKAMEVEARKVRREVAAMEKEVAAMRASKEQETRAKLLGTKGSGSSQLLPGSTNWVDAQLPVMAALTRSSILG

SEQ ID NO: 196646 - protein, 384 aa, Zea Mays
MTDGGEDGNAAAPRAPSRRRGPVRASLDADEFMALMHGSDPVRVELTRLENELRDKERELGEAQTEIRALRLSERAREKAVEELTDELEKMAEKLKLTESLLESKNLEVKKINDERKAALAAQFAAEATLRRVHAAQKDDDMPPIEAILAPLEAELKLSRQEDDNRALDRLTKQKEAALLEAERTVQIAMAKAAMVDDLQNKNQELIKQIEICHEENKILDKLHRQKIAEVEKLSQTVRELEEAVLQGGATANVVRDYQRRFQEINEEKRTLDRELARAKVTANRVASVVANEWKDSNDKVMPVKQWLEERRFLQGEMQQLRDKLAVAERTARSEAQLKEKYQLRLKVLEDGLRGPPSGSSRPTTEGKSFSNGPSRRLSLAAWS

SEQ ID NO: 196647 - protein, 389 aa, Zea Mays
MTDGGEDGNAAAPRAPSRRRGPVRASLDADEFMALMHGSDPVRVELTRLENELRDKERELGEAQTEIRALRLSERAREKAVEELTDELEKMAEKLKLTESLLESKNLEVKKINDERKAALAAQFAAEATLRRVHAAQKDDDMPPIEAILAPLEAELKLSRQEIANLQDDNRALDRLTKQKEAALLEAERTVQIAMAKAAMVDDLQNKNQELIKQIEICHEENKILDKLHRQKIAEVEKLSQTVRELEEAVLQGGATANVVRDYQRRFQEINEEKRTLDRELARAKVTANRVASVVANEWKDSNDKVMPVKQWLEERRFLQGEMQQLRDKLAVAERTARSEAQLKEKYQLRLKVLEDGLRGPPSGSSRPTTEGKSFSNGPSRRLSLAAWS

SEQ ID NO: 196648 - protein, 541 aa, Zea Mays
MTDGGEDGNAAAPRAPSRRRGPVRASLDADEFMALMHGSDPVRVELTRLENELRDKERELGEAQTEIRALRLSERAREKAVEELTDELEKMAEKLKLTESLLESKNLEVKKINDERKAALAAQFAAEATLRRVHAAQKDDDMPPIEAILAPLEAELKLSRQEIANLQDDNRALDRLTKQKEAALLEAERTVQIAMAKAAMVDDLQNKNQELIKQIEICHEENKILDKLHRQKIAEVEKLSQTVRELEEAVLQGGATANVVRDYQRRFQEINEEKRTLDRELARAKVTANRVASVVANEWKDSNDKVMPVKQWLEERRFLQGEMQQLRDKLAVAERTARSEAQLKEKYQLRLKVLEDGLRGPPSGSSRPTTEGKSFSNGPSRRLSLGGADNISKLSPNGLLSRRSPSFHSRSSLLSNSSLVLKHAKGTSKSFDGGTRSLDRGKIHGSGAHLLNRSTDAVRDKETSDSWKGDMDERTNERADNNTDEKSNETTNKNSAETVSGFLYDMLQKEVISLRKSCHEKDQILKDKDDAIEFAYLLLSG

SEQ ID NO: 196649 - protein, 62 aa, Zea Mays
MGAPDSVRCANGSKSSTVGCANLGKQSALDTEQCLSGGAPDCPGAPPDRRQELPSWIALNGS

SEQ ID NO: 196650 - protein, 96 aa, Zea Mays
MMRPERTLLYLVPGRLARNPGSTHLITEKHMSSKKVSKRKHARIIDKKIAKKKSEAVEYQKLLPIGSRNRDRHNESLAKRRSKLSTSAKSSSGTSA

SEQ ID NO: 196651 - protein, 84 aa, Zea Mays
MGERWNREVAATIDLRPPRCSGLDDGSWGIAGVHRFRTWFSRVRLACVAGVIRRRRSKNCRHRGRTTSQHKIRNTKKRREDPIL

SEQ ID NO: 196652 - protein, 280 aa, Zea Mays
MGRAASHITLECALQTHPNAALIGEEVAAKKETLKNVTNYITDIICKRADLGYNYGVILIPEGLIDFIPEVQKLIAELNEILAHDVVDEAGAWKSKLQAESRELFEFLPKTIQEQLMLERDPHGNVQVAKIETEKMLISMVETELEKRKAEGRYSAHFRGQAHFFGYEGRCGLPTNFDSNYCYALGYGAGALLQSGKTGLISSVGNLAAPVEEWTVGGTALTSLMDVERRHGKFKPVIKKAMVELDAAPFKKYASLRDEWAIKNRYISPAALEAMTRTTP

SEQ ID NO: 196653 - protein, 96 aa, Zea Mays
MCSPATRWFATLKTYVHHLVSYACCVNGKHSAHSGCSMKCANNIFFARLGHQSRSVVSRAPRLFDKMSRHLFCHTTMHYMLSLKHIRYYRIFRLRW

SEQ ID NO: 196654 - protein, 118 aa, Zea Mays
MSSTPPPPHHHGQRLLGIWGCRARPCCLHRPLLPPPLWQHVPQGRRLSARAHWLSIGTTHGDMCSIYIVGKERGWTRWSPLQRRIRRRRQRRMARSCPSCPGPPLSQGELLNRVGAVW

SEQ ID NO: 196655 - protein, 373 aa, Zea Mays
MPMTIERDLHMATGNGETSYTKNSRIQIKPVLEEATRAAYSALLPRTMVVADLGCSSGPNTLRFVSEVIGIIARHCKEHDRRHDYPQLQFFLNDLPGNDFNNLFLLIQQFNKSMARNHKGEAAEALPPCYISGLSGSFYTRIFPSESVHLFHSLFSVHWHSQASEQLKDTKNKCLDIYITKNMPPSMVKLFQQQFEKDFSLFLKLRYEELVSGGQMVLTFIGRKHEDVFTREPNHLHGLLAQSLKSLVDEGLVEKEKLESFYLPFYSPSVGEVEAILKQVGLFNMNHVKVFEINWDPYDDSESDDVHNSIGSGENVAKCLRAVMESLVASQFGEHILDKLFKEFAHCIAEHLENEKTKHVVLVLSIEKAIIHV

SEQ ID NO: 196656 - protein, 238 aa, Zea Mays
MTCRETTSTISSCSSSSSISRWQETTRASEQLKDTKNKCLDIYITKNMPPSMVKLFQQQFEKDFSLFLKLRYEELVSGGQMVLTFIGRKHEDVFTREPNHLHGLLAQSLKSLVDEGLVEKEKLESFYLPFYSPSVGEVEAILKQVGLFNMNHVKVFEINWDPYDDSESDDVHNSIGSGENVAKCLRAVMESLVASQFGEHILDKLFKEFAHCIAEHLENEKTKHVVLVLSIEKAIIHV

SEQ ID NO: 196657 - protein, 354 aa, Zea Mays
MANFSIRLQNCVVLVAAMPMTIERDLHMATGNGETSYTKNSRIQEKVMFQIKPVLEEATRAAYSALLPRTMVVADLGCSSGPNTLRFVSEFNKSMARNHKGEAAEALPPCYISGLSGSFYTRIFPSESVHLFHSLFSVHWHSQASEQLKDTKNKCLDIYITKNMPPSMVKLFQQQFEKDFSLFLKLRYEELVSGGQMVLTFIGRKHEDVFTREPNHLHGLLAQSLKSLVDEGLVEKEKLESFYLPFYSPSVGEVEAILKQVGLFNMNHVKVFEINWDPYDDSESDDVHNSIGSGENVAKCLRAVMESLVASQFGEHILDKLFKEFAHCIAEHLENEKTKHVVLVLSIEKAIIHV

SEQ ID NO: 196658 - protein, 374 aa, Zea Mays
MRIERDLHMATGDGETSYTKNSRIQEKTMFQIKPVLEEATRAVYTALHPQTMVVADLGCSSGPNTLRFVSEVIGIIARHCKEHGRQHDHPQLQFFLNDLPGNDFNNLFQLIQQFNKLTAINHKSEAAEALPPPCYISGLPGSYYTRIFPSDSVHLFHSLFCLQWRSEAPEGNKKTCLDIYITKTMSPSMVKLFQQQFQKDFSLFLRLRYEELVSGGQMVLTFIGRKHENVFTGESNHLYGLLAQSLKSLVDEGLVEKEKLESFYLPMYSPSVGEVEAILKQVGLFNMNHVKVFQTNWDPYDDLESDVVHNSIRSGENVAKCLRAVMQPLVASQFGEPILDKLFKEYARRVAKHLENEKTKHAIIVLSIEKAIHL

SEQ ID NO: 196659 - protein, 862 aa, Zea Mays
MDGGSALPATPASQPSSTILSQAGQGSGVTQNKGAAFIHEPSLTPESRKVSSSAKTTPHQGDNLLLGKEIIPAPPNVETPSGAHNTPGADTLRLLPLKLASSQDDAYSVLDGSTNKIDKSVTGKRSRTSPSKKAAKKLFRDEVITNDDATGSSSVNVEAGKNEKGSTVYQQRLLSCDYAVVYGFSLPAAERFIALANKETLIAGGPFVLPLAHKHKVKILPADSEHSAIFQTSECSLVDCLKYFAVVEHLDSYRCDRCWHIIAAKYLSLRSKVDEEKLQGYVPPGVTAMFIIFTSNKAADYQSVPEGNTSVVSHPNTSGDKDVIVERTHLSLNFVIHISQDPSARPHFRLRRHAPRASATANSSLLTLEEVARAAKGKRAHTVMLTQLLALASHALAEAETRPEPKDLWEEPINATMWRPCSDQRDWKASEGTNGYIMISANGGINQQRVAICNAVTISRLLNATLVLPKFLYSNVWLDKSQFGDIYQEDYFIKYLKSDIQIVKDLPVELQSLDLEAIGSLVNDTNVMKEAKPSLYVKKILPILLRNRVVHFIGFGNRLSFDPIPSDLQRLRCRCNFHALRFVHKIQETGAVLVERLHGHRASSSPLKDNLLGQFAIKSDPSTNKSDASKYLAVHLRFEIDMVAYSLCYFGGGKDEEDELEAYRQIHFPVLSELKKTTKLPSAALLRSEGKCPLAPEEAVLMLAAIGFKRSTNIYIAGAEIYGGQYRMAAISRLYPALVTKETLLSPSELEPFRNFSSQLAALDFIACAAADAFAMTDPGSQFSSLVQGYRMYYGGGNFPTIRPNKRRLASILVKNATIEWNEFESRVTIQQIKLPEFCQPCIAISIVAIVLRLKSEYICCP

SEQ ID NO: 196660 - protein, 411 aa, Zea Mays
MDGGSALPATPASQPSSTILSQAGQGSGVTQNKGAAFIHEPSLTPESRKVSSSAKTTPHQGDNLLLGKEIIPAPPNVETPSGAHNTPGADTLRLLPLKLASSQDDAYSVLDGSTNKIDKSVTGKRSRTSPSKKAAKKLFRDEVITNDDATGSSSVNVEAGKNEKGSTVYQQRLLSCDYAVVYGFSLPAAERFIALANKETLIAGGPFVLPLAHKHKVKILPADSEHSAIFQTSECSLVDCLKYFAVVEHLDSYRCDRCWHIIAAKYLSLRSKVDEEKLQGYVPPGVTAMFIIFTSNKAADYQSVPEGNTSVVSHPNTSGDKDVIVERTHLSLNFVIHISQDPSARPHFRLRRHAPRASATANSSLLTLEEVARAAKGKRAHTVMLTQLLALASHALAEKPGLNLRICGKSR

SEQ ID NO: 196661 - protein, 862 aa, Zea Mays
MDGGSALPATPASQPSSTILSQAGQGSGVTQNKGAAFIHEPSLTPESRKVSSSAKTTPHQGDNLLLGKEIIPAPPNVETPSGAHNTPGADTLRLLPLKLASSQDDAYSVLDGSTNKIDKSVTGKRSRTSPSKKAAKKLFRDEVITNDDATGSSSVNVEAGKNEKGSTVYQQRLLSCDYAVVYGFSLPAAERFIALANKETLIAGGPFVLPLAHKHKVKILPADSEHSAIFQTSECSLVDCLKYFAVVEHLDSYRCDRCWHIIAAKYLSLRSKVDEEKLQGYVPPGVTAMFIIFTSNKAADYQSVPEGNTSVVSHPNTSGDKDVIVERTHLSLNFVIHISQDPSARPHFRLRRHAPRASATANSSLLTLEEVARAAKGKRAHTVMLTQLLALASHALAEAETRPEPKDLWEEPINATMWRPCSDQRDWKASEGTNGYIMISANGGINQQRVAICNAVTISRLLNATLVLPKFLYSNVWLDKSQFGDIYQEDYFIKYLKSDIQIVKDLPVELQSLDLEAIGSLVNDTNVMKEAKPSLYVKKILPILLRNRVVHFIGFGNRLSFDPIPSDLQRLRCRCNFHALRFVHKIQETGAVLVERLHGHRASSSPLKDNLLGQFAIKSDPSTNKSDASKYLAVHLRFEIDMVAYSLCYFGGGKDEEDELEAYRQIHFPVLSELKKTTKLPSAALLRSEGKCPLAPEEAVLMLAAIGFKRSTNIYIAGAEIYGGQYRMAAISRLYPALVTKETLLSPSELEPFRNFSSQLAALDFIACAAADAFAMTDPGSQFSSLVQGYRMYYGGGNFPTIRPNKRRLASILVKNATIEWNEFESRVRKLIQQTKQVHERPVARSIFRHPRCPECMCRTEH

SEQ ID NO: 196662 - protein, 155 aa, Zea Mays
MLARTIGGAVRTRLAPSLASLLCRGYASPASSADDLVIDEDPPRAASTSVAATTVAATVPTLLQPRVLIYDGVCHLCHRAALKVASYLPPPYSVLSSLLIVPTPLRDAVYDYIAKNRYDWFGKDDECIVTKDKEILERFIDREEMLGGGPSNSFF

SEQ ID NO: 196663 - protein, 275 aa, Zea Mays
MLAVSPSPVRCADAEECGGGGASKEMEETAVGPVSDSDLDFDFTVDDIDFGDFFLRLDDGDDALPGLEVDPAEIVFADFEAIATAGGDGGVTDQEVPSVLPFADAAHIGAVDPCCGVLGEDNDAACADVEEGKGECDHADEVAAAGNNNSDSGEAGCGGAFAGEKSPSSTASSSQEAESRRKVSKKHSQGKKKAKVDWTPELHRRFVQAVEELGIDKAVPSRILEIMGIDSLTRHNIASHLQEAHACEGGGGSDVDDAPAADVRCPQRRREEARL

SEQ ID NO: 196664 - protein, 310 aa, Zea Mays
MALHAAAPACAVFCRLPSPSPSHAGSRRSLPAVASPRGVVSAAPLRTRAVPTKAIVNSDGIPETSDSPHVVCFGELLIDFVPTVNGVSLAEAPAFKKAPGGAPANVAVGIARLGGSSAFIGKVGDDEFGYMLADILKQNNVNNQGLLFDPHARTALAFVSLRSDGEREFMFYRNPSADMLLEEKELDLDLIRKAKIFHHGSISLITEPCKTAHIAAARAAKDAGVLVSYDPNLRLSLWSSPEDARDGILSVWRTADIFKVSEEEVSFLTNGEDPYDDAVVKKLMHSNLKLLLVTEGPDGCRYYSKVILQL

SEQ ID NO: 196665 - protein, 279 aa, Zea Mays
MALHAAAPACAVFCRLPSPSPSHAGSRRSLPAVASPRGVVSAAPLRTRAVPTKAIVNSDGIPETSDSPHVVCFGELLIDFVPTVNGVSLAEAPAFKKAPGGAPANVAVGIARLGGSSAFIGKVGDDEFGYMLADILKQNNVNNQGLLFDPHARTALAFVSLRSDGEREFMFYRNPSADMLLEEKELDLDLIRKAKIFHHGSISLITEPCKTAHIAAARAAKDAGVLVSYDPNLRLSLWSSPEDARDGILSVWRTADIFKVQTAVGITLRILVVELVDLR

SEQ ID NO: 196666 - protein, 347 aa, Zea Mays
MALHAAAPACAVFCRLPSPSPSHAGSRRSLPAVASPRGVVSAAPLRTRAEAPAFKKAPGGAPANVAVGIARLGGSSAFIGKVGDDEFGYMLADILKQNNVNNQGLLFDPHARTALAFVSLRSDGEREFMFYRNPSADMLLEEKELDLDLIRKAKIFHHGSISLITEPCKTAHIAAARAAKDAGVLVSYDPNLRLSLWSSPEDARDGILSVWRTADIFKVSEEEVSFLTNGEDPYDDAVVKKLMHSNLKLLLVTEGPDGCRYYSKDFSGRVGGLKVSAVDTTGAGDAFVAGVLSQLATDFSLLQDEGRLREALKFANVCGALTVTQRGAIPALPTRQQVLDALTNFVA

SEQ ID NO: 196667 - protein, 311 aa, Zea Mays
MALHAAAPACAVFCRLPSPSPSHAGSRRSLPAVASPRGVVSAAPLRTRAVPTKAIVNSDGIPETSDSPHVVCFGELLIDFVPTVNGVSLAEAPAFKKAPGGAPANVAVGIARLGGSSAFIGKVGDDEFGYMLADILKQNNVNNQGLLFDPHARTALAFVSLRSDGEREFMFYRNPSADMLLEEKELDLDLIRKAKIFHHGSISLITEPCKTAHIAAARAAKDAGVLVSYDPNLRLSLWSSPEDARDGILSVWRTADIFKVSEEEVSFLTNGEDPYDDAVVKKLMHSNLKLLLVTEGPDGCRILVVELVDLR

SEQ ID NO: 196668 - protein, 84 aa, Zea Mays
MGLESHCCSLDLPTRSRGAEGLCSSVSTRMVAECAGLTVLGVATGSGVDSRVRLSEMEAPGHDGGKGREAGKTTHITRPYRLFH

SEQ ID NO: 196669 - protein, 71 aa, Zea Mays
MFGLCVVIFLPLHRIRKMSDSEKIEERQEHLQCCQFNLAMQKYDDLGNLQQSFWKSYVLSLHELPSQQLTA

SEQ ID NO: 196670 - protein, 51 aa, Zea Mays
MFGLCVVIFLPLHRIRKMSDSEKIEERQEHLQCCQFNLAMQNLEELCFESA

SEQ ID NO: 196671 - protein, 548 aa, Zea Mays
MKKWHGGFVIVSLFIILMLRYVILDRLLAEKSLQYVFQQNRTAELHWLDVPNPPAIQNPQISSEVISTRLLASNLSITRNLSDTELQSLHSWNHLKHLLTHAHILPDGVEAIKEAGVAWRELNTALAYDDSVVSVNGSIQQKDKGKQCPYSVRRMNATRLGDRFALKLPCGLIQGSSITIIGTPGGLLANFKIELTGAAVPGEPDPPIVLHYNVRLLGDKLTEDPVIVQNTWTIADDWGSENRCPSPDSDAKDSAKVDDLEKCSSIVGEDQKEILPSKLHSHVLTMPPARKKKAESRKYFPFRQGYLAVAILRIGAHGIHMTVDGKHITSFAFREDLEPGFVGEVRIAGDIKLLSVIASGLPTTEYFEHVTDLEILKAPPVAMDKSVDLFIGVFSTANNFKRRMAVRRTWMQYDAVRSGKVAVRFFVGLHKNEVVNEELWNEARTYGDIQLMPFVDYYSLILWKTIAICIYGTNVLSAKYVMKTDDDAFVRVDEILSSLDRTNISHALLYGRVNSDSQPHRDPYSKWNGLRRIILHGRMVQDILFHRT

SEQ ID NO: 196672 - protein, 483 aa, Zea Mays
MNATRLGDRFALKLPCGLIQGSSITIIGTPGGLLANFKIELTGAAVPGEPDPPIVLHYNVRLLGDKLTEDPVIVQNTWTIADDWGSENRCPSPDSDAKDSAKVDDLEKCSSIVGEDQKEILPSKLHSHVLTMPPARKKKAESRKYFPFRQGYLAVAILRIGAHGIHMTVDGKHITSFAFREDLEPGFVGEVRIAGDIKLLSVIASGLPTTEYFEHVTDLEILKAPPVAMDKSVDLFIGVFSTANNFKRRMAVRRTWMQYDAVRSGKVAVRFFVGLHKNEVVNEELWNEARTYGDIQLMPFVDYYSLILWKTIAICIYGTNVLSAKYVMKTDDDAFVRVDEILSSLDRTNISHALLYGRVNSDSQPHRDPYSKWYITPEEWPEENYPPWAHGPGYIVSQDIAKEVYRKHKNGELKMFKLEDVAMGIWINEMKKDGLDVKYENDGRILVEGCEDGYVIAHYQEPRDMMCLWDKFQKTKRGTCCKE

SEQ ID NO: 196673 - protein, 661 aa, Zea Mays
MRRWPPRLPAAVAHHHAGAPATPDVGVAADHADGLVRQHNRSLVGLLRRGRFSAARRLFDALPARSVVTWNSLLAALSRGSDVRAARCFFDAMPVRDIISWNTLLSAYARSLQPNDLAAARRLFYEMPQRDAVSWSTLLGAYTRRGLMEEAQRLFDEMPHRNASSWNTMITGFFAVGQMRKALNVFAAMPDKDSASLSAMVSGFIRNGRLHEADDLLTKRLTVMDMDKAVGAFNTLIAAYGQTGRVTDARRLFSMIPKTQNQHKGHKRMVFERNVVSWNSMMMCYIRTGDVCSARALFDEMPHKDLVSWNTMIAGYTQASEMEEAEKLFWEVPDPDAVTWNLMIRGFTQKGDVEHARGFFDRMPERSTITWNTMISGYEQNEDYDSTIKLFQRMLEVGERPDHHTLSSVLAACASLAMLRLGAQLHQLIEKSFLPDTATNNALMTMYSRCGELISAKAIFGHMHTQRDIVSWNALIGGYEQQGNATEALRLFEEMRSAKVMPTHITFISLLSACGNAGLVSEGRVVFHTMVHDYGLAASVEHYAALVNLIGRHGQLEDALELIKSMPIAPDRAVWGAFLGACTAKKNEPLAEMAANALSKIDPDSSAPYVLMHNLHAHEGRWGSASLVREDMERLGIHKHPGYSWIDLHDKVFAYNMKNVT

SEQ ID NO: 196674 - protein, 340 aa, Zea Mays
MYPLAYGFMDSETEDNWKWWMAQLHKVVGDLPKLAICSDACKGLLNAVRDVFPEVDRRECFRHLMQNFVKRYSGDSSGHMWPAARAYDKHVYESHMAIVYAALSSAKSWLETHHKLKWQRSDFDPDIKCDYVTSNVAEVFNNWIKDIKDLPVVELADKIREMIMILSYKRRKIGERLYGRILPAVIQILNARTRGLGHLTVIKGDNYAAEVWDNFNRRFVVKAYLHECSCCEWQHTGKPCQHALSLITARQIRNVRMEDFVHDYYSVEKFRKAYARQIEQLPSKEKWPKVDLAFEVGAPLSKRGVGRQQKIGSKVALKVEVVGLNVLKSLLKMRMRRLKK

SEQ ID NO: 196675 - protein, 221 aa, Zea Mays
MVDVMVSAVVAEEYMEDVPRKPQTTVVVDGLDGREREEEYASPWGHARDEERERATDGVQDESLQGVVVQSSKSVGDDKSVVLRVDVLVQELVDVHVSVHEILPCVHDKHCNDKLQRQYQSRRLLPHSPILITKNREEKKGDSDLKRLLNKDAPDDRRPGNDVLGLLLPLGMEPVVVHPEPVQDDVEPRVEPVHRNRHEGAQQLVGDRKCHRHLSAPCDRQ

SEQ ID NO: 196676 - protein, 254 aa, Zea Mays
MTNQDVVVPDMGIAAAAALPPPGLFACRGVAGAVSSLRGTYGSLGLPGGAAADGGEFRSPVAAAANAPPGRTSCTSRVVEAIRASSPARCPAVDEYDAWTRKHPSALGSFDQIAAAAKGKRVVMFMDYDGTLSPIVADPDMAFMTPEMRAAVRNVAKRFPTAIVTGRCIEKFRRPAGALLRRKPRDGHQRPKLQGGQDGPAAATSSRVPAGDRQGLQGSGGEDEGHDGGQGGEQQVLPLRALQMRRRKELELIG

SEQ ID NO: 196677 - protein, 126 aa, Zea Mays
MRGPGLSGFLPQPKPCNSLPEIWATQQLDRPRRTYSADSGLLYRTPPLGYKTWAMISSILSSSTTIVRHGGEGTDQPLGVIVNCVCRSVLLHHMEEDWMAAESSLPRGVRAWMATPWMNRAAPLQQ

SEQ ID NO: 196678 - protein, 125 aa, Zea Mays
MEDEEHEVYGQEIPVDGEDVDMSAGDDATKELDEMKRRLKEMEEEAAALREMQAKVAKDMQDPNATTSENKEEMDSRSVFVGNVSLLSSSLSIKVLASGSVSAQVLVLASWGKEKKEGKKIQESS

SEQ ID NO: 196679 - protein, 90 aa, Zea Mays
MYPFTSVCSSCRGIGKVIKDYCLTCQGSGVVGGMKHVTLDMPAGLDSGDTINVPEAGDSGGLGVQSGNLHIKIQVRVHIHARFFLHIYIV

SEQ ID NO: 196680 - protein, 94 aa, Zea Mays
MLGGKVEVPTLNGKTEVKIPKGVQPGQVVVLRGKGLPNPSGYLGDQYVRFRIHFPSVVTERQRMLLEEFAVEEAAKEHNTFVAGNWLYQQLSTG

SEQ ID NO: 196681 - protein, 70 aa, Zea Mays
MLGGKVEVPTLNGKTEVKIPKGVQPGQVVVLRGKGLPNPSGYLGDQYVRFRIHFPSIKVMISHPWSGKES

SEQ ID NO: 196682 - protein, 169 aa, Zea Mays
MARERREIRRIESAAARQVTFSKRRRGLFKKAEELAVLCDADVALVVFSATGRLSQFASSSVNDIVDKYSTHSKNLGKSHQQPSIDLNVEQSKYSGLNEQLAEETNGLRQMRGEDLEGLSVEELHRMERKLEAGLHRVISTKDQLFMQQIGELLQKKISSLKTGSRLNL

SEQ ID NO: 196683 - protein, 192 aa, Zea Mays
MARERREIRRIESAAARQVTFSKRRRGLFKKAEELAVLCDADVALVVFSATGRLSQFASSSVNDIVDKYSTHSKNLGKSHQQPSIDLNVEQSKYSGLNEQLAEETNGLRQMRGEDLEGLSVEELHRMERKLEAGLHRVISTKDQLFMQQIGELLQKGTQLEDENRRLKEQMPQVLTAGTINGGCCCCRKYPH

SEQ ID NO: 196684 - protein, 552 aa, Zea Mays
MDFDPDQFEGFAAIADGANKLLMLVLAAVIKAGAAREHEILAEIRDAVFSFIRKMEPKKVMDTMLVSRVKILYIRSLLAKSPELQSIKVSPVERFLEKSNTGRSRSSSRGSSPGRSPVHHHGHGSRTALVDEHVHGFKVNIKQEKKSKFSSIVLKLRGIEEETWRQHVTGGKLREITEEAKAFSIGNKALAALFVHTPAGELQRQIRAWLAENFEFLSVTGADAAGGAAGQLELLSTAIMDGWMAGLGTAQPPTTDALGQLLSEYTKRVYTSQLQHLKDIAGTLATEEADDPAHVSKLRSALESVDHKRRKIMQQMRTDTALLTKEEGGSPIRNPLTAAEDARLASLISLDNILKQVKEVIRQSSTGPMRKSKRKALLELLDDLLTQMPSLLDIDHPCAQKQIMEARKVVESLQEDPDDPAPQSNALGEGEVSQWNVLQFNTGTTAPFIIKCGANSSGELVIKADLRVQEPKGGEVIRVVPRPTVLADLSFEEIKGVFEQLPEAVSLLALARTADGTRARYSRLYRTLASKVTALKETVAEMERGGVFKDVR

SEQ ID NO: 196685 - protein, 1260 aa, Zea Mays
MADSRRTWSWDVSGFEPPQPATTQAASAPTAMPRAPPTAMMPRPSAGAPRASAGAVPVADQLDQLVDSVQLAREDCLELRQEASDLLEYSNAKLGRVTRYLGFLADRTRKLDQAALETEARITPLIHEKKRLFNDLLTLKGNVKVFCRCRPLFEDEGPSVLEFPDDFSIRVNTGDESLTNPKKDYEFDRVYGPHIGQGELFLDVQPFVQSALDGYNISIFAYGQSRSGKTHTLEGSSHDRGLYLRSFEELFDLSNSDTTSTAHFNFYFTACELYNDQVRDLLSESSSTVPKVRMGVQESFVELVQEKVENPLEFSAALKIALQNRSVNSPKAMVSHLIITIHIHYRNYVTGEHLYSKLSLVDLPASECLLEEDANRDNVTDFLHVSKSLSVLGDAFASLSAKKEPVLYGNSRITQILADSLGSSSKILLIVHVSPSASNLSRTLSTLSFSARARNAELSLGNRDTIKKWKDVANDSRKQLHDKEKEVLDLRQEVIGLKHSLKEANDQCILLFNEVQKAWRVSSSLQADLKSENLMLAEKHKTEKEQNNQLRDQISHLLKVEQEQNLKMQERDLTIQSLQTKLKSIESQLNEALNASDARSTIGSESASVISSPKITESTADSSSVTKRLEEELAKRDALIEASSPSANKPANGQGREIGRSDSSKSRSPDVFASPVSQDKTGNSGAIVKSSNELAKTTPAGEYLTSALMDFDPDQFEGFAAIADGANKLLMLVLAAVIKAGAAREHEILAEIRDAVFSFIRKMEPKKVMDTMLVSRVKILYIRSLLAKSPELQSIKVSPVERFLEKSNTGRSRSSSRGSSPGRSPVHHHGHGSRTALVDEHVHGFKVNIKQEKKSKFSSIVLKLRGIEEETWRQHVTGGKLREITEEAKAFSIGNKALAALFVHTPAGELQRQIRAWLAENFEFLSVTGADAAGGAAGQLELLSTAIMDGWMAGLGTAQPPTTDALGQLLSEYTKRVYTSQLQHLKDIAGTLATEEADDPAHVSKLRSALESVDHKRRKIMQQMRTDTALLTKEEGGSPIRNPLTAAEDARLASLISLDNILKQVKEVIRQSSTGPMRKSKRKALLELLDDLLTQMPSLLDIDHPCAQKQIMEARKVVESLQEDPDDPAPQSNALGEGEVSQWNVLQFNTGTTAPFIIKCGANSSGELVIKADLRVQEPKGGEVIRVVPRPTVLADLSFEEIKGVFEQLPEAVSLLALARTADGTRARYSRLYRTLASKVTALKETVAEMERGGVFKDVR

SEQ ID NO: 196686 - protein, 1169 aa, Zea Mays
MADSRRTWSWDVSGFEPPQPATTQAASAPTAMPRAPPTAMMPRPSAGAPRASAGAVPVADQLDQLVDSVQLAREDCLELRQEASDLLEYSNAKLGRVTRYLGFLADRTRKLDQAALETEARITPLIHEKKRLFNDLLTLKGNVKVFCRCRPLFEDEGPSVLEFPDDFSIRVNTGDESLTNPKKDYEFDRVYGPHIGQGELFLDVQPFVQSALDGYNISIFAYGQSRSGKTHTLEGSSHDRGLYLRSFEELFDLSNSDTTSTAHFNFYFTACELYNDQVRDLLSESSSTVPKVRMGVQESFVELVQEKVENPLEFSAALKIALQNRSVNSPKAMVSHLIITIHIHYRNYVTGEHLYSKLSLVDLPASECLLEEDANRDNVTDFLHVSKSLSVLGDAFASLSAKKEPVLYGNSRITQILADSLGSSSKILLIVHVSPSASNLSRTLSTLSFSARARNAELSLGNRDTIKKWKDVANDSRKQLHDKEKEVLDLRQEVIGLKHSLKEANDQCILLFNEVQKAWRVSSSLQADLKSENLMLAEKHKTEKEQNNQLRDQISHLLKVEQEQNLKMQERDLTIQSLQTKLKSIESQLNEALNASDARSTIGSESASVISSPKITESTADSSSVTKRLEEELAKRDALIEVLAAVIKAGAAREHEILAEIRDAVFSFIRKMEPKKVMDTMLVSRVKILYIRSLLAKSPELQSIKVSPVERFLEKSNTGRSRSSSRGSSPGRSPVHHHGHGSRTALVDEHVHGFKVNIKQEKKSKFSSIVLKLRGIEEETWRQHVTGGKLREITEEAKAFSIGNKALAALFVHTPAGELQRQIRAWLAENFEFLSVTGADAAGGAAGQLELLSTAIMDGWMAGLGTAQPPTTDALGQLLSEYTKRVYTSQLQHLKDIAGTLATEEADDPAHVSKLRSALESVDHKRRKIMQQMRTDTALLTKEEGGSPIRNPLTAAEDARLASLISLDNILKQVKEVIRQSSTGPMRKSKRKALLELLDDLLTQMPSLLDIDHPCAQKQIMEARKVVESLQEDPDDPAPQSNALGEGEVSQWNVLQFNTGTTAPFIIKCGANSSGELVIKADLRVQEPKGGEVIRVVPRPTVLADLSFEEIKGVFEQLPEAVSLLALARTADGTRARYSRLYRTLASKVTALKETVAEMERGGVFKDVR

SEQ ID NO: 196687 - protein, 324 aa, Zea Mays
MESHVGVLDQDSESFLKIDIPFSSVTNIVVSGDRSFYIEGASATLPVSIAKVTLDEKRTMATDFSIVWSSSEDVAQYESYFSLPEFVEFPNVINGGPTDEARGVLDLSVQYWTSRGWAFVDVNYGGSSGYGREFRERLLAQWGVVDVNDCCSCAAFLVETGRVDGQRLCVTGESAGGFTTLACLAFRQTFKAGSSLYGIADLASLRAGMHKFEAYYIDNLVGNKQAYFERSPINFVENFSCPVILFQGLEDTVVSPDQATKIYKAIKDKGLPVALVEYEGEQHGFRKAENIKFTLEQEMVFLARLVGEFKVPDDITPIKIENFD

SEQ ID NO: 196688 - protein, 432 aa, Zea Mays
MHPRIASGATGKSTAPYGSWESPISAAVVSAAGRTAEGFAIAGDGRLVWVETRPEDGGRAVLVKEAAGPGGKALDVTPQGFAVRSLAQEYGGGAFAVQGDTVVFSNYTDQRLYRQTIGDNSPLPLTPDYGPVVRYADGVFDPHFHRFVTIMEDHRHNSSNPITTIVAVGISDPDVKEYTMLVSGNDFYAFPRIDPTKKRMAWIEWSNPNMSWDKSQLWVGYFNEKGEIKEKICVAGGDPTIVESPTEPKWSSKGRMESHVGVLDQDSESFLKIDIPFSSVTNIVVSGDRSFYIEGASATLPVSIAKVTLDEKRTMATDFSIVWSSSEDVAQYESYFSLPEFVEFPNVINGQHAYAYFYAPYNNFFQGSSDEKPPLLVRTHGKRIYYFCPFFFMSFMIMTSCYIRNNKQKHFVGFYVLSNQYVKPSPADYAKH

SEQ ID NO: 196689 - protein, 350 aa, Zea Mays
MWIFGVSSYGFLGIDDTSHKIVCSYRMESHVGVLDQDSESFLKIDIPFSSVTNIVVSGDRSFYIEGASATLPVSIAKVTLDEKRTMATDFSIVWSSSEDVAQYESYFSLPEFVEFPNVINGGPTDEARGVLDLSVQYWTSRGWAFVDVNYGGSSGYGREFRERLLAQWGVVDVNDCCSCAAFLVETGRVDGQRLCVTGESAGGFTTLACLAFRQTFKAGSSLYGIADLASLRAGMHKFEAYYIDNLVGNKQAYFERSPINFVENFSCPVILFQGLEDTVVSPDQATKIYKAIKDKGLPVALVEYEGEQHGFRKAENIKFTLEQEMVFLARLVGEFKVPDDITPIKIENFD

SEQ ID NO: 196690 - protein, 327 aa, Zea Mays
MHPRIASGATGKSTAPYGSWESPISAAVVSAAGRTAEGFAIAGDGRLVWVETRPEDGGRAVLVKEAAGPGGKALDVTPQGFAVRSLAQEYGGGAFAVQGDTVVFSNYTDQRLYRQTIGDNSPLPLTPDYGPVVRYADGVFDPHFHRFVTIMEDHRHNSSNPITTIVAVGISDPDVKEYTMLVSGNDFYAFPRIDPTKKRMAWIEWSNPNMSWDKSQLWVGYFNEKGEIKEKICVAGGDPTIVESPTEPKWSSKGELFFITDRRSGFWNIYKWDEHSRAVTPLHSLDAEFSKPMWIFGVSSYGFLGIDDTSHKIVCSYRQNGKSCWSA

SEQ ID NO: 196691 - protein, 495 aa, Zea Mays
MHPRIASGATGKSTAPYGSWESPISAAVVSAAGRTAEGFAIAGDGRLVWVETRPEDGGRAVLVKEAAGPGGKALDVTPQGFAVRSLAQEYGGGAFAVQGDTVVFSNYTDQRLYRQTIGDNSPLPLTPDYGPVVRYADGVFDPHFHRFVTIMEDHRHNSSNPITTIVAVGISDPDVKEYTMLVSGNDFYAFPRIDPTKKRMAWIEWSNPNMSWDKSQLWVGYFNEKGEIKEKICVAGGDPTIVESPTEPKWSSKGELFFITDRRSGFWNIYKWDEHSRAVTPLHSLDAEFSKPMWIFGVSSYGFLGIDDTSHKIVCSYRMESHVGVLDQDSESFLKIDIPFSSVTNIVVSGDRSFYIEGASATLPVSIAKVTLDEKRTMATDFSIVWSSSEDVAQYESYFSLPEFVEFPNVINGQHAYAYFYAPYNNFFQGSSDEKPPLLVRTHGKRIYYFCPFFFMSFMIMTSCYIRNNKQKHFVGFYVLSNQYVKPSPADYAKH

SEQ ID NO: 196692 - protein, 295 aa, Zea Mays
MESHVGVLDQDSESFLKIDIPFSSVTNIVVSGDRSFYIEGASATLPVSIAKVTLDEKRTMATDFSIVWSSSEDVAQYESYFSLPEFVEFPNVINGGPTDEARGVLDLSVQYWTSRGWAFVDVNYGGSSGYGREFRERLLAQWGVVDVNDCCSCAAFLVETGRVDGQRLCVTGESAGGFTTLACLAFRQTFKAGNKQAYFERSPINFVENFSCPVILFQGLEDTVVSPDQATKIYKAIKDKGLPVALVEYEGEQHGFRKAENIKFTLEQEMVFLARLVGEFKVPDDITPIKIENFD

SEQ ID NO: 196693 - protein, 480 aa, Zea Mays
MHPRIASGATGKSTAPYGSWESPISAAVVSAAGRTAEGFAIAGDGRLVWVETRPEDGGRAVLVKEAAGPGGKALDVTPQGFAVRSLAQEYGGGAFAVQGDTVVFSNYTDQRLYRQTIGDNSPLPLTPDYGPVVRYADGVFDPHFHRFVTIMEDHRHNSSNPITTIVAVGISDPDVKEYTMLVSGNDFYAFPRIDPTKKRMAWIEWSNPNMSWDKSQLWVGYFNEKGEIKEKICVAGGDPTIVESPTEPKWSSKGRMESHVGVLDQDSESFLKIDIPFSSVTNIVVSGDRSFYIEGASATLPVSIAKVTLDEKRTMATDFSIVWSSSEDVAQYESYFSLPEFVEFPNVINGQHAYAYFYAPYNNFFQGSSDEKPPLLVRTHGGPTDEARGVLDLSVQYWTSRGWAFVDVNYGGSSGYGREFRERLLAQWGVVDVNDCCSCAAFLVETGRVDGQRLCVTGESAGGFTTLACLAFRQTFKADS

SEQ ID NO: 196694 - protein, 581 aa, Zea Mays
MHPRIASGATGKSTAPYGSWESPISAAVVSAAGRTAEGFAIAGDGRLVWVETRPEDGGRAVLVKEAAGPGGKALDVTPQGFAVRSLAQEYGGGAFAVQGDTVVFSNYTDQRLYRQTIGDNSPLPLTPDYGPVVRYADGVFDPHFHRFVTIMEDHRHNSSNPITTIVAVGISDPDVKEYTMLVSGNDFYAFPRIDPTKKRMAWIEWSNPNMSWDKSQLWVGYFNEKGEIKEKICVAGGDPTIVESPTEPKWSSKGRMESHVGVLDQDSESFLKIDIPFSSVTNIVVSGDRSFYIEGASATLPVSIAKVTLDEKRTMATDFSIVWSSSEDVAQYESYFSLPEFVEFPNVINGQHAYAYFYAPYNNFFQGSSDEKPPLLVRTHGGPTDEARGVLDLSVQYWTSRGWAFVDVNYGGSSGYGREFRERLLAQWGVVDVNDCCSCAAFLVETGRVDGQRLCVTGESAGGFTTLACLAFRQTFKAGNKQAYFERSPINFVENFSCPVILFQGLEDTVVSPDQATKIYKAIKDKGLPVALVEYEGEQHGFRKAENIKFTLEQEMVFLARLVGEFKVPDDITPIKIENFD

SEQ ID NO: 196695 - protein, 381 aa, Zea Mays
MWIFGVSSYGFLGIDDTSHKIVCSYRMESHVGVLDQDSESFLKIDIPFSSVTNIVVSGDRSFYIEGASATLPVSIAKVTLDEKRTMATDFSIVWSSSEDVAQYESYFSLPEFVEFPNVINGQHAYAYFYAPYNNFFQGSSDEKPPLLVRTHGGPTDEARGVLDLSVQYWTSRGWAFVDVNYGGSSGYGREFRERLLAQWGVVDVNDCCSCAAFLVETGRVDGQRLCVTGESAGGFTTLACLAFRQTFKAGSSLYGIADLASLRAGMHKFEAYYIDNLVGNKQAYFERSPINFVENFSCPVILFQGLEDTVVSPDQATKIYKAIKDKGLPVALVEYEGEQHGFRKAENIKFTLEQEMVFLARLVGEFKVPDDITPIKIENFD

SEQ ID NO: 196696 - protein, 610 aa, Zea Mays
MHPRIASGATGKSTAPYGSWESPISAAVVSAAGRTAEGFAIAGDGRLVWVETRPEDGGRAVLVKEAAGPGGKALDVTPQGFAVRSLAQEYGGGAFAVQGDTVVFSNYTDQRLYRQTIGDNSPLPLTPDYGPVVRYADGVFDPHFHRFVTIMEDHRHNSSNPITTIVAVGISDPDVKEYTMLVSGNDFYAFPRIDPTKKRMAWIEWSNPNMSWDKSQLWVGYFNEKGEIKEKICVAGGDPTIVESPTEPKWSSKGRMESHVGVLDQDSESFLKIDIPFSSVTNIVVSGDRSFYIEGASATLPVSIAKVTLDEKRTMATDFSIVWSSSEDVAQYESYFSLPEFVEFPNVINGQHAYAYFYAPYNNFFQGSSDEKPPLLVRTHGGPTDEARGVLDLSVQYWTSRGWAFVDVNYGGSSGYGREFRERLLAQWGVVDVNDCCSCAAFLVETGRVDGQRLCVTGESAGGFTTLACLAFRQTFKAGSSLYGIADLASLRAGMHKFEAYYIDNLVGNKQAYFERSPINFVENFSCPVILFQGLEDTVVSPDQATKIYKAIKDKGLPVALVEYEGEQHGFRKAENIKFTLEQEMVFLARLVGEFKVPDDITPIKIENFD

SEQ ID NO: 196697 - protein, 339 aa, Zea Mays
MTQVTKLFALTGRMESHVGVLDQDSESFLKIDIPFSSVTNIVVSGDRSFYIEGASATLPVSIAKVTLDEKRTMATDFSIVWSSSEDVAQYESYFSLPEFVEFPNVINGQHAYAYFYAPYNNFFQGSSDEKPPLLVRTHGGPTDEARGVLDLSVQYWTSRGWAFVDVNYGGSSGYGREFRERLLAQWGVVDVNDCCSCAAFLVETGRVDGQRLCVTGESAGGFTTLACLAFRQTFKAGNKQAYFERSPINFVENFSCPVILFQGLEDTVVSPDQATKIYKAIKDKGLPVALVEYEGEQHGFRKAENIKFTLEQEMVFLARLVGEFKVPDDITPIKIENFD

SEQ ID NO: 196698 - protein, 203 aa, Zea Mays
MWIFGVSSYGFLGIDDTSHKIVCSYRMESHVGVLDQDSESFLKIDIPFSSVTNIVVSGDRSFYIEGASATLPVSIAKVTLDEKRTMATDFSIVWSSSEDVAQYESYFSLPEFVEFPNVINGQHAYAYFYAPYNNFFQGSSDEKPPLLVRTHGKRIYYFCPFFFMSFMIMTSCYIRNNKQKHFVGFYVLSNQYVKPSPADYAKH

SEQ ID NO: 196699 - protein, 190 aa, Zea Mays
MTQVTKLFALTGRMESHVGVLDQDSESFLKIDIPFSSVTNIVVSGDRSFYIEGASATLPVSIAKVTLDEKRTMATDFSIVWSSSEDVAQYESYFSLPEFVEFPNVINGQHAYAYFYAPYNNFFQGSSDEKPPLLVRTHGKRIYYFCPFFFMSFMIMTSCYIRNNKQKHFVGFYVLSNQYVKPSPADYAKH

SEQ ID NO: 196700 - protein, 117 aa, Zea Mays
MNALVCVTALLTTGQSLLSVVYLCGNLGPECIIYAMLLFHRLLMFDPVNQVCHQEQEFNSAFCCILDGLFRSPAQAEASSASLSSSTSTTRDLRSSLLPISNIVLHQLEGKSNKELE

SEQ ID NO: 196701 - protein, 122 aa, Zea Mays
MPSDGVLDQRGRVHGTASGAALELEKGCVVTAEGTTQVSGGGVPLHNPPTPPLPSNHVGAEVYYLPYVTDAEYYTTGAHHPRRQCGTRTTPGLGQSPARAGLATLQHDSLLDSLILVLKRRY

SEQ ID NO: 196702 - protein, 687 aa, Zea Mays
MDICALHEGTKSEREERYHITMKKLNSFEMLANENANDMHSRLNILVEEVNGLGLTQISQPDVVRKILSVLPIDRYGHIVTMLHQMDLSVATPTQILGKINAHEMYMHINDKDGSSSKRKDLALKANQEKKGKAKVQIEEESSSDDDLDANIALMVRKTTKMLKKLNREGIKFDSRKKKFFSSKRKPISEMDCYNCGELGHLAHQCNKPKKNKFKGKKDNDSDDEKNEKKFFKRKDGKHKRFHKKKNGKAYIIGDWLTDIESSSGSSSSEEENDEKIAAIAGDFSSPRPSPSSTSHLCLMAKGERKVQIENDVIDDSDSDSDDEFASPSYDELADLLKEYTQIIRKSKAKCDNLRASLATLFSHVISNFPRENELISLGKTKNPWENRVSKLALKDENEFLTAKYDIVVKASDEMKKENKTISSTVNELKSSLKDAKDKYDKLNEANRQLKDRLVKFKEYYTKNKIDYDNLLVANELLSCNTHEAINPAVKIDVATSCDDLSQDDQSSLHDELIEKVEVLTLDNQKLKRYLADATTGGNVAIESNDINNELAVDNERLINEVKKLKNENEHLATSVQKFNKGQYLQNELLMNTVMKNNKSGIEYNSFVQKKATNQYKAKQTPKPIKCFECGKEGHFAHNYKAKPPTPLPKHSRPFAFNAHYVLRKVANGNVKVTFLGPPSKSRPRQI

SEQ ID NO: 196703 - protein, 61 aa, Zea Mays
MAMIPRRLSRPCVARSLLLAEGVKIQAEVVTEEESTPVAADQVEEPSNWGLIEGSSTSSLQ

SEQ ID NO: 196704 - protein, 147 aa, Zea Mays
MVPRRWGASSHGSSARISPRSRARRSRRPRPTGPSSMACTSASSAPAAPPPARPTGGTQRSTSAQPRCSTPTGEQGFSRDAGLAMEAIHSLSASKSSYPMLCIGPCTIFQFFLSSLQKQVGPVQLYLTMIWGGWGLNLFLCSYNLMV

SEQ ID NO: 196705 - protein, 876 aa, Zea Mays
MSCRAAPWSRPSHIAGPRVPTPARPRFALGSRNLWKNSWTIGAGVSNMFALPSTLFRCMASSGSGDGDFARSTLTDEAAPFPLYSWPDKQRPRVCILGGGFGGLYTALRLESLVWPNDKRPQVLLVDQSDKFVFKPMLYELLSGEVDIWEIAPSFTELLKNTSVQFVRDSVKLLRPSDHLRRKPGEPCTGGVVHLESGTVIEYDWLVLALGAEAKIDVVPGSAEYALPFTTLEDALRVESKLKMLERKRFGKSSPTIEVAIVGLGYSGVELAATISERLKNTGTVKAINVQTTVCPTAPQGNRDAALKVLESRNIQLFLGYFVSCIKEAPTSDESSSTVTYSEVDGDHRKLILDLQPAERGLKGQTLDADLVLWTVGSTSQIPRLQPPDAPYVIPLNGRGQVETEETLQVKGHPRTFAIGDSAALRDPSGKLLPATAQVAFQQADFAGWNLWAAINDRPLLPFRFQNLGEMMTLGRNDAAVTASFIEGLTLEGPLGHAARKLVYCLRMPTDEHRVKVGISWFTKAAIDSLASVQNAVTSSFPPPTQMGDSTATNPSSPTAAMDPDSEVVFDFPPYLCQYKSGRIHRPGGAPTVPAGTDPATGVVSKDIRAGPASARVYLPPGAAGKIPVVVYFHGGGFVVGSPARPGTHNYLNDLVARSGAIGVSVYYRLAPEHKLPAAYDDAWAALRWAATLGGGEDPWLLEHADLSRVFLAGCSAGANIAHNTAVRASAAGALPDGVTIRGLAVVHPYFTGSEAVGGEIAFGPEIRPFMDRTWRFVVSDTVGLDDPRVNPFVDDAARRASAGIPCQRVLVCVAENDFLLKERALWYHREIKASGYAGEVELFESKGVGHAFHFDMLDSEQGVQLQERIVAFINK

SEQ ID NO: 196706 - protein, 675 aa, Zea Mays
MIARLVLALGAEAKIDVVPGSAEYALPFTTLEDALRVESKLKMLERKRFGKSSPTIEVAIVGLGYSGVELAATISERLKNTGTVKAINVQTTVCPTAPQGNRDAALKVLESRNIQLFLGYFVSCIKEAPTSDESSSTVTYSEVDGDHRKLILDLQPAERGLKGQTLDADLVLWTVGSTSQIPRLQPPDAPYVIPLNGRGQVETEETLQVKGHPRTFAIGDSAALRDPSGKLLPATAQVAFQQADFAGWNLWAAINDRPLLPFRFQNLGEMMTLGRNDAAVTASFIEGLTLEGPLGHAARKLVYCLRMPTDEHRVKVGISWFTKAAIDSLASVQNAVASSFPPPTQMGDSTATNPSSPTAAMDPDSEVVFDFPPYLCQYKSGRIHRPGGAPTVPAGTDPATGVVSKDIRAGPASARVYLPPGAAGKIPVVVYFHGGGFVVGSPARPGTHNYLNDLVARSGAIGVSVYYRLAPEHKLPAAYDDAWAALRWAATLGGGEDPWLLEHADLSRVFLAGCSAGANIAHNTAVRASAAGALPDGVTIRGLAVVHPYFTGSEAVGGEIAFGPEIRPFMDRTWRFVVSDTVGLDDPRVNPFVDDAARRASAGIPCQRVLVCVAENDFLLKERALWYHREIKASGYAGEVELFESKGVGHAFHFDMLDSEQGVQLQERIVAFINK

SEQ ID NO: 196707 - protein, 671 aa, Zea Mays
MIARLVLALGAEAKIDVVPGSAEYALPFTTLEDALRVESKLKMLERKRFGKSSPTIEVAIVGLGYSGVELAATISERLKNTGTVKAINVQTTVCPTAPQGNRDAALKVLESRNIQLFLGYFVSCIKEAPTSDESSSTVTYSEVDGDHRKLILDLQPAERGLKGQTLDADLVLWTVGSTSQIPRLQPPDAPYVIPLNGRGQVETEETLQVKGHPRTFAIGDSAALRDPSGKLLPATAQVAFQQADFAGWNLWAAINDRPLLPFRFQNLGEMMTLGRNDAAVTASFIEGLTLEGPLGHAARKLVYCLRMPTDEHRVKVGISWFTKAAIDSLASVQNAAAAAIFIYLHEAPPAEIRSPRCVALLGSQLVSSPNPNGRLHRHQPLLADRSHGSRLRGRLRLPALPLPVQERPHPPPRRRPHRPSWHGPSHRRRVQGHPRRPRLRASLPPSRRSRQDPGGRLLPRRRVRGRLAGAAGHAQLPQRPGRPLGRHRRVRLLPPRAGAQAARGVRRRVGGATVGGDARRRRGPVAAGARRPVPRVPGGLQRRRQHRAQHGRAGLRRRRAPRRRDHPRARRGAPLLHGQRGRGRRDSLRPRDPAVHGPHLAVRGLRHGGAGRPAREPVRGRRGAQGLRGDPVPARAGVRGRERLPAQGARAVVPPGDQGQRVRWRGRAVRV

SEQ ID NO: 196708 - protein, 344 aa, Zea Mays
MIARLVLALGAEAKIDVVPGSAEYALPFTTLEDALRVESKLKMLERKRFGKSSPTIEVAIVGLGYSGVELAATISERLKNTGTVKAINVQTTVCPTAPQGNRDAALKVLESRNIQLFLGYFVSCIKEAPTSDESSSTVTYSEVDGDHRKLILDLQPAERGLKGQTLDADLVLWTVGSTSQIPRLQPPDAPYVIPLNGRGQVETEETLQVKGHPRTFAIGDSAALRDPSGKLLPATAQVAFQQADFAGWNLWAAINDRPLLPFRFQNLGEMMTLGRNDAAVTASFIEGLTLEGPLGHAARKLVYCLRMPTDEHRVKVGISWFTKAAIDSLASVQNAVSNTLTGSS

SEQ ID NO: 196709 - protein, 277 aa, Zea Mays
MTEYWVSQGNKWCDFCKIYIANNSFSIRTHELGKRHKDNVTKRLSTMQKESETKEKEQQQAARALQQIEAKAKKSYQKDLENNQRNVDGDTSAAPGDGWVLDSASGYYHDKSTGLYYDSNSGFYYSDSLGKWVTQEEAYKSVQASKSDAGQSSASQTKAPAAAETAVPAIKGGAAPGRVVTKPLNPMRPIKGTPAPSAVAVNKRKRDDGKPKAVSKEEEAALKAREAARKRVEDREKPLMGLYKTRNAGNGVALDFRAFLHQQCVSTRCNTSSVVLE

SEQ ID NO: 196710 - protein, 302 aa, Zea Mays
MVRALRLGGRAAAAARWCTCRRAAVALCVANLVAALLVARALYAPGSFAFAPKRGELKYSREQMRWVEESIRIRRAAEPVELIEAVKKLRKAFTREEKTRKGLPLELKQKVSLEILQRLHDLGEGSNTTEQQEAVEAWRVGKLKDMRSASSKNLSNFGLSSEDSRMLKRALEFNWQRILEDIGLWIPPTIYHIEHDDKPENEPEDEEIIPGPPLPPECNTELHTDYGGTAVRWGLTHHKESAADCCQACIDQAKRARPGALKCNIWVYCPSEYGCYSPDKYEHKHQECWLKQVFSVVVYVYI

SEQ ID NO: 196711 - protein, 465 aa, Zea Mays
MGVVRLLVGVTNIDKIPESVDIVVGEGLYEIFFKIDKVCKDGVWSEYYYPSDKKDYDFESKDEVFDGLDDIQPKFDDTTKDTVMKDVSGSKVDNSSNVQHATQQNCDIRQTDALEKCLVAVNRSSIFKENVAAPTAVAHGVVYDNNWTEAEGTIILNAKQTAQQRGEFSRTGGPSSYLASMVQLNEVSRTVGREGPVDADAFNLNTICHDSRKKAVVPFVVVCTADASEGSVDANSICLNSIPSVPASATAVYPISLADINTDLNSVAIDFSPATNIHAAIPNVSVEQIHEHVRGAEHSVAQLTSPVGADGSGALVENFSLQENISRHRDFNMVPTCMDHGGGTFNMITSLLEALNQLAQSNDQILISLQDYFKSKSLSQRPMARDDLTQVLGKRVVSEEDTLSKAKRLAAKRNLEISSFQGNILAQILEIVAERTTSTRDPCGMSILRGGGYGDLCKPWMEVQR

SEQ ID NO: 196712 - protein, 67 aa, Zea Mays
MVLCSFLAYIMELEAEVAKLKDQNEELQKKQVEMLKKQKDEVLERINSQHGPKAKKLCLRRTLTGPW

SEQ ID NO: 196713 - protein, 289 aa, Zea Mays
MPAGSGAPALARQGSVYSLTFDEFQTTLGGASKDFGSMNMDELLRNIWTAEESNAMAAAAPATATATAAASVDAHAQQQQQQQHGAPIQRQGSFTLPRTLSQKTVDEVWREIVSLTSGEDAQQVAAPAPAPAPEPEPAPAPAPLPAQAQAQQTLGSMTLEEFLVRAGVVREDMGGHQTLLLQPHAQGLFSQGNAVAPQTLQLGNGMVAGVVGQGLGGGVTVAAPTTPVVFNGLGKVEAGDLSSLSPVPYPFDTALRMRKGPTVEKVVERRQRRMIKNRESAARSRARKQ

SEQ ID NO: 196714 - protein, 370 aa, Zea Mays
MKDCSMSELLAYALIFTLLFTAAATPTAGLTMRADLTHVDKGRGFTRWERLSRMAVRSRARAASLYQRGGHYGQPVTATAVPSSGEYLIHFNIGTPRPQRVALTMDTGSDLVWTQCTPCPVCFDQPFPLFDPSVSSTFRAVACPDPICRPSSGLSVSACALKTFRCFYLCSYGDKSITAGYIFKDTFTFMSPNGEGAPPVAVSGLAFGCGDYNTGVFASNESGIAGFGRGPLSLPSQLRVGRFSYCLTSHDETESNKTSAVFLGTPPNGLRAHSSGPFRSTPIIHSPSFPTFYYLSLEGITVGKTRLADMDLPRENYIPEDTDSGVMCLMINGAEVDMVLIGNFQQQNMHIVYDVENSKLLFASAQCDKM

SEQ ID NO: 196715 - protein, 347 aa, Zea Mays
MDTGSDLVWTQCTPCPVCFDQPFPLFDPSVSSTFRAVACPDPICRPSSGLSVSACALKTFRCFYLCSYGDKSITAGYIFKDTFTFMSPNGEGAPPVAVSGLAFGCGDYNTGVFASNESGIAGFGRGPLSLPSQLRVGRFSYCLTSHDETESNKTSAVFLGTPPNGLRAHSSGPFRSTPIIHSPSFPTFYYLSLEGITVGKTRLPVDSSVFALKKDGSGGTVIDSGTGVTTFPAAVFEQLKNEFVAQLPLPRYDNTSEVGNLLCFQRPKGGKQVPVPKLIFHLASADMDLPRENYIPEDTDSGVMCLMINGAEVDMVLIGNFQQQNMHIVYDVENSKLLFASAQCDKM

SEQ ID NO: 196716 - protein, 111 aa, Zea Mays
MKLEVMPKPKQRVLEAQQREEAMEMSGLDLWKHEKPPRICPLPPSLPPPPPAFDEAALVPPLNFAVVDDGIFRSGFPGTANFRFLKSLNLRSIVAPGTCARSRTRGRTRSS

SEQ ID NO: 196717 - protein, 232 aa, Zea Mays
MARQLIFFPFSYEEFLELSQRGNNLSVDLTVGDIYGEEGYPKIGLPASTTAASFGKVNSSKLSEYKVEDLAAALLNSFTYNIGQIAYFVANLSGLKRIFFRGAYVCGHEKTMDKISRSLKYWSKGEVQTTFLCHEGFLGTLGAFWSYENMGIDSLAAHEVIREVLLGAPYTGQFPSLPVTQQQENGEHGTLEGEVESLRHDNALLKAEVERLQKENALLRAKLVRSGETSTL

SEQ ID NO: 196718 - protein, 527 aa, Zea Mays
MDSVVSGANFLLQSIPGAAFTHMNGLRNPVDVSPNNLFPYLLVNIGSGVSILKVTGNRKFERVTGTHIGGGTMFGLAKLLTGCKSYDEFLQLSQKGDNFVLDLIVKDICGELVCQKQGLSTSTLASSFGKVITSKKKLTDYKPEDLASTLLSAFTYNIAQIAFLVASLLGLRRVFFGGSYIRGHKSTMENISYAIDFWSQSQMQAVFLRHEGYLGALGALMSYGDPSGENLTLEEKEPHHESAPVDGTSADEESDSNIFPYLLVNIGSGVSMIEVIGKGKFERIIGSHLGGGTILGLARLLTGCSSYEEFLELSQRGNNLSVDLTVGDIYGEEGYPKIGLPASTTAASFGKVNSSKLSEYKVEDLAAALLNSFTYNIGQIAYFVANLSGLKRIFFRGAYVCGHEKTMDKISRSLKYWSKGEVQTTFLCHEGFLGTLGAFWSYENMGIDSLAAHEVIREVLLGAPYTGQFPSLPVTQQQENGEHGTLEGEVESLRHDNALLKAEVERLQKENALLRAKLVRSGETSTL

SEQ ID NO: 196719 - protein, 205 aa, Zea Mays
MFGLAKLLTGCKSYDEFLQLSQKGDNFVLDLIVKDICGELVCQKQGLSTSTLASSFGKVITSKKKLTDYKPEDLASTLLSAFTYNIAQIAFLVASLLGLRRVFFGGSYIRGHKSTMENISYAIDFWSQSQMQAVFLRHEGYLGALGALMSYGDPSGENLTLEEKEPHHESAPVDGTSADEESDSNIFPYLLVNIGSGVSMIEVLQ

SEQ ID NO: 196720 - protein, 292 aa, Zea Mays
MAEATGHGGRVVDLSGAEIRGDLEDRNPPIFLPRQPAASPLLALDIGGTLIKLVYTASRGGGADGTDLRFAKFERRRLQECFNFIRAEGLLASNAGGEGVTLKATGGGAYKFADDFLEKLGVCLDKLDEMDSVVSGANFLLQSIPGAAFTHMNGLRNPVDVSPNNLFPYLLVNIGSGVSILKVTGNRKFERVTGTHIGGGTMFGLAKLLTGCKSYDEFLQLSQKGDNFVLDLIVKDICGELVCQKQGLSTSTLASSFGKVITSKKKLTDYKPEDLASTLLSAFTYNIAQMVR

SEQ ID NO: 196721 - protein, 360 aa, Zea Mays
MAEATGHGGRVVDLSGAEIRGDLEDRNPPIFLPRQPAASPLLALDIGGTLIKLVYTASRGGGADGTDLRFAKFERRRLQECFNFIRAEGLLASNAGGEGVTLKATGGGAYKFADDFLEKLGVCLDKLDEMDSVVSGANFLLQSIPGAAFTHMNGLRNPVDVSPNNLFPYLLVNIGSGVSILKVTGNRKFERVTGTHIGGGTMFGLAKLLTGCKSYDEFLQLSQKGDNFVLDLIVKDICGELVCQKQGLSTSTLASSFGKVITSKKKLTDYKPEDLASTLLSAFTYNIAQSQMQAVFLRHEGYLGALGALMSYGDPSGENLTLEEKEPHHESAPVDGTSADEESDSNIFPYLLVNIGSGNW

SEQ ID NO: 196722 - protein, 317 aa, Zea Mays
MAGGGGGARGSDRAGAARSPTTTTAIQSTIQSIKEVVVGHSDADILDTLRESNMDPNETAQKLLNQDPFHEVKRKRDKKKESAGQKSFADSTAQVEQNSQWMKPHTQKMENDQRTPKQGQMSGPTREFRVVRDNRFQHGVVENRPELGHKGSANMPSGGSHLTAGSVKYGVSQFKPLPSGNPSGYGNYTHPAGFTMGSPGVIGATVGVDDVNRMKYKDNIYASTPQVETSDIWIQQAREMPPMQVPSYYNIPVPRLVPSSATSLYCKSAPHGASTGAIGHWSQCWGWGGSSRPASWSLSATTAWPYELETQLLKKVS

SEQ ID NO: 196723 - protein, 771 aa, Zea Mays
MAGGGGGARGSDRAGAARSPTTTTAIQSTIQSIKEVVVGHSDADILDTLRESNMDPNETAQKLLNQDPFHEVKRKRDKKKESAGQKSFADSTAQVEQNSQWMKPHTQKMENDQRTPKQGQMSGPTREFRVVRDNRFQHGVVENRPELGHKGSANVQMSDRSTLVQSGRNRSPATTSGDQITHQNAMQNSNSDTTQGKRDAQGTTEKHVKPYLKNPQNEQHFPGSDPAHGSANVRIAGGTVGPAQRHVGVVNSTRQFAARSGSQMHAPSGSYANIQRGSFTSVGASGRYSAFMSRNIQQNQRPDTMFRGRPTVRSFVAQNTNRYHQGSTSNQKAVHPIKEWKPKSTKKSPTIDADNSIADATSPSASNCESANTLNVNELPEKISQTNLHEVEHVIIPEHLRVPEYEQTKLRFGSFTSGLDSEQVSASTPQDTEQPEHVQESVQQASEYDSLDAGPDDMDEQARSSQHLSTSTAEISLPPSEDSDRMSGQVENDDGLGLVQSDTPIGAADGDNTQITSTLTAFSAYSHEDPNMHTNNEAQLYGLVEPNVHPQVLASSSQALNPQIVSNSPVSISSQQQQHISQQQAAAQMYPQMHVQHFPNFMPYRQLYSPVYPMPMPNYSPNVPYPSNGNNYLQMPSGGSHLTAGSVKYGVSQFKPLPSVGVDDVNRMKYKDNIYASTPQVETSDIWIQQAREMPPMQVPSYYNIPVPRLVPSSATSLYCKSAPHGASTGAIGHWSQCWGWGGSSRPASWSLSATTAWPYELETQLLKKVS

SEQ ID NO: 196724 - protein, 804 aa, Zea Mays
MAGGGGGARGSDRAGAARSPTTTTAIQSTIQSIKEVVVGHSDADILDTLRESNMDPNETAQKLLNQDPFHEVKRKRDKKKESAGQKSFADSTAQVEQNSQWMKPHTQKMENDQRTPKQGQMSGPTREFRVVRDNRFQHGVVENRPELGHKGSANVQMSDRSTLVQSGRNRSPATTSGDQITHQNAMQNSNSDTTQGKRDAQGTTEKHVKPYLKNPQNEQHFPGSDPAHGSANVRIAGGTVGPAQRHVGVVNSTRQFAARSGSQMHAPSGSYANIQRGSFTSVGASGRYSAFMSRNIQQNQRPDTMFRGRPTVRSFVAQNTNRYHQGSTSNQKAVHPIKEWKPKSTKKSPTIDADNSIADATSPSASNCESANTLNVNELPEKISQTNLHEVEHVIIPEHLRVPEYEQTKLRFGSFTSGLDSEQVSASTPQDTEQPEHVQESVQQASEYDSLDAGPDDMDEQARSSQHLSTSTAEISLPPSEDSDRMSGQVENDDGLGLVQSDTPIGAADGDNTQITSTLTAFSAYSHEDPNMHTNNEAQLYGLVEPNVHPQVLASSSQGYPSENPEADNAVQVFRMPESNVHSQVLPSTSEALNPQIVSNSPVSISSQQQQHISQQQAAAQMYPQMHVQHFPNFMPYRQLYSPVYPMPMPNYSPNVPYPSNGNNYLQMPSGGSHLTAGSVKYGVSQFKPLPSVGVDDVNRMKYKDNIYASTPQVETSDIWIQQAREMPPMQVPSYYNIPVPRLVPSSATSLYCKSAPHGASTGAIGHWSQCWGWGGSSRPASWSLSATTAWPYELETQLLKKVS

SEQ ID NO: 196725 - protein, 778 aa, Zea Mays
MAGGGGGARGSDRAGAARSPTTTTAIQSTIQSIKEVVVGHSDADILDTLRESNMDPNETAQKLLNQDPFHEVKRKRDKKKESAGQKSFADSTAQVEQNSQWMKPHTQKMENDQRTPKQGQMSGPTREFRVVRDNRFQHGVVENRPELGHKGSANVQMSDRSTLVQSGRNRSPATTSGDQITHQNAMQNSNSDTTQGKRDAQGTTEKHVKPYLKNPQNEQHFPGSDPAHGSANVRIAGGTVGPAQRHVGVVNSTRQFAARSGSQMHAPSGSYANIQRGSFTSVGASGRYSAFMSRNIQQNQRPDTMFRGRPTVRSFVAQNTNRYHQGSTSNQKAVHPIKEWKPKSTKKSPTIDADNSIADATSPSASNCESANTLNVNELPEKISQTNLHEVEHVIIPEHLRVPEYEQTKLSVQESVQQASEYDSLDAGPDDMDEQARSSQHLSTSTAEISLPPSEDSDRMSGQVENDDGLGLVQSDTPIGAADGDNTQITSTLTAFSAYSHEDPNMHTNNEAQLYGLVEPNVHPQVLASSSQGYPSENPEADNAVQVFRMPESNVHSQVLPSTSEALNPQIVSNSPVSISSQQQQHISQQQAAAQMYPQMHVQHFPNFMPYRQLYSPVYPMPMPNYSPNVPYPSNGNNYLQMPSGGSHLTAGSVKYGVSQFKPLPSVGVDDVNRMKYKDNIYASTPQVETSDIWIQQAREMPPMQVPSYYNIPVPRLVPSSATSLYCKSAPHGASTGAIGHWSQCWGWGGSSRPASWSLSATTAWPYELETQLLKKVS

SEQ ID NO: 196726 - protein, 296 aa, Zea Mays
MREEQAVQLILARLASATIGRLLNEQQRACNLLTLAGAVAIVPPLENISSMMLAESITSRNIDSDIRRLVDQPYVEGKCLSCACPSVPSTIFQEDPIEPKTGIKFPTFLEDDSSPSAAVLVGIGFKGMRVMRVKNLNLYAFGLYMQPTSIREKLGPKYASFPTDKLMENPDFYSDLLRVRLVVNYNGLSVGAVRDVFEKSLGLRLQKMNPNTDFHCLKTFGSHFTEDIAIPSGTKIDFCQTSDGKLITEIDGKQIGAVRSKDLCKAFFDMYIGDSPVSLEAKKVVAQNVAGLIGRR

SEQ ID NO: 196727 - protein, 246 aa, Zea Mays
MKPNQLITSHVDIHRVYPYEFQPEFSMSHDLGLNLFSQAGTVLGTSLRHHRKISSSGNAMVHGAFNRLNKLSRALYFWLSRPSDPKILRWVASVAATSSRSCQLRFNQMGSHMQNLTKLQFSFPMREEQAVQLILARLASATIGRLLNEQQRACNLLTLAGAVAIVPPLENISSMMLAESITSRNIDSDIRRLVDQPYVEGKCLSCACPSVPSTIFQEDPIEPKTGIKFPTFLEDDSSPSAAVSKA

SEQ ID NO: 196728 - protein, 280 aa, Zea Mays
MEFFPDRAHLRLRNPVNSAYLYAMEDGVGITLRRRSGTRNEAWAVHRVELNGANYVLLHSAAYGRYLAIVCEEAAPAPSSGQGAGASHICRVVQRAYDAPGQDDVLWEVRCVDDGSGEVQMRNPTYGATGYYDGQKKWMRVMVEAIPPRADPPEHPLPVISWMRWQQQFPIVGRLRRQCQGVQGQPVLRRRIYYVRADDQGNFNSDAWRMLWFLDRSVWHLRRDLAAQVGVGEANALDITLCVRAGSNGRLTPLVIDLPSDEQAMHVVVLNTDSPDVGAP

SEQ ID NO: 196729 - protein, 490 aa, Zea Mays
MKIKDTLWQWGPVQESMHQHFWDFLQISIYDLRMSSPLRVKDHMYGSPILNIKWHQTLNSTEPKLITADKHIVRIWDPNTGNNMTSIEPDGGAINDVCVFRNSGLVLLALDNSQIPAHFIPALGPAPKWCSHLDNLTEEMEEKPDTTLFDEYKFLTKEEMERLNLTQYIGSSAVRAYLHGFIVRYELYKKQRAAVAPVEYETIKDEIKKKKLEAQRKSRITQVVKIPKVNRQIMDSIREDEIDLDMENVDKSSIKKKKRKLELNKAILDDDRFKEMFENKDFEIDEESKEYLALHPQAATKEPRLIEEHFDSVSEDDQQSDGNTSDTLAESDSDDVMHNSKRIRLYEVKDEHHAEAFLNSVSLSNEDAAPLEDRIAALERKQNSKALDAVKYGPGGSREISFFSKSRRRHKEESSSDDEPKGVKKRAVQPLGLKQGKAEFYMFGGNRGRGRGGSGRGRSGRGRGGGGGGGGRGGGRGGGGRGGGRGRGRG

SEQ ID NO: 196730 - protein, 187 aa, Zea Mays
MHQHFWDFLQISIYDLRMSSPLRVKDHMYGSPILNIKWHQTLNSTEPKLITADKHIVRIWDPNTGNNMTSIEPDGGAINDVCVFRNSGLVLLALDNSQIPAHFIPALGPAPKWCSHLDNLTEEMEEKPDTTLFDEYKFLTKEEMERLNLTQYIGSSAVRAYLHGFIVRYELYKKMSYRKDAKQYLPG

SEQ ID NO: 196731 - protein, 67 aa, Zea Mays
MDFPVCIRVVVAAASFVYSCDLLLAIGVSCFCVCVCVTISCYQTYDMEMWLTTIYGTHTYNNNHLCW

SEQ ID NO: 196732 - protein, 174 aa, Zea Mays
MQDASLQGSPESPKSVVLVTGEGEYNMVSLRKTIRAYLLEMGSPFLPCRARSGRFVVKDYSLKMWLKDSPFCMDLELKDAPAHPKLNSMKLIEGYFMRAGFVSAFKDIHERLGEVWPKKFSRLALLSEECRDEVIKADIQGRKEKLERMKKKGIVTARKSKTRARRGKFVRQQK

SEQ ID NO: 196733 - protein, 419 aa, Zea Mays
MLLTVRPRSENFLAPVLAARSAEMAALGRLSRLLSSTVHRSGGLVRAFSMLAEVVDVADVSDLYLPRDAHCYYIFGKHELLKLSSTRVISITEYFKEVSLLDRAPRNRLVEDIDDNLPFLIHDRQFVKLFKALVGKYPERDAIFKLPKSLDLHFKFLELLIVKDYRVIYGPVLFPKLLISIIYSGAHGERAKKHIVGSEDGSDETLIYEVSDDTKDLKASNVPLKVRNFMGNKELSDETKSTTAEGNVEIVPGDELTTTLLDAVNTIQRTTGYGFLSCYKRKICTFQTLALDLAPLRSRIMTLRLRSRPRAHCYGVRSSWGHQGRRTLRRGYRRVMGRARASTSSAPSGTDGGRSGLPAGGVGDPDSAGAFMSLRSGPRIRWCWRPDACAVRASHRRRSVRRDVWTRDLGRPHAWDTHI

SEQ ID NO: 196734 - protein, 78 aa, Zea Mays
MFPPNLRRRQPWQSACRCSPLPFPAPPPSFRFLFSSTAVEPPPLSLVLPSLILSAASPLSPNYSVPRQIDLDFGGSYF

SEQ ID NO: 196735 - protein, 102 aa, Zea Mays
MFSWRGVDASTGRVVMSLRSAPRRWIASSSSEEYPLGWASPPLGMAGAPQLRAMQPPRGSWLSRPRGSWPSHRWAWSRRLRSRPRGSWPRHRRRRAWSRRLR

SEQ ID NO: 196736 - protein, 153 aa, Zea Mays
MSPSAIFVFLLVSAVHMLECILDLKRRRGSISDDQLRLRVEITQLLKEASALSTPSTFAQAAKLKRLAGAKEKELAKMQDVDIRGKQSLYEKYRKVLLAAKVVVYGVLVLWFWSTPVTTVPKHLLQPFGRMFSWRGVDASTGRVVVSTTELLA

SEQ ID NO: 196737 - protein, 894 aa, Zea Mays
MQPPAQELIAKDLHDISWKFRHIYRGQPKRHLLTTGWSVFVSTKRLLAGDSVLFIRDEKSQLLLGIRRASRPQPALSSSVLSSDSMHIGILAAAAHAAANSSPFTIFYNPRASPSEFVIPLAKYNKALYTQVSLGMRFRMLFETEDSGVRRYMGTITGIGDLDPLRWKNSHWRNLQVGWDESTASERRTRVSIWEIEPVATPFYICPPPFFRPKLPKQAGMPDDENEVESAFKRAMPWLADDFALKDVQNALFPGLSLVQWMAMQQNPQMLATASPAVQSQYLTSNALGMQDGIGSVSEDPTKRLTMQAQNIGLPNLQAGSKVDHPAITPLAQHQQQPHHVLQQQQVQPLQQSSAILQQQQAQLLQQNAIHLQQQQEQLQRQQSQPQQQFKATACLQSSDQHKLKEQQPSGGQAASQVHLLNQILQPSSSQLQQLGLPKSPTQRPGLPSLTTMGSLQQSQLPQTPQPQQTAEYHQALLQSQQPQLQQLSQSELQLQLLQKIQQQNLLSQLNPQHQSQLIQQLSQKSQEILQQQVLQHQFGGADAMGQLKHLQQTPLNHNTGSLPPQQLVRSHSALTESEEPSSSTVPSGSRISPINSFSRANQGTRNLPEMPATPHIEHLLQEIQSKTDNRIKNDIQGSKETVHAPNRHLASDQLDASSATSFCLDESPREGFSFPPVCLDNNVQVDPRENFLIAENVDTLMPDALLSRGMSSGKGICNLPSGQRDHRDVENELSSAAFSSQSFGVPDMSFKPGCSSDVAVADGGMASQGLWNSQTQRMRTFTKVQKRGSVGRSIDITRYRGYEDLRHDLACMFGIQGQLEDPYRTDWKLVYVDHENDILLVGDDPWEEFVSCVKSIKILSSVEVQQMSLDGDLGCIPQTQACSASDDANAWRA

SEQ ID NO: 196738 - protein, 268 aa, Zea Mays
MGLLEHPLEAVAFRLYSLPVPEASAATGAAAAWTCLAAAVLAAAAGVWRLCLSLSPPPPPSAAVAAAAANASEPDRSHVAEASPEPAAAAAATPKERYTAYYRDVGCCCCGGESDDEEDDAEERGDGDVFLSDDDGPTTDPFGWEWEVVWSLQPPLSPVAETTGGRYRRSPTTGLGGNDGAEVPEEPDDGARRQRGAAVGPGRRARPDARGAPAAEGPGGRRHRLGLLKTYPRARVSKRAIKLARLVGERREKIIRLCSTVCAGLPLP

SEQ ID NO: 196739 - protein, 74 aa, Zea Mays
MEATPEDTTTVPHRRRTAKNEVHRTCCPASTCLTTAGWRMDALMKKRRGWPLGNGKEAQALPLPRRSLAREGKQ

SEQ ID NO: 196740 - protein, 65 aa, Zea Mays
MEATPEDTTTVPHRRRTAKNEVHRTCCPASTCLTTAGWRMDALMKKRRGWPLGNGKEAQALPLPR

SEQ ID NO: 196741 - protein, 183 aa, Zea Mays
MMRHNMNQPGKSLGVIGLGGLGHMAVKFGKAFGLKVTVFSTSESKRDEAINLLGADNFVISSDTQQMESLKNSLHFIIDTASGDHPFDPYFSLLKVGGVMTLVGFPSEIKMHPASLILGARTLSGSVVGGIKDIQEMVNFCAANNIYPEIEIIKIDYINEALARLVNRDVKYRFVIDIENSFK

SEQ ID NO: 196742 - protein, 285 aa, Zea Mays
MAAESENGNCKAWAARDPSGVLSPHSFNRRAVQSGDVSLKIIYCGVCYADVAWTRNKLNDSKYPLVPGHEIAGVVTQVGADVKGFKVGDHGGYSTHIVVHERYCFKIPDGYPLAKAAPLLCAGITVYTPMMRHNMNQPGKSLGVIGLGGLGHMAVKFGKAFGLKVTVFSTSESKRDEAINLLGADNFVISSDTQQMEVGGVMTLVGFPSEIKMHPASLILGARTLSGSVVGGIKDIQEMVNFCAANNIYPEIEIIKIDYINEALARLVNRDVKYRFVIDIENSFK

SEQ ID NO: 196743 - protein, 274 aa, Zea Mays
MAAESENGNCKAWAARDPSGVLSPHSFNRRHEIAGVVTQVGADVKGFKVGDHGGYSTHIVVHERYCFKIPDGYPLAKAAPLLCAGITVYTPMMRHNMNQPGKSLGVIGLGGLGHMAVKFGKAFGLKVTVFSTSESKRDEAINLLGADNFVISSDTQQMESLKNSLHFIIDTASGDHPFDPYFSLLKVGGVMTLVGFPSEIKMHPASLILGARTLSGSVVGGIKDIQEMVNFCAANNIYPEIEIIKIDYINEALARLVNRDVKYRFVIDIENSFK

SEQ ID NO: 196744 - protein, 281 aa, Zea Mays
MKIGSGLNTGAAGVDGPAANSVKRKRKNQFRGIRRRPWGKWAAEIRDPRKGVRVWLGTFNSPEEAARAYDAEARRIRGKKAKVNFPDEVPTAVSQKRRAAGPASLKAPKMDVEEEKPIIKLAVNNMTNSNAYHYPAVVGHNIIPEPFMQTQNMPFAPLVNYAALVNLSSDQGSNSFGCSDFSLENDSRTPDITSVPAPVATLAAVGESVFVQNTAGHAVASPATGNTGVDLAELEPYMNFLMDGGSDDSISTLLSCDGSQDVVSNMDLWSFEDMPMSAGFY

SEQ ID NO: 196745 - protein, 160 aa, Zea Mays
MSAKCEGLSGPLRLQQGPLKRPLNYRGCARDPNCGGRPPCAIRATDPPAAARKLPPPPTARWRLHLPGPSPQSGVLRRRHRGRWETRGLARADAEHGGGADRRGVHGHRRTRSIVEEQIEEASMATAAATPFQLQFDKPIPFQRGSQERRRSKVGTKISE

SEQ ID NO: 196746 - protein, 181 aa, Zea Mays
MSAKCEGLSGPLRLQQGPLKRPLNYRGCARDPNCGGRPPCAIRATDPPAAARKLPPPPTARWRLHLPGPSPQSGVLRRRHRGRWETRGLARADAEHGGGADRRGVHGHRRTRSIVEEQIEEASMATAAATPFQLQFDKPIPFQIKMAEWNPEKDLLAMVTDDSKVLLHRFNWQRLWTISLG

SEQ ID NO: 196747 - protein, 173 aa, Zea Mays
MAEEQIEEASMAIAGRGASWRSRSKRRPWPRRRPRRSSSSSTSPSRSRIREGVRKEGAQKSGQKYLSESDLQNADGHPEIDLAFVLLLPRRSLVSSLPRPSLLKLSSSTQEPREYDSGEGRGEKGYSVAVAVLRIWPWVMAAPAHCSLTYQPPETRDWNWMDKAQANRMPLIF

SEQ ID NO: 196748 - protein, 144 aa, Zea Mays
MSAKCEGLSGPLRLQQGPLKRPLNYRGCARDPNCGGRPPCAIRATDPPAAARKLPPPPTARWRLHLPGPSPQSGVLRRRHRGRWETRGLARADAEHGGGADRRGVHGHRRTRSIVEEQIEEASMATAAATPFQLQFDKPIPFQV

SEQ ID NO: 196749 - protein, 249 aa, Zea Mays
MSAKCEGLSGPLRLQQGPLKRPLNYRGCARDPNCGGRPPCAIRATDPPAAARKLPPPPTARWRLHLPGPSPQSGVLRRRHRGRWETRGLARADAEHGGGADRRGVHGHRRTRSIVEEQIEEASMATAAATPFQLQFDKPIPFQGNGWFTDGQARPLPHLKFYDLHRIREGVRKEGAQKSGQKYLSESDLQNADGHPEIDLAFVLLLPRRSLIKMAEWNPEKDLLAMVTDDSKVLLHRFNWQRLWTISLG

SEQ ID NO: 196750 - protein, 53 aa, Zea Mays
MYTSSLRYGTVLEKELIFLSTSSSQPITSKMAFILFRGLEMLSKLFLLSVACL

SEQ ID NO: 196751 - protein, 79 aa, Zea Mays
MEIIHQQVQRKKEKMARLADLQRKIDEATEEVRHLAQDDQDRRPQHRELRQEGLFNEDGWYDDFNHDTFTFDDVSPLAA

SEQ ID NO: 196752 - protein, 745 aa, Zea Mays
MRKEQHKAVLGKKSGPDILKENPSDDIFSKLQTSTAKANAKTKNEKLDGSVVSSYQEDTTKPSSVLLAPAARPLVPPGFANAFADKKLQSQSSNITHEPKLEDDQSATGFTSESKEKGVSGNDATMGPKHTLPPGSVTSSAELASSVLKGSEDWDADVMDKYSIGKEGKSKNIDPVRKDDSVAILEQFFGNVLSKSGSNLPTYVENQPLKTDDDMITSVPESSKFAHWFLDEDLKPAEDLSSKSLLSMIVKNENPELISFTSSTPANGVLEQCIHSDVPEAVPIMTCEDLEQTMLAQVSNSSSTQINATKEQLTVMDEPVAMQKVTVDNHASQHLLSLLQKGTDNKGAPSLGFQRESTDEPLSVDTNLMANGGISGSDPVNSVENVPTSGKDLTLEALFGAAFMNELHSKDAPVSIRGATTGGPTEFAEMGKTLLSSSHEGYYPVEQTVHFNNTKDAAVRREPGIEHSAVPGLSQGSASFDKKGMEIHLPEEDNLFTMSDSLLGQNSDILASVGSSRVEGLLPEKALDNLSYRFQSLVPGDAEHIQVYGPDALGSHPRDSQNMYHLLQGRPPMIAPHPMMDHIVNRKQPAPFDMAQSIHHDSHRSFPSNVNHMQHNLHGPGVPHLDPAGHIMRQHMSMPGRFPPEGLPRGVPPSQPVHHMAGYRPEMGNVNNFHMHPRQPNYGEFGLMMPGPEVRGNHPEAFERLIQMEMSARSKQQQVHHPAMAAGRVPSGMYGHELDAKLRYR

SEQ ID NO: 196753 - protein, 976 aa, Zea Mays
MKTRIVYSREFLLSLGELEHCKKLPPDFDAALLSELQELSAGVLERNKGYYNTSQGRPDGSVGYTYSSRGGNTGGRWDTRSSGSSDRDGEPDRESQTQAGRGANQYRRNWQNTEHDGLLGRGGFPRPSGYTGQLSSKDHGNAPQLNRTSERYQPPRPYKAAPFSRKDIDSINDETFGSSELSNEDRAEEERKRRASFELMRKEQHKAVLGKKSGPDILKENPSDDIFSKLQTSTAKANAKTKNEKLDGSVVSSYQEDTTKPSSVLLAPAARPLVPPGFANAFADKKLQSQSSNITHEPKLEDDQSATGFTSESKEKGVSGNDATMGPKHTLPPGSVTSSAELASSVLKGSEDWDADVMDKYSIGKEGKSKNIDPVRKDDSVAILEQFFGNVLSKSGSNLPTYVEPLKTDDDMITSVPESSKFAHWFLDEDLKPAEDLSSKSLLSMIVKNENPGLENLNHTPLSDAAAQNLSPRAPIDKLDSASELISFTSSTPANGVLEQCIHSDVPEAVPIMTCEDLEQTMLAQVSNSSSTQINATKEQLTVMDEPVAMQKVTVDNHASQHLLSLLQKGTDNKGAPSLGFQRESTDEPLSVDTNLMANGGISGSDPVNSVENVPTSGKDLTLEALFGAAFMNELHSKDAPVSIRGATTGGPTEFAEMGKTLLSSSHEGYYPVEQTVHFNNTKDAAVRREPGIEHSAVPGLSQGSASFDKKGMEIHLPEEDNLFTMSDSLLGQNSDILASVGSSRVEGLLPEKALDNLSYRFQSLVPGDAEHIQVYGPDALGSHPRDSQNMYHLLQGRPPMIAPHPMMDHIVNRKQPAPFDMAQSIHHDSHRSFPSNVNHMQHNLHGPGVPHLDPAGHIMRQHMSMPGRFPPEGLPRGVPPSQPVHHMAGYRPEMGNVNNFHMHPRQPNYGEFGLMMPGPSGPEVRGNHPEAFERLIQMEMSARSKQQQVHHPAMAAGRVPSGMYGHELDAKLRYR

SEQ ID NO: 196754 - protein, 977 aa, Zea Mays
MKTRIVYSREFLLSLGELEHCKKLPPDFDAALLSELQELSAGVLERNKGYYNTSQGRPDGSVGYTYSSRGGNTGGRWDTRSSGSSDRDGEPDRESQTQGRGANQYRRNWQNTEHDGLLGRGGFPRPSGYTGQLSSKDHGNAPQLNRTSERYQPPRPYKAAPFSRKDIDSINDETFGSSELSNEDRAEEERKRRASFELMRKEQHKAVLGKKSGPDILKENPSDDIFSKLQTSTAKANAKTKNEKLDGSVVSSYQEDTTKPSSVLLAPAARPLVPPGFANAFADKKLQSQSSNITHEPKLEDDQSATGFTSESKEKGVSGNDATMGPKHTLPPGSVTSSAELASSVLKGSEDWDADVMDKYSIGKEGKSKNIDPVRKDDSVAILEQFFGNVLSKSGSNLPTYVENQPLKTDDDMITSVPESSKFAHWFLDEDLKPAEDLSSKSLLSMIVKNENPGLENLNHTPLSDAAAQNLSPRAPIDKLDSASELISFTSSTPANGVLEQCIHSDVPEAVPIMTCEDLEQTMLAQVSNSSSTQINATKEQLTVMDEPVAMQKVTVDNHASQHLLSLLQKGTDNKGAPSLGFQRESTDEPLSVDTNLMANGGISGSDPVNSVENVPTSGKDLTLEALFGAAFMNELHSKDAPVSIRGATTGGPTEFAEMGKTLLSSSHEGYYPVEQTVHFNNTKDAAVRREPGIEHSAVPGLSQGSASFDKKGMEIHLPEEDNLFTMSDSLLGQNSDILASVGSSRVEGLLPEKALDNLSYRFQSLVPGDAEHIQVYGPDALGSHPRDSQNMYHLLQGRPPMIAPHPMMDHIVNRKQPAPFDMAQSIHHDSHRSFPSNVNHMQHNLHGPGVPHLDPAGHIMRQHMSMPGRFPPEGLPRGVPPSQPVHHMAGYRPEMGNVNNFHMHPRQPNYGEFGLMMPGPSGPEVRGNHPEAFERLIQMEMSARSKQQQVHHPAMAAGRVPSGMYGHELDAKLRYR

SEQ ID NO: 196755 - protein, 516 aa, Zea Mays
MKTRIVYSREFLLSLGELEHCKKLPPDFDAALLSELQELSAGVLERNKGYYNTSQGRPDGSVGYTYSSRGGNTGGRWDTRSSGSSDRDGEPDRESQTQAGRGANQYRRNWQNTEHDGLLGRGGFPRPSGYTGQLSSKDHGNAPQLNRTSERYQPPRPYKAAPFSRKDIDSINDETFGSSELSNEDRAEEERKRRASFELMRKEQHKAVLGKKSGPDILKENPSDDIFSKLQTSTAKANAKTKNEKLDGSVVSSYQEDTTKPSSVLLAPAARPLVPPGFANAFADKKLQSQSSNITHEPKLEDDQSATGFTSESKEKGVSGNDATMGPKHTLPPGSVTSSAELASSVLKGSEDWDADVMDKYSIGKEGKSKNIDPVRKDDSVAILEQFFGNVLSKSGSNLPTYVENQPLKTDDDMITSVPESSKFAHWFLDEDLKPAEDLSSKSLLSMIVKNENPELISFTSSTPANGVLEQCIHSDVPEAVPIMTCEDLEQTMLAQEQIIREHLPWVSRENQLMNL

SEQ ID NO: 196756 - protein, 937 aa, Zea Mays
MKTRIVYSREFLLSLGELEHCKKLPPDFDAALLSELQELSAGVLERNKGYYNTSQGRPDGSVGYTYSSRGGNTGGRWDTRSSGSSDRDGEPDRRGANQYRRNWQNTEHDGLLGRGGFPRPSGYTGQLSSKDHGNAPQLNRTSERYQPPRPYKAAPFSRKDIDSINDETFGSSELSNEDRAEEERKRRASFELMRKEQHKAVLGKKSGPDILKENPSDDIFSKLQTSTAKANAKTKNEKLDGSVVSSYQEDTTKPSSVLLAPAARPLVPPGFANAFADKKLQSQSSNITHEPKLEDDQSATGFTSESKEKGVSGNDATMGPKHTLPPGSVTSSAELASSVLKGSEDWDADVMDKYSIGKEGKSKNIDPVRKDDSVAILEQFFGNVLSKSGSNLPTYVENQPLKTDDDMITSVPESSKFAHWFLDEDLKPAEDLSSKSLLSMIVKNENPELISFTSSTPANGVLEQCIHSDVPEAVPIMTCEDLEQTMLAQVSNSSSTQINATKEQLTVMDEPVAMQKVTVDNHASQHLLSLLQKGTDNKGAPSLGFQRESTDEPLSVDTNLMANGGISGSDPVNSVENVPTSGKDLTLEALFGAAFMNELHSKDAPVSIRGATTGGPTEFAEMGKTLLSSSHEGYYPVEQTVHFNNTKDAAVRREPGIEHSAVPGLSQGSASFDKKGMEIHLPEEDNLFTMSDSLLGQNSDILASVGSSRVEGLLPEKALDNLSYRFQSLVPGDAEHIQVYGPDALGSHPRDSQNMYHLLQGRPPMIAPHPMMDHIVNRKQPAPFDMAQSIHHDSHRSFPSNVNHMQHNLHGPGVPHLDPAGHIMRQHMSMPGRFPPEGLPRGVPPSQPVHHMAGYRPEMGNVNNFHMHPRQPNYGEFGLMMPGPEVRGNHPEAFERLIQMEMSARSKQQQVHHPAMAAGRVPSGMYGHELDAKLRYR

SEQ ID NO: 196757 - protein, 946 aa, Zea Mays
MKTRIVYSREFLLSLGELEHCKKLPPDFDAALLSELQELSAGVLERNKGYYNTSQGRPDGSVGYTYSSRGGNTGGRWDTRSSGSSDRDGEPDRESQTQGRGANQYRRNWQNTEHDGLLGRGGFPRPSGYTGQLSSKDHGNAPQLNRTSERYQPPRPYKAAPFSRKDIDSINDETFGSSELSNEDRAEEERKRRASFELMRKEQHKAVLGKKSGPDILKENPSDDIFSKLQTSTAKANAKTKNEKLDGSVVSSYQEDTTKPSSVLLAPAARPLVPPGFANAFADKKLQSQSSNITHEPKLEDDQSATGFTSESKEKGVSGNDATMGPKHTLPPGSVTSSAELASSVLKGSEDWDADVMDKYSIGKEGKSKNIDPVRKDDSVAILEQFFGNVLSKSGSNLPTYVENQPLKTDDDMITSVPESSKFAHWFLDEDLKPAEDLSSKSLLSMIVKNENPELISFTSSTPANGVLEQCIHSDVPEAVPIMTCEDLEQTMLAQVSNSSSTQINATKEQLTVMDEPVAMQKVTVDNHASQHLLSLLQKGTDNKGAPSLGFQRESTDEPLSVDTNLMANGGISGSDPVNSVENVPTSGKDLTLEALFGAAFMNELHSKDAPVSIRGATTGGPTEFAEMGKTLLSSSHEGYYPVEQTVHFNNTKDAAVRREPGIEHSAVPGLSQGSASFDKKGMEIHLPEEDNLFTMSDSLLGQNSDILASVGSSRVEGLLPEKALDNLSYRFQSLVPGDAEHIQVYGPDALGSHPRDSQNMYHLLQGRPPMIAPHPMMDHIVNRKQPAPFDMAQSIHHDSHRSFPSNVNHMQHNLHGPGVPHLDPAGHIMRQHMSMPGRFPPEGLPRGVPPSQPVHHMAGYRPEMGNVNNFHMHPRQPNYGEFGLMMPGPSGPEVRGNHPEAFERLIQMEMSARSKQQQVHHPAMAAGRVPSGMYGHELDAKLRYR

SEQ ID NO: 196758 - protein, 947 aa, Zea Mays
MKTRIVYSREFLLSLGELEHCKKLPPDFDAALLSELQELSAGVLERNKGYYNTSQGRPDGSVGYTYSSRGGNTGGRWDTRSSGSSDRDGEPDRESQTQAGRGANQYRRNWQNTEHDGLLGRGGFPRPSGYTGQLSSKDHGNAPQLNRTSERYQPPRPYKAAPFSRKDIDSINDETFGSSELSNEDRAEEERKRRASFELMRKEQHKAVLGKKSGPDILKENPSDDIFSKLQTSTAKANAKTKNEKLDGSVVSSYQEDTTKPSSVLLAPAARPLVPPGFANAFADKKLQSQSSNITHEPKLEDDQSATGFTSESKEKGVSGNDATMGPKHTLPPGSVTSSAELASSVLKGSEDWDADVMDKYSIGKEGKSKNIDPVRKDDSVAILEQFFGNVLSKSGSNLPTYVENQPLKTDDDMITSVPESSKFAHWFLDEDLKPAEDLSSKSLLSMIVKNENPELISFTSSTPANGVLEQCIHSDVPEAVPIMTCEDLEQTMLAQVSNSSSTQINATKEQLTVMDEPVAMQKVTVDNHASQHLLSLLQKGTDNKGAPSLGFQRESTDEPLSVDTNLMANGGISGSDPVNSVENVPTSGKDLTLEALFGAAFMNELHSKDAPVSIRGATTGGPTEFAEMGKTLLSSSHEGYYPVEQTVHFNNTKDAAVRREPGIEHSAVPGLSQGSASFDKKGMEIHLPEEDNLFTMSDSLLGQNSDILASVGSSRVEGLLPEKALDNLSYRFQSLVPGDAEHIQVYGPDALGSHPRDSQNMYHLLQGRPPMIAPHPMMDHIVNRKQPAPFDMAQSIHHDSHRSFPSNVNHMQHNLHGPGVPHLDPAGHIMRQHMSMPGRFPPEGLPRGVPPSQPVHHMAGYRPEMGNVNNFHMHPRQPNYGEFGLMMPGPSGPEVRGNHPEAFERLIQMEMSARSKQQQVHHPAMAAGRVPSGMYGHELDAKLRYR

SEQ ID NO: 196759 - protein, 434 aa, Zea Mays
MIASHVLGALWYLLSVDRQIACWKNFCDETDCHTRYLYCDVKPDSMWNGTSVFSTCNAKNSTKFDFGMFQPLLANKTPNESFLKKYIYCLWWGLQNLSYSCYGQTLTVSTFIGETLYAILLAVVGLVLFAHLIGKVQTYLQSITARVEEWRLKQRDTEEWMGHRQLPHELRERVRRFVHYKWLATRGVDEESILSALPTDLRRDIKRHLCLYLVRRVPLFSQMDDQLLDAICERLVSSLSTEGTYIVREGDPVTEMLFIIRGKLESSTTDGGRTGFFNSITLKPGDFCGEELLGWALVPKPTVNLPLSTRTVKAVLEVEAFALQADDLRFVASQFRRLHSRKLQHTFRYYSHHWRTWAACFIQHAWRRLRRRKMAKDLSLRESFSSTGPYEGDGDDASSPEQSITLRRGAGSIIRELPKFRKPSEPDFSAEHDD

SEQ ID NO: 196760 - protein, 98 aa, Zea Mays
MSGDARRALEICRRAAEFADYRVKQSRQSAQNTVSANKGDGVVSMGDIEAAIQEVFQAPHIQVMKNCPKFGKVILVAIVHELYKSGLGEIMFDKLQAW

SEQ ID NO: 196761 - protein, 239 aa, Zea Mays
METILRHCSIMCPKDFRDANDGGDDVFYCEYEYDIHWHNFKRLADIGDEPETKEDPSDEPYNASDDYNSDTDEDSEYDEVEEPTSSFSARGNQSHELAANSRKGRIYGLQKIGIRKIPEHVRCHQKTELEKAKATLLLATLPKSLPCRDKEMEEISIFVKDAICNDQCLGRCLYIHGVPGTGKTMSVLAVMRRLRSEFDSGTLRPYCFIEINGLKLASPENIYKVALKLESKQTSQLFC

SEQ ID NO: 196762 - protein, 857 aa, Zea Mays
MAKLHCQWESEGRNPNSSTFQIHIPPLCLSPVTPRRLRRDPEMDVAATPSRSKSKPRSSLVNPVAAPAESRMDLCTPSKPTPRRNSKSTASPAPMSPSTPYTVRRSRRLLETPTKAALEVQVKATLTPTSKGKRAAPSPKTPAQHEPKRQKRHPRKRAYYRKVVYDGGEFEVGDDVYVKRREAAESDAEDPEEEECRVCFRTGGGVMVECDACLGGFHLRCVRPPLRRVPEGDWACPYCEAERAGKVVERPRPPEGKRIVRTAKEKLLSSDLWAARIESLWREPDGTFWAKVRWYIIPEETAAGRQLHNLRRELYRTNDLADIEMETILRHCSIMCPKDFRDANDGGDDVFYCEYEYDIHWHNFKRLADIGDEPETKEDPSDEPYNASDDYNSDTDEDSEYDEVEEPTSSFSARGNQSHELAANSRKGRIYGLQKIGIRKIPEHVRCHQKTELEKAKATLLLATLPKSLPCRDKEMEEISIFVKDAICNDQCLGRCLYIHGVPGTGKTMSVLAVMRRLRSEFDSGTLRPYCFIEINGLKLASPENIYKVVYEQLSGHRVGWKKALHYLTEHFSGGTKIGKQANQPIILLIDELDLLLTRNQSVLYNILDWPTKPYSNLVVIGIANTMDLPEKLLPRISSRMGIQRLCFGPYNYRQLQEIITSRLKGIDAFEEQAIEFASRKVAAMSGDARRALEICRRAAEFADYRVKQSRQSAQNTVSANKDLIFVGDGVVSMGDIEAAIQEVFQAPHIQVMKNCPKFGKVILVAIVHELYKSGLGEIMFDKLATTVFSWCRAHRELLPGYDTLLKICCKLGESKIILCEEGTKHKLQKVQLNYPSDDVTFALKESPDLPWLSKYL

SEQ ID NO: 196763 - protein, 154 aa, Zea Mays
MEGSLQPLPSPPQSMDAPAPRRAHPESRAARSPCYPTPVLFSSSSRRSYYSPPWRTAFRCQVHSDIKVSPTLDLKDDSKSETWRIKMLYDGDCALCMREVNMLRERNKSYGAIKFADISSKDYSPDDNEGLDYEIMCITSIYLTFLAHPLYDFS

SEQ ID NO: 196764 - protein, 183 aa, Zea Mays
MEGSLQPLPSPPQSMDAPAPRRAHPESRAARSPCYPTPVLFSSSSRRSYYSPPWRTARALSVGEELMAKRPCRQVYRIDGLPCLCAFRCQVHSDIKVSPTLDLKDDSKSETWRIKMLYDGDCALCMREVNMLRERNKSYGAIKFADISSKDYSPDDNEGLDYEIMCITSIYLTFLAHPLYDFS

SEQ ID NO: 196765 - protein, 482 aa, Zea Mays
MVVTLNAYNVVAARCAAEYLGMTEDVEKSNLVFKIEVFLSSGIFRSWKDSIIALQTTDALLPWSEELKLVGRCVDSVAAKATVSASNVVWSYTYNRKSASSDEIVEARRSSQAVPKDWWVEDLCELDVDLYRRVMVAVKSRGRIPSDAIGEALKAYAARWLPECCDALVDDAYSGAYKHLLETIVWLLPSDKGSSGISCRFFLKLLKFTVLVGAGELLKEELMDRTVLQLHKASVSDLLIPSRPPAQTVYDVQLVQTLIGRYMSHAGVSQGGIFLNDLDQEMFETNVDGESLLALCKLVDRYLAEVASDPNLSVSSFVDLATSMPETARPTHDGLYTAIDVYLKLHPGLPKMEKRKISNLMDVRKLSKGACIHAAQNDRLPLRVVVQVLFFEQLRAAGAAAAAGTPSASVANQSSRMSLSSRSRRIFDRLWVGGAKLPGEAAAAGKGSSDTSGSSQSPRSSAKPPESKSSSSSSRNRRYSVS

SEQ ID NO: 196766 - protein, 622 aa, Zea Mays
MFFSFVWRYVLSDLPSDIVVHVDDARFYLHKFPLLSKSGLLQRLIVEASQNGSDEVAIQDVPGGAKTFEICAKFCYGMVVTLNAYNVVAARCAAEYLGMTEDVEKSNLVFKIEVFLSSGIFRSWKDSIIALQTTDALLPWSEELKLVGRCVDSVAAKATVSASNVVWSYTYNRKSASSDEIVEARRSSQAVPKDWWVEDLCELDVDLYRRVMVAVKSRGRIPSDAIGEALKAYAARWLPECCDALVDDAYSGAYKHLLETIVWLLPSDKGSSGISCRFFLKLLKFTVLVGAGELLKEELMDRTVLQLHKASVSDLLIPSRPPAQTVYDVQLVQTLIGRYMSHAGVSQGGIFLNDLDQEMFETNVDGESLLALCKLVDRYLAEVASDPNLSVSSFVDLATSMPETARPTHDGLYTAIDVYLKLHPGLPKMEKRKISNLMDVRKLSKGACIHAAQNDRLPLRVVVQVLFFEQLRAAGAAAAAGTPSASVARCIARLAEQEEEEERWNDGRALPEPPTPGALKRQLGSLKLQGDHHQGAGDDGRRLVARSNSVANQSSRMSLSSRSRRIFDRLWVGGAKLPGEAAAAGKGSSDTSGSSQSPRSSAKPPESKSSSSSSRNRRYSVS

SEQ ID NO: 196767 - protein, 616 aa, Zea Mays
MRYVLSDLPSDIVVHVDDARFYLHKFPLLSKSGLLQRLIVEASQNGSDEVAIQDVPGGAKTFEICAKFCYGMVVTLNAYNVVAARCAAEYLGMTEDVEKSNLVFKIEVFLSSGIFRSWKDSIIALQTTDALLPWSEELKLVGRCVDSVAAKATVSASNVVWSYTYNRKSASSDEIVEARRSSQAVPKDWWVEDLCELDVDLYRRVMVAVKSRGRIPSDAIGEALKAYAARWLPECCDALVDDAYSGAYKHLLETIVWLLPSDKGSSGISCRFFLKLLKFTVLVGAGELLKEELMDRTVLQLHKASVSDLLIPSRPPAQTVYDVQLVQTLIGRYMSHAGVSQGGIFLNDLDQEMFETNVDGESLLALCKLVDRYLAEVASDPNLSVSSFVDLATSMPETARPTHDGLYTAIDVYLKLHPGLPKMEKRKISNLMDVRKLSKGACIHAAQNDRLPLRVVVQVLFFEQLRAAGAAAAAGTPSASVARCIARLAEQEEEEERWNDGRALPEPPTPGALKRQLGSLKLQGDHHQGAGDDGRRLVARSNSVANQSSRMSLSSRSRRIFDRLWVGGAKLPGEAAAAGKGSSDTSGSSQSPRSSAKPPESKSSSSSSRNRRYSVS

SEQ ID NO: 196768 - protein, 347 aa, Zea Mays
MGENQGIEQVLGKLVELLSARRDEAPSSSKENIVHIEPVQKLELMPNEVKLEGVKNYLAWSRRALRLLKAKRLEGYVDGTVVEPKDKPSAEWKDWDAINSLVAAWMLSSMIPAIASTIDTIISAAEMWKALEEMYSGAGNVMLMVETEDRLHNIKQGERTVAEYVQELQCLWADVDHYDPIELPHSECVVWAKKWVEKRRVLQFLRGLNPEFEGRRASMFHQSTLPSLQEAIAAISQEESRLKVMRESPPVSSHPVFSAMRTKDARECYNCGDIGHIARNCTKPFKFNRGRGRGAARGGRGCGGRSWARANATTTKEDLEIFMENEAETKSTEQHKIPGNKNQESYT

SEQ ID NO: 196769 - protein, 89 aa, Zea Mays
MLVPGILVTIYTYCFRMAAEDSKDILKKRLPKKIREVPDCYFLPRRSWPSALAIYGAVCAASFGAGMLLEVWINKKIKEDSGIVWEMDK

SEQ ID NO: 196770 - protein, 95 aa, Zea Mays
MAHERRACLVGRRSFWHFTNAETFLLDSASPAPHRRAASSIAAAASIDPRTTRYLEPVSISTSSRLYSLFVVFRCYSLPHRLPTTLLVDRIVLSA

SEQ ID NO: 196771 - protein, 500 aa, Zea Mays
MLFYVRNSIGKSVVCKDNNAANLLKKKTSEKISSLNGIAQTNVRAQNLNGVSPFGDKTHGTIIGYSTISSKTKTIHCSKNEVKAEDAPASQNNALPSTQAPIARNDVGILPTKPMQFAVKNEEKTSSHQPAPFTNTCGEQTVVGRPLQEMEPKAGAGENTSVVSAVANDAATLSKADKLTSQPQTAPSSKPTANDSVVSNGAVLSIGCLTSGEKAMNLSESVDQANEITKALPTSQNNTAPVIAQADCGVEISSGVIMHVAVSASCNGTTEKKVNSKSKKFVRYPVVNMWLGSRHLKPGKKANRKRSKMIRRVVACKDAANLSCLSEQLTSTSSTACSETVECTSSHQKRSHASARSKDDAQSSQNKQKVDGARVGAGTSAPSCSAGVPKSDPNPSTDAKVVATQPASIRATDLMEATVPRWDDVDMPNIKVAEPQSKRKSGGYILDEWDEEYDRGKTKKVRRSKQDFGGPNPFQEEADYVSQRRTKQKSYRGKSWNKRA

SEQ ID NO: 196772 - protein, 473 aa, Zea Mays
MLFYVRNSIGKSVVCKDNNAANLLKKKTSEKISSLNGIAQTNVRAQNLNGVSPFGDKTHGTIIGYSTISSKTKTIHCSKNEVKAEDAPASQNNALPSTQAPIARNDVGILPTKPMQFAVKNEEKTSSHQPAPFTNTCGEQTVVGRPLQEMEPKAGAGENTSVVSAVANDAATLSKADKLTSQPQTAPSSKPTANVKDTATEFATLSLSKKDSVVSNGAVLSIGCLTSGEKAMNLSESVDQANEITKALPTSQNNTAPVIAQADCGVEISSGVIMHVAVSASCNGTTEKKVNSKSKKFVRYPVVNMWLGSRHLKPGKKANRKRSKMIRRVVACKDAANLSCLSEQLTSTSSTACSETVECTSSHQKRSHASARSKDDAQSSQNKQKVDGARVGAGTSAPSCSAGVPKSDPNPSTDAKVVATQPASIRATDLMEATVPRWDDVDMPNPFQEEADYVSQRRTKQKSYRGKSWNKRA

SEQ ID NO: 196773 - protein, 891 aa, Zea Mays
MAGVSMAAAPEGVLHRRIEFHLARRPHGSVAVGGGGFRMETLNPDAAGKVGPGEAVGSSEGDARRPEKGDSGGIDPELSVARIYLGRIGAGLENLGNTCYLNSVLQCLTYTEPFAAYLQSGKHTSSCRTSGFCALCALQIHVKTALESTGKIVTPFRIVKNLRYAHELMVNLLESMHKCCLPSGVSTESQSAYDKSLVHKIFGGRLRSQVKCTRCLHCSNKFDPFLDLSLEIAKATTLVRALENFTEDELLDEGQKEYECERCRQKVVAKKRLTIDKAPNVLTIHLKRFSPFNPREKIDKKVDFQSILDLKPFVSDSKGTDFKYSLYGVLVHTGWSTQSGHYYCYVRTSSGMWHNLDDKEVRQVREADVLKQKAYMLFYVRNSIGKSVVCKDNNAANLLKKKTSEKISSLNGIAQTNVRAQNLNGVSPFGDKTHGTIIGYSTISSKTKTIHCSKNEVKAEDAPASQNNALPSTQAPIARNDVGILPTKPMQFAVKNEEKTSSHQPAPFTNTCGEQTVVGRPLQEMEPKAGAGENTSVVSAVANDAATLSKADKLTSQPQTAPSSKPTANVKDTATEFATLSLSKKDSVVSNGAVLSIGCLTSGEKAMNLSESVDQANEITKALPTSQNNTAPVIAQADCGVEISSGVIMHVAVSASCNGTTEKKVNSKSKKFVRYPVVNMWLGSRHLKPGKKANRKRSKMIRRVVACKDAANLSCLSEQLTSTSSTACSETVECTSSHQKRSHASARSKDDAQSSQNKQKVDGARVGAGTSAPSCSAGVPKSDPNPSTDAKVVATQPASIRATDLMEATVPRWDDVDMPNIKVAEPQSKRKSGGYILDEWDEEYDRGKTKKVRRSKQDFGGPNPFQEEADYVSQRRTKQKSYRGKSWNKRA

SEQ ID NO: 196774 - protein, 540 aa, Zea Mays
MWHNLDDKEVRQVREADVLKQKAYMLFYVRNSIGKSVVCKDNNAANLLKKKTSEKISSLNGIAQTNVRAQNLNGVSPFGDKTHGTIIGYSTISSKTKTIHCSKNEVKAEDAPASQNNALPSTQAPIARNDVGILPTKPMQFAVKNEEKTSSHQPAPFTNTCGEQTVVGRPLQEMEPKAGAGENTSVVSAVANDAATLSKADKLTSQPQTAPSSKPTANVKDTATEFATLSLSKKDSVVSNGAVLSIGCLTSGEKAMNLSESVDQANEITKALPTSQNNTAPVIAQADCGVEISSGVIMHVAVSASCNGTTEKKVNSKSKKFVRYPVVNMWLGSRHLKPGKKANRKRSKMIRRVVACKDAANLSCLSEQLTSTSSTACSETVECTSSHQKRSHASARSKDDAQSSQNKQKVDGARVGAGTSAPSCSAGVPKSDPNPSTDAKVVATQPASIRATDLMEATVPRWDDVDMPNIKVAEPQSKRKSGGYILDEWDEEYDRGKTKKVRRSKQDFGGPNPFQEEADYVSQRRTKQKSYRGKSWNKRA

SEQ ID NO: 196775 - protein, 512 aa, Zea Mays
MIKSIGKSVVCKDNNAANLLKKKTSEKISSLNGIAQTNVRAQNLNGVSPFGDKTHGTIIGYSTISSKTKTIHCSKNEVKAEDAPASQNNALPSTQAPIARNDVGILPTKPMQFAVKNEEKTSSHQPAPFTNTCGEQTVVGRPLQEMEPKAGAGENTSVVSAVANDAATLSKADKLTSQPQTAPSSKPTANVKDTATEFATLSLSKKDSVVSNGAVLSIGCLTSGEKAMNLSESVDQANEITKALPTSQNNTAPVIAQADCGVEISSGVIMHVAVSASCNGTTEKKVNSKSKKFVRYPVVNMWLGSRHLKPGKKANRKRSKMIRRVVACKDAANLSCLSEQLTSTSSTACSETVECTSSHQKRSHASARSKDDAQSSQNKQKVDGARVGAGTSAPSCSAGVPKSDPNPSTDAKVVATQPASIRATDLMEATVPRWDDVDMPNIKVAEPQSKRKSGGYILDEWDEEYDRGKTKKVRRSKQDFGGPNPFQEEADYVSQRRTKQKSYRGKSWNKRA

SEQ ID NO: 196776 - protein, 111 aa, Zea Mays
MPSPSSSARGVTQLTNAREGVRWEREQSAAMRRAVRAAALGTSSTTPYGLGNQAGDLRGVAVDSSGTATGESENWGTANRSPDVWRAHQITVRRGPVSAPPDCRRASHRGI

SEQ ID NO: 196777 - protein, 691 aa, Zea Mays
MLLGAAAARMEEKRVITGRERDQFPVGMRVLAVDDDPVCLKVLETLLRRCQYHVITTNQAITALKLLRENRDMFDLVISDVHMPDMDGFKLLELVGLEMDLPVIMLSVNGETKSVMKGITHGACDYLLKPVRIEELRNIWQHVVRRKFSKRERSNLDVYKDFNRLPGADPCHSHGHGHGQTTAGASDQSGRIGRKRKEMHSDEEDDGEENDFQEGDEPSAAKKPRVVWSIELHRKFVAAVNQLGIDKAVPKRILELMNVEKLTRENVASHLQKYRLYLKRLSAVASQQASIVAAFGGRDPFLHMGAFEGLQSYQPFAPCAALSSFIPHHGSLGRTTAAAFGVPELAPAITVQAAASNGMISHCAGDASKFQLSGIQENQQPNLGQGSATSLGLPQLQQKWIQQETGDLSAVFSGSALANTLSGALQRVASSPLPPQELLEGVQTKVSAQPPITMASVSSELVERTVGVSANLQDSGISPQGTLPINDGFTADKLQLQDPFDSNGGTNFSVNMPVCPSGSLTASSNAKGGASSCSPVLLAPDTGRHSNYLQFGVAGNSGHDMNDIKQDHLHQGLSTGGFNHDFGTCMTEQTDPNVPYLMPQMKPNTLSSEDKLKQRNIYDLGIPKLHGGFSSSSCNFDGLLNSMIKAVWTFSCHSYFCLFLERKLLQLFYMIFLKKINLYYYVQCFFGSLYS

SEQ ID NO: 196778 - protein, 180 aa, Zea Mays
MAGSAKKIYDAAAGAPEGHSVVLLAHNGPTGLGSRMDDICGRDWVPGGGDHGDPDLERAISDLQREARVSIPLVVFGHMHKSLAYGRGLRKMIAFGANHIIYLNGAVVPRVKFAQTTPGHEQNQPEGSGSRAPTLRAFTIADLYEGRVEKISEVWVLVSGARTEVEEEIVLYKHPREQHM

SEQ ID NO: 196779 - protein, 224 aa, Zea Mays
MVLRSCSPSSWSAAGAAVATRASANPPPPRPSSPPSRPSRRAMDSAAGAGRHRVRIAVVGDVHNDWALEEDSKALRFLQPDLVLFTGDYGNENVELVRSISDLQLPKAAILGNHDCWHTHQFSEKKVDRVRLQLASLGEQHVGYKCLDFPSIKLSVVGGRPFSCGGDRLLRPRLLSKCYGVNDMAGSAKKIYDAAAGAPEGHSVVLLAHNGPTGQDLIEQISEV

SEQ ID NO: 196780 - protein, 171 aa, Zea Mays
MKQMKKKVGSHNIHVQRYGYAGLGSRMDDICGRDWVPGGGDHGDPDLERAISDLQREARVSIPLVVFGHMHKSLAYGRGLRKMIAFGANHIIYLNGAVVPRVKFAQTTPGHEQNQPEGSGSRAPTLRAFTIADLYEGRVEKISEVWVLVSGARTEVEEEIVLYKHPREQHM

SEQ ID NO: 196781 - protein, 352 aa, Zea Mays
MVLRSCSPSSWSAAGAAVATRASANPPPPRPSSPPSRPSRRAMDSAAGAGRHRVRIAVVGDVHNDWALEEDSKALRFLQPDLVLFTGDYGNENVELVRSISDLQLPKAAILGNHDCWHTHQFSENLGEQHVGYKCLDFPSIKLSVVGGRPFSCGGDRLLRPRLLSKCYGVNDMAGSAKKIYDAAAGAPEGHSVVLLAHNGPTGLGSRMDDICGRDWVPGGGDHGDPDLERAISDLQREARVSIPLVVFGHMHKSLAYGRGLRKMIAFGANHIIYLNGAVVPRVKFAQTTPGHEQNQPEGSGSRAPTLRAFTIADLYEGRVEKISEVWVLVSGARTEVEEEIVLYKHPREQHM

SEQ ID NO: 196782 - protein, 227 aa, Zea Mays
MGSSAAGSTPTARQQRGAGVDAGAAPSSSSPVFLNVYDVTPANGYARWLGLGVYHSGVQVHGVEYAYGAHDGASSGIFEVVPRRCPGYAFRESVAVGATELSRGEVRALMAELAAEFPGDAYNLVSRNCNHFCDAACRRLVARARIPRWVNRLAKIGVAFTCVIPGNGRAARPPSAASRSRSRSAPPRPRTFFRTFSVGPRRNMTAPSPPAHASASTSSGSTTAGRR

SEQ ID NO: 196783 - protein, 81 aa, Zea Mays
MSGSTKSSTLRAQHITFPFFLPSFLTTSPLHPGGDSRPPHQLLRLGQRWLQGGRDHDAEWNSQQCREIPANKVRTTSPVSL

SEQ ID NO: 196784 - protein, 69 aa, Zea Mays
MSGSTKSSTLRAQHITFPFFLPSFLTTSPLHPGGDSRPPHQLLRLGQRWLQGGRDHDAEWNSQQRDSCK

SEQ ID NO: 196785 - protein, 101 aa, Zea Mays
MNWNPTAQTFQWEESGPECSESSLRRPPLPIVPVSPLAPRVKKNGRRKARRWCLLEEETLRKGVEQYGRGNWKEILDNNPDVFIGRTPVDLKDKWRNMIIR

SEQ ID NO: 196786 - protein, 1226 aa, Zea Mays
MASASRGTGVAPAGEPGSPRAWGGEDEACRARKVKLMCSYGGRIAPRPGDGALRYVGGQTRLISAPRAASFADLLRKVEAVDEASASSGGGVVLRYQLPGDDLDSLISVSGPEDYDNMMEEYEKLAAAAPDGSAKLRVFLFPASGADAGPHLAAVVDESGQRYIDAINCVSTEAIATATAMRRKDGVASAGSSAHNSEAAEYSGLVESTSPRAVPPPASVATEYSYSGGAHYLRAFPESVGLTAVSASPLAMGIPAQNPILVRTEQSTLPPHQVAAVYAAATQHQPPQVTTYVQEQQQQQPQGTHYVPQQQPQSAAYVQQMPQSYIEPQQVHYINAQQFGVHGVPQSVNYVPVQMSQFMPNIPVTGSMATTAAQVGKLKPASAGVEPVPETTQFTRPVQAQVDQSYRVVHTPLSQLPPLSSVHLQTNDAQRQKFGAQQAMTSAVSMPVVTSSGTIPVVVSSATVPSLRYDGCTMCQKALPHAHSDNTIREQGSSCAMGNLEAAPMFYSPHQGTASNKSNPGASSGTLTNYVAEPRAGNTAVMAQFDSTLPARKPAVQATAYADTVVPVQPTIIAFPVSSAPAPKGVFVGHSPSAGAEDHVRYQQQPFSYSMQPPLVPVNVPQGIGASAYKDSNHAAVEPLREYARDLPHDYARAIDARMHAVHLGPIAPPESSVQGNPSIPHVVIDHAKVGKPPVNNDVTSFCKSQAGGYHMGITNAFTAPVLTQEDNIARHSEQPPCDFDVGAQNVQPDIIQRPPLNLPVQSNLRVPIEPPVSNEKFTVQPSNSGAQLPAGPPLQHPKEMPNHLDPWKAVGNASLVPPRPSKLTKEPVVSGGQYADGHMPDMNTHAALLFEEDPSLKDIHTVKLNKGFGKANIKRQLQDVAEGVAASVLQPSFPEKPAAFSGDHIDSHGAVIDVKVQGEGNNQSDKTSQGIQVLDDIDKLQIIKNSDLEELRELGSGTIGTVYHGKWRGSDVAIKRINERCFAGKASEQERMRTDFWNEADKLASLHHPNVVALYGVVLDGPGGSVATVTEYMANGSLRQALQRHEKIFDRRRRLLIAMDVAFGMEYLHGKNIVHFDLNSDNLLVNLRYPQRPICKVGDLGLSKVKCQTLISGGVRGTLPWMAPELLNGSSSLVSEKVDVFSFGIVMWELLTGEEPYAELHYGAIIGGIVNNTLRPPVPESCDPQWRSLMEQCWSAEPSARPSFTEVGTNLRAMAAAPTKAQQSK

SEQ ID NO: 196787 - protein, 1003 aa, Zea Mays
MASASRGTGVAPAGEPGSPRAWGGEDEACRARKVKLMCSYGGRIAPRPGDGALRYVGGQTRLISAPRAASFADLLRKVEAVDEASASSGGGVVLRYQLPGDDLDSLISVSGPEDYDNMMEEYEKLAAAAPDGSAKLRVFLFPASGADAGPHLAAVVDESGQRYIDAINCVSTEAIATATAMRRKDGVASAGSSAHNSEAAEYSGLVESTSPRAVPPPASVATEYSYSGGAHYLRAFPESVGLTAVSASPLAMGIPAQNPILVRTEQSTLPPHQVAAVYAAATQHQPPQVTTYVQEQQQQQPQGTHYVPQQQPQSAAYVQQMPQSYIEPQQVHYINAQQFGVHGVPQSVNYVPVQMSQFMPNIPVTGSMATTAAQVGKLKPASAGVEPVPETTQFTRPVQAQVDQSYRVVHTPLSQLPPLSSVHLQTNDAQRQKFGAQQAMTSAVSMPVVTSSGTIPVVVSSATVPSLRYDGCTMCQKALPHAHSDNTIREQGSSCAMGNLEAAPMFYSPHQGTASNKSNPGASSGTLTNYVAEPRAGNTAVMAQFDSTLPARKPAVQATAYADTVVPVQPTIIAFPVSSAPAPKGVFVGHSPSAGAEDHVRYQQQPFSYSMQPPLVPVNVPQGIGASAYKDSNHAAVEPLREYARDLPHDYARAIDARMHAVHLGPIAPPESSVQGNPSIPHVVIDHAKVGKPPVNNDVTSFCKSQAGGYHMGITNAFTAPVLTQEDNIARHSEQPPCDFDVGAQNVQPDIIQRPPLNLPVQSNLRVPIEPPVSNEKFTVQPSNSGAQLPAGPPLQHPKEMPNHLDPWKAVGNASLVPPRPSKLTKEPVVSGGQYADGHMPDMNTHAALLFEEDPSLKDIHTVKLNKGFGKANIKRQLQDVAEGVAASVLQPSFPEKPAAFSGDHIDSHGAVIDVKVQGEGNNQSDKTSQGIQVLDDIDKLQIIKNSDLEELRELGSGTIGTVYHGKWRGSDVAIKRINERCFAGKASEQERMTSLHLCTIQT

SEQ ID NO: 196788 - protein, 1108 aa, Zea Mays
MASASRGTGVAPAGEPGSPRAWGGEDEACRARKVKLMCSYGGRIAPRPGDGALRYVGGQTRLISAPRAASFADLLRKVEAVDEASASSGGGVVLRYQLPGDDLDSLISVSGPEDYDNMMEEYEKLAAAAPDGSAKLRVFLFPASGADAGPHLAAVVDESGQRYIDAINCVSTEAIATATAMRRKDGVASAGSSAHNSEAAEYSGLVESTSPRAVPPPASVATEYSYSGGAHYLRAFPESVGLTAVSASPLAMGIPAQNPILVRTEQSTLPPHQVAAVYAAATQHQPPQVTTYVQEQQQQQPQGTHYVPQQQPQSAAYVQQMPQSYIEPQQVHYINAQQFGVHGVPQSVNYVPVQMSQFMPNIPVTGSMATTAAQVGKLKPASAGVEPVPETTQFTRPVQAQVDQSYRVVHTPLSQLPPLSSVHLQTNDAQRQKFGAQQAMTSAVSMPVVTSSGTIPVVVSSATVPSLRYDGCTMCQKALPHAHSDNTIREQGSSCAMGNLEAAPMFYSPHQGTASNKSNPGASSGTLTNYVAEPRAGNTAVMAQFDSTLPARKPAVQATAYADTVVPVQPTIIAFPVSSAPAPKGVFVGHSPSAGAEDHVRYQQQPFSYSMQPPLVPVNVPQGIGASAYKDSNHAAVEPLREYARDLPHDYARAIDARMHAVHLGPIAPPESSVQGNPSIPHVVIDHAKVGKPPVNNDVTSFCKSQAGGYHMGITNAFTAPVLTQEDNIARHSEQPPCDFDVGAQNVQPDIIQRPPLNLPVQSNLRVPIEPPVSNEKFTVQPSNSGAQLPAGPPLQHPKEMPNHLDPWKAVGNASLVPPRPSKLTKEPVVSGGQYADGHMPDMNTHAALLFEEDPSLKDIHTVKLNKGFGKANIKRQLQDVAEGVAASVLQPSFPEKPAAFSGDHIDSHGAVIDVKVQGEGNNQSDKTSQGIQVLDDIDKLQIIKNSDLEELRELGSGTIGTVYHGKWRGSDVAIKRINERCFAGKASEQERMRTDFWNEADKLASLHHPNVVALYGVVLDGPGGSVATVTEYMANGSLRQALQRHENRIFDRRRRLLIAMDVAFGMEYLHGKNIVHFDLNSDNLLVNLRLVIWDYQRSNARHLSLVE

SEQ ID NO: 196789 - protein, 1227 aa, Zea Mays
MASASRGTGVAPAGEPGSPRAWGGEDEACRARKVKLMCSYGGRIAPRPGDGALRYVGGQTRLISAPRAASFADLLRKVEAVDEASASSGGGVVLRYQLPGDDLDSLISVSGPEDYDNMMEEYEKLAAAAPDGSAKLRVFLFPASGADAGPHLAAVVDESGQRYIDAINCVSTEAIATATAMRRKDGVASAGSSAHNSEAAEYSGLVESTSPRAVPPPASVATEYSYSGGAHYLRAFPESVGLTAVSASPLAMGIPAQNPILVRTEQSTLPPHQVAAVYAAATQHQPPQVTTYVQEQQQQQPQGTHYVPQQQPQSAAYVQQMPQSYIEPQQVHYINAQQFGVHGVPQSVNYVPVQMSQFMPNIPVTGSMATTAAQVGKLKPASAGVEPVPETTQFTRPVQAQVDQSYRVVHTPLSQLPPLSSVHLQTNDAQRQKFGAQQAMTSAVSMPVVTSSGTIPVVVSSATVPSLRYDGCTMCQKALPHAHSDNTIREQGSSCAMGNLEAAPMFYSPHQGTASNKSNPGASSGTLTNYVAEPRAGNTAVMAQFDSTLPARKPAVQATAYADTVVPVQPTIIAFPVSSAPAPKGVFVGHSPSAGAEDHVRYQQQPFSYSMQPPLVPVNVPQGIGASAYKDSNHAAVEPLREYARDLPHDYARAIDARMHAVHLGPIAPPESSVQGNPSIPHVVIDHAKVGKPPVNNDVTSFCKSQAGGYHMGITNAFTAPVLTQEDNIARHSEQPPCDFDVGAQNVQPDIIQRPPLNLPVQSNLRVPIEPPVSNEKFTVQPSNSGAQLPAGPPLQHPKEMPNHLDPWKAVGNASLVPPRPSKLTKEPVVSGGQYADGHMPDMNTHAALLFEEDPSLKDIHTVKLNKGFGKANIKRQLQDVAEGVAASVLQPSFPEKPAAFSGDHIDSHGAVIDVKVQGEGNNQSDKTSQGIQVLDDIDKLQIIKNSDLEELRELGSGTIGTVYHGKWRGSDVAIKRINERCFAGKASEQERMRTDFWNEADKLASLHHPNVVALYGVVLDGPGGSVATVTEYMANGSLRQALQRHENRIFDRRRRLLIAMDVAFGMEYLHGKNIVHFDLNSDNLLVNLRYPQRPICKVGDLGLSKVKCQTLISGGVRGTLPWMAPELLNGSSSLVSEKVDVFSFGIVMWELLTGEEPYAELHYGAIIGGIVNNTLRPPVPESCDPQWRSLMEQCWSAEPSARPSFTEVGTNLRAMAAAPTKAQQSK

SEQ ID NO: 196790 - protein, 1020 aa, Zea Mays
MASASRGTGVAPAGEPGSPRAWGGEDEACRARKVKLMCSYGGRIAPRPGDGALRYVGGQTRLISAPRAASFADLLRKVEAVDEASASSGGGVVLRYQLPGDDLDSLISVSGPEDYDNMMEEYEKLAAAAPDGSAKLRVFLFPASGADAGPHLAAVVDESGQRYIDAINCVSTEAIATATAMRRKDGVASAGSSAHNSEAAEYSGLVESTSPRAVPPPASVATEYSYSGGAHYLRAFPESVGLTAVSASPLAMGIPAQNPILVRTEQSTLPPHQVAAVYAAATQHQPPQVTTYVQEQQQQQPQGTHYVPQQQPQSAAYVQQMPQSYIEPQQVHYINAQQFGVHGVPQSVNYVPVQMSQFMPNIPVTGSMATTAAQVGKLKPASAGVEPVPETTQFTRPVQAQVDQSYRVVHTPLSQLPPLSSVHLQTNDAQRQKFGAQQAMTSAVSMPVVTSSGTIPVVVSSATVPSLRYDGCTMCQKALPHAHSDNTIREQGSSCAMGNLEAAPMFYSPHQGTASNKSNPGASSGTLTNYVAEPRAGNTAVMAQFDSTLPARKPAVQATAYADTVVPVQPTIIAFPVSSAPAPKGVFVGHSPSAGAEDHVRYQQQPFSYSMQPPLVPVNVPQGIGASAYKDSNHAAVEPLREYARDLPHDYARAIDARMHAVHLGPIAPPESSVQGNPSIPHVVIDHAKVGKPPVNNDVTSFCKSQAGGYHMGITNAFTAPVLTQEDNIARHSEQPPCDFDVGAQNVQPDIIQRPPLNLPVQSNLRVPIEPPVSNEKFTVQPSNSGAQLPAGPPLQHPKEMPNHLVCALPNRSSKFQLQATVGIDRVEATQEPAYTDSLFSNQDPWKAVGNASLVPPRPSKLTKEPVVSGGQYADGHMPDMNTHAALLFEEDPSLKDIHTVKLNKGFGKANIKRQLQDVAEGVAASVLQPSFPEKPAAFSGDHIDSHGAVIDVKVQGIQVLDDIDKLQIIKNSDLEELRELGSGTIGTVYHGKWRGSDVAIKRINERCFAGKASEQERMV

SEQ ID NO: 196791 - protein, 158 aa, Zea Mays
MILATSTVSTFVKYIFYVSDMLMEGQWEKKAVYTFYLVRELYVTFRNFRIRIADYVRYRKITSNMNERFPDATSEELDVSDATCIICREEMATAKKLLDGHLFHVHCLRETGEQAEEEVPLRLLHGSFSSTGRILSTGTVPCCLPQCASSVEGAQDDV

SEQ ID NO: 196792 - protein, 134 aa, Zea Mays
MILATSTVSTFVKYIFYVSDMLMEGQWEKKAVYTFYLVRELYVTFRNFRIRIADYVRYRKITSNMNERFPDATSEELDVETGEQAEEEVPLRLLHGSFSSTGRILSTGTVPCCLPQCARPHFAINHEDLTLLFP

SEQ ID NO: 196793 - protein, 67 aa, Zea Mays
MFLHIKFMVFFSYCLSSENGPGCKPYCFVRLSCSLLTVFTQPIAIGQHERNSKPETAMQFSNSSKGS

SEQ ID NO: 196794 - protein, 82 aa, Zea Mays
MADESWRIPMLVQELAAKVQQPPSRYMQPEQYHPVSLDVGAETLEPIPVIDLSRLSTAGGADDDESGKLRLALQTWGALPGC

SEQ ID NO: 196795 - protein, 233 aa, Zea Mays
MESAGGEARPVLPPPPPPVQELAGAANDVPARYVARAGNEPKVTVTAPVPVIDLARLCQPGGGADEASKLRLALESWGLFLVTNHGIEATLMDAMMDASREFFRQPLQEKQKHSNMIDGKHFQLQGYGNDRVASEDQVLDWCDRLYLLVEPQEDRSLDLWPACLRDVLHDFTTECTRVKDCLLREMAKALDELGDDDDYFIDQFGDRADTHARFSGTEPGTTCAPDLTPCSSI

SEQ ID NO: 196796 - protein, 324 aa, Zea Mays
MESAGGEARPVLPPPPPPVQELAGAANDVPARYVARAGNEPKVTVTAPVPVIDLARLCQPGGGADEASKLRLALESWGLFLVTNHGIEATLMDAMMDASREFFRQPLQEKQKHSNMIDGKHFQLQGYGNDRVASEDQVLDWCDRLYLLVEPQEDRSLDLWPACLRDVLHDFTTECTRVKDCLLREMAKALDELGDDDDYFIDQFGDRADTHASVGGLQVFRDGAWYDVRTRPHTLLVNLGDQIEIISNGIFKSPVHRVVTNAEKERLSVVLFYSIDPEREIRPADKLIDENHPALYKKVKVKEYTAGLYEHFSRGKLVKETAKI

SEQ ID NO: 196797 - protein, 197 aa, Zea Mays
METLASAMRRENRRSKAPPSSSASSALASGRVPLVMAFLSCLAWLYVAGRLWQDAQTRAILSGLLEKSSTSVPKVLSVEDKLRNLGCKAIGRKIVEAEMDLTKAKSEGYLWGNRTAAVDSDKKQQLLAVIGVYTGFGSRLKRNVFRGSWMPRGDALKKLEEKGVAIRFVIGRSANRGDSLDRNIDDENRQTKDFLIL

SEQ ID NO: 196798 - protein, 174 aa, Zea Mays
METLASAMRRENRRSKAPPSSSASSALASGRVPLVMAFLSCLAWLYVAGRLWQDAQTRAILSGLLEKSSTSVPKVLSVEDKLRNLGCKAIGRKIVEAEMDLTKAKSEGYLWGNRTAAVDSDKKQQLLAVIGVYTGFGSRLKRNVFRGSWMPRVQIEVIAWTVILMMKIGRQRTS

SEQ ID NO: 196799 - protein, 321 aa, Zea Mays
METLASAMRRENRRSKAPPSSSASSALASGRVPLVMAFLSCLAWLYVAGRLWQDAQTRAILSGLLEKSSTSVPKVLSVEDKLRNLGCKAIGRKIVEAEMDLTKAKSEGYLWGNRTAAVDSDKKQQLLAVIGVYTGFGSRLKRNVFRGSWMPRGDALKKLEEKGVAIRFVIGRSANRGDSLDRNIDDENRQTKDFLILESHEEAAEELPSKAKIFFSAAVEAWDAEFYVKVEDNINLDLAGLIEMLEGRRGSQGLYMGCMKSGMVISEEGQQWYEPEWWKFGDSKTYFRHASGSLFILSKNLARYININRFMDDGTECNLRG

SEQ ID NO: 196800 - protein, 317 aa, Zea Mays
METLASAMRRENRRSKAPPSSSASSALASGRVPLVMAFLSCLAWLYVAGRLWQDAQTRAILSGLLEKSSTSVPKVLSVEDKLRNLGCKAIGRKIVEAEMDLTKAKSEGYLWGNRTAAVDSDKKQQLLAVIGVYTGFGSRLKRNVFRGSWMPRGDALKKLEEKGVAIRFVIGRSANRGDSLDRNIDDENRQTKDFLILESHEEAAEELPSKAKIFFSAAVEAWDAEFYVKVEDNINLDLAGLIEMLEGRRGSQGLYMGCMKSGMVISEEGQQWYEPEWWKFGDSKTYFRHASGSLFILSKNLARYININRVMHTMIYQ

SEQ ID NO: 196801 - protein, 182 aa, Zea Mays
MKLSKDVRNQLCQIIQKIAKGSTDVDARKSRKNDPDYRKLRRALCVGYGNQLAERMLHHNGYHTVGYRTQLVQVHPSSVLEGDEYGKFPMYVIYHELISTTRPYMRNVCAVEQAWVQPILKKLDKLDINRLSGGSSAPGDSELLGDNKQVNSSKNDVGVKQSEVDSKIQAARERYLARKGKK

SEQ ID NO: 196802 - protein, 538 aa, Zea Mays
MSIVPCDVCVCEFSMDRDPWAKFRRPNSEHPAQSEETRTHQHPGVAGARRPNAMPSPSPAPPPVLPISEHEDEIVAAVDANPVVVVIGETGSGKSTQLSQILHRRGYTRRGAIAVTQPRRVAAVSVSRRVAQELGVPLGDEVGYAIRFEDRTSERTCIKYLTDGILLRESLSNPELKQYSVIILDEAHERSLNTDILLGLMKRLIKDRASDLKVLITSATLDGLKVSKFFSGCPVLNIPGTLFPVEKFYSTDRPTNYIESSLRTAIDIHAKEPPGDVLIFMTGKDDIDKMVSKLEERIRNLEEGSCIDALVLPLHGSLPPELQVRVFAPAPPNCRRFIVATNVAETSLTVDGVVFVIDCGYVKQRQYNPSSGMYSLDVVQISRVQADQRAGRAGRTRPGKCYRLYPISIYQNEFLEATVPEIQRSSLAGSVLYLKSLNLPDINILKFDFLDPPSRESLEDALRQLYLIDAIDENGQITDVGRVMAELPLEPSLSRTLIEANELGCLSQALTVASILSAEITLRSQGRGGWKEEKAGAP

SEQ ID NO: 196803 - protein, 283 aa, Zea Mays
MSIVPCDVCVCEFSMDRDPWAKFRRPNSEHPAQSEETRTHQHPGVAGARRPNAMPSPSPAPPPVLPISEHEDEIVAAVDANPVVVVIGETGSGKSTQLSQILHRRGYTRRGAIAVTQPRRVAAVSVSRRVAQELGVPLGDEVGYAIRFEDRTSERTCIKYLTDGILLRESLSNPELKQYSVIILDEAHERSLNTDILLGLMKRLIKDRASDLKVLITSATLDGLKVSKFFSGCPVLNIPGTLFPVEKFYSTDRPTNYIESSLRTAIENDCCQISMPRNLLEMS

SEQ ID NO: 196804 - protein, 759 aa, Zea Mays
MSIVPCDVCVCEFSMDRDPWAKFRRPNSEHPAQSEETRTHQHPGVAGARRPNAMPSPSPAPPPVLPISEHEDEIVAAVDANPVVVVIGETGSGKSTQLSQILHRRGYTRRGAIAVTQPRRVAAVSVSRRVAQELGVPLGDEVGYAIRFEDRTSERTCIKYLTDGILLRESLSNPELKQYSVIILDEAHERSLNTDILLGLMKRLIKDRASDLKVLITSATLDGLKVSKFFSGCPVLNIPGTLFPVEKFYSTDRPTNYIESSLRTAIDIHAKEPPGDVLIFMTGKDDIDKMVSKLEERIRNLEEGSCIDALVLPLHGSLPPELQVRVFAPAPPNCRRFIVATNVAETSLTVDGVVFVIDCGYVKQRQYNPSSGMYSLDVVQISRVQADQRAGRAGRTRPGKCYRLYPISIYQNEFLEATVPEIQRSSLAGSVLYLKSLNLPDINILKFDFLDPPSRESLEDALRQLYLIDAIDENGQITDVGRVMAELPLEPSLSRTLIEANELGCLSQALTVASILSAEITLRSVSKDVVDGKRKRQELPDGSGWGDHIQLLQIFESWDQTGYDTKWCSHHDLQVRGMKLSKDVRNQLCQIIQKIAKGSTDVDARKSRKNDPDYRKLRRALCVGYGNQLAERMLHHNGYHTVGYRTQLVQVHPSSVLEGDEYGKFPMYVIYHELISTTRPYMRNVCAVEQAWVQPILKKLDKLDINRLSGGSSAPGDSELLGDNKQVNSSKNDVGVKQSEVDSKIQAARERYLARKGKK

SEQ ID NO: 196805 - protein, 497 aa, Zea Mays
MSIVPCDVCVCEFSMDRDPWAKFRRPNSEHPAQSEETRTHQHPGVAGARRPNAMPSPSPAPPPVLPISEHEDEIVAAVDANPVVVVIGETGSGKSTQLSQILHRRGYTRRGAIAVTQPRRVAAVSVSRRVAQELGVPLGDEVGYAIRFEDRTSERTCIKYLTDGILLRESLSNPELKQYSVIILDEAHERSLNTDILLGLMKRLIKDRASDLKVLITSATLDGLKVSKFFSGCPVLNIPGTLFPVEKFYSTDRPTNYIESSLRTAIDIHAKEPPGDVLIFMTGKDDIDKMVSKLEERIRNLEEGSCIDALVLPLHGSLPPELQVRVFAPAPPNCRRFIVATNVAETSLTVDGVVFVIDCGYVKQRQYNPSSGMYSLDVVQISRVQADQRAGRAGRTRPGKCYRLYPISIYQNEFLEATVPEIQRSSLAGSVLYLKSLNLPDINILKFDFLDPPSRESLEDALRQLYLIDAIDENGQITDVGRVMADYDNRSVWWDFH

SEQ ID NO: 196806 - protein, 272 aa, Zea Mays
MSIVPCDVCVCEFSMDRDPWAKFRRPNSEHPAQSEETRTHQHPGVAGARRPNAMPSPSPAPPPVLPISEHEDEIVAAVDANPVVVVIGETGSGKSTQLSQILHRRGYTRRGAIAVTQPRRVAAVSVSRRVAQELGVPLGDEVGYAIRFEDRTSERTCIKYLTDGILLRESLSNPELKQYSVIILDEAHERSLNTDILLGLMKRLIKDRASDLKVLITSATLDGLKVSKFFSGCPVLNIPGTLFPVEKFYSTDRPTNYIESSLRTAIGFGCCT

SEQ ID NO: 196807 - protein, 73 aa, Zea Mays
MSSKLLRLVAVEFSMMGKDVRLRWRNSATVRARWSIVQWLALCQACLTASTTLFYIQDRTSRLPVHAATASPC

SEQ ID NO: 196808 - protein, 292 aa, Zea Mays
MDPKAENPNEMVTAGVLSSLQNFLRKCLIAILSYGPMPKHIAFIMDGNRRYAKFRSMQEGAGHRMGFSTLIASLMYCYEMGVKYITVYAFSIDNFKRDPSEVESLMQLMEEKINELLENRSVINKINCKINFWGNLDLLYEPVRLAAEKLMASTAGNTGLVFSICMPYNSTSEIVNAVSQVCAERMEMFQSEHIGECNGHAANNGVRSEISVADLDRHMYSAECPDPDIVIRTSGETRLSNFLLWQTTFSHLQNPDPLWPEFSFRHLVWAVLQYQRVYPALEHNRKLAKKQL

SEQ ID NO: 196809 - protein, 154 aa, Zea Mays
MASSSTLDLAMGPGALLPRSAVPYASFAPGRGRSASGTRSRNLALSASSSNGAAVPSLTTDSEKKGPVIMEIPLDQIRRPLMRTRANDPVKVQELMDSIRVIGLQVPFLDYCRLMCWRSMGSIMASLDATATRLTSALVSQPSAAKFAVGQRKH

SEQ ID NO: 196810 - protein, 76 aa, Zea Mays
MIQTRFYITGYNTHYTTIHPTIPYNTLLLLLLHPYSCLPSVLAASSSGVGVQTSTNLKEGGGSKRSNSPPSARPAT

SEQ ID NO: 196811 - protein, 75 aa, Zea Mays
MTGYLTLTGRKWAIFVSRSMITQMESKPFAVLGNPTIKSILMSSHFHVGIGKDCNGPAVFMCMALTRLQVSHLAT

SEQ ID NO: 196812 - protein, 101 aa, Zea Mays
MCFLYPMWLNRGNKRVMFTKMSNTRSSSYPLLNIAEDGVHGMISLNCLVDSWVWRPWNLFIFLILIMGISPLIIAFLLRWLNFLIFSFIILSLILILSWWR

SEQ ID NO: 196813 - protein, 701 aa, Zea Mays
MPRVPLSAGRPTARRRSAHNPSCFTLAPRATPPTRFRAARRVRQHDRAPKLDPTSGELFALSYDMIKRPYLRYFYLRPDGGKSGGVEIPLEQPTMVHDFAVTERFVVVPDRQGNLQHEYSGNDCLQLKGHQTYTEVSSLLEHLKLCMFFSKKSFLAFLKFGGYKQEDILIHKAKARLMQSSFALVCDKRTKCLLLFIRGAISTKERLTAATSAEVPFHHIILSEGKISNVVLGKLQSEVLKDAISQIVQDANKNRKFTETVELQISLKNYEEGCGDDEGCGDGDASGKRLTKEIYARLCRSTLFDAGRKEFWIMKNKGALCISISSKAMTITRIDDRRYWSHLATGESRQVAEIASEPDRAAAYARLLLLQRGCADDASSAAELAAELPSTLLPLLLRDAAADDEAVAASALKCLGFALYHPVLVSTISAQMTQLVLDTLVHIIMSTRMKSACNLGVWCFSVQQLNPLIIEDRADPMLIAIVHALDNPFGSLSTTFEAAQAIMKLGGQSPKRMRDLSSLWVPPVYRRLLSADKAERDMVERCLIKVSCVILPPQPLLSKAVASDLEQKLLSCMVNMLDDPSKKVQTVKSWGWIVSLLGPDAVNNRPLLNKLIKVPEQMFTDLNPQVQVATMVSWKSLVDAFFPSQATEIVAQQTVISPLKPIEQGQRGFMCPSESELASSIMQAYQGLIGYSTHQMVTMGY

SEQ ID NO: 196814 - protein, 942 aa, Zea Mays
MLIAIVHALDNPFGSLSTTFEAAQAIMKLGGQSPKRMRDLSSLWVPPVYRRLLSADKAERDMVERCLIKVSCVILPPQPLLSKAVASDLEQKLLSCMVNMLDDPSKKVQTVKSWGWIVSLLGPDAVNNRPLLNKLIKVPEQMFTDLNPQVQVATMVSWKSLVDAFFPSQATEIVAQQTVISPLKPIEQASAQVKRIRLIMVPICRVLSRSRNIVLSSSCLSTWHYLLHRLGNLINYLPILEAAFGPILKIIFSFGINDQNKPLWSFCLNLFLDFVSSKNRVREDLCAPVNQNLLAQSCKHIKALLDIQHIKWLPWDISCFNFQLNILGIILKPELFQDIIPETMVIVMDSATEIFRFLLKGIQIELREQRAYEQVNECITNACKFAKRLLLDHVGKNSVIKCAALLEFGLRFMKVIAKELDHSLLASENIEVCLDIEHIKENQHAECSPKLSLPRIRSLSYMEMVSPAVYVTALSLSMISQYTGEFSHRDADELVSILDPSSDALENFHTAVSFMYMQIRRPTCNKERLKWLMVWNSFAKKMNSQIISYLETNSGLCYHDVLHQFFCYPILNFLYPKGISILLNAENSSESKFSVLQNLEMESTIEVYRSLSTNSCNSKFFSKVFFDGFYKYLVCTIDENMALFQANLEHLSEEFENASVLSALGEIVIGLLQNDQMLTYANQELKETPEDSSVCRQPELFLNCFKLANRFMKLSSFHFKANPAGQHQVTSRFFSSLSNFAGHLTLKEDVLLFEIIGDQLTEWLSLSIILYSEMQQGQIVVHLENLWLKMVECLKRSQLVSDVPLINQKHRLLQAALNRPHRPISVATASVCRVATHGNTTLHPGCLISEFAELLMHRRKALDSSRKTVITSNPTDLTAERYDGSVNVSVGLGRKRLKIMKYSTKPKELNKNRANMGISPGNTENRACRKPELILEMLQRKT

SEQ ID NO: 196815 - protein, 743 aa, Zea Mays
MVPICRVLSRSRNIVLSSSCLSTWHYLLHRLGNLINYLPILEAAFGPILKIIFSFGINDQNKPLWSFCLNLFLDFVSSKNRVREDLCAPVNQNLLAQSCKHIKALLDIQHIKWLPWDISCFNFQLNILGIILKPELFQDIIPETMVIVMDSATEIFRFLLKGIQIELREQRAYEQVNECITNACKFAKRLLLDHVGKNSVIKCAALLEFGLRFMKVIAKELDHSLLASENIEVCLDIEHIKENQHAECSPKLSLPRIRSLSYMEMVSPAVYVTALSLSMISQYTGEFSHRDADELVSILDPSSDALENFHTAVSFMYMQIRRPTCNKERLKWLMVWNSFAKKMNSQIISYLETNSGLCYHDVLHQFFCYPILNFLYPKGISILLNAENSSESKFSVLQNLEMESTIEVYRSLSTNSCNSKFFSKVFFDGFYKYLVCTIDENMALFQANLEHLSEEFENASVLSALGEIVIGLLQNDQMLTYANQELKETPEDSSVCRQPELFLNCFKLANRFMKLSSFHFKANPAGQHQVTSRFFSSLSNFAGHLTLKEDVLLFEIIGDQLTEWLSLSIILYSEMQQGQIVVHLENLWLKMVECLKRSQLVSDVPLINQKHRLLQAALNRPHRPISVATASVCRVATHGNTTLHPGCLISEFAELLMHRRKALDSSRKTVITSNPTDLTAERYDGSVNVSVGLGRKRLKIMKYSTKPKELNKNRANMGISPGNTENRACRKPELILEMLQRKT

SEQ ID NO: 196816 - protein, 1368 aa, Zea Mays
MPRVPLSAGRPTARRRSAHNPSCFTLAPRATPPTRFRAARRVRQHDRAPKLDPTSGELFALSYDMIKRPYLRYFYLRPDGGKSGGVEIPLEQPTMVHDFAVTERFVVVPDRQGNLQHEYSGNDCLQLKGHQTYTEVSSLLEHLKLCMFFSKKSFLAFLKFGGYKQEDILIHKAKARLMQSSFALVCDKRTKCLLLFIRGAISTKERLTAATSAEVPFHHIILSEGKISNVVLGKLQSEVLKDAISQIVQDANKNRKFTETVELQISLKNYEEGCGDDEGCGDGDASGKRLTKEIYARLCRSTLFDAGRKEFWIMKNKGALCISISSKAMTITRIDDRRYWSHLATGESRQVAEIASEPDRAAAYARLLLLQRGCADDASSAAELAAELPSTLLPLLLRDAAADDEAVAASALKCLGFALYHPVLVSTISAQMTQLVLDTLVHIIMSTRMKAIMKLGGQSPKRMRDLSSLWVPPVYRRLLSADKAERDMVERCLIKVSCVILPPQPLLSKAVASDLEQKLLSCMVNMLDDPSKKVQTVKSWGWIVSLLGPDAVNNRPLLNKLIKVPEQMFTDLNPQVQVATMVSWKSLVDAFFPSQATEIVAQQTVISPLKPIEQASAQVKRIRLIMVPICRVLSRSRNIVLSSSCLSTWHYLLHRLGNLINYLPILEAAFGPILKIIFSFGINDQNKPLWSFCLNLFLDFVSSKNRVREDLCAPVNQNLLAQSCKHIKALLDIQHIKWLPWDISCFNFQLNILGIILKPELFQDIIPETMVIVMDSATEIFRFLLKGIQIELREQRAYEQVNECITNACKFAKRLLLDHVGKNSVIKCAALLEFGLRFMKVIAKELDHSLLASENIEVCLDIEHIKENQHAECSPKLSLPRIRSLSYMEMVSPAVYVTALSLSMISQYTGEFSHRDADELVSILDPSSDALENFHTAVSFMYMQIRRPTCNKERLKWLMVWNSFAKKMNSQIISYLETNSGLCYHDVLHQFFCYPILNFLYPKGISILLNAENSSESKFSVLQNLEMESTIEVYRSLSTNSCNSKFFSKVFFDGFYKYLVCTIDENMALFQANLEHLSEEFENASVLSALGEIVIGLLQNDQMLTYANQELKETPEDSSVCRQPELFLNCFKLANRFMKLSSFHFKANPAGQHQVTSRFFSSLSNFAGHLTLKEDVLLFEIIGDQLTEWLSLSIILYSEMQQGQIVVHLENLWLKMVECLKRSQLVSDVPLINQKHRLLQAALNRPHRPISVATASVCRVATHGNTTLHPGCLISEFAELLMHRRKALDSSRKTVITSNPTDLTAERYDGSVNVSVGLGRKRLKIMKYSTKPKELNKNRANMGISPGNTENRACRKPELILEMLQRKT

SEQ ID NO: 196817 - protein, 121 aa, Zea Mays
MAVSAVAATPISAAADAAADTDASLSLPALASVAAAATSQPWVRCTDRWPAPGRSAGRRPRWRSRTRRRSPAAARTRGCSTTAASSPPSSASARSAGPTRPRSRRDAVGLACLCLCSCSSW

SEQ ID NO: 196818 - protein, 310 aa, Zea Mays
MAASARDSADAAERVVDDHDGWASDAEMDVEMDVVEGDADRRDGGADGDDEYLLLTRIRDTSAAEARAGKDIQGIPWERIHIARQDYRKARLEQYKNYENFPQSGELMDKLCKQVEKSSKYYEFQHNTRSVKPSILHFQLRNLLWATSKHDVYFMSNSTVSHWSSLSHKLSEVLDFSGHVAPAEKYPGSLLEGFSGVQVSTLAVNEGLVVAGGFQGELIGKDVEGCSVKFCMRTTLSDNAITNAIDIHRSISGSLHITVSNNDCGVREYDMERYQLVNHYRYNWPVNIRNFWLWLEMIEMLFLWIHEMER

SEQ ID NO: 196819 - protein, 451 aa, Zea Mays
MAASARDSADAAERVVDDHDGWASDAEMDVEMDVVEGDADRRDGGADGDDEYLLLTRIRDTSAAEARAGKDIQGIPWERIHIARQDYRKARLEQYKNYENFPQSGELMDKLCKQVEKSSKYYEFQHNTRSVKPSILHFQLRNLLWATSKHDVYFMSNSTVSHWSSLSHKLSEVLDFSGHVAPAEKYPGSLLEGFSGVQVSTLAVNEGLVVAGGFQGELIGKDVEGCSVKFCMRTTLSDNAITNAIDIHRSISGSLHITVSNNDCGVREYDMERYQLVNHYRYNWPHTSVSPDKKLLAVVGDDRDALLVDSRNGKVTSTLVGHLDYSFATAWHPDSRTFATGNQDKTCRIWDTRNLSTSLAVLRGNIGAIRCIRYSSDGRFLVFSEPADFVHVYSVAADYKKRQEIDFFGEVSGITLSPDDESLFIGVCDRVYASLLQYRMIRGFDYLDSYV

SEQ ID NO: 196820 - protein, 124 aa, Zea Mays
MVMVSGGGGNAWAKEMTLRRRIASIFNKTQEHFPTLKDYNDYLEEVEDMTFNLIEGIDVEEIEAKIARYQQENAEQIYLSRAKRAEDLAAALKASRMNPVKAEANDTRSDNLIAGCVSTRAIPS

SEQ ID NO: 196821 - protein, 175 aa, Zea Mays
MLLFDALSARIRVVKLRGSSPDCTHCGENSVFTEEDFQKFDYESFTQSPMSDKAAPSVNVLPESARITCREYKKLADDGEPHLLLDVRPAHHFQIASISPSHNIPLSMLEEKLPALEASLKEAGEGSALVVLCRRGNDSQRAVQLLREKGFASAKDIIGGLQAWGRDVDPDFPVY

SEQ ID NO: 196822 - protein, 168 aa, Zea Mays
MGGRREAIERELKKLRAEREELDGRIRLLESQLEAGPAGFNGAAAGKGVGDDACGGSGACQSRVGNEFAPDGSLPADMIYRYSRHLLLPDFGVEGQRKLSQSSILVVGAGGLGSPLALYLAACGVGRLGIVDGDDVELNNLHRQIIHKEAYVGQSKVKSAADACRDQD

SEQ ID NO: 196823 - protein, 248 aa, Zea Mays
MGGRREAIERELKKLRAEREELDGRIRLLESQLEAGPAGFNGAAAGKGVGDDACGGSGACQSRVGNEFAPDGSLPADMIYRYSRHLLLPDFGVEGQRKLSQSSILVVGAGGLGSPLALYLAACGVGRLGIVDGDDVELNNLHRQIIHKEAYVGQSKVKSAADACREYMISDCCVLLNKPLVSGAALGLEGQLTVYHHNGSPCYRCLFPTPPPVAACQRCSDSGVLGVVPGVIGCLQALEAIKVATGVG

SEQ ID NO: 196824 - protein, 76 aa, Zea Mays
MAAVLHSIKRCTTSSMEDSGGGGQEVYVVLGIGDNIRSHAVAHRRHHLLRSVPSLDLHPVIYTLSHAKSLKRRWLW

SEQ ID NO: 196825 - protein, 124 aa, Zea Mays
MAEASEARTEGCTAGTWAACHGGAWAACCGRRRSRSRVKATSASHCRARPVHSCCSATPASRGAGGGRRRRRGAGGRELRWRLPLRLGSTQRRATGCSVHTAAHASPFIEEERHVRSLRTLTLW

SEQ ID NO: 196826 - protein, 187 aa, Zea Mays
MAEASGGRRVARTVVVMAEASVGRRAASVERRAESAAVASGVRTAVTAEASAGRGRMVARRAVRAEASEARTEGCTAGTWAACHGGAWAACCGRRRSRSRVKATSASHCRARPVHSCCSATPASRGAGGGRRRRRGAGGRELRWRLPLRLGSTQRRATGCSVHTAAHASPFIEEERHVRSLRTLTLW

SEQ ID NO: 196827 - protein, 342 aa, Zea Mays
MNRKEPLCARQTPTQLTSAMASAAAVEWEAAARKVLVARKPCFGLPTACPTCLPVLLYLRMAQVPFDIHVDTSFPDADHIPYVEFGDCVAFNNEKGGVIEYLKDEKIADLNSNHPNISSTTVLDTKAMVSSWLANALLYELWVVSAGSIANDIYFSDLPWPIGKILHWNKTRHVKQLLGITKLNAAEKEEEIYLKASAAYDSLSFRLGDQVFLFDNSPTDVDALFLGHALFVLSALPDTSVLRGTLQKHDNLVSFAEHHKVQLLETSSSSSSGLGSSPSPSSSTPRRRPSADHSYKPKPRAKKERTEEEKKFRRRAKIHSRTSLIVVVGVSTSQGAASSSTS

SEQ ID NO: 196828 - protein, 845 aa, Zea Mays
MDLAINPFSSGTRLRAFILHRDMIRAIRACKTAAEERAVVRRECAAIRAAISEGDQDYRHRNMAKLMFIHMLGYPTHFGQMECLKLIAAAGFPEKRIGYLGLMLLLDERQEVLMLVTNSLKQDLNHSNQFIVGLALCALGNICSAEMARDLAPEVERLLQNRDPNTKKKAALCSVRIVRKVPDLAEIFMSAATSLLKEKHHGVLISAVQLCMELCNASNEALEYLRKNCLEGLVRILRDVSNSSYAPEYDIGGITDPFLHIRVLKLMRILGQGDADCSEYINDILAQVSTKTESNKNAGNAILYECVETIMSIEATSGLRVLAINILGRFLSNRDNNIRYVALNMLMKAIAVDTQAVQRHRATILECVKELVDYLEVSDQDFKEDLTAKICSIVEKFSLDRLWYLDQMFRVLSLAGNHVKDDVWHALIVLVSNASELQGYSVRSLYKALQASSEQESLVRVAVWCIGEYGEMLVNNLSMLDMEEPITVTEYDAVDAVEAALQRYSADVTTRAMCLVSLLKLSSRFPPTSERIKEIVAQNKGNTVLELQQRSIEFSSIIQRHQSMKSSLLERMPVLDEANYLVKRAASIQAAVPSVNSAPAVTSGGPFKLPNGVGKPAAPLADLLDLSSDDAPVTTSAPTTAPNDFLQDLLGIGLTDSSPIGGAPSTSTDILMDLLSIGSSSVQNGPPTANFSLPGIETKSVAVTPQVVDLLDGLSSGTSLPDENATYPTITAFQSATLRITFSFKKQPGKPQETTISASFTNLATTTFTDFVFQAAVPKFIQLRLDPASSSTLPASGNGSVTQSLSVTNNQHGQKPLAMRIRMSYKVNGEDRLEQGQISNFPAGL

SEQ ID NO: 196829 - protein, 749 aa, Zea Mays
MDLAINPFSSGTRLRDMIRAIRACKTAAEERAVVRRECAAIRAAISEGDQDYRHRNMAKLMFIHMLGYPTHFGQMECLKLIAAAGFPEKRIGYLGLMLLLDERQEVLMLVTNSLKQDLNHSNQFIVGLALCALGNICSAEMARDLAPEVERLLQNRDPNTKKKAALCSVRIVRKVPDLAEIFMSAATSLLKEKHHGVLISAVQLCMELCNASNEALEYLRKNCLEGLVRILRDVSNSSYAPEYDIGGITDPFLHIRVLKLMRILGQGDADCSEYINDILAQVSTKTESNKNAGNAILYECVETIMSIEATSGLRVLAINILGRFLSNRDNNIRYVALNMLMKAIAVDTQAVQRHRATILECVKDADVSIRKRALELVYLLVNDTNVKPLTKELVDYLEVSDQDFKEDLTAKICSIVEKFSLDRLWYLDQMFRVLSLAGNHVKDDVWHALIVLVSNASELQGYSVRSLYKALQASSEQESLVRVAVWCIGEYGEMLVNNLSMLDMEEPITVTEYDAVDAVEAALQRYSADVTTRAMCLVSLLKLSSRFPPTSERIKEIVAQNKGNTVLELQQRSIEFSSIIQRHQSMKSSLLERMPVLDEANYLVKRAASIQAAVPSVNSAPAVTSGGPFKLPNGVGKPAAPLADLLDLSSDDAPVTTSAPTTAPNDFLQDLLGIGLTDSSPIGGAPSTSTDILMDLLSIGSSSVQNGPPTANFSLPGIETKSVAVTPQVVDLLDGLSSGTSLPVCLFAR

SEQ ID NO: 196830 - protein, 839 aa, Zea Mays
MDLAINPFSSGTRLRDMIRAIRACKTAAEERAVVRRECAAIRAAISEGDQDYRHRNMAKLMFIHMLGYPTHFGQMECLKLIAAAGFPEKRIGYLGLMLLLDERQEVLMLVTNSLKQDLNHSNQFIVGLALCALGNICSAEMARDLAPEVERLLQNRDPNTKKKEKHHGVLISAVQLCMELCNASNEALEYLRKNCLEGLVRILRDVSNSSYAPEYDIGGITDPFLHIRVLKLMRILGQGDADCSEYINDILAQVSTKTESNKNAGNAILYECVETIMSIEATSGLRVLAINILGRFLSNRDNNIRYVALNMLMKAIAVDTQAVQRHRATILECVKDADVSIRKRALELVYLLVNDTNVKPLTKELVDYLEVSDQDFKEDLTAKICSIVEKFSLDRLWYLDQMFRVLSLAGNHVKDDVWHALIVLVSNASELQGYSVRSLYKALQASSEQESLVRVAVWCIGEYGEMLVNNLSMLDMEEPITVTEYDAVDAVEAALQRYSADVTTRAMCLVSLLKLSSRFPPTSERIKEIVAQNKGNTVLELQQRSIEFSSIIQRHQSMKSSLLERMPVLDEANYLVKRAASIQAAVPSVNSAPAVTSGGPFKLPNGVGKPAAPLADLLDLSSDDAPVTTSAPTTAPNDFLQDLLGIGLTDSSPIGGAPSTSTDILMDLLSIGSSSVQNGPPTANFSLPGIETKSVAVTPQVVDLLDGLSSGTSLPDENATYPTITAFQSATLRITFSFKKQPGKPQETTISASFTNLATTTFTDFVFQAAVPKFIQLRLDPASSSTLPASGNGSVTQSLSVTNNQHGQKPLAMRIRMSYKVNGEDRLEQGQISNFPAGL

SEQ ID NO: 196831 - protein, 405 aa, Zea Mays
MFRVLSLAGNHVKDDESLVRVAVWCIGEYGEMLVNNLSMLDMEEPITVTEYDAVDAVEAALQRYSADVTTRAMCLVSLLKLSSRFPPTSERIKEIVAQNKGNTVLELQQRSIEFSSIIQRHQSMKSSLLERMPVLDEANYLVKRAASIQAAVPSVNSAPAVTSGGPFKLPNGVGKPAAPLADLLDLSSDDAPVTTSAPTTAPNDFLQDLLGIGLTDSSPIGGAPSTSTDILMDLLSIGSSSVQNGPPTANFSLPGIETKSVAVTPQVVDLLDGLSSGTSLPDENATYPTITAFQSATLRITFSFKKQPGKPQETTISASFTNLATTTFTDFVFQAAVPKFIQLRLDPASSSTLPASGNGSVTQSLSVTNNQHGQKPLAMRIRMSYKVNGEDRLEQGQISNFPAGL

SEQ ID NO: 196832 - protein, 834 aa, Zea Mays
MDLAINPFSSGTRLRDMIRAIRACKTAAEERAVVRRECAAIRAAISEGDQDYRHRNMAKLMFIHMLGYPTHFGQMECLKLIAAAGFPEKRIGYLGLMLLLDERQEVLMLVTNSLKQDLNHSNQFIVGLALCALGNICSAEMARDLAPEVERLLQNRDPNTKKKAALCSVRIVRKVPDLAEIFMSAATSLLKEKHHGVLISAVQLCMELCNASNEALEYLRKNCLEGLVRILRDVSNSSYAPEYDIGGITDPFLHIRVLKLMRILGQGDADCSEYINDILAQVSTKTESNKNAGNAILYECVETIMSIEATSGLRVLAINILGRFLSNRDNNIRYVALNMLMKAIAVDTQAVQRHRATILECVKDADVSIRKRALELVYLLVNDTNVKPLTKELVDYLEVSDQDFKEDLTAKICSIVEKFSLDRLWYLDQMFRVLSLAGNHVKDDESLVRVAVWCIGEYGEMLVNNLSMLDMEEPITVTEYDAVDAVEAALQRYSADVTTRAMCLVSLLKLSSRFPPTSERIKEIVAQNKGNTVLELQQRSIEFSSIIQRHQSMKSSLLERMPVLDEANYLVKRAASIQAAVPSVNSAPAVTSGGPFKLPNGVGKPAAPLADLLDLSSDDAPVTTSAPTTAPNDFLQDLLGIGLTDSSPIGGAPSTSTDILMDLLSIGSSSVQNGPPTANFSLPGIETKSVAVTPQVVDLLDGLSSGTSLPDENATYPTITAFQSATLRITFSFKKQPGKPQETTISASFTNLATTTFTDFVFQAAVPKFIQLRLDPASSSTLPASGNGSVTQSLSVTNNQHGQKPLAMRIRMSYKVNGEDRLEQGQISNFPAGL

SEQ ID NO: 196833 - protein, 721 aa, Zea Mays
MDLAINPFSSGTRLRDMIRAIRACKTAAEERAVVRRECAAIRAAISEGDQDYRHRNMAKLMFIHMLGYPTHFGQMECLKLIAAAGFPEKRIGYLGLMLLLDERQEVLMLVTNSLKQDLNHSNQFIVGLALCALGNICSAEMARDLAPEVERLLQNRDPNTKKKAALCSVRIVRKVPDLAEIFMSAATSLLKEKHHGVLISAVQLCMELCNASNEALEYLRKNCLEGLVRILRDVSNSSYAPEYDIGGITDPFLHIRVLKLMRILGQGDADCSEYINDILAQVSTKTESNKNAGNAILYECVETIMSIEATSGLRVLAINILGRFLSNRDNNIRYVALNMLMKAIAVDTQAVQRHRATILECVKELVDYLEVSDQDFKEDLTAKICSIVEKFSLDRLWYLDQMFRVLSLAGNHVKDDVWHALIVLVSNASELQGYSVRSLYKALQASSEQESLVRVAVWCIGEYGEMLVNNLSMLDMEEPITVTEYDAVDAVEAALQRYSADVTTRAMCLVSLLKLSSRFPPTSERIKEIVAQNKGNTVLELQQRSIEFSSIIQRHQSMKSSLLERMPVLDEANYLVKRAASIQAAVPSVNSAPAVTSGGPFKLPNGVGKPAAPLADLLDLSSDDAPVTTSAPTTAPNDFLQDLLGIGLTDSSPIGGAPSTSTDILMDLLSIGSSSVQNGPPTANFSLPGIETKSVAVTPQVVDLLDGLSSGTSLPVCLFAR

SEQ ID NO: 196834 - protein, 779 aa, Zea Mays
MDLAINPFSSGTRLRDMIRAIRACKTAAEERAVVRRECAAIRAAISEGDQDYRHRNMAKLMFIHMLGYPTHFGQMECLKLIAAAGFPEKRIGYLGLMLLLDERQEVLMLVTNSLKQDLNHSNQFIVGLALCALGNICSAEMARDLAPEVERLLQNRDPNTKKKEKHHGVLISAVQLCMELCNASNEALEYLRKVSTKTESNKNAGNAILYECVETIMSIEATSGLRVLAINILGRFLSNRDNNIRYVALNMLMKAIAVDTQAVQRHRATILECVKDADVSIRKRALELVYLLVNDTNVKPLTKELVDYLEVSDQDFKEDLTAKICSIVEKFSLDRLWYLDQMFRVLSLAGNHVKDDVWHALIVLVSNASELQGYSVRSLYKALQASSEQESLVRVAVWCIGEYGEMLVNNLSMLDMEEPITVTEYDAVDAVEAALQRYSADVTTRAMCLVSLLKLSSRFPPTSERIKEIVAQNKGNTVLELQQRSIEFSSIIQRHQSMKSSLLERMPVLDEANYLVKRAASIQAAVPSVNSAPAVTSGGPFKLPNGVGKPAAPLADLLDLSSDDAPVTTSAPTTAPNDFLQDLLGIGLTDSSPIGGAPSTSTDILMDLLSIGSSSVQNGPPTANFSLPGIETKSVAVTPQVVDLLDGLSSGTSLPDENATYPTITAFQSATLRITFSFKKQPGKPQETTISASFTNLATTTFTDFVFQAAVPKFIQLRLDPASSSTLPASGNGSVTQSLSVTNNQHGQKPLAMRIRMSYKVNGEDRLEQGQISNFPAGL

SEQ ID NO: 196835 - protein, 606 aa, Zea Mays
MARDLAPEVERLLQNRDPNTKKKAALCSVRIVRKVPDLAEIFMSAATSLLKEKHHGVLISAVQLCMELCNASNEALEYLRKVSTKTESNKNAGNAILYECVETIMSIEATSGLRVLAINILGRFLSNRDNNIRYVALNMLMKAIAVDTQAVQRHRATILECVKELVDYLEVSDQDFKEDLTAKICSIVEKFSLDRLWYLDQMFRVLSLAGNHVKDDESLVRVAVWCIGEYGEMLVNNLSMLDMEEPITVTEYDAVDAVEAALQRYSADVTTRAMCLVSLLKLSSRFPPTSERIKEIVAQNKGNTVLELQQRSIEFSSIIQRHQSMKSSLLERMPVLDEANYLVKRAASIQAAVPSVNSAPAVTSGGPFKLPNGVGKPAAPLADLLDLSSDDAPVTTSAPTTAPNDFLQDLLGIGLTDSSPIGGAPSTSTDILMDLLSIGSSSVQNGPPTANFSLPGIETKSVAVTPQVVDLLDGLSSGTSLPDENATYPTITAFQSATLRITFSFKKQPGKPQETTISASFTNLATTTFTDFVFQAAVPKFIQLRLDPASSSTLPASGNGSVTQSLSVTNNQHGQKPLAMRIRMSYKVNGEDRLEQGQISNFPAGL

SEQ ID NO: 196836 - protein, 718 aa, Zea Mays
MDLAINPFSSGTRLRDMIRAIRACKTAAEERAVVRRECAAIRAAISEGDQDYRHRNMAKLMFIHMLGYPTHFGQMECLKLIAAAGFPEKRIGYLGLMLLLDERQEVLMLVTNSLKQDLNHSNQFIVGLALCALGNICSAEMARDLAPEVERLLQNRDPNTKKKEKHHGVLISAVQLCMELCNASNEALEYLRKVSTKTESNKNAGNAILYECVETIMSIEATSGLRVLAINILGRFLSNRDNNIRYVALNMLMKAIAVDTQAVQRHRATILECVKELVDYLEVSDQDFKEDLTAKICSIVEKFSLDRLWYLDQMFRVLSLAGNHVKDDESLVRVAVWCIGEYGEMLVNNLSMLDMEEPITVTEYDAVDAVEAALQRYSADVTTRAMCLVSLLKLSSRFPPTSERIKEIVAQNKGNTVLELQQRSIEFSSIIQRHQSMKSSLLERMPVLDEANYLVKRAASIQAAVPSVNSAPAVTSGGPFKLPNGVGKPAAPLADLLDLSSDDAPVTTSAPTTAPNDFLQDLLGIGLTDSSPIGGAPSTSTDILMDLLSIGSSSVQNGPPTANFSLPGIETKSVAVTPQVVDLLDGLSSGTSLPDENATYPTITAFQSATLRITFSFKKQPGKPQETTISASFTNLATTTFTDFVFQAAVPKFIQLRLDPASSSTLPASGNGSVTQSLSVTNNQHGQKPLAMRIRMSYKVNGEDRLEQGQISNFPAGL

SEQ ID NO: 196837 - protein, 267 aa, Zea Mays
MATTATEAAKAAPAQEQQANGNGNGEQKTRHSEVGHKSLLKSDDLYQNDPQYILDTSVYPREPESMKELREITAKHPWNLMTTSADEGQFLNMLIKLIGAKKTMEIGVYTGYSLLATALALPEDGTILAMDINRENYELGLPCINKAGVGHKIDFREGPALPVLDDLVADKEQHGSFDFAFVDADKDNYLSYHERLLKLVRPGGLIGYDNTLWNGSVVLPDDAPMRKYIRFYRDFVLALNSALAADDRVEICQLPVGDGVTLCRRVK

SEQ ID NO: 196838 - protein, 104 aa, Zea Mays
MLSMRNVGGGNITASSSGAVMPPVNQNKTIQEAPFHLESSQFHPRPFRMPESSEMMLPGEVVAKHQLTSIQGRVSMPGIGMNPIRQESSTVKADQFDGCSHSKE

SEQ ID NO: 196839 - protein, 264 aa, Zea Mays
MNEQGLGGLGGGRGAVQGHGREAMALLQHQQLQQQRRQLEEEDEVRRQMFGGVAAFPAALGHGQQVDYGEDAGGLGDSDAGGSEPEPPPERTRGGSGGGGGKRSRAAEVHNLSEKRRRSKINEKMKALQSLIPNSNKTDKASMLDEAIEYLKQLQLQVQMLSMRNGVYLNPPYLSGTIEPAQASQMFAAVGGGNITASSSGAVMPPVNQSSGLQVFDPLNPPRDQPLSFVLPNVDKTIQEAPFHLESSQFHPRPFRMPESSEVR

SEQ ID NO: 196840 - protein, 287 aa, Zea Mays
MNEQGLGGLGGGRGAVQGHGREAMALLQHQQLQQQRRQLEEEDEVRRQMFGGVAAFPAALGHGQQVDYGEDAGGLGDSDAGGSEPEPPPERTRGGSGGGGGKRSRAAEVHNLSEKRRRSKINEKMKALQSLIPNSNKTDKASMLDEAIEYLKQLQLQVQMLSMRNGVYLNPPYLSGTIEPAQASQMFAAVGGGNITASSSGAVMPPVNQNKTIQEAPFHLESSQFHPRPFRMPESSEMMLPGEVVAKHQLTSIQGRVSMPGIGMNPIRQESSTVKADQFDGCSHSKE

SEQ ID NO: 196841 - protein, 239 aa, Zea Mays
MNEQGLGGLGGGRGAVQGHGREAMALLQHQQLQQQRRQLEEEDEVRRQMFGGVAAFPAALGHGQQVDYGEDAGGLGDSDAGGSEPEPPPERTRGGSGGGGGKRSRAAEVHNLSEKRRRSKINEKMKALQSLIPNSNKTDKASMLDEAIEYLKQLQLQVQMLSMRNGVYLNPPYLSGTIEPAQASQMFAAVGGGNITASSSGAVMPPVNQNKTIQEAPFHLESSQFHPRPFRMPESSEVR

SEQ ID NO: 196842 - protein, 283 aa, Zea Mays
MNEQGLGGLGGGRGAVQGHGREAMALLQHQQLQQQRRQLEEEDEVRRQMFGGVAAFPAALGHGQQVDYGEDAGGLGDSDAGGSEPEPPPERTRGGSGGGGGKRSRAAEVHNLSEKRRRSKINEKMKALQSLIPNSNKTDKASMLDEAIEYLKQLQLQVQAVGGGNITASSSGAVMPPVNQSSGLQVFDPLNPPRDQPLSFVLPNVDKTIQEAPFHLESSQFHPRPFRMPESSEMMLPGEVVAKHQLTSIQGRVSMPGIGMNPIRQESSTVKADQFDGCSHSKE

SEQ ID NO: 196843 - protein, 1041 aa, Zea Mays
MEKRLAYAALLPLLLLTLRILPLPSGSPNCSGGEGETPPASRHVVRFLEYRRAEEHREYLDAGLRDGAPAAAWRWVERRNPAAAFPTDFAVLEIRDAHREAVVAAVRALGRVRDVHADATYSRSALSAAPDRSRPPRRGKLFTAMSFEGEEEGGGETGNSSSAAWGRKLLLQRSQVTSLFGAERLWGRGFTGKKVKMAIFDTGIRADHPHFRNIKERTNWTNEDTLNDNLGHGTFVAGVIAGQDAECPGFAPDTEIYAFRVFTDAQISYTSWFLDAFNYAIATGMDVLNLSIGGPDYLDLPFVEKVWELTANNIIMVSAIGNDGPLYGTLNNPADQSDVIGVGGIDYNNHIASFSSRGMTTWELPHGYGRVKPDVVAYSRDIIGSKISTGCKTLSGTSVASPVVAGVVCLLVSVIPEDKRKLILNPAAMKQALVEGASKLSGPNMYEQGAGRLDLWQSYEILKNYQPRASIFPTMLDFTDCPYFWPFCRQPMYAGAMPVIFNATILNGMGVIGYVKDQPLWQPSEDIGNLLSVHFTYSDVIWPWTGYLALHLQVKDEGSQFSGIISGNVTLTIYTPAAHGESSPRSSTCILHMKVKVVPTPVRSKRILWDQYHNIKYPSGYVPRDSLNVHNDILDWHGDHLHTNFHILFNMLRDAEYYIETLGSPLTCFDASNYGTLLMVDLEDEYFDEEIQKLRDDVIHKGLGIAVFAEWYHVDTMVKMTFFDENTRSWWTPITGGANIPAINELLAPFGIALGDKILTGDFSINGEQTHYASGTDIVQFPAGGFLHSFQLQENSKTVQDHIGTLDTESTQGKGKLSSILGVIEAGEGRIAVYGDSNCLDSSHMVTNCYWLLRKILEFTGNRVKDNVLFSEAAQLKFPVFENIHHPSRRTDVNFSTYSTVVGKELICHQDSRFEVWGTKGYGVQPIGTSRKLPEYQMHESSSSPNVTIQIAGSRQDKVERLQRNLSIPNAAKFDDKRDYFGFIGHEEVDIGMLMASQWMIPCFAATACLMLYLSCRVQQKRRRRRKGSVASANRLTSMEI

SEQ ID NO: 196844 - protein, 1017 aa, Zea Mays
MEKRLAYAALLPLLLLTLRILPLPSGSPNCSGGEGETPPASRHVVRFLEYRRAEEHREYLDAGLRDGAPAAAWRWVERRNPAAAFPTDFAVLEIRDAHREAVVAAVRALGRVRDVHADATYSRSALSAAPDRSRPPRRGKLFTAMSFEGEEEGGGETGNSSSAAWGRKLLLQRSQVTSLFGAERLWGRGFTGKKVKMAIFDTGIRADHPHFRNIKERTNWTNEDTLNDNLGHGTFVAGVIAGQDAECPGFAPDTEIYAFRVFTDAQISYTSWFLDAFNYAIATGMDVLNLSIGGPDYLDLPFVEKVWELTANNIIMVSAIGNDGPLYGTLNNPADQSDVIGVGGIDYNNHIASFSSRGMTTWELPHGYGRVKPDVVAYSRDIIGSKISTGCKTLSGTSVASPVVAGVALVEGASKLSGPNMYEQGAGRLDLWQSYEILKNYQPRASIFPTMLDFTDCPYFWPFCRQPMYAGAMPVIFNATILNGMGVIGYVKDQPLWQPSEDIGNLLSVHFTYSDVIWPWTGYLALHLQVKDEGSQFSGIISGNVTLTIYTPAAHGESSPRSSTCILHMKVKVVPTPVRSKRILWDQYHNIKYPSGYVPRDSLNVHNDILDWHGDHLHTNFHILFNMLRDAEYYIETLGSPLTCFDASNYGTLLMVDLEDEYFDEEIQKLRDDVIHKGLGIAVFAEWYHVDTMVKMTFFDENTRSWWTPITGGANIPAINELLAPFGIALGDKILTGDFSINGEQTHYASGTDIVQFPAGGFLHSFQLQENSKTVQDHIGTLDTESTQGKGKLSSILGVIEAGEGRIAVYGDSNCLDSSHMVTNCYWLLRKILEFTGNRVKDNVLFSEAAQLKFPVFENIHHPSRRTDVNFSTYSTVVGKELICHQDSRFEVWGTKGYGVQPIGTSRKLPEYQMHESSSSPNVTIQIAGSRQDKVERLQRNLSIPNAAKFDDKRDYFGFIGHEEVDIGMLMASQWMIPCFAATACLMLYLSCRVQQKRRRRRKGSVASANRLTSLQP

SEQ ID NO: 196845 - protein, 217 aa, Zea Mays
MDDFYAGEGTDHSGVPTKLVTTNCSLHVSVYNPATMFGIHVTSGPIRLIYSEISIAVGQVLPAEEEPPDGDGGDPRREGAAVRRRGRPDAVHERGRGGGAPDAGLRPHLPGLRDRQARAGDAQGARDVPRRRGRQEDQACQVLQEGVRRVQGLSLRARETCDRPSVSNACSCKDVAIVLMVKNNKRTRMVLSIYRAVKACCSCVCIPFSGHDRRDGR

SEQ ID NO: 196846 - protein, 51 aa, Zea Mays
MLHILFDQKQCQFRLSHDSRRAEENWKATFLSHQEPPDYLGRTSNPLGKLP

SEQ ID NO: 196847 - protein, 58 aa, Zea Mays
MKIEETSEENVLRLSSQDIGCSGSSGHGDEANQEHLQLALDPSLHIGYQAYMDHLNND

SEQ ID NO: 196848 - protein, 166 aa, Zea Mays
MDSIYKTLERYRSCSFASEASAPLEAELNNYQEYLKLKTRVEFLQTTQRNLLGEDLGPLSVKELEQLENQIEISLKQIRSSKNQQMLDQLFDLKRKEQQLQDANKDLRMKIEETSEENVLRLSSQDIGCSGSSGHGDEANQEHLQLALDPSLHIGYQAYMDHLNND

SEQ ID NO: 196849 - protein, 81 aa, Zea Mays
MLDQLFDLKRKEQQLQDANKDLRMKIEETSEENVLRLSSQDIGCSGSSGHGDEANQEHLQLALDPSLHIGYQAYMDHLNND

SEQ ID NO: 196850 - protein, 570 aa, Zea Mays
MASPDLLFNLWNLFYLGAYQATINIDVPGLDAAAAAERDAIVFRSYIALGSYQLEKNTRRASKRRPMEISTKVRPPKLREVIQVPKKVGRDPRFEPAYGFVDKEGCKLDEFLTLIDLVGMQRLQKMIKKSKDLDAIGEMKSRVTWINVESEILREHIKKEREAAKAGKRPYYLKKPEFRERKLMNKYNELKEECLQRSSVHAVPTLGNNELRGRLPAGLSGLRDLQYLILENNPMGGVPLPPELGNIPRLQELRLANSGYSGPIPDTFGLLSSLTTLSLENNNLTGRIPPGLSRLKRMYHLNLSKNGLDGVVPFDAAFLRRLGRNLDLSGNPGLCVTDRAVMPGVGVGVCGDDVVDCERSAAAESSVVGRVVRGEAGRAQARRRAGAAPVALVEQGSRGGSVEQERRGDSAEQGRRGAGAALVTVALAQGRRGAAAQAAGAAPVAVTLELGASWPPGRLRRQTDGDGTRPHGTGARGLGVLGFLGNRASRQWQDLKLNGNGPRLRPIRHGQVRCRPAAAEAVEAAISGLFVPINGPFRICLNGSGSCPPVGLGVGQNTARCIGPGRPDPK

SEQ ID NO: 196851 - protein, 402 aa, Zea Mays
MRSGRLAVAVAVALAWAFAASAAAAAQKYNAIFNFGDSITDTGNLCTNGRPSQITFTQPPYGETYFGTPTCRCSDGRVIPDFLCSRFGLPFLPPSKSTTADFKKGANMAITGATAMDAPFFRSLGLSDKIWNNGPISFQLQWFQQVTSAVCGQDCKSYLANSLFVFGEFGGNDYNAMLFGNYNADQASTYTPQIVSAIAAGVEKLLAMGATDVVVPGVLPIGCFPIYLTVYGTSNSADYDALGCLKKFNDLSTNHNAQLQAQISALQAKYKSARIMYADFYSAVYDMVKNPGSYARCSRRAAARGAASTTTRTARGAACRARPRAPARRRTSAGTASTSPRPPTSRSPTAGSTGPTAAPPSSTAKLSEGRAINFLLLPCYLYLCLRCREKSVPAAACMCCLL

SEQ ID NO: 196852 - protein, 330 aa, Zea Mays
MKSPTSCKPTQCPYCKTLNYAVEYRGVKTKEEKGIEQLEEQRVIEAQIRMRQQEVQDDAERMKNKRTATLGDVVASAQVDSCNTDGASTAVANSPRGNDVLSSEVQHSELISRNSEAFKQMRGNNFEVDLEEVMLMEAIWLSIQDQEALGNPGCVSTTPSSIPSRPFDDGDMTTTAEAASSGGFACAVAALAEQQHMHGESSSASPCQTIRFGTLSRPDRSTTQDLSVAGSSSSDSRVEEPPTSNTHRTIEAAEYSNSNVQWSEVAEAGTSIAESDGTVEAGVDNSSTSAGSNIDSVSVPDSFEEQMMLAMALSLVDARARAGSPGLAWR

SEQ ID NO: 196853 - protein, 238 aa, Zea Mays
MGNQVGGRRRRRPPVDERYTRPQGLYPHPDIDLRKLRRLILEAKLAPCHPGADDARADLDECPICFLFYPSLNRSKCCAKGICTECFLQMKSPTSCKPTQCPYCKTLNYAVEYRGVKTKEEKGIEQLEEQRVIEAQIRMRQQEVQDDAERMKNKRTATLGDVVASAQVDSCNTDGASTAVANSPRGNDVLSSEVQHSELISRNSEAFKQMRIKKLWEIQDVLALHRHQFLQGLLMMVI

SEQ ID NO: 196854 - protein, 256 aa, Zea Mays
MDTSKSKQGPEHLLVLVHGIMASPKDWTYGEAVLKRRLGDDFFIYASSTNSYTKTFDGIDVAGRRLANELPFLQGLSILEKLAAPLAPLIVGRTGAQLFLTDGDPSKAPLLLQMASDCDDKNYISALAAFKNRVLYANVSYDHMVGWRTSSLRREKNLIKPSHRSLDGYKHIVNVEYCSPVSSEGPHFPSKAARAKEAAQRSPNRENTEEYHQMMEEEMLHGLQKVGWKKVDVNFHSSFWPYSAHNNIHVCLVLLE

SEQ ID NO: 196855 - protein, 177 aa, Zea Mays
MASDCDDKNYISALAAFKNRVLYANVSYDHMVGWRTSSLRREKNLIKPSHRSLDGYKHIVNVEYCSPVSSEGPHFPSKAARAKEAAQRSPNRENTEEYHQMMEEGWLEEGGRQLPFVILALLCSQQHTRQERVASQCWRWCYRARCGQHQAAGVTAMSSCQSIAVAFSNPFVQIICR

SEQ ID NO: 196856 - protein, 220 aa, Zea Mays
MDTSKSKQGPEHLLVLVHGIMASPKDWTYGEAVLKRRLGDDFFIYASSTNSYTKTFDGIDVAGRRLANEVLEVVNKMPSLRKISFLAHSLGGLFARYVIAILHSVSVETKNAGQSSALIVPTTRGPAKSRCASGLGSIAGLRPINFITLATPHLGVRGRNQLPFLQGLSILEKLAAPLAPLIVGRTGAQLFLTDGDPSKAPLLLQMASDCDDKNYILGSF

SEQ ID NO: 196857 - protein, 187 aa, Zea Mays
MVILARHLSCYRWHPTVMTKTTSLAAFKNRVLYANVSYDHMVGWRTSSLRREKNLIKPSHRSLDGYKHIVNVEYCSPVSSEGPHFPSKAARAKEAAQRSPNRENTEEYHQMMEEGWLEEGGRQLPFVILALLCSQQHTRQERVASQCWRWCYRARCGQHQAAGVTAMSSCQSIAVAFSNPFVQIICR

SEQ ID NO: 196858 - protein, 182 aa, Zea Mays
MPSLRKISFLAHSLGGLFARYVIAILHSVSVETKNAGQSSALIVPTTRGPAKSRCASGLGSIAGLRPINFITLATPHLGVRGRNQLPFLQGLSILEKLAAPLAPLIVGRTGAQLFLTDGDPSKAPLLLQMASDCDDKNYISALAAFKNRVLYANVSHGRLANVFTKEREESYKALTSFTGWL

SEQ ID NO: 196859 - protein, 227 aa, Zea Mays
MIFSYMLPFLQGLSILEKLAAPLAPLIVGRTGAQLFLTDGDPSKAPLLLQMASDCDDKNYISALAAFKNRVLYANVSYDHMVGWRTSSLRREKNLIKPSHRSLDGYKHIVNVEYCSPVSSEGPHFPSKAARAKEAAQRSPNRENTEEYHQMMEEGWLEEGGRQLPFVILALLCSQQHTRQERVASQCWRWCYRARCGQHQAAGVTAMSSCQSIAVAFSNPFVQIICR

SEQ ID NO: 196860 - protein, 178 aa, Zea Mays
MQTSLSTASSTNSYTKTFDGIDVAGRRLANEVLEVVNKMPSLRKISFLAHSLGGLFARYVIAILHSVSVETKNAGQSSALIVPTTRGPAKSRCASGLGSIAGLRPINFITLATPHLGVRGRNQVHHQNVSDYVYKIYCTLSSKGSIPGKTNSLFVILFIHVDFEVAWYDFYKLGLYHC

SEQ ID NO: 196861 - protein, 344 aa, Zea Mays
MQTSLSTASSTNSYTKTFDGIDVAGRRLANEVLEVVNKMPSLRKISFLAHSLGGLFARYVIAILHSVSVETKNAGQSSALIVPTTRGPAKSRCASGLGSIAGLRPINFITLATPHLGVRGRNQLPFLQGLSILEKLAAPLAPLIVGRTGAQLFLTDGDPSKAPLLLQMASDCDDKNYISALAAFKNRVLYANVSYDHMVGWRTSSLRREKNLIKPSHRSLDGYKHIVNVEYCSPVSSEGPHFPSKAARAKEAAQRSPNRENTEEYHQMMEEGWLEEGGRQLPFVILALLCSQQHTRQERVASQCWRWCYRARCGQHQAAGVTAMSSCQSIAVAFSNPFVQIICR

SEQ ID NO: 196862 - protein, 57 aa, Zea Mays
MHPLFSLSSWPNGTDSTTCPILYPLPSDYPINITFSGVLGPKISLHFAFRGVKQYQL

SEQ ID NO: 196863 - protein, 687 aa, Zea Mays
MPNKQKISKSSCRDDRHPPPPPPAAAAATGATPIGGGLKNMAAASASTRQATAEACSSHVHHAHLAALLNASARLPPLPLSRLHLPLSLPTASRLVASFPPLPLLVCFLRALRLLPSSPPRPFDSLIKSYASLPNRASLAAAALAFARSAGYVPSVLAYNAVLLALSDASLTSARRFFDSMLSDGVAPNVYTYNILVRALCGRGHRKEALSILRDMRGAGCGPNVVTYNTLVAAFFRAGEVDGAERLVGMMREGGLKPNLVTFNSMVNGMCKAGKMEDARKVFDEMVREGLAPDGVSYNTLVGGYCKAGCSHEALSVFAEMTQKGIMPDVVTFTSLIHVMCKAGNLERAVTLVRQMRERGLQMNEVTFTALIDGFCKKGFLDDALLAVRGMKQCRIKPSVVCYNALINGYCMVGRMDEARELLHEMEAKGLKPDVVTYSTIISAYCKNCDTHSAFELNQQMLEKGVLPDAITYSSLIRVLCGEKRLSDAHVLFKNMIKLGLQPDEFTYTSLIDGHCKEGNVESALSLHDKMVKAGVLPDVVTYSVLINGLSKSARAMEAQQLLFKLYHEDPIPANTKYDALMHCCRKAELKSVLALLKGFCMKGLMNEADKVYQSMLDRNWNLDGSVYSVLIHGHCRAGNVMKALSFHKQMLQGGFAPNSTSTISLIRGLFENGMVVEADQVMWTQS

SEQ ID NO: 196864 - protein, 663 aa, Zea Mays
MPNKQKISKSSCRDDRHPPPPPPAAAAATGATPIGGGLKNMAAASASTRQATAEACSSHVHHAHLAALLNASARLPPLPLSRLHLPLSLPTASRLVASFPPLPLLVCFLRALRLLPSSPPRPFDSLIKSYASLPNRASLAAAALAFARSAGRFFDSMLSDGVAPNVYTYNILVRALCGRGHRKEALSILRDMRGAGCGPNVVTYNTLVAAFFRAGEVDGAERLVGMMREGGLKPNLVTFNSMVNGMCKAGKMEDARKVFDEMVREGLAPDGVSYNTLVGGYCKAGCSHEALSVFAEMTQKGIMPDVVTFTSLIHVMCKAGNLERAVTLVRQMRERGLQMNEVTFTALIDGFCKKGFLDDALLAVRGMKQCRIKPSVVCYNALINGYCMVGRMDEARELLHEMEAKGLKPDVVTYSTIISAYCKNCDTHSAFELNQQMLEKGVLPDAITYSSLIRVLCGEKRLSDAHVLFKNMIKLGLQPDEFTYTSLIDGHCKEGNVESALSLHDKMVKAGVLPDVVTYSVLINGLSKSARAMEAQQLLFKLYHEDPIPANTKYDALMHCCRKAELKSVLALLKGFCMKGLMNEADKVYQSMLDRNWNLDGSVYSVLIHGHCRAGNVMKALSFHKQMLQGGFAPNSTSTISLIRGLFENGMVVEADQVMWTQS

SEQ ID NO: 196865 - protein, 709 aa, Zea Mays
MSCCVSDHGNMAAVSIMRKVDRPPTNSKCLIIESSQECFSVDIPCSTDMADPTNTPSDGDPPQHRKTSVAAAAKNIAMPNVDDDDDFEPPKKKCNISMDAPNKTQKLDPRDMTLRIGPDKELKITKQTVHQILGLPNLGGGKPLNINEANAAATLRASLNITKDEFVISKLQDRLRLGQDDDLSIRCFFLILFNRLLFPTASWSISFNEVVLTEEMERFPQIDWCHLIFSDLCEAAQRWHNRSINNVSATIYGCSIIVLLYYLDHLHHAAAPNNKNGTPRIKYFNKNIIRALSMADKRKPRQGGEPFGVCPFRSSSETCYVSKSPTTCQIEFPMRPETFDEDPNQHDRLPNIIIQLPLMQDLMANKIQMLPVHQRQKFQATLIDYDLEVGKIFASIKQCLNTIGTKQSNLAATFGELIDEVLRADESVTPNTVSQTVVGGTVENDSGPVFDKTPIGSVSAPGLFLSELECARALRAYLCSRFIELDRNIIDFGEHRANCCDIQQSFADGACLDNVFMQCVIECVRDDWSKHIPPLNAHQLILDVNVGIMVPMLRSGHWTLYVVNLQIGRIHVLDSNPYGPEMGGTIWKNYHCIPMDLGDRKVSWAMLMMSRLNLAIQNARPRSALPAFLKYPIELMNNCPTMKLGSNDCGFFVMRYMQNYDYMVGAMNAVIDPDNSEDIRSLVLHYLIFHRLNRNSFVVSHLDRFKFSQ

SEQ ID NO: 196866 - protein, 82 aa, Zea Mays
MVVSFLLHSCLLTILITFCVGVIPVSAVLADKDVMLCIRPWEHGSMTKSLYFSLLSFLLSNFSPLQGFPIKEKKCLRADVKT

SEQ ID NO: 196867 - protein, 89 aa, Zea Mays
MGPSSPALAPTATELQSSATARSARLRPSPAPAGCTKSDPTPPPPPAPPARPPVSQLPPPPPSHLPPARPSDPTACRAPAAPYQTKRFG

SEQ ID NO: 196868 - protein, 193 aa, Zea Mays
MGPSSPALAPTATELQSSATARSARLRPSPAPAGCTKSDPTPPPPPAPPARPPVSQLPPPPPSHLPPARPSDPTACRAPAAPYQTKRVRFAFTASTTPPRIHYPSAVSRSHSATPAPTAGSKPPSGSCDRIEDEDLEGWTTIRRRRGRAARAGLGCAPAAPRLLSAHAPSRLMVSLRVWMISHFASCGGQVVK

SEQ ID NO: 196869 - protein, 289 aa, Zea Mays
MAHYQQGRRQQVDEYGNPVPGGHGVQGQQLGEAAGGYGVAGTGSYGGQQQAGYGPTGTGTHDAGGYDGSDHPGYGATGTGVDDAGGPGMGTTTGTGAHGATGMLDTGVLGGGGHAATGMPAGHGTRPGATGVAGTGGAFPHAAEHKTGGGILRRSGSSSSSSSSSSEDDGMGGRRKKGLKEKIKEKMPGGHREGQGQATATGAYGGTGYVAGPTTGGPHEKKGVVEKIKEKIPGGHKDYDQHQHTTAATGGGGGYGGTTDTTYGTTTTEGTHEKKGFMDKIKEKLPGQH

SEQ ID NO: 196870 - protein, 53 aa, Zea Mays
MRAYATAIVAAEYILRWLPRGTHEWSKLVTPEELVLMLQKASVSVEEMAGFVY

SEQ ID NO: 196871 - protein, 189 aa, Zea Mays
MNPTRLSFIRSTLCRHFRRDPNSSKPLEGLKVIDVGCGGGILSEPLARMGATGTAIDAVDKNIKIASIHAASDPTTASIEYCCATAEGLVKEKRLFDAVISLEVIEHVANPLEFCESLSALTIPNGATVISTINRSMRAYATAIVAAEYILRWLPRGTHEWSKLVTPEELVLMLQKASVSVEEMAGFVY

SEQ ID NO: 196872 - protein, 141 aa, Zea Mays
MGATGTAIDAVDKNIKIASIHAASDPTTASIEYCCATAEGLVKEKRLFDAVISLEVIEHVANPLEFCESLSALTIPNGATVISTINRSMRAYATAIVAAEYILRWLPRGTHEWSKLVTPEELVLMLQKASVSVEEMAGFVY

SEQ ID NO: 196873 - protein, 370 aa, Zea Mays
MYYMPREMVHLTRVHPNRLYIALAQVFSFSPAPNLPQVEQIGNLQDERQDRYTMDNAHNSSSSCEASGYFFCLEDRALLCRDCDVAIHTVNSFVSVHQRFLLTGVQVGLDPADPVPPIAEKHVNAVGGSVNQPVRHQPRRSPTVQFSVEGSASVPTKNVTNGDCSRQNFVPTARAEVVDWTMNNSTIRSVESPPKYISEESPTLLQSSQTTTVFSNQINGNSDGAYHLSFSGGNVTDSLPDWPVDEFFSNSEYGPNFGFSENGSSKGDTAKLGGAGGSPQCRLAEGSVAEELLGQVPGLITDEYMGRVPENSWTVPEVPSPPTASGLNWHGNLCFPAYDSTMFVPEITSLQNSQSHFTVPSSFKRRRREY

SEQ ID NO: 196874 - protein, 105 aa, Zea Mays
MLQSFLRRMPACLDATPHRRGQRLRCCHACFLLASDEWSLDVGCPRRMRGSPRSICPRSGVQCRTAAAYLSEKKTASALALVIYLSIFTRFACIYIYLRHVEIRC

SEQ ID NO: 196875 - protein, 135 aa, Zea Mays
MAAEAGSRRGAAARRKAKEAAVGAAARVLFYPTLLYNVVRSKVQAEFRWWDEFVLLGAVPFRSDVTRLQKLGICGVITLNEPFETLVPSSMYKASDIHVGSITLLFLQEIICLLLHLWILIKLLISFIEMRLVGK

SEQ ID NO: 196876 - protein, 230 aa, Zea Mays
MAAEAGSRRGAAARRKAKEAAVGAAARVLFYPTLLYNVVRSKVQAEFRWWDEVDPFVLLGAVPFRSDVTRLQKLGICGVITLNEPFETLVPSSMYKSRGIDHLVIPTRDYMFAPSLVDINQATDFIHRNASCGKITYIHCKAGRGRSTTVVLCYLVKYKNMTPAAAFEHVRSKRARVLLTHSQWKVALIVAGCSRIQQEEHGPSCSHERSRNSISSTGRGTGNSSGSERQ

SEQ ID NO: 196877 - protein, 144 aa, Zea Mays
MAAEAGSRRGAAARRKAKEAAVGAAARVLFYPTLLYNVVRSKVQAEFRWWDEVDPFVLLGAVPFRSDVTRLQKLGICGVITLNEPFETLVPSSMYKASDMKCVLWENNIYSLQSWKGPEYNSRLVLSGQIQEYDTCCSFRACTV

SEQ ID NO: 196878 - protein, 200 aa, Zea Mays
MAAEAGSRRGAAARRKAKEAAVGAAARVLFYPTLLYNVVRSKVQAEFRWWDEVDPFVLLGAVPFRSDVTRLQKLGICGVITLNEPFETLVPSSMYKSRGIDHLVIPTRDYMFAPSLVDINQATDFIHRNASCGKITYIHCKAGRGRSTTVVLCYLVALIVAGCSRIQQEEHGPSCSHERSRNSISSTGRGTGNSSGSERQ

SEQ ID NO: 196879 - protein, 259 aa, Zea Mays
MAAEAGSRRGAAARRKAKEAAVGAAARVLFYPTLLYNVVRSKVQAEFRWWDEVDPFVLLGAVPFRSDVTRLQKLGICGVITLNEPFETLVPSSMYKSRGIDHLVIPTRDYMFAPSLVDINQATDFIHRNASCGKITYIHCKAGRGRSTTVVLCYLVKYKNMTPAAAFEHVRSKRARVLLTHSQWKAVQEFSKKNTDRPALTSGPATASPARDAAPVTVADLNGNNAPEFLAEDASLSRRNTTPSRPTIKMLSCLFPSRV

SEQ ID NO: 196880 - protein, 190 aa, Zea Mays
MAAEAGSRRGAAARRKAKEAAVGAAARVLFYPTLLYNVVRSKVQAEFRWWDEVDPFVLLGAVPFRSDVTRLQKLGICGVITLNEPFETLVPSSMYKSRGIDHLVIPTRDYMFAPSLVDINQATDFIHRNASCGKITYIHCKAGRGRSTTVVLCYLVKYKNMTPAAAFEHVRSKRARVLLTHSQWKVLKRP

SEQ ID NO: 196881 - protein, 175 aa, Zea Mays
MAAEAGSRRGAAARRKAKEAAVGAAARVLFYPTLLYNVVRSKVQAEFRWWDEVDPFVLLGAVPFRSDVTRLQKLGICGVITLNEPFETLVPSSMYKASDIHVGSITLLFLQEIICLLLHLWILIKLLISFMKCVLWENNIYSLQSWKGPEYNSRLVLSGQIQEYDTCCSFRACTV

SEQ ID NO: 196882 - protein, 166 aa, Zea Mays
MAAEAGSRRGAAARRKAKEAAVGAAARVLFYPTLLYNVVRSKVQAEFRWWDEFVLLGAVPFRSDVTRLQKLGICGVITLNEPFETLVPSSMYKSRGIDHLVIPTRDYMFAPSLVDINQATDFIHRNASCGKITYIHCKAGRGRSTTVVLCYLVNLIIYLLLRIITC

SEQ ID NO: 196883 - protein, 624 aa, Zea Mays
MLMYHLQALFVQYHSCYSQRGYNSSSMQIAKTFRGHFHLPESINKLVNLVHVDVEKAYVLMLSSTLKLPFVECAGEFHVNDEGSLLGLKDLNMIRGHLTLLSLDKVQNKEEASKAHLHHKEHIMKLELQWGSLNFASSTKQGVEVLDVLKPHSDLEELTISGYPGARSPSWLESGWLSRLQFICLRDCNRWEVLPPLGDLPLLKTVEIRRMQGLRTLGQKFFGRAGFPSLERLLLERLPELEWCCVDNDQVFQNLRHLSVAGCPKLREYPTYPWTLEHIAILDEERIQVKTFIPSARVSRTFCILVSSFFHVLRAHHLEFVEDMEIYVNHVVCMSREVLENLKSLQNLKIYGIHRANTCSVIAKLWDENGSAVFPSSLRSLQLVQCYLKPSYFSKQLNNLSSLETLRLINCDTIEMPCPPVNMWHLRILKQLVLYKCDWITFLEGSEALVSLEEMAISDCYDLKYVPDLNNMPSLEKLHLRRCPQVMRLSSADYQTRLKELVIESCDALSSLRELQGLVSLTKLIVANCSKLELLPGMDSFCALGILIIEDCRLLRSLPERGLPVSLRTFVLDGCHQALDEQFQKGEGPDWNKVAALPGCMRYEHMADVEDESVWHSFYNLYYF

SEQ ID NO: 196884 - protein, 271 aa, Zea Mays
MDEPSPLELADGDAVLWLPEPAAVDLAPQLPDEVDVEPDGVDPASPLLVVSPSLVVDPAPPLPLDCKVDRHRDDPFQPAVETTLAFQSDTERILLLRSLSIPRTQVTAMTDRHTCTSSARRRTTTPTSSWVAGLALPILMKKPNMGAKELQKELQDKWKCTISYDTVWKGREKAFLDLHGAWEDSFRLLFSWKEAVLEKMPDSVIEIDVQEEDGKVFFSRFFCAFGPCIKGFLQGCRPYLSVDSTALNGNRHHSPCLMHWKTPVHRSLLQG

SEQ ID NO: 196885 - protein, 168 aa, Zea Mays
MFTGLGAAGVGCRAAMDLFVLVGRDRAAAQAAPVGDPPLYLKTKNPAVKVVCVEPAESPVISGGKPSRHKIQGVGPGFVPKNLDTSVTDEIVTVTAEDAMANARRLAREEGLLVGISSGANLAACLKVASRQENRGKMIVTVFPSGGERYMSSDLFADAREECVAMTF

SEQ ID NO: 196886 - protein, 297 aa, Zea Mays
MVRAPTTLVIFFSTNVQSCGCHVLHRMIEDAEERGLISPGATTLVEPTSGNMGIALAYIDLARGYRFVAVMPAEYSLDKQILLRYLGADLVLTDPALGFQGQLDKLEQLRKEIPNAHVLDQFANAANPEAHFRWTGPEIWKDTAGKVDIFVAGSGTGGTVSGVGRLTGSRSPRGRRLDNDQSAAGQQRVDGRRLDNDESAAGGWTTCESASRRLDFGRRWGEGPATYGSAPAVRRSGLRAPGERRCELQRCSGVWAWAAPPPRLAAAGAGGYRIEEGCSRGWARLEWAVARRWTYSF

SEQ ID NO: 196887 - protein, 97 aa, Zea Mays
MIEDAEERGLISPGATTLVEPTSGNMGIALAYIALARGYRFVAVMPAEYSLDKQILLRYLGADLVLTGKEVKVAAHRHRCPLVSRLQDWPARLFTMF

SEQ ID NO: 196888 - protein, 383 aa, Zea Mays
MGGEKETFDTSDLNASLPAAAAALSAEDRAGLVNALKDKLQSLAGQHADVLETLSPNVRKRVEFLREIQSQHDEIEAKFFEERAALEAKYQKLYEPLYTKRYGIVNGEVEVDGVCDEPASENTVEGKEPDAKGVPDFWLTAMKTNEVLSEEIQERDEAALKYLKDIKWSRIEDPKGFKLDFFFDTNPFFKNSVLTKTYHMVDEDDPILEKAIGTEIEWYPGKNLTQKILKKKPKKGSKNTKPITKTEDCESFFNFFNPPQVPEDDDDIDEDTADELQSQMEHDYDIGTTIRDKIIPHAVSWFTGEAVQGEDFGELGDDDEDDDDEDDDEDDEDEEEDDDEEEDDEEESKPARKDLVADIRRHRRCRREMRNNQRSASSSRMAC

SEQ ID NO: 196889 - protein, 376 aa, Zea Mays
MGGEKETFDTSDLNASLPAAAAALSAEDRAGLVNALKDKLQSLAGQHADVLETLSPNVRKRVEFLREIQSQHDEIEAKFFEERAALEAKYQKLYEPLYTKRYGIVNGEVEVDGVCDEPASENTVEGKEPDAKGVPDFWLTAMKTNEVLSEEIQERDEAALKYLKDIKWSRIEDPKGFKLDFFFDTNPFFKNSVLTKTYHMVDEDDPILEKAIGTEIEWYPGKNLTQKILKKKPKKGSKNTKPITKTEDCESFFNFFNPPQVPEDDDDIDEDTADELQSQMEHDYDIGTTIRDKIIPHAVSWFTGEAVQGEDFGELGDDDEDDDDEDDDEDDEDEEEDDDEEEDDEEESKPARKSGSGRRHKVSQGNAEQPAECKQQ

SEQ ID NO: 196890 - protein, 378 aa, Zea Mays
MGGEKETFDTSDLNASLPAAAAALSAEDRAGLVNALKDKLQSLAGQHADVLETLSPNVRKRVEFLREIQSQHDEIEAKFFEERAALEAKYQKLYEPLYTKRYGIVNGEVEVDGVCDEPASENTVEGKEPDGVPDFWLTAMKTNEVLSEEIQERDEAALKYLKDIKWSRIEDPKGFKLDFFFDTNPFFKNSVLTKTYHMVDEDDPILEKAIGTEIEWYPGKNLTQKILKKKPKKGSKNTKPITKTEDCESFFNFFNPPQVPEDDDDIDEDTADELQSQMEHDYDIGTTIRDKIIPHAVSWFTGEAVQGEDFGELGDDDEDDDDEDDDEDDEDEEEDDDEEEDDEEESKPARKSGSGRRHKAPQKVSQGNAEQPAECKQQ

SEQ ID NO: 196891 - protein, 178 aa, Zea Mays
MNRKWFLEKIGHEGLNNLLKAYEDKSAFAMCIFSLALGPGEEPITFVGKTAGKIVSARGPNDFGWDPVFQPDGFEQTYAEMPKSVKNEISHRGKALALVVTRSLACLIVLPRDDLRKNGCPCFSLPEALSGSILQLPIASWTSSISNKSSVRLLNSGVLMDFLQRKANDLSKTQPSKL

SEQ ID NO: 196892 - protein, 327 aa, Zea Mays
MTYFRVRASNNLYKPVPNDIMITFTNWTKLEQVIEIPPAFPTLTYSLTHIEQIHSRIDHKDYYTVTSVSNVSPHRSKGQQASNLKRNISICSARGASVNVVLWGAQATLFPGERIYEDGQNSPQIVLFVGTLVKKYADGLCLTGGSPCKWYINPSIPKAEPLMSSARGDHKPVKWNATVTSSQLISPVAEEQKVSYIKYLHPFENKGKEFLVTVTIRKIDSKWWYNSCRKCACTAVTHRDSYKCINRDCANIAMPIQRYKILVTARDETTDTDFILFGRMAQRIVKRSCDMLIANTPSGFIPDAITKLLERTFIWNVSFSGHTINSG

SEQ ID NO: 196893 - protein, 65 aa, Zea Mays
MQLLLAKLTQDDYNCSNRALPCLKIYVCFSNICLVLSSYYSLEEDSWRIKAKGKLMVLLNRSQFL

SEQ ID NO: 196894 - protein, 465 aa, Zea Mays
MCSSDFICFYDWADCRLIRRIDVNVKNVYWADSGDLVAIASDTSFYILKYNRDIVASYLEGGKPVDEEGVEDAFELLHEINERVRTGIWVGDCFIYNNSSWRLNYCVGGEVTTMYHLDRPMYLLGYIANQSRVYLIDKELNVIGYTLLLSLIEYKTLVMRGDLDHANKILSSIPKAQYNSVAHFLESRGMLEEALEIATDADYKFDLAVQLGKLEVAKAIAIEAQSESKWKQLGELAMSTGKLEMAEECLLQAKDLSGLLLLYSSLGDAEGIEKLASLAKEHGKNNVAFLCLFMLGKVEDCIQLLVDSNRIPEAALLARSYLPSKVPEIVAIWRDDLSKINPKAAESLADPSEYPNLFEDWQVALTVEKSVASQRGNYLPADQYLNHAEKSDMTIVEAFKRMQVVQHEEPEDVAEENGELDQQAFEETEMQNTDDDADEPEETVLVNGNKGEEHQGTDNEGALSA

SEQ ID NO: 196895 - protein, 627 aa, Zea Mays
MKGSRRMVIGYDEGTIMIKMGREVPIASMDTGGKIIWAKHNEIQTVNIKTVGAGFEATDGERLPLAVKELGSCDLYPQSLKHNPNGRFVVVCGDGEYIIYTALAWRNRSFGSALEFVWSSEGEYAIRESTSRIKIFNKSFQEKKTIRPSFSAERIYGGVLLAMCSSDFICFYDWADCRLIRRIDVNVKNVYWADSGDLVAIASDTSFYILKYNRDIVASYLEGGKPVDEEGVEDAFELLHEINERVRTGIWVGDCFIYNNSSWRLNYCVGGEVTTMYHLDRPMYLLGYIANQSRVYLIDKELNVIGYTLLLSLIEYKTLVMRGDLDHANKILSSIPKAQYNSVAHFLESRGMLEEALEIATDADYKFDLAVQLGKLEVAKAIAIEAQSESKWKQLGELAMSTGKLEMAEECLLQAKDLSGLLLLYSSLGDAEGIEKLASLAKEHGKNNVAFLCLFMLGKVEDCIQLLVDSNRIPEAALLARSYLPSKVPEIVAIWRDDLSKINPKAAESLADPSEYPNLFEDWQVALTVEKSVASQRGNYLPADQYLNHAEKSDMTIVEAFKRMQVVQHEEPEDVAEENGELDQQAFEETEMQNTDDDADEPEETVLVNGNKGEEHQGTDNEGALSA

SEQ ID NO: 196896 - protein, 159 aa, Zea Mays
MEIQSSGRSIEGLMEKVLSVNILSSDYFKELFKYKTYHEVVDEIYNQVDHVEPWMTGNCRGPSSAFCLLYKLFTMKLTVKQMHGLLKHQDSPYIRAIGFLYLRYVAEPKTLWTWYEPYIKDDEEFAPGSNRKVTTMGVYVRDLLLGQVYLLKLFHNYSI

SEQ ID NO: 196897 - protein, 570 aa, Zea Mays
MGCWSTFFLQQAYAHKILTGRRSLFHTITQKNGLSGFTSRFESEYDPFGAGHGCNSLSAGLGMAVARDINGRKNRIVTVISNWTTMAGQVYEAMGHAGFLDSNMVVILNDSCHTLLPKADGGAKMSVNAFSSALSKIQSSKGFRRFREAAKGLAKWFGKGMHEFAAKVDEYARGMIGPHGATLFEELGLYYIGPIDGRNIDDLICVLKEVASLDSTGPVLVHVITGTENDTGGIIGSEINAVEEGTGLSRTYNDCFVEALTAEAENDKRIVVVHGGMGIDRSLRLFQSRFPDRFFDLGIAEQHAVTFSAGLACGGLKPFCIIPSTFLQRAYDQIIEDVDMQKIPVRFAITNAGLVGSEGPTNSGPFDITFMSCLPNMIVMSPSNEDELIDMVATAAMIEDRPICFRYPRGAIVGTSGSVTYGNPFEIGKGEILVEGKEIAFLGYGEVVQRCLIARSLLSNFGIQATVANARFCKPLDIDLIRTLCQQHSFLITVEEGTVGGFGSHVSQFISLDGLLDGRTKWRPIVLPDRYIEHASLAEQLDLAGLTAHHIAATALTLLGRHRDALLLMK

SEQ ID NO: 196898 - protein, 391 aa, Zea Mays
MDTAFLSPPLARNLVYDEFAVLHPTSYPFHTLRYLRCNPMYSRPLLTIAPASPSRGLIQRVAALPDVDDFFWEKDPTPILDTIDAPIHLKNLSSKELKQLADEVRSEIAFIMSRKCQPCGADRSVVELTIAIHYVFNAPMDKILWDAGQHAYAHKILTGRRSLFHTITQKNGLSGFTSRFESEYDPFGAGHGCNSLSAGLGMAVARDINGRKNRIVTVISNWTTMAGQVYEAMGHAGFLDSNMVVILNDSCHTLLPKADGGAKMSVNAFSSALSKIQSSKGFRRFREAAKGLAKWFGKGMHEFAAKVDEYARGMIGPHGATLFEELGLYYIGPIDGRNIDDLICVLKEVASLDSTGPVLVHVITGTENDTGGIIGSEINAVEEGLAFKLKP

SEQ ID NO: 196899 - protein, 380 aa, Zea Mays
MSMLVEVASLDSTGPVLVHVITGTENDTGGIIGSEINAVEEGPSNSSPDLLKFLGTGLSRTYNDCFVEALTAEAENDKRIVVVHGGMGIDRSLRLFQSRFPDRFFDLGIAEQHAVTFSAGLACGGLKPFCIIPSTFLQRAYDQIIEDVDMQKIPVRFAITNAGLVGSEGPTNSGPFDITFMSCLPNMIVMSPSNEDELIDMVATAAMIEDRPICFRYPRGAIVGTSGSVTYGNPFEIGKGEILVEGKEIAFLGYGEVVQRCLIARSLLSNFGIQATVANARFCKPLDIDLIRTLCQQHSFLITVEEGTVGGFGSHVSQFISLDGLLDGRTKWRPIVLPDRYIEHASLAEQLDLAGLTAHHIAATALTLLGRHRDALLLMK

SEQ ID NO: 196900 - protein, 521 aa, Zea Mays
MAVARDINGRKNRIVTVISNWTTMAGQVYEAMGHAGFLDSNMVVILNDSCHTLLPKADGGAKMSVNAFSSALSKIQSSKGFRRFREAAKGLAKWFGKGMHEFAAKVDEYARGMIGPHGATLFEELGLYYIGPIDGRNIDDLICVLKEVASLDSTGPVLVHVITGTENDTGGIIGSEINAVEEGPSNSSPDLLKFLGTGLSRTYNDCFVEALTAEAENDKRIVVVHGGMGIDRSLRLFQSRFPDRFFDLGIAEQHAVTFSAGLACGGLKPFCIIPSTFLQRAYDQIIEDVDMQKIPVRFAITNAGLVGSEGPTNSGPFDITFMSCLPNMIVMSPSNEDELIDMVATAAMIEDRPICFRYPRGAIVGTSGSVTYGNPFEIGKGEILVEGKEIAFLGYGEVVQRCLIARSLLSNFGIQATVANARFCKPLDIDLIRTLCQQHSFLITVEEGTVGGFGSHVSQFISLDGLLDGRTKWRPIVLPDRYIEHASLAEQLDLAGLTAHHIAATALTLLGRHRDALLLMK

SEQ ID NO: 196901 - protein, 569 aa, Zea Mays
MSRKCQPCGADRSVVELTIAIHYVFNAPMDKILWDAGQHVRHLSVTVVLFFSDLLSATLFRSIVFLQQAYAHKILTGRRSLFHTITQKNGLSGFTSRFESEYDPFGAGHGCNSLSAGLGMAVARDINGRKNRIVTVISNWTTMAGQVYEAMGHAGFLDSNMVVILNDSCHTLLPKADGGAKMSVNAFSSALSKIQSSKGFRRFREAAKGLAKWFGKGMHEFAAKVDEYARGPSNSSPDLLKFLGTGLSRTYNDCFVEALTAEAENDKRIVVVHGGMGIDRSLRLFQSRFPDRFFDLGIAEQHAVTFSAGLACGGLKPFCIIPSTFLQRAYDQIIEDVDMQKIPVRFAITNAGLVGSEGPTNSGPFDITFMSCLPNMIVMSPSNEDELIDMVATAAMIEDRPICFRYPRGAIVGTSGSVTYGNPFEIGKGEILVEGKEIAFLGYGEVVQRCLIARSLLSNFGIQATVANARFCKPLDIDLIRTLCQQHSFLITVEEGTVGGFGSHVSQFISLDGLLDGRTKWRPIVLPDRYIEHASLAEQLDLAGLTAHHIAATALTLLGRHRDALLLMK

SEQ ID NO: 196902 - protein, 703 aa, Zea Mays
MDTAFLSPPLARNLVYDEFAVLHPTSYPFHTLRYLRCNPMYSRPLLTIAPASPSRGLIQRVAALPDVDDFFWEKDPTPILDTIDAPIHLKNLSSKELKQLADEVRSEIAFIMSRKCQPCGADRSVVELTIAIHYVFNAPMDKILWDAGQHKNGLSGFTSRFESEYDPFGAGHGCNSLSAGLGMAVARDINGRKNRIVTVISNWTTMAGQVYEAMGHAGFLDSNMVVILNDSCHTLLPKADGGAKMSVNAFSSALSKIQSSKGFRRFREAAKGLAKWFGKGMHEFAAKVDEYARGMIGPHGATLFEELGLYYIGPIDGRNIDDLICVLKEVASLDSTGPVLVHVITGTENDTGGIIGSEINAVEEGPSNSSPDLLKFLGTGLSRTYNDCFVEALTAEAENDKRIVVVHGGMGIDRSLRLFQSRFPDRFFDLGIAEQHAVTFSAGLACGGLKPFCIIPSTFLQRAYDQIIEDVDMQKIPVRFAITNAGLVGSEGPTNSGPFDITFMSCLPNMIVMSPSNEDELIDMVATAAMIEDRPICFRYPRGAIVGTSGSVTYGNPFEIGKGEILVEGKEIAFLGYGEVVQRCLIARSLLSNFGIQATVANARFCKPLDIDLIRTLCQQHSFLITVEEGTVGGFGSHVSQFISLDGLLDGRTKWRPIVLPDRYIEHASLAEQLDLAGLTAHHIAATALTLLGRHRDALLLMK

SEQ ID NO: 196903 - protein, 472 aa, Zea Mays
MDTAFLSPPLARNLVYDEFAVLHPTSYPFHTLRYLRCNPMYSRPLLTIAPASPSRGLIQRVAALPDVDDFFWEKDPTPILDTIDAPIHLKNLSSKELKQLADEVRSEIAFIMSRKCQPCGADRSVVELTIAIHYVFNAPMDKILWDAGQHAYAHKILTGRRSLFHTITQKNGLSGFTSRFESEYDPFGAGHGCNSLSAGLGMAVARDINGRKNRIVTVISNWTTMAGQVYEAMGHAGFLDSNMVVILNDSCHTLLPKADGGAKMSVNAFSSALSKIQSSKGFRRFREAAKGLAKWFGKGMHEFAAKVDEYARVASLDSTGPVLVHVITGTENDTGGIIGSEINAVEEGPSNSSPDLLKFLGTGLSRTYNDCFVEALTAEAENDKRIVVVHGGMGIDRSLRLFQSRFPDRFFDLGIAEQHAVTFSAGLACGGLKPFCIIPSTFLQRAYDQIIEDVDMQKIPVRFAITNAGLLQ

SEQ ID NO: 196904 - protein, 525 aa, Zea Mays
MCSMPQWIRYYGMLVNMHMRTRFSQEGALSSILLHRKMAFLGSRRVLRASMIPLVLDMDAIVYPLALFLSYFLSGMAVARDINGRKNRIVTVISNWTTMAGQVYEAMGHAGFLDSNMVVILNDSCHTLLPKADGGAKMSVNAFSSALSKIQSSKGFRRFREAAKGLAKWFGKGMHEFAAKVDEYARGPSNSSPDLLKFLGTGLSRTYNDCFVEALTAEAENDKRIVVVHGGMGIDRSLRLFQSRFPDRFFDLGIAEQHAVTFSAGLACGGLKPFCIIPSTFLQRAYDQIIEDVDMQKIPVRFAITNAGLVGSEGPTNSGPFDITFMSCLPNMIVMSPSNEDELIDMVATAAMIEDRPICFRYPRGAIVGTSGSVTYGNPFEIGKGEILVEGKEIAFLGYGEVVQRCLIARSLLSNFGIQATVANARFCKPLDIDLIRTLCQQHSFLITVEEGTVGGFGSHVSQFISLDGLLDGRTKWRPIVLPDRYIEHASLAEQLDLAGLTAHHIAATALTLLGRHRDALLLMK

SEQ ID NO: 196905 - protein, 255 aa, Zea Mays
MSRKCQPCGADRSVVELTIAIHYVFNAPMDKILWDAGQHKNGLSGFTSRFESEYDPFGAGHGCNSLSAGLGMAVARDINGRKNRIVTVISNWTTMAGQVYEAMGHAGFLDSNMVVILNDSCHTLLPKADGGAKMSVNAFSSALSKIQSSKGFRRFREAAKGLAKWFGKGMHEFAAKVDEYARGMIGPHGATLFEELGLYYIGPIDGRNIDDLICVLKEVASLDSTGPVLVHVITGTENDTGGIIGSEINAVEEGL

SEQ ID NO: 196906 - protein, 157 aa, Zea Mays
MCGTSHTSPSTASLASSTSPLTSSPTCLAPCRAQGESIPRSQVTGKFSERHKDRSYATSRPHQCYRLIVIIVTLLFMGIATTKILVVISSQLLVAGFIFGNACKTVFEALIFVFIMHPFEVANRCVIDETQVPGEQTNALAPYPHCKSQGHLGCEQD

SEQ ID NO: 196907 - protein, 137 aa, Zea Mays
MAGHLSGSGESIPRSQVTGKFSERHKDRSYATSRPHQCYRLIVIIVTLLFMGIATTKILVVISSQLLVAGFIFGNACKTVFEALIFVFIMHPFEVANRCVIDETQVTSTSLFLVPVSIDFPCYRHECTLMIDDRRGN

SEQ ID NO: 196908 - protein, 66 aa, Zea Mays
MPISLALVLSRSSPQSWSRRERCPRRMVLAVELRRDRDSFLSFEESTVKLWRPSDRTLRVLRDRRS

SEQ ID NO: 196909 - protein, 67 aa, Zea Mays
MHHPSLVHNNSTRFKTLFLLFPPRPDLQGFFFYPLPCMMLSSTNCLQASRDHGLITNNSPPCAKLMR

SEQ ID NO: 196910 - protein, 317 aa, Zea Mays
MSSAAAPAAVGSGKELANPPADGITNLRFSNHSNNLLVSSWDKTVRLYDADANVLKGEFMHPGAVLDCCFHDDSSGFSAGADHTVRRLVFSSSKEDVLGRHDGPVRCVEYSYAAGQVITGSWDKTVKCWDPRGVSGPERTLVGTYAQPERVYSLSLVGNRLVVATAGRHVNIYDLRNMSQPEQKRDSSLKYQTRCVRCFPNGTGYALSSVEGRVSMEFFDLSESAQSKKYAFKCHRKSEAGRDTVYPVNAIAFHPIYGTFATGGCDGFVNVWDGINKKRLYQYSKYASSIAALSFSKDGHLLAVASSYTYEEGEKTE

SEQ ID NO: 196911 - protein, 204 aa, Zea Mays
MSSAAAPAAVGSGKELANPPADGITNLRFSNHSNNLLVSSWDKTVRLYDADANVLKGEFMHPGAVLDCCFHDDSSGFSAGADHTVRRLVFSSSKEDVLGRHDGPVRCVEYSYAAGQVITGSWDKTVKCWDPRGVSGPERTLVGTYAQPERVYSLSLVGNRLVVATAGRHVNIYDLRNMSQPEQKRDSSLKYQTRCVRCFPNGTD

SEQ ID NO: 196912 - protein, 428 aa, Zea Mays
MYCKCGDLDSAHQVLDRLEHVDEISLSALVYGYASCGQLHKALCLFDKMESPSIALWTSLISGMLKPGQQTQACALKSGAVNDLIAASALIDFYSKCGLWADACQAFSELRHHDTIVLNSMITVYSNCGQIDEARRVFRLIPSKSVISWNSMIVGFSQNGHALDALELFCEMHRLGLQLDNVAISSVLSASGSICSVSSGEQIFGLAIALGLQSDHIVASSLIDLYCKCGNLANGRRIFSGIANPDEVLWNSMLIGYASNGYGLEALKLLDLMQSRGLKPSERTFVGVLSACCHSGLVEEGLRWFYRMKEDFGVSPSAEHYACVTDLLVRAGRLDEAVEFIENMPFKADAISWTSIIGGCKAQGNEVLLDKVANKLMETGLSTHSSLYVQLSSTLAAHGDWDKSAEIRSMMHDRRISKNAGRSWVDRA

SEQ ID NO: 196913 - protein, 115 aa, Zea Mays
MSTVSRASLDQKLALAKRCSREATLAGAKAAAVATIASAIPTLASVRMLPWAKANINPTGQALIVSTVAGMAYFIAADKKILSLARRHSFEQAPDHLKNTSFQGTGRPHPAFFRP

SEQ ID NO: 196914 - protein, 91 aa, Zea Mays
MSTVSRASLDQKLALAKRCSREATLAGAKAAAVATIASAIPTRADAAMGQGQHQPHRPGAHRLHGGWDGLLHRRRQEDPVAGEAPLVRASP

SEQ ID NO: 196915 - protein, 68 aa, Zea Mays
MLPWAKANINPTGQALIVSTVAGMAYFIAADKKILSLARRHSFEQAPDHLKNTSFQGTGRPHPAFFRP

SEQ ID NO: 196916 - protein, 131 aa, Zea Mays
MHRWAFGACIGKLEKEVLRGLLERVAPRQRQDLLVGGDEVGHPSHRGDDERLAGGVDVGLGPWQHPHAGQGGDRGGDSRHRCRLGSGEGRLSGATLGEGELLVEGRTAHRRRHLCVRGCRLAGAAAKQEGL

SEQ ID NO: 196917 - protein, 250 aa, Zea Mays
MKIHRSVLVLNGNGADVAKHCVPAVPTKRISITFRKMDPAKRPFGFEDDPELLNLAPLGTVVQETGISSDEGKGKLPDVQITNMGKASRGKRSKGRTAAGKYGSGILGEQSPGHAQAPAVEVQSLRNPHGQRPVSASSAERERNSAGRSRESRHQSSTLVVHSQVDNSRQWPRRSAQERWHSNGMSFSEDGVGSAERRPRVEHRQISLINQTISDDMDSLSLSGRESGDQPRASVRTVYNKPREDQIKPR

SEQ ID NO: 196918 - protein, 284 aa, Zea Mays
MLPPTRDRQPAVFSHVGTKVFVGLRAQTKLGSSESSCPNVSAGFHTAVNRRISLRLSKKKATRARISMMPIGTPRVPYRTPGEGTWQWLDIWNALYRERIIFIGDNIDEEFSNQVLASMLYLDSIDNSKKIMLYINGPGGDLTPCMALYDTMLSLKSPIGTHCLGFAFNLAGFILAAGEKGSRTGMPLCRISLQSPAGAARGQADDIENEANELIRIKNYLYGKLAGHTGHSVEKIHEDLSRVKRFDAEGALEYGIIDRIVRPSRIKKEGSTAQRRDMRNLGLG

SEQ ID NO: 196919 - protein, 151 aa, Zea Mays
MPIGSGCTTQALAAMHGGGEPEVVEPHRRLLQQRMEPLSSFRPPADSDVDRDDCRRLTRLLVNVTVDRSLWPVHLVLGADATVADLVRAAVAAYAREGRRPPLAGAAADGFELHLDKYSLQSLRLEDKVLDLGSRNFFLCARRPAGLGLTT

SEQ ID NO: 196920 - protein, 409 aa, Zea Mays
MATTSFRSLLLLFLSVLGASARNEEDARALAALKRALDPAGRVLGSWDPSGDPCAGSFVGLTCGRDGRVTAVSLQGRGLSGTLPPAVAGLRRLQGLYLHYNGIKGPIPREIGKLSELTDLYLDVNHLTGPVPVEIAAIANLQVLQLGYNQLTGSIPPQLGNLNKLTVLAMQSNQLDGAIPATLGELTQLRRLDLSFNSLFGSIPSKIAEVPLLEVFDVRNNTLSGSVPVGLRRLNGGFQYMNNKGLCGAGFSLLELCLSSEDGLKPSKPEPFGPDGTVKTRQVPQSANPDGCSGASCSKSANASQGVLIVAVVAAVIGAAFCGLFAFSWYRRQKQKIGSSLEVSDSRLSTDHFQQKEACRRSASPLISVEYSNSWDPLSAGGAGVGSPGQVVGDSFRFNLEERGMLPRV

SEQ ID NO: 196921 - protein, 304 aa, Zea Mays
MHTSSEVAAPMTWLVLTLLLSSAVYFCLLPLIFCPSIGWHPPTIYISPTHTHVPQAAAVETVKVVTTPVFPQIPRLQASKDFQVVVRLEAPPVAQQKARVPVDLAVVLDVGAGGGGSTGSARLDAVKKAVKFIIGQIHDNDRLAVVGPSPNRRLVIGFPSTHEARQNAEKSVDDLEPRGEFASGAGLEEAVKLIRTTGVSDPRGVTGDGEREQPRALRHPGDRHGGDGGQRRQIRQAAARAPPPGAHVRPRRGARPQGAALHRQGVPGHLLLRRRPEHGRHHGRHRHLPQRAQGRGRRRHARPR

SEQ ID NO: 196922 - protein, 592 aa, Zea Mays
MRSLLTQHSRLKMHTSSEVAAPMTWLVLTLLLSSAAAAVETVKVVTTPVFPQIPRLQASKDFQVVVRLEAPPVAQQKARVPVDLAVVLDVGAGGGGSTGSARLDAVKKAVKFIIGQIHDNDRLAVVGPSPNRRLVIGFPSTHEARQNAEKSVDDLEPRGEFASGAGLEEAVKILGELPATASGSSRARFVILVTDTAVTEGSGGRFGKLRRELLPPVHTFGLGAGHDPRALLSIARESQGTYSFVDDQNTDGITGAIAICLSGLKDVVAVGTRVRVEAPVGSGVTIERIESGGVPALPSTSAMTTSSSVDNGGCDKQQLLTVTFAGHYATRDEGGATSPASPSPTVTTTAILYVQRPPPEALDVAGGGALFRVPVPAVMNLIARFGVLEMVTTFVENEIWRLSSSSSSTVEVATKLRTQWEQFVQARQFWSGLDLGVLDVEVNRMASILEAAGTRIGSSATAYMLSWLSSYQMQRPTAMGSPSIVAAAFVTVKMQLTLQQATIVTIRPQPCIGGCPACECGCEDRCVQPLPPPVLLPSGRGDDTYRVNPAYPQGVLFNAINQAMEQMYLALVRASNLTRCDDAARVELFLPA

SEQ ID NO: 196923 - protein, 92 aa, Zea Mays
MEGTREARIAVGLCWLLVFSFVFFPGHRCRAIVFYLLDSRANNVIKRVWWCVPETDNVRGNFYRQVWHVLCNDETMQIVAYIEVYMIMMVEM

SEQ ID NO: 196924 - protein, 148 aa, Zea Mays
MTWSQAMPFSMGLASIPISLLSSRFYVLYVGDSKRAMDEYTSEIFMGSKNTIVLHNTYEDSLLTTPIILDLVLLAELSTRIQLKPEGTDKFHSFHPVATILSYLTKAPLVPPGTLVVNALAKQRAVLENIMRACVGLALENNMILEYK

SEQ ID NO: 196925 - protein, 179 aa, Zea Mays
MVLHFCSKTYYTCCMFVGLIDLAIKNNCLIGGDDFKSGKTKMKSVLVDFLVGAGIKYVLYVGDSKRAMDEYTSEIFMGSKNTIVLHNTYEDSLLTTPIILDLVLLAELSTRIQLKPEGTDKFHSFHPVATILSYLTKAPLVPPGTLVVNALAKQRAVLENIMRACVGLALENNMILEYK

SEQ ID NO: 196926 - protein, 469 aa, Zea Mays
MGDRYETVRFFHCYKRGVDRVFVDHPLFLERVWGKTEEKIYGPDAGTDYRDNQLRFSLLCQAALEAPRILSLNNNPYFSGPYGEDVVFVCNDWHTGPLSCYLKSNYQSHGIYRDAKTAFCIHNISYQGRFAFSDYPELNLPERFKSSFDFIDGYEKPVEGRKINWMKAGILEADRVLTVSPYYAEELISGIARGCELDNIMRLTGITGIVNGMDVSEWDPSRDKYIAVKYDVSTAVEAKALNKEALQAEVGLPVDRNIPLVAFIGRLEEQKGPDVMAAAIPQLMEMVEDVQIVLLGTGKKKFERMLMSAEEKFPGKVRAVVKFNAALAHHIMAGADVLAVTSRFEPCGLIQLQGMRYGTPCACASTGGLVDTIIEGKTGFHMGRLSVDCNVVEPADVKKVATTLQRAIKVVGTPAYEEMVRNCMIQDLSWKGPAKNWENVLLSLGVAGGEPGVEGEEIAPLAKENVAAP

SEQ ID NO: 196927 - protein, 424 aa, Zea Mays
MSISVNGQSVVPPGFRFHPTEEELLTYYLKKKVASERIDLDVIRDVDLNKLEPWDIQEKCRIGSGPQNDWYFFSHKDKKYPTGTRTNRATAAGFWKATGRDKAIYASPGARRIGMRKTLVFYKGRAPHGQKSDWIMHEYRLEAPVDAGAGAAHHLLLPAAEHPPYYTSPPQAPSSTTTATIRGAAGDQAAQEQEGWVICRVFKKKNLVHHGQSSGVKQQAAGDDHAASHTAAAAAHMDESSPSQCSSVTVISDHVHANVNDKQQQAQASLLMMHTHHSASSDDDALDHILQQYMGGGRQAPAPDTKPALLEQLDHLHHHLAAAPTTRAAAGFYYGKFMKLPPLEHAGLPPSPPPPGAREYGAAAAAGWDDDDDALDRLAAYDHLNGLSNDASKNMAAAAVDGDLWSLARSVSALHADLTMNNNV

SEQ ID NO: 196928 - protein, 150 aa, Zea Mays
MANMVGLNKFSLGTSLKSEKHLFISPDPEFLIPYALPIQMNRGGEDEEHTARNIRSKAEWQGIMCSKQNIRSQHTMPTLWQARRHPCLRWTLRAGNKHPAGRNLELCHYETWVLLYCHQMNGFHPDAIMNHGVHAKMSFGCLTKTKITPI

SEQ ID NO: 196929 - protein, 170 aa, Zea Mays
MYPSINERVSRQVSCPCFPKPIYCSPHTVHPRYCSFASLFTYNYCSPRCVNSSSSLRLFQLAATVPKLRGPEPQPSPHHTYHLRSRSSNRNCACCHPSDHPRQNHEQKGMAEQASVCPYGKSTYLISDYSPSTICVIVQVGIDLIRAGAGSENGTNIPSCGADSLLNKVL

SEQ ID NO: 196930 - protein, 56 aa, Zea Mays
MSTRVQNRIKALTNSKSRLAVSLAATSAKPIIKTPWELGVRGQEYSDSGTRRKKVT

SEQ ID NO: 196931 - protein, 239 aa, Zea Mays
MAGLERPRRRPPPDPVAVLRGHRAAVNDACFHPSLPLLFSGAADGELRAWDTASHRTASSVWAHAGSVGVYSVAAGAGLGNKIISQGRDGTCKCWAIEEAGLSRKPLLTIKTSTYHFCKMSLVKSSFTHATESGSSSSASDVEPQIVPTENAECHGVNPTIGPQEHDQCTTSNGHNMLAIAGQESSQVELWDITSARKIVTLPQTCSANATDHPTKKKVMKMEALFGGMYESLDYLYLQ

SEQ ID NO: 196932 - protein, 421 aa, Zea Mays
MAGLERPRRRPPPDPVAVLRGHRAAVNDACFHPSLPLLFSGAADGELRAWDTASHRTASSVWAHAGSVGVYSVAAGAGLGNKIISQGRDGTCKCWAIEEAGLSRYHLLTLFEFKKQLIFLQERKPLLTIKTSTYHFCKMSLVKSSFTHATESGSSSSASDVEPQIVPTENAECHGVNPTIGPQEHDQCTTSNGHNMLAIAGQESSQVELWDITSARKIVTLPQTCSANATDHPTKKKGLCMAVQAFIPHESAGYVNILSSYEDGSTLWWDVRKPGLPLSSVKYHSESALSIAIDGFCNGGISGGADDKVVMFTLDHPKGTFILRKEIELERPGIAGTAIRPDNKIAATAGWDHRIRVYNYNKGNALAVLKYHSASCNAVTFSSDCKLMASCSADTTVALWDLYPPKPQSKADITETDEASC

SEQ ID NO: 196933 - protein, 226 aa, Zea Mays
MLAIAGQESSQVELWDITSARKIVTLPQTCSANATDHPTKKKGLCMAVQAFIPHESAGYVNILSSYEDGSTLWWDVRKPGLPLSSVKYHSESALSIAIDGFCNGGISGGADDKVVMFTLDHPKGTFILRKEIELERPGIAGTAIRPDNKIAATAGWDHRIRVYNYNKGNALAVLKYHSASCNAVTFSSDCKLMASCSADTTVALWDLYPPKPQSKADITETDEASC

SEQ ID NO: 196934 - protein, 211 aa, Zea Mays
MLAIAGQESSQVELWDITSARKIVTLPQTCSANATDHPTKKKGLCMAVQAFIPHESAGYVNILSSYEDGSTLWWDVRKPGLPLSSVKYHSESGGADDKVVMFTLDHPKGTFILRKEIELERPGIAGTAIRPDNKIAATAGWDHRIRVYNYNKGNALAVLKYHSASCNAVTFSSDCKLMASCSADTTVALWDLYPPKPQSKADITETDEASC

SEQ ID NO: 196935 - protein, 178 aa, Zea Mays
MAGLERPRRRPPPDPVAVLRGHRAAVNDACFHPSLPLLFSGAADGELRAWDTASHRTASSVWAHAGSVGVYSVAAGAGLGNKIISQGRDGTCKCWAIEEAGLSRKPLLTIKTSTYHFCKMSLVKSSFTHATESGSSSSASDVEPQIVPTENAECHGVNPTIGPQEHDQCIEATLKPLL

SEQ ID NO: 196936 - protein, 171 aa, Zea Mays
MGLVNVGRLKKLGFQGIICSRYLSSKNNSFFFRRGRKPLLTIKTSTYHFCKMSLVKSSFTHATESGSSSSASDVEPQIVPTENAECHGVNPTIGPQEHDQCTTSNGHNMLAIAGQESSQVELWDITSARKIVTLPQTCSANATDHPTKKKVMKMEALFGGMYESLDYLYLQ

SEQ ID NO: 196937 - protein, 169 aa, Zea Mays
MAGLERPRRRPPPDPVAVLRGHRAAVNDACFHPSLPLLFSGAADGELRAWDTASHRTASSVWAHAGSVGVYSVAAGAGLGNKIISQGRDGTCKCWAIEEAGLSRKPLLTIKTSTYHFCKMSLVKSSFTHATESGSSSSASDVEPQIVPTENAECHGVNPTIGPQEHDQC

SEQ ID NO: 196938 - protein, 205 aa, Zea Mays
MAGLERPRRRPPPDPVAVLRGHRAAVNDACFHPSLPLLFSGAADGELRAWDTASHRTASSVWAHAGSVGVYSVAAGAGLGNKIISQGRDGTCKCWAIEEAGLSRKPLLTIKTSTYHFCKMSLVKSSFTHATESGSSSSASDVEPQIVPTENAECHGVNPTIGPQEHDQCTTSNGHNMLAIAGQESSQEEKLFRLSFGTLQVLERS

SEQ ID NO: 196939 - protein, 120 aa, Zea Mays
MSLVKSSFTHATESGSSSSASDVEPQIVPTENAECHGVNPTIGPQEHDQCTTSNGHNMLAIAGQESSQVELWDITSARKIVTLPQTCSANATDHPTKKKVMKMEALFGGMYESLDYLYLQ

SEQ ID NO: 196940 - protein, 271 aa, Zea Mays
MAGLERPRRRPPPDPVAVLRGHRAAVNDACFHPSLPLLFSGAHAGSVGVYSVAAGAGLGNKIISQGRDGTCKCWAIEEAGLSRKPLLTIKTSTYHFCKMSLVKSSFTHATESGSSSSASDVEPQIVPTENAECHGVNPTIGPQEHDQCTTSNGHNMLAIAGQESSQVELWDITSARKIVTLPQTCSANATDHPTKKKGLCMAVQAFIPHESAGYVNILSSYEDGSTLWWDVRKPGLPLSSVKYHSESGVQLYPLLLMDFAMVESQEVLMIK

SEQ ID NO: 196941 - protein, 167 aa, Zea Mays
MATVTEEVAPVVTVSEEPAPEAAKEVVEKPEEGKKPDEEGDERKKADPAAEKEKKADPAAEKEKKARKPRSRKPKSAGLHHPPYFEMIKEAILSQDGGKVGASPYAIAKHMGEKHRDVLPPNYRKVLAVQLRGKRARKVAPAPAQPKPKPARAAASGAGKKVNKASA

SEQ ID NO: 196942 - protein, 216 aa, Zea Mays
MATVTEEVAPVVTVSEEPAPEAAKEVVEKPEEGKKPDEEGDERKKADPAAEKEKKARKPRSRKPKSAGLHHPPYFEDGGKVGASPYAIAKHMGEKHRDVLPPNYRKVLAVQLRGFAAKGRLVKVKASFKLAAAEERKPSAAAKAKKKASAGMAKRKRAAAPAKMKPAAAASAPSREARKVRAKRARKVAPAPAQPKPKPARAAASGAGKKVNKASA

SEQ ID NO: 196943 - protein, 152 aa, Zea Mays
MATVTEEVAPVVTVSEEPAPEAAKEVVEKPEEGKKPDEEGDERKKADPAAEKEKKADPAAEKEKKARKPRSRKPKSAGLHHPPYFEMIKEAILSQDGGKVGASPYAIAKHMGEKHRDVLPPNYRKVLAVQLRGFAAKGRLVKVKASVYYTSR

SEQ ID NO: 196944 - protein, 121 aa, Zea Mays
MLSDQKFISEYIKVNRERLRKMYLLFSDALKQLGIECFKSSGGFYCWADMSRYIRSYSEKGERKLWDRLLEEAKVNVTPGSSCHCIEPGWFRCCFTTLSEEDIPVLVERLRRVTDSFKSKR

SEQ ID NO: 196945 - protein, 334 aa, Zea Mays
MRQTMHGSVSFDPSQMVITCGATPAMEILSFCIADPGNAFLVPSPYYPGWDRDIKWRTGVELIPVPCRSTDNFNVSVTALEIAYKQAKKRGIRVRGVLISNPSNPTGGIVPKEILHDLLQFAAEKNIHLISDEIFAGSTYGSDKFVSVADVVDELEDFDKGRVHIIYGLSKDLSLAGFRVGVIYSYNEHIVSAAAKIARFSSVSSPTQRLLVSMLSDQKFISEYIKVNRERLRKMYLLFSDALKQLGIECFKSSGGFYCWADMSRYIRSYSEKGERKLWDRLLEEAKVNVTPGSSCHCIEPGWFRCCFTTLSEEDIPVLVERLRRVTDSFKSKR

SEQ ID NO: 196946 - protein, 351 aa, Zea Mays
MNTRQHLRLRKQALAGFMRQTMHGSVSFDPSQMVITCGATPAMEILSFCIADPGNAFLVPSPYYPGWDRDIKWRTGVELIPVPCRSTDNFNVSVTALEIAYKQAKKRGIRVRGVLISNPSNPTGGIVPKEILHDLLQFAAEKNIHLISDEIFAGSTYGSDKFVSVADVVDELEDFDKGRVHIIYGLSKDLSLAGFRVGVIYSYNEHIVSAAAKIARFSSVSSPTQRLLVSMLSDQKFISEYIKVNRERLRKMYLLFSDALKQLGIECFKSSGGFYCWADMSRYIRSYSEKGERKLWDRLLEEAKVNVTPGSSCHCIEPGWFRCCFTTLSEEDIPVLVERLRRVTDSFKSKR

SEQ ID NO: 196947 - protein, 153 aa, Zea Mays
MRDRFCSSGTNCHTQESIDIDNEDHHADQPCEDYIPDEKRVVYNRMNPSMQPGCLFPNKKEFRIVMRQYAIKHEFEVRIDVTSTTRYVGYCKGGDCPWRIYAREEKKGLPTIVVVVLDDVHTCTSSGRRKTTTPTSGWVAFHARPLLMKKPQM

SEQ ID NO: 196948 - protein, 948 aa, Zea Mays
MAARSSAAAVAVLLLAAAGAAAAAGGAEGDGDGQALMAVKAGFRNAANALADWDGGRDHCAWRGVACDAASFAVVGLNLSNLNLGGEISPAIGQLKSLQFVDLKLNKLTGQIPDEIGDCVSLKYLDLSGNLLYGDIPFSISKLKQLEDLILKNNQLTGPIPSTLSQIPNLKTLDLAQNKLTGDIPRLIYWNEVLQYLGLRGNSLTGTLSPDMCQLTGLWYFDIRGNNLTGTIPEGIGNCTSFEILDISYNQISGEIPYNIGYLQVATLSLQGNRLIGKIPEVIGLMQALAVLDLSENELVGPIPPILGNLSYTGKLYLHGNKLTGHIPPELGNMSKLSYLQLNDNELVGTIPAELGKLTELFELNLANNNLEGHIPANISSCSALNKFNVYGNRLNGSIPAGFQKLESLTYLNLSSNSFKGQIPSELGHIVNLDTLNLSKNHLTGSVPAEFGNLRSVQVIDMSSNNLSGYLPEELGQLQNLDSLILNNNSLAGEIPAQLANCFSLVSLNLSYNNFSGHVPSSKNFSKFPMESFMGNLMLHVYCQDSSCGHSHGTKGFVILLCIVLLAIYKTNQPQLPEKASDKPVQGPPKLVVLQMDMAVHTYEDIMRLTENLSEKYIIGYGASSTVYRCDLKSGKAIAVKRLYSQYNHSLREFETELETIGSIRHRNLVSLHGFSLSPHGNLLFYDYMENGSLWDLLHGPSKKVKLDWDTRLRIAVGAAQGLAYLHHDCNPRIVHRDVKSSNILLDGSFEAHLSDFGIAKCVPAAKSHASTYVLGTIGYIDPEYARTSRLNEKSDVYSFGVVLLELLTGRKAVDNESNLHQLILSKADDDTVMEAVDPEVSVTCTDMNLVRKAFQLALLCTKRHPADRPTMHEVARVLLSLLPPAAKPPASKAAAASAAAGDYTRFLATAADLRRGGVADDDTGDNSSSDEQWFVRFGEVISKHTLS

SEQ ID NO: 196949 - protein, 1040 aa, Zea Mays
MAARSSAAAVAVLLLAAAGAAAAAGGAEGDGDGQALMAVKAGFRNAANALADWDGGRDHCAWRGVACDAASFAVVGLNLSNLNLGGEISPAIGQLKSLQFVDLKLNKLTGQIPDEIGDCVSLKYLDLSGNLLYGDIPFSISKLKQLEDLILKNNQLTGPIPSTLSQIPNLKTLDLAQNKLTGDIPRLIYWNEVLQYLGLRGNSLTGTLSPDMCQLTGLWYFDIRGNNLTGTIPEGIGNCTSFEILDISYNQISGEIPYNIGYLQVATLSLQGNRLIGKIPEVIGLMQALAVLDLSENELVGPIPPILGNLSYTGKLYLHGNKLTGHIPPELGNMSKLSYLQLNDNELVGTIPAELGKLTELFELNLANNNLEGHIPANISSCSALNKFNVYGNRLNGSIPAGFQKLESLTYLNLSSNSFKGQIPSELGHIVNLDTLDLSYNEFSGPVPPTIGDLEHLLELNLSKNHLTGSVPAEFGNLRSVQVIDMSSNNLSGYLPEELGQLQNLDSLILNNNSLAGEIPAQLANCFSLVSLNLSYNNFSGHVPSSKNFSKFPMESFMGNLMLHVYCQDSSCGHSHGTKGFVILLCIVLLAIYKTNQPQLPEKASDKPVQVSQEDSSITFLDHIAGPPKLVVLQMDMAVHTYEDIMRLTENLSEKYIIGYGASSTVYRCDLKSGKAIAVKRLYSQYNHSLREFETELETIGSIRHRNLVSLHGFSLSPHGNLLFYDYMENGSLWDLLHGEAGFLSSLSFFFLNSCRFVLPITHGPRPFPGPSKKVKLDWDTRLRIAVGAAQGLAYLHHDCNPRIVHRDVKSSNILLDGSFEAHLSDFGIAKCVPAAKSHASTYVLGTIGYIDPEYARTSRLNEKSDVYSFGVVLLELLTGRKAVDNESNLHQLVSRRRHGDGGRGPGGVGDVHGHEPGAEGLPARAAVHQAPPRGPADHARGREGAALPPAARRQASRVQGGGGFGGGRRLHALPRDGGRPEARRRGRRRHRRQQLLRRAVVRAVRRGYIQAHAVMIVRPSVSLTPPQKVFSQVEIEVKA

SEQ ID NO: 196950 - protein, 961 aa, Zea Mays
MAARSSAAAVAVLLLAAAGAAAAAGGAEGDGDGQALMAVKAGFRNAANALADWDGGRDHCAWRGVACDAASFAVVGLNLSNLNLGGEISPAIGQLKSLQFVDLKLNKLTGQIPDEIGDCVSLKYLDLSGNLLYGDIPFSISKLKQLEDLILKNNQLTGPIPSTLSQIPNLKTLDLAQNKLTGDIPRLIYWNEVLQYLGLRGNSLTGTLSPDMCQLTGLWYFDIRGNNLTGTIPEGIGNCTSFEILDISYNQISGEIPYNIGYLQVATLSLQGNRLIGKIPEVIGLMQALAVLDLSENELVGPIPPILGNLSYTGKLYLHGNKLTGHIPPELGNMSKLSYLQLNDNELVGTIPAELGKLTELFELNLANNNLEGHIPANISSCSALNKFNVYGNRLNGSIPAGFQKLESLTYLNLSSNSFKGQIPSELGHIVNLDTLNLSKNHLTGSVPAEFGNLRSVQVIDMSSNNLSGYLPEELGQLQNLDSLILNNNSLAGEIPAQLANCFSLVSLNLSYNNFSGHVPSSKNFSKFPMESFMGNLMLHVYCQDSSCGHSHGTKVSISRTAVACMILGFVILLCIVLLAIYKTNQPQLPEKASDKPVQGPPKLVVLQMDMAVHTYEDIMRLTENLSEKYIIGYGASSTVYRCDLKSGKAIAVKRLYSQYNHSLREFETELETIGSIRHRNLVSLHGFSLSPHGNLLFYDYMENGSLWDLLHGPSKKVKLDWDTRLRIAVGAAQGLAYLHHDCNPRIVHRDVKSSNILLDGSFEAHLSDFGIAKCVPAAKSHASTYVLGTIGYIDPEYARTSRLNEKSDVYSFGVVLLELLTGRKAVDNESNLHQLILSKADDDTVMEAVDPEVSVTCTDMNLVRKAFQLALLCTKRHPADRPTMHEVARVLLSLLPPAAKPPASKAAAASAAAGDYTRFLATAADLRRGGVADDDTGDNSSSDEQWFVRFGEVISKHTLS

SEQ ID NO: 196951 - protein, 935 aa, Zea Mays
MAARSSAAAVAVLLLAAAGAAAAAGGAEGDGDGQALMAVKAGFRNAANALADWDGGRDHCAWRGVACDAASFAVVGLNLSNLNLGGEISPAIGQLKSLQFVDLKLNKLTGQIPDEIGDCVSLKYLDLSGNLLYGDIPFSISKLKQLEDLILKNNQLTGPIPSTLSQIPNLKTLDLAQNKLTGDIPRLIYWNEVLQYLGLRGNSLTGTLSPDMCQLTGLWYFDIRGNNLTGTIPEGIGNCTSFEILDISYNQISGEIPYNIGYLQVATLSLQGNRLIGKIPEVIGLMQALAVLDLSENELVGPIPPILGNLSYTGKLYLHGNKLTGHIPPELGNMSKLSYLQLNDNELVGTIPAELGKLTELFELNLANNNLEGHIPANISSCSALNKFNVYGNRLNGSIPAGFQKLESLTYLNLSSNSFKGQIPSELGHIVNLDTLDLSYNEFSGPVPPTIGDLEHLLELNLSKNHLTGSVPAEFGNLRSVQVIDMSSNNLSGYLPEELGQLQNLDSLILNNNSLAGEIPAQLANCFSLVSLNLSYNNFSGHVPSSKNFSKFPMESFMGNLMLHVYCQDSSCGHSHGTKVSISRTAVACMILGFVILLCIVLLAIYKTNQPQLPEKASDKPVQGPPKLVVLQMDMAVHTYEDIMRLTENLSEKYIIGYGASSTVYRCDLKSGKAIAVKRLYSQYNHSLREFETELETIGSIRHRNLVSLHGFSLSPHGNLLFYDYMENGSLWDLLHGPSKKVKLDWDTRLRIAVGAAQGLAYLHHDCNPRIVHRDVKSSNILLDGSFEAHLSDFGIAKCVPAAKSHASTYILSKADDDTVMEAVDPEVSVTCTDMNLVRKAFQLALLCTKRHPADRPTMHEVARVLLSLLPPAAKPPASKAAAASAAAGDYTRFLATAADLRRGGVADDDTGDNSSSDEQWFVRFGEVISKHTLS

SEQ ID NO: 196952 - protein, 972 aa, Zea Mays
MAARSSAAAVAVLLLAAAGAAAAAGGAEGDGDGQALMAVKAGFRNAANALADWDGGRDHCAWRGVACDAASFAVVGLNLSNLNLGGEISPAIGQLKSLQFVDLKLNKLTGQIPDEIGDCVSLKYLDLSGNLLYGDIPFSISKLKQLEDLILKNNQLTGPIPSTLSQIPNLKTLDLAQNKLTGDIPRLIYWNEVLQYLGLRGNSLTGTLSPDMCQLTGLWYFDIRGNNLTGTIPEGIGNCTSFEILDISYNQISGEIPYNIGYLQVATLSLQGNRLIGKIPEVIGLMQALAVLDLSENELVGPIPPILGNLSYTGKLYLHGNKLTGHIPPELGNMSKLSYLQLNDNELVGTIPAELGKLTELFELNLANNNLEGHIPANISSCSALNKFNVYGNRLNGSIPAGFQKLESLTYLNLSSNSFKGQIPSELGHIVNLDTLDLSYNEFSGPVPPTIGDLEHLLELNLSKNHLTGSVPAEFGNLRSVQVIDMSSNNLSGYLPEELGQLQNLDSLILNNNSLAGEIPAQLANCFSLVSLNLSYNNFSGHVPSSKNFSKFPMESFMGNLMLHVYCQDSSCGHSHGTKGFVILLCIVLLAIYKTNQPQLPEKASDKPVQGPPKLVVLQMDMAVHTYEDIMRLTENLSEKYIIGYGASSTVYRCDLKSGKAIAVKRLYSQYNHSLREFETELETIGSIRHRNLVSLHGFSLSPHGNLLFYDYMENGSLWDLLHGPSKKVKLDWDTRLRIAVGAAQGLAYLHHDCNPRIVHRDVKSSNILLDGSFEAHLSDFGIAKCVPAAKSHASTYVLGTIGYIDPEYARTSRLNEKSDVYSFGVVLLELLTGRKAVDNESNLHQLILSKADDDTVMEAVDPEVSVTCTDMNLVRKAFQLALLCTKRHPADRPTMHEVARVLLSLLPPAAKPPASKAAAASAAAGDYTRFLATAADLRRGGVADDDTGDNSSSDEQWFVRFGEVISKHTLS

SEQ ID NO: 196953 - protein, 920 aa, Zea Mays
MAARSSAAAVAVLLLAAAGAAAAAGGAEGDGDGQALMAVKAGFRNAANALADWDGGRDHCAWRGVACDAASFAVVGLNLSNLNLGGEISPAIGQLKSLQFVDLKLNKLTGQIPDEIGDCVSLKYLDLSGNLLYGDIPFSISKLKQLEDLILKNNQLTGPIPSTLSQIPNLKTLDLAQNKLTGDIPRLIYWNEVLQYLGLRGNSLTGTLSPDMCQLTGLWYFDIRGNNLTGTIPEGIGNCTSFEILDISYNQISGEIPYNIGYLQVATLSLQGNRLIGKIPEVIGLMQALAVLDLSENELVGPIPPILGNLSYTGKLYLHGNKLTGHIPPELGNMSKLSYLQLNDNELVGTIPAELGKLTELFELNLANNNLEGHIPANISSCSALNKFNVYGNRLNGSIPAGFQKLESLTYLNLSSNSFKGQIPSELGHIVNLDTLNLSKNHLTGSVPAEFGNLRSVQVIDMSSNNLSGYLPEELGQLQNLDSLILNNNSLAGEIPAQLANCFSLVSLNLSYNNFSGHVPSSKNFSKFPMESFMGNLMLHVYCQDSSCGHSHGTKVSISRTAVACMILGFVILLCIVLLAIYKTNQPQLPEKASDKPVQGPPKLVVLQMDMAVHTYEDIMRLTENLSEKYIIGYGASSTVYRCDLKSGKAIAVKRLYSQYNHSLREFETELETIGSIRHRNLVSLHGFSLSPHGNLLFYDYMENGSLWDLLHGPSKKVKLDWDTRLRIAVGAAQGLAYLHHDCNPRIVHRDVKSSNILLDGSFEAHLSDFGIAKCVPAAKSHASTYVLGTIGYIDPEYARTSRLNEKSDVYSFGVVLLELLTGRKAFQLALLCTKRHPADRPTMHEVARVLLSLLPPAAKPPASKAAAASAAAGDYTRFLATAADLRRGGVADDDTGDNSSSDEQWFVRFGEVISKHTLS

SEQ ID NO: 196954 - protein, 447 aa, Zea Mays
MSFLRSLADSFSSLLFSSGGGAVSMDAAGAAPSPAAVVGERVAVKLRGYFDLAKEEIDKAVRAEEWGLPDEATAHYRNAMRVMLEAKAARVPDAVSSSERGQVRVYQEKIAKWQAQVEERLRVLGQRSGEGATAAEVPKKVAANNPIIRTAKTASNSIQRSPLQNSPTFNRGGQASTHQKIGSGASRPVQKAGGNYDDKLVEMINTTIVDRSPSVKWDDVAGLDKAKQALMEMVILPSKRRDLFTGLRRPARGLLLFGPPGNGKTMLAKAVASESEATFFNVSASSLTSKWVGEAEKLVRTLFMVAIDRQPSVIFMDEIDSVMSTRLANENDSSRRLKSEFLIQFDGVSSNPDDLVIVIGATNKPQELDDAVLRRLVKRIYVPLPDPNVRRLLLKNQLKGQSFKLSNHDFERLAVETEGYSGSDLRALCEEAAMMPIRELVEPSRAS

SEQ ID NO: 196955 - protein, 214 aa, Zea Mays
MPMVRRAAASNLGKFAATVEQNHLKTEIMSIFDDLTQDDQDSVRLLAVEGCAALGKLLEPQDCVAHILPVIVNFSQDKSWRVRYMVANQLYELCEAVGPEPTRADLVPAYVRLLRDNEAEVRIAAAGKVTKFCRILNPQLSIQHILPCVKELSSDSSQHVRSALASVIMGMAPVLGKDATMEQLLPIFLSLLKDEFPDVRLNIISKLDQVNQPL

SEQ ID NO: 196956 - protein, 333 aa, Zea Mays
MVANQLYELCEAVGPEPTRADLVPAYVRLLRDNEAEVRIAAAGKVTKFCRILNPQLSIQHILPCVKELSSDSSQHVRSALASVIMGMAPVLGKDATMEQLLPIFLSLLKDEFPDVRLNIISKLDQVNQVIGIDFLSQTLLPAIVELAEDRHWRVRLAIIEYIPLLASQLGVGFFDDKLGALCMQWLEDKVFSIRDAAANNLKRLAEEFGPEWAMQHIIPQVLEKINNPHYLYRMTILQAISLLAPVMGAEITCQKLLPVVINSSKDRVPNIKFNVAKVLKSLVPILDQSVSSSGYFASCYRFEKRCVCISALLGNIVNAYFAGRGEDRETMPC

SEQ ID NO: 196957 - protein, 636 aa, Zea Mays
MMMIKRPYFQMYMIYVSHTHGGLHTHTRPSAIDASSVWTARLQQKQKQSLIYLMAMIDEPLYPIAVLIDELKNEDIQLRLNSIRRLSTIARALGEERTRKELIPFLSENNDDEDEVLLAMAEELGVFIPYVGGVEHAHVLLPPLETLCTVEETCVRDKAVESLCRIGAQMKETDIVDWFIPVVKRLAAGEWFTARVSSCGLFHIAYPSALDQLKTELRTIYGQLCQDDMPMVRRAAASNLGKFAATVEQNHLKTEIMSIFDDLTQDDQDSVRLLAVEGCAALGKLLEPQDCVAHILPVIVNFSQDKSWRVRYMVANQLYELCEAVGPEPTRADLVPAYVRLLRDNEAEVRIAAAGKVTKFCRILNPQLSIQHILPCVKELSSDSSQHVRSALASVIMGMAPVLGKDATMEQLLPIFLSLLKDEFPDVRLNIISKLDQVNQVIGIDFLSQTLLPAIVELAEDRHWRVRLAIIEYIPLLASQLGVGFFDDKLGALCMQWLEDKVFSIRDAAANNLKRLAEEFGPEWAMQHIIPQVLEKINNPHYLYRMTILQAISLLAPVMGAEITCQKLLPVVINSSKDRVPNIKFNVAKVLKSLVPILDQSTVKPCLVELSEDPDVDVRYYANQALQACDQMMVSS

SEQ ID NO: 196958 - protein, 640 aa, Zea Mays
MMMIKRPYFQMYMIYVSHTHGGLHTHTRPSAIDASSVWTARLQQKQKQSLIYLMAMIDEPLYPIAVLIDELKNEDIQLRLNSIRRLSTIARALGEERTRKELIPFLSENNDDEDEVLLAMAEELGVFIPYVGGVEHAHVLLPPLETLCTVEETCVRDKAVESLCRIGAQMKETDIVDWFIPVVKRLAAGEWFTARVSSCGLFHIAYPSALDQLKTELRTIYGQLCQDDMPMVRRAAASNLGKFAATVEQNHLKTEIMSIFDDLTQDDQDSVRLLAVEGCAALGKLLEPQDCVAHILPVIVNFSQDKSWRVRYMVANQLYELCEAVGPEPTRADLVPAYVRLLRDNEAEVRIAAAGKVTKFCRILNPQLSIQHILPCVKELSSDSSQHVRSALASVIMGMAPVLGKDATMEQLLPIFLSLLKDEFPDVRLNIISKLDQVNQVIGIDFLSQTLLPAIVELAEDRHWRVRLAIIEYIPLLASQLGVGFFDDKLGALCMQWLEDKVFSIRDAAANNLKRLAEEFGPEWAMQHIIPQVLEKINNPHYLYRMTILQAISLLAPVMGAEITCQKLLPVVINSSKDRVPNIKFNVAKVLKSLVPILDQSVVEKTVKPCLVELSEDPDVDVRYYANQALQACDQMMVSS

SEQ ID NO: 196959 - protein, 168 aa, Zea Mays
MSTRLANENDSSRRLKSEFLIQFDGVSSNPDDLVIVIGATNKPQELDDAVLRRLVKRIYVPLPDPNVRRLLLKNQLKGQSFKLSNHDFERLAVETEGYSGSDLRALCEEAAMMPIRELGPQNILTIKANQLRPLRYEDFKNAMTVIRPSLQKSKWDELENWNEEFGSS

SEQ ID NO: 196960 - protein, 290 aa, Zea Mays
MSFLRSLADSFSSLLFSSGGGAVSMDAAGAAPSPAAVVGERVAVKLRGYFDLAKEEIDKAVRAEEWGLPDEATAHYRNAMRVMLEAKAARVPDAVSSSERGQVRVYQEKIAKWQAQVEERLRVLGQRSGEGATAAEVPKKVAANNPIIRTAKTASNSIQRSPLQNSPTFNRGGQASTHQKIGSGASRPVQKAGGNYDDKLVEMINTTIVDRSPSVKWDDVAGLDKAKQALMEMVILPSKRRDLFTGLRRPARGLLLFGPPGNGKTMLAKAVASESEATFFNVSASSLTSK

SEQ ID NO: 196961 - protein, 75 aa, Zea Mays
MELRAAATYISSWFSNDDDDDRGTSMMQLAEDSCRQLSSGRQARGHRRHRRRLLGSAMLCSFVHGVLASRACIAV

SEQ ID NO: 196962 - protein, 604 aa, Zea Mays
MRSKLFRSLLADSLDGFLPLAVGFRRANPLPPPTTSAALLRKAAVQALERWHHLFGAHYRQLRLAVEYLKESARVQFSGLRATVDARAAREARMQEIYAGKVEQLRENLASIKAEIRSTIDEIRNGLEIIRAEHKKFEGYYVDDEEEIASLSMRSIRTASLMAGEWVPETQENEAVFDALREAHRLLVSKHLVTVQEWITVLVRVNLPDNRFRDSALKDFIDVKNEIRAVRDHCSELGLDLDNFHRRKGDQEEEDNEFWVEGNIEAPNRARVQSSLDVASTSKDTEKGKWVVGGVCHIGKAPVAANGTRNLDPEKSKLLAEAPVLPWSSVLDRWGSSGDVHVNQRGLEVESHWGRVDNDATIPAAKIAELNVHCSIYREAPVEILPCHAPLKKGGLCQRRDLRVCPFHGPIVPRDAEGNPIEQNSGSSDAEVNPVEHLDIGGHSNELNGISDDDYMEGTSSRMTGVNNDYGDIAGTCDLGKITAEQLARQSVKNVRKREMDRKAQERAQRARIRQHNEDVLRNAALASTSYSAAAYEQPTEAHGRRGRRGKAKAPTLASMLKKKVTTKDRIAERLLNTRATDATVRDVSHNEDMSYREAFPNQW

SEQ ID NO: 196963 - protein, 683 aa, Zea Mays
MKKKVKQYGQQLQQGEKDRRRVLKDFSKMLDDQIEKIVLFLLEQQGLLASRIEKLGKQRAILQEQPDISGIAELREAYREVGINLIKLLKFVDLNATGIRKILKKFDKRFGYRFTDYYVTSRSNHPYSQLQQVFKHVGVGAVVGALSRNLAELQERQGSYLSIYDQPSSALKLTVFGFDPLQDPIIDMINSSVDKLTRSTNFLRFLGQHAMIVDEESPSTAGEEEIEDQKYHFMSLMLNLVNTFLYMVNTYIIVPTADDYSVSLGAASTVCGVVIGSMAVAQIFSSIYFSAWSNKSYFKPLVFSSIVLFLGNICYAMAYDMKSLTVLIIGRLLCGMGSARAVNRRYISDCVPARIRMQASAGFVSASALGMACGPALAGLLQWKFKVYMVTFNQSTLPGWVMAVAWLLYLIWLWFSFKEPNRATEVNEAPQNPASGQTVDIGRLENGIAQPLLKDSVDKQNEDEDEVDDIEETADDSRKPATSIGSAYRLLTPSVKVQLLIYFMLKYAMEILLSESSVITNHYFSWNTSAVAIFLAILGLTVLPVNAVVGTYISNMFEDRQLLMVSQITLLVGIIFSFKVTSTYYVVQYVVSALVTFVSAEVLEGVNLSLLSSVMSSRLSRGTYNGGLLSTEAGTLARVVADCTITAAGYLGVGKLLNVTLLPSLVICVASIACTFLTYNSLF

SEQ ID NO: 196964 - protein, 348 aa, Zea Mays
MGSARAVNRRYISDCVPARIRMQASAGFVSASALGMACGPALAGLLQWKFKVYMVTFNQSTLPGWVMAVAWLLYLIWLWFSFKEPNRATEVNEAPQNPASGQTVDIGRLENGIAQPLLKDSVDKQNEDEDEVDDIEETADDSRKPATSIGSAYRLLTPSVKVQLLIYFMLKYAMEILLSESSVITNHYFSWNTSAVAIFLAILGLTVLPVNAVVGTYISNMFEDRQLLMVSQITLLVGIIFSFKVTSTYYVVQYVVSALVTFVSAEVLEGVNLSLLSSVMSSRLSRGTYNGGLLSTEAGTLARVVADCTITAAGYLGVGKLLNVTLLPSLVICVASIACTFLTYNSLF

SEQ ID NO: 196965 - protein, 708 aa, Zea Mays
MVNFGKKLMADQIPEWKGYYINYKLMKKKVKQYGQQLQQGEKDRRRVLKDFSKMLDDQIEKIVLFLLEQQGLLASRIEKLGKQRAILQEQPDISGIAELREAYREVGINLIKLLKFVDLNATGIRKILKKFDKRFGYRFTDYYVTSRSNHPYSQLQQVFKHVGVGAVVGALSRNLAELQERQGSYLSIYDQPSSALKLTVFGFDPLQDPIIDMINSSVDKLTRSTNFLRFLGQHAMIVDEESPSTAGEEEIEDQKYHFMSLMLNLVNTFLYMVNTYIIVPTADDYSVSLGAASTVCGVVIGSMAVAQIFSSIYFSAWSNKSYFKPLVFSSIVLFLGNICYAMAYDMKSLTVLIIGRLLCGMGSARAVNRRYISDCVPARIRMQASAGFVSASALGMACGPALAGLLQWKFKVYMVTFNQSTLPGWVMAVAWLLYLIWLWFSFKEPNRATEVNEAPQNPASGQTVDIGRLENGIAQPLLKDSVDKQNEDEDEVDDIEETADDSRKPATSIGSAYRLLTPSVKVQLLIYFMLKYAMEILLSESSVITNHYFSWNTSAVAIFLAILGLTVLPVNAVVGTYISNMFEDRQLLMVSQITLLVGIIFSFKVTSTYYVVQYVVSALVTFVSAEVLEGVNLSLLSSVMSSRLSRGTYNGGLLSTEAGTLARVVADCTITAAGYLGVGKLLNVTLLPSLVICVASIACTFLTYNSLF

SEQ ID NO: 196966 - protein, 491 aa, Zea Mays
MQNTTPSQARGRCLGRAYALVQDCRLVLSEVMARRGMNPTVSDQAIRLDLIAKSRGIAAAEKYFLDLPETSKTHLTYGALLNSYCKELMTEKAESLMEKMKELNFAFTAMSFNSLMTMYTKVNQAEKVPSIIQDMKADDVLPDVFTYNVWMRALAALKDIPGVERVIEEMKRDGRVAPDWTTYSNLASIYVEAGMFEKAEAALKELEKRNTSNDIEAYQFLITLYGRTQNLVEVHRVWRSLKRDNPRMANMSYLNMIQVLANLKDLSAAEACFKEWEARHIHPPKTNTKGSGADNTPGADPKSPSNPPNNQSGTKETGDETAEDLQPKHPKYDIRVANAMIKAYITEGMLDKAVAMKKRAKMRGGRLNAKTWEIFMEHYLKTGDLKMAHWCADRAMKKGHSSGRIWVPPPAVTETLMSYFEENKDVDGAERYVGALKKVQKDLGAPVFEPLVRTYAAAGKKFPGMRQRLKIENVEVGEGTAQLLDSICADQ

SEQ ID NO: 196967 - protein, 114 aa, Zea Mays
MHNSKRIRLYEVKDEHHAEAFLNSVSLSNEDAVPLEDRIAALERKQNSKALDAVKYGPGGSREISFFSKSRRRHKEESSSDDEPKGVKKRAVQPLGLKQGKAEFYMFGGNRGRG

SEQ ID NO: 196968 - protein, 101 aa, Zea Mays
MDRATKSSKAAPKHTNSDSEFSLSLKSDSPIVDHFYSNFHITSNKTVLRRFVHHHMSFSILCRAQNMYSLAKETLKLPSHGEKSTRVAWSPWSHDALAEAN

SEQ ID NO: 196969 - protein, 83 aa, Zea Mays
MPGRLTLCSRARAAATAVEARQRRAAEPSTTSIAQTTKRSEEEEEKTFPRNQESGDDEDDLTNKLTMQCNAMQCNATCGVPSS

SEQ ID NO: 196970 - protein, 132 aa, Zea Mays
MYHDRFSTTDVSPRVLSDLGLVWELHFSKLFLFFPSVDWKNRVSKLALRMRLKPTRRSRMPLKPTRRSRMLLKPSRRFTHAVLVLNDLGCSVQISRCSIHLSTASCVSKLWSLTACLVCITKPFHGVWCRLV

SEQ ID NO: 196971 - protein, 89 aa, Zea Mays
MMAARDIFRPFVGFREVRLVNKEPKHPGGDPIVLCFVDFAEPTQSAIALDALQGYKFDEHDRNSPNLRLQFARFAGPKGNSGPGGRGRR

SEQ ID NO: 196972 - protein, 145 aa, Zea Mays
MADAYWRYAAAAPRQQQQQQQPPPSAGGGVAHPGMGGGAPQMAPAGGQQQPMKRPRPTEFSDIFRPFVGFREVRLVNKEPKHPGGDPIVLCFVDFAEPTQSAIALDALQGYKFDEHDRNSPNLRLQFARFAGPKGNSGPGGRGRR

SEQ ID NO: 196973 - protein, 169 aa, Zea Mays
MSSGKKMSVVVIMFMAALLLLLLATVESSSSYAAAAPRQQQQQQQPPPSAGGGVAHPGMGGGAPQMAPAGGQQQPMKRPRPTEFSDIFRPFVGFREVRLVNKEPKHPGGDPIVLCFVDFAEPTQSAIALDALQGYKFDEHDRNSPNLRLQFARFAGPKGNSGPGGRGRR

SEQ ID NO: 196974 - protein, 882 aa, Zea Mays
MAQQAVFAVLERGGSIAVDEAVYLLGVSEKLESAKKQLLLMQAFLMDLDEKMLKGNFMARHLASEVREIAYEVEDIIDTANILMRRNGPKTSVRGAMSKYACFPIYLTRLHKLGSRIDSTEERMKKLFGDFEKFNIAANAIAEEPRRYITEDDDIRHRRLVHPNSGDQVGVIGFDEQIKQIEYDLLDTKNRHLTVVSIVGPGGAGKSTMAKKVYSLPAVKGHFKVHCWLTVSQRAVATHDFLKEVVKMVVPSHLMKVMEHEVKKLLHEFALSQRYLIVLDDIWSKDAWDAIKHAFPNQKNGSRIILTTRNVDVAKLPGARKKIYRPKLLNEDESTQLLLTTALPEYILDGGQNLDELKELGKELAIKCGGLPLALIVLGGYLSRNLDVGEWKRLLTNSMDWHDLITSDRVIGAILDLSYYDMPSHLRSCFMYTTAFPEDSPIDVRVLAMLWIAEGFIPLVRGQTREKVALKYVAELVQRCMIQAEGWTNSGMIKVVKVHDILREWGFGRAQREGFMKDCHSAEDIEVAYSGEEMMKAYRVVLHSSLSLERGVGTTTRKLRTLLDFNNHTSVQVPKSFQGLRVLHLNCSGEVSLPKDIHQMRYLRYLGLGGNCSYDLPSNIGGLLSLETLYCTASIDHIPASLWRNRTLRQVHIPYARSLSSPQIGSQSSKVLVILVDCGSSTHMDDAKRIVEKTRRQVLRNKNLDLSFCLGVEYGKYGMEVIGRCNTGVQFPIDLLNFDETHDYWELKICCANLLSNDHKILELGRIKNLKVLEIGEQSYTGKVMVFPSGSFMTLERLVLYDLAVEKWKIECGSMICLRVLTLCKCPKLVHLPEELLRLPKLRSLALIAMPLGCYQKGEVPQGVKISESDDEKVFQHLPIWR

SEQ ID NO: 196975 - protein, 329 aa, Zea Mays
MEEAKRLHARLLRRGERRLQPLLLRVLAAGELRYAARLLGSCPASPPSAPLHNRLLHALAAARHPLLLPCFARAHRLRVLTPLSFTLLLSSATATAAACAHALLAKSGHAAAAPGDPFLASALVSSYARAGLLAESRRAFDELPAGAGAGAAAARNAMLSAYARGGRVGDAERLFAGMPDRSVVSWTAMVSGYAQNGRHEEAVRTFLDMWDGAGVRPNELTVSSVLPACAALGALALGRKVERYARGRGMLRNVYVANALVEMYAKCGSIRRAWKVFRGMGTRRDLCSWNSMIMAFAVHGLWTEALALFHKLRIIMEDTRGTFRLWGYA

SEQ ID NO: 196976 - protein, 257 aa, Zea Mays
MGHSTALQQKSEVPQLKSGTRGERAPVQIIAPPVEADVLQAQAQVDEHGHERQASVERAREQVVVALPPVTPVPVDHVPRQEPGNDPRGVVDGGGRRHHAGGADEHGHVDEQDPALAREHPVREPHEEGRDGAAQEEPVDRRVGAEVAEDPARADEAPDDGRVVEHVVHGARPGAVGGEQLRAADVGDAVHEPPRRPDVHERRDQRPHHLRHEHGPRRDLHVVAQLEVLQEGQRLRHADVAVHLEAHVGDGTARVQC

SEQ ID NO: 196977 - protein, 282 aa, Zea Mays
MGHSTALQQKLEATTQFRKLRSIERSPPIEEVISTGVVPRFYGGTRGERAPVQIIAPPVEADVLQAQAQVDEHGHERQASVERAREQVVVALPPVTPVPVDHVPRQEPGNDPRGVVDGGGRRHHAGGADEHGHVDEQDPALAREHPVREPHEEGRDGAAQEEPVDRRVGAEVAEDPARADEAPDDGRVVEHVVHGARPGAVGGEQLRAADVGDAVHEPPRRPDVHERRDQRPHHLRHEHGPRRDLHVVAQLEVLQEGQRLRHADVAVHLEAHVGDGTARVQC

SEQ ID NO: 196978 - protein, 100 aa, Zea Mays
MNMFGCLAQSGSLAEASPKQFCGLAERKREFVGSLTGLARLQSPSDARVSLSSVAAVPTLVSRRSAAMGSPPLTPYRRWATPLHSSRSLRPPHSSGSCAP

SEQ ID NO: 196979 - protein, 132 aa, Zea Mays
MAAAAARRRRRRSTTSRASATSGLGARSMRRHLTSSRGSLVFSLCSRIRMLMLNTRTTELNSSSTVRLFRGLPRGRGGWSPCRRGQQTGRGTMTEPATHAGGRTSDELCDKIIKKTTATSPRWFQLWNSRIT

SEQ ID NO: 196980 - protein, 214 aa, Zea Mays
MRAHQPFRSPAAAAAAAMATRSSSLASASHGRRLNAAVSSTSPAASDEVPSKVPSNGASQKAIVATSLSTGRFFVFAAAASLAGASGTFVAQARPPTAAPGDRAQAPSNGASQKAIMAATLSIGHLAASNANLDGAALGTLDEDGLFPAASDDAAEVRSNGASLKATMAMRLSISIAATSSLFDWFWSGMRCWRQAASIYIWTPQYRCRSESDA

SEQ ID NO: 196981 - protein, 353 aa, Zea Mays
MTRSRSSELRRRYAAMQTNMAPITIGSIETPNQLKQDFTNTTNITPMSNTLVHTPKFVSPSSSSTSPLDNPHVAAQDTVTSVVSMLKDTLERKKLGSHANKDTSAGNSFGFYDTQQFQQNILGGTDFFPIVTTAQVQDSLMLPKVDRPMEPNNGNFVAPANQVWFSAASREPSHSGSSTAMTTHSAGFEMCDELPPAAQAMSVCESTRKNAANGTTDCKSKGKEYRERVQKDNLKDGRKKAALTRIGSISSEQAADNGDPTKKRRVERSRKMAEAKERSSTPVIPSDMQAVLKRCETLEKEVRSLKLNLSFMNRKDSEQTKQIEELQKQNEDLAEEKERLVEEIERIVSDPNT

SEQ ID NO: 196982 - protein, 317 aa, Zea Mays
MEMEGRGLSDLFRNTSEEIFLKAVMENSMGVAAAPSMEMLGFKNTSRSLREDSEELFNNWLMNGEIPGFGSVNNHPRQPSRLSSEAAGLPNQQHDIAQQSFLTDNLVPQNLTIPSVEYPNNHNQQSLKNAAEKGMQASDLLLAKAWFHSTQPMTRSRSSELRRRYAAMQTNMAPITIGSIETPNQLKQDFTNTTNITPMSNTLVHTPKFVSPSSSSTSPLDNPHVAAQDTVTSVVSMLKDTLERKKLGSHANKDTSAGNSFGFYDTQQFQQNILGGTDFFPIVTTAQVQDSLMLPKVDRPMEPNNGNFVAPANQRKR

SEQ ID NO: 196983 - protein, 366 aa, Zea Mays
MCAITFPHEIYGSCLSFLGHICRRRYAAMQTNMAPITIGSIETPNQLKQDFTNTTNITPMSNTLVHTPKFVSPSSSSTSPLDNPHVAAQDTVTSVVSMLKDTLERKKLGSHANKDTSAGNSFGFYDTQQFQQNILGGTDFFPIVTTAQVQDSLMLPKVDRPMEPNNGNFVAPANQVWFSAASREPSHSGSSTAMTTHSAGFEMCDELPPAAQAMSVCESTRKNAANGTTDCKSKGKEYRERVQKDNLKDGRKKAALTRIGSISSEQAADNGDPTKKRRVERSRKMAEAKERSSTPVIPSDMQAVLKRCETLEKEVRSLKLNLSFMNRKDSEQTKQIEELQKQNEDLAEEKERLVEEIERIVSDPNT

SEQ ID NO: 196984 - protein, 74 aa, Zea Mays
MNNTSDRALLVLMLLLSLLFVAQCGRPHVYMDDDVVGTARGRRAAFSLTENGYCDTEHQNNNIPSVESEEVAED

SEQ ID NO: 196985 - protein, 631 aa, Zea Mays
MAMAAAPHSHHTPVGAAAATSAAVSMPCCSSASCYDDKDGDPSSSWSLSSPRRRQPYRRLLRDEAQRLRRARRSQGPGADTPRWVRRTTDQMARYIEDDRAGHVYGRHVVAAVRAVRATASRPSADMRQAMASFVTRLTFREMCVVLREQRGWRQARDFFAWMKLQLCYEPSVVAYTVLLRLYGRVGKVKLAEETFLEMLQVGCEPDAVACGTLLCAYARWGRHEDMMLFYSAVRGRGLVPPISVYNYMISSLQKQKLHGKVIHVWKQMLEAGAPPNQFTYTVVIGSLVKEDLLEEAVDLFGEMRRRRFVPEEATYSLLISASSRHGKGEQALRLFEEMKGQGIAPSNYTCASLLALHCKNEDYPKALALFSDMESSKVIPDEVIYGILIRIYGKLGLYEEARQTFGEIEKAGLLNDEQTYVAMAQVHLNAGDCDRALEVLESMKTRGVKPSRFSYSALLRCHVAKEDVVAAEDTFRALSQSQHGLPDAFCCNDMLRLYMRLGRLDKARALVSVLLREDGFQLDENLSTTVMEFYCKSGMVEDAEKLLEDIQRNRKPVKVPTLLLLVEMYARNRPSVVLEERSSSRALGSSAASVALNSLLDMPGGLSSVSLLISRLAREGENNGAQHSCA

SEQ ID NO: 196986 - protein, 787 aa, Zea Mays
MAMAAAPHSHHTPVGAAAATSAAVSMPCCSSASCYDDKDGDPSSSWSLSSPRRRQPYRRLLRDEAQRLRRARRSQGPGADTPRWVRRTTDQMARYIEDDRAGHVYGRHVVAAVRAVRATASRPSADMRQAMASFVTRLTFREMCVVLREQRGWRQARDFFAWMKLQLCYEPSVVAYTVLLRLYGRVGKVKLAEETFLEMLQVGCEPDAVACGTLLCAYARWGRHEDMMLFYSAVRGRGLVPPISVYNYMISSLQKQKLHGKVIHVWKQMLEAGAPPNQFTYTVVIGSLVKEDLLEEAVDLFGEMRRRRFVPEEATYSLLISASSRHGKGEQALRLFEEMKGQGIAPSNYTCASLLALHCKNEDYPKALALFSDMESSKVIPDEVIYGILIRIYGKLGLYEEARQTFGEIEKAGLLNDEQTYVAMAQVHLNAGDCDRALEVLESMKTRGVKPSRFSYSALLRCHVAKEDVVAAEDTFRALSQSQHGLPDAFCCNDMLRLYMRLGRLDKARALVSVLLREDGFQLDENLSTTVMEFYCKSGMVEDAEKLLEDIQRNRKPVKVPTLLLLVEMYARNRPSVVLEERSSSRALGSSAASVALNSLLDMPGGLSSVSLLISRLAREDEARFIYDQLTELGTKPDDSAVATLIVQYGQAKQLERAQELFDSASASFPDGALVCNAMVDAFCKCGRAEDAYHLFMEMADQGSYRNAVTASILVTHLTKHGKFQEVENIMHGCFRDEVQLDTALYNTFIKSMLESVSKQVNCIRPSAYTIAWYPLAFLSPCRRSIQ

SEQ ID NO: 196987 - protein, 150 aa, Zea Mays
MPHQVATVLLLFTLSGPVKASTYLLMHGVVGLIMGTVWRLETNWIVSIILCSIVRALGACGYVLVSSFLIRENILALITVNIHASLTYILTAAGVNTIPSMGTIYLLFGTLLLLNCGFFVFLLHVMYTVFLAKLGIKPSLRSPRWLDRVM

SEQ ID NO: 196988 - protein, 207 aa, Zea Mays
MRGLHRCPHQLLLVSPPPRSAPACRQSATASSRGLRSSLAVFSAPGARVAAAAREQKWGHVEGDEDGGEEGLGEALHRTRELVECAMFAAVAGLAYFLSNSLAIENYFSCFFPLPIVISSLRWGLEASRKTVVATVLLLFTLSGPVKASTYLLMHGVVGLIMGTVWRLETNWIVSIILCSIVRALGACGYVLVSSFLIRENILALLA

SEQ ID NO: 196989 - protein, 167 aa, Zea Mays
MRGLHRCPHQLLLVSPPPRSAPACRQSATASSRGLRSSLAVFSAPGARVAAAAREQKWGHVEGDEDGGEEGLGEALHRTRELVECAMFAAVAGLAYFLSNSLAIENYFSCFFPLPIVISSLRWGLEASRKTVVATVLLLFTLSGPVKASTYLLMHGVVGLIMGTVWR

SEQ ID NO: 196990 - protein, 848 aa, Zea Mays
MAVLGLFLTWRIKHKNEDAIWLWGMSVVCELWFGFSWLLDQLPKLCPVNRATDLAVLKDKFETPTPSNPTGRSDLPGLDIFVSTADPEKEPPLVTANTILSILAADYPVEKLSCYVSDDGGALLTFEAMAEAASFANMWVPFCRKHNIEPRNPDSYFNLKKDPYKNKVRQDFVKDRRRVKREYDEFKVRINGLPDSIRRRSDAYHAREEIKAMKRQREAALDDAVEPVKIPKATWMADGTHWPGTWIQPSAEHTRGDHAGIIQVMLKPPSDDPLYGSTGDEGRPLDFTEVDIRLPMLVYVSREKRPGYDHNKKAGAMNALVRSSAVMSNGPFILNLDCDHYVYNSQAFREGMCFMMDRGGDRIGYVQFPQRFEGIDPSDRYANHNTVFFDVNMRALDGLMGPVYVGTGCLFRRVALYGFDPPRSKEHGGCCSCCFPQRRKIKASAAAPEETRALRMADFDEDEMNMSSFPKKFGNSSFLIDSIPIAEFQGRPLADHPGVKNGRPPGALTVPRDLLDASTVAEAVSVISCWYEDKTEWGHRVGWIYGSVTEDVVTGYRMHNRGWKSVYCVTKRDAFRGTAPINLTDRLHQVLRWATGSVEIFFSRNNALLASRRMKFLQRIAYLNVGIYPFTSIFLIVYCFLPALSLFSGQFIVKTLNVTFLTYLLVITLTLCLLAVLEIKWSGISLEEWWRNEQFWLIGGTSAHLAAVLQGLLKVVAGIEISFTLTSKSGGDDVDDEFADLYIVKWTSLMIPPIVIMMVNLIGIAVGFSRTIYSEIPQWSKLLGGVFFSFWVLAHLYPFAKGLMGRRGRTPTIVFVWAGLLSITISLLWVAINPPSQNQQIGGSFTFP

SEQ ID NO: 196991 - protein, 280 aa, Zea Mays
MALSSSGHPATTRLLFSLLLVGSAAGLPERAAIDRVNRRGPSLGLVMSYVDEATALQASGYFQPWRALPFVDLYGRRYHIGSIRGVNVIYALTGQRRLNAAVTVQTLIDVFSVSGIVHYGTAGSCNDSISFGDVSVPRLVAYTGAWTWKKFRSPRESSAELSFGEYNVPDGGGGENLLGSLKYRNEELYSAGKPMEEVFWLPVHSAWFRTAEQLTVELERCNDTFCLPTAPRIVYGLKGSSADMFLDNAEYRKFLFQEFGVSTMDEESAAVVMQRRLAYL

SEQ ID NO: 196992 - protein, 215 aa, Zea Mays
MALSSSGHPATTRLLFSLLLVGSAAGLPERAAIDRVNRRGPSLGLVMSYVDEATALQASGYFQPWRALPFVDLYGRRYHIGSIRGVNVIYALTGQRRLNAAVTVQTLIDVFSVSGIVHYGTAGSCNDSISFGDVSVPRLVAYTGAWTWKITERVIGGIELRRIQRPRRRRRGESARIPQVQKRGALLGRQAHGRGLLAACAFGMVQNCRTAHGGT

SEQ ID NO: 196993 - protein, 409 aa, Zea Mays
MPLLMRLACPFYKISAPEVVSGVSGASEENIRGLFQKAYRTAPSIVFIDEIDAIASKRENLQREMERRIVTQLMTCMDQFHQNIGSGSSNLEAESSEKKPGYVIVIGATNRPDAVDQALRRPGRFDREISLGVPDENARKQILKMLTQHLRLEGEFDLFKIARATPGFVGADLKALVDKAGNLAMKRIIDERRARCCIEQDGSSKHDWWRQPWDESEVDELHITMNDFEEAAKMVQPSLRREGFSSVPGVTWDDVGGLDSLRKEFDRCIIRCIKHPEDYEVFGVNMQAGFLLFGPPGCGKTLIAKAVAHEAGANFIHIKGPELLNKYVGESESEVRKIFTRARTNSPCILFFDEVDALTTKRGKEGGWVVERLLNQLLIELDGADQRQGVYVIGATNRRESFNIKGTCS

SEQ ID NO: 196994 - protein, 260 aa, Zea Mays
MLVNFVFFICRSTRPKLTLEILVYLFFSAAFGAALSQYTFFYGLQYTTATFAITFTNVAPVLTFLIAVLLRVESLSMKNKAGAAKIAGTLTSFAGVMLLTLYKGVSLTHHQAGEASPEDHSLGAAAASPSDRKSWTLGTLALLANCLCFSFWLLLQSRLTKKYPALYSSTAYMFLISSMQGGALTAAIQRRASVWLLTRPIEIVTVLYTGIMGSGVGYVLMTWCVEKRGPVFTSAFIPVIQIMVAMVDFFFLHENLYLGR

SEQ ID NO: 196995 - protein, 348 aa, Zea Mays
MVMMMRSCLGGGLLPVAVMLCLNVVAAVMVSLVKVAMDGGMKPLVIVTLQQLTAAVFLAPIAFFKERKSRPKLTLEIFAYIFVSAALGAALRQYMIFVALRYTTATFVTAFSNIAPVLTFLLAVATRSEALDLKSRTGLAKLLGTLVSLAGAMVLTLYKGVALTHAAAASQDQQQHSHGRLPPSAADSRGKWTLGTVAILGNCVCLSCWFLLHGRLAKKYPHVYSCNALMSLLSFLQVAVVGLCTQRSISPWIVTSKFNILTVLYARGAVFVAAFIPVVQIIVSVIDFSILHEQLYLGSVLGSVLVIGGLYLLLWGKRQEALHCPPPPPPKVAEEDPADKEQQQVQHN

SEQ ID NO: 196996 - protein, 362 aa, Zea Mays
MVMMMRSCLGGGLLPVAVMLCLNVVAAVMVSLVKVAMDGGMKPLVIVTLQQLTAAVFLAPIAFFKERKSRPKLTLEIFAYIFVSAALGLRHILQGSSSSVHDLRGPALHHGHLRDRLLQHRPRAHLPPGRRHAVRSAGPQEQDGVGEAAGHAGVAGRRHGAHPLQGRGAHPRGGSLAGPAAALPRPVAAERRRQPRQVDAGHRGHPGQLRLPLLLVPAPRPPRQEVPARLLLQRAHVLAQLPPGRRRRPLHPAQHLPLDRHQQVQHPHRPIRRHRRLRRLVRAGDMVHREERSRVRGRLHTGGADHRLRHRLLHPARAALPRKRAGISASDRWPLPSAVGQEAGGPALSSSSSSKGCRRRPC

SEQ ID NO: 196997 - protein, 198 aa, Zea Mays
MYTYRESIVLGKTNCCILKVNQILRELSWEWPGHSYELLSRNCNHFCNTFCEKLEVSKLPGWVNRFANAGDAALEVAETTAGKLKQAKKEIVTACKAASTFLTGTSSSASSNAEDTGGSTSTGNSLFEGAWIRSIIGMTMKPSKSLVCVDSSDSDSSGSESESDGDRPNSDDNAERQAKGVKQERGTKKKNNGPHCHS

SEQ ID NO: 196998 - protein, 492 aa, Zea Mays
MHDLHSNEANAEDGVRLIPSGTQIVLSVKSQQHAMQCDALADEIRLLSEPFKVFEFDFSERPDSHRETKIEIKATADGHAHAIVSWWVLQLDSSGSVFYSTAPRWVRQSSGVDLPQYANGTKDWCDHWKQCVWFIQGTGAPAKKDQTLSLSASHNQTSISYQLNINDEGSRSPKSNHLTLLPERVALYGDKVWRSALISVIRNYTSERSSPICIVADDSVFLALIVSFLLPSSKVLAMFPCLRDSGLNYLQAVADANNLSMDRIKVIGKKASSLTTNDLNHEKVNMLVGEPFYHGSEGMLPWQNLRFWNERTLLDPLLSEDAFIMPCKGILRFCAMSLPDLWRSRRSLKDVEGFDHSVVNDTLGACGDLPGEQQGPCLPYYVWQCGYTKKLSEVYSLMDLNFSEPIHSCFGETKVEFAHDGTCHGFAVWIDWVLDKENSIVISTGPESRYWKQGVQLLSTPVQVNPANSVMHVEANFDADIGELTFKSTTLS

SEQ ID NO: 196999 - protein, 591 aa, Zea Mays
MPSCLLPGIAPRPPPAALRSLLLRRSRMASSGPARAFQLRLNPLTGDSEWLVVDEAETEAEVAAPAPTHHKQLLAATSYLDMLNDASRNRAYRLAIDATVTDPTSRVLDIGAGTGLLSMMAARALAAAGGEGRGSVSACESYLPMGKLTRRVLRANGMENKVKVFHKRSDELGVGVELDSRPDILVSEILDSELLGEGLIPTLQHAHDMLLVKNPKTVPYRATTYGVLVESTSLWKMHDLHSNEANAEDGVRLIPSGTQIVLSVKSQQHAMQCDALADEIRLLSEPFKVFEFDFSERPDSHRETKIEIKATADGHAHAIVSWWVLQLDSSGSVFYSTAPRWVRQSSGVDLPQYANGTKDWCDHWKQCVWFIQGTGAPAKKDQTLSLSASHNQTSISYQLNINDEGSRSPKSNHLTLLPERVALYGDKVWRSALISVIRNYTSERSSPICIVADDSVFLALIVSFLLPSSKVLAMFPCLRDSGLNYLQAVADANNLSMDRIKVIGKKASSLTTNDLNHEKVNMLVGEPFYHGSEGMLPWQNLRFWNERTLLDPLLSEDAFIMPCKGILRTCGEAVVALKMLRVLTTQLLMIL

SEQ ID NO: 197000 - protein, 371 aa, Zea Mays
MPSCLLPGIAPRPPPAALRSLLLRRSRMASSGPARAFQLRLNPLTGDSEWLVVDEAETEAEVAAPAPTHHKQLLAATSYLDMLNDASRNRAYRLAIDATVTDPTSRVLDIGAGTGLLSMMAARALAAAGGEGRGSVSACESYLPMGKLTRRVLRANGMENKVKVFHKRSDELGVGVELDSRPDILVSEILDSELLGEGLIPTLQHAHDMLLVKNPKTVPYRATTYGVLVESTSLWKMHDLHSNEANAEDGVRLIPSGTQIVLSVKSQQHAMQCDALADEIRLLSEPFKVFEFDFSERPDSHRETKIEIKATADGHAHAIVSWWVLQLDSSGSVFYSTAPRWARRIGVIIGSSVFGLYKGQGLLQRKIKLFL

SEQ ID NO: 197001 - protein, 328 aa, Zea Mays
MGTKDWCDHWKQCVWFIQGTGAPAKKDQTLSLSASHNQTSISYQLNINDEGSRSPKSNHLTLLPERVALYGDKVWRSALISVIRNYTSERSSPICIVADDSVFLALIVSFLLPSSKVLAMFPCLRDSGLNYLQAVADANNLSMDRIKVIGKKASSLTTNDLNHEKVNMLVGEPFYHGSEGMLPWQNLRFWNERTLLDPLLSEDAFIMPCKGILRFCAMSLPVSLSNIYLSFISLLGHKVILFVLRITMMQDLWRSRRSLKDVEGFDHSVVNDTLGACGDLPGEQQGPCLPYYVWQCGYTKKLSEVYSLMDLNFSEPIHSCFGETKVSF

SEQ ID NO: 197002 - protein, 730 aa, Zea Mays
MPSCLLPGIAPRPPPAALRSLLLRRSRMASSGPARAFQLRLNPLTGDSEWLVVDEAETEAEVAAPAPTHHKQLLAATSYLDMLNDASRNRAYRLAIDATVTDPTSRVLDIGAGTGLLSMMAARALAAAGGEGRGSVSACESYLPMGKLTRRVLRANGMENKVKVFHKRSDELGVGVELDSRPDILVSEILDSELLGEGLIPTLQHAHDMLLVKNPKTVPYRATTYGVLVESTSLWKMHDLHSNEANAEDGVRLIPSGTQIVLSVKSQQHAMQCDALADEIRLLSEPFKVFEFDFSERPDSHRETKIEIKATADGHAHAIVSWWVLQLDSSGSVFYSTAPRWVRQSSGVDLPQYANGTKDWCDHWKQCVWFIQGTGAPAKKDQTLSLSASHNQTSISYQLNINDEGSRSPKSNHLTLLPERVALYGDKVWRSALISVIRNYTSERSSPICIVADDSVFLALIVSFLLPSSKVLAMFPCLRDSGLNYLQAVADANNLSMDRIKVIGKKASSLTTNDLNHEKVNMLVGEPFYHGSEGMLPWQNLRFWNERTLLDPLLSEDAFIMPCKGILRFCAMSLPDLWRSRRSLKDVEGFDHSVVNDTLGACGDLPGEQQGPCLPYYVWQCGYTKKLSEVYSLMDLNFSEPIHSCFGETKVEFAHDGTCHGFAVWIDWVLDKENSIVISTGPGKESRYWKQGVQLLSTPVQVNPANSVMHVEANFDADIGELTFKSTTLS

SEQ ID NO: 197003 - protein, 653 aa, Zea Mays
MPSCLLPGIAPRPPPAALRSLLLRRSRMASSGPARAFQLRLNPLTGDSEWLVVDEAETEAEVAAPAPTHHKQLLAATSYLDMLNDASRNRAYRLAIDATVTDPTSRVLDIGAGTGLLSMMAARALAAAGGEGRGSVSACESYLPMGKLTRRVLRANGMENKVKVFHKRSDELGVGVELDSRPDILVSEILDSELLGEGLIPTLQHAHDMLLVKNPKTVPYRATTYGVLVESTSLWKMHDLHSNEANAEDGVRLIPSGTQIVLSVKSQQHAMQCDALADEIRLLSEPFKVFEFDFSERPDSHRETKIEIKATADGHAHAIVSWWVLQLDSSGSVFYSTAPRWVRQSSGVDLPQYANGTKDWCDHWKQCVWFIQGTGAPAKKDQTLSLSASHNQTSISYQLNINDEGSRSPKSNHLTLLPERVALYGDKVWRSALISVIRNYTSERSSPICIVADDSVFLALIVSFLLPSSKVLAMFPCLRDSGLNYLQAVADANNLSMDRIKVIGKKASSLTTNDLNHEKVNMLVGEPFYHGSEGMLPWQNLRFWNERTLLDPLLSEDAFIMPCKGILRFCAMSLPDLWRSRRSLKDVEGFDHSVVNDTLGACGDLPGEQQGPCLPYYVWQCGYTKKLSEVYSLMDLNFSEPIHSCFGETKVSF

SEQ ID NO: 197004 - protein, 697 aa, Zea Mays
MPSCLLPGIAPRPPPAALRSLLLRRSRMASSGPARAFQLRLNPLTGDSEWLVVDEAETEAEVAAPAPTHHKQLLAATSYLDMLNDASRNRAYRLAIDATVTDPTSRVLDIGAGTGLLSMMAARALAAAGGEGRGSVSACESYLPMGKLTRRVLRANGMENKVKVFHKRSDELGVGVELDSRPDILTVPYRATTYGVLVESTSLWKMHDLHSNEANAEDGVRLIPSGTQIVLSVKSQQHAMQCDALADEIRLLSEPFKVFEFDFSERPDSHRETKIEIKATADGHAHAIVSWWVLQLDSSGSVFYSTAPRWVRQSSGVDLPQYANGTKDWCDHWKQCVWFIQGTGAPAKKDQTLSLSASHNQTSISYQLNINDEGSRSPKSNHLTLLPERVALYGDKVWRSALISVIRNYTSERSSPICIVADDSVFLALIVSFLLPSSKVLAMFPCLRDSGLNYLQAVADANNLSMDRIKVIGKKASSLTTNDLNHEKVNMLVGEPFYHGSEGMLPWQNLRFWNERTLLDPLLSEDAFIMPCKGILRFCAMSLPDLWRSRRSLKDVEGFDHSVVNDTLGACGDLPGEQQGPCLPYYVWQCGYTKKLSEVYSLMDLNFSEPIHSCFGETKVEFAHDGTCHGFAVWIDWVLDKENSIVISTGPESRYWKQGVQLLSTPVQVNPANSVMHVEANFDADIGELTFKSTTLS

SEQ ID NO: 197005 - protein, 449 aa, Zea Mays
MPSCLLPGIAPRPPPAALRSLLLRRSRMASSGPARAFQLRLNPLTGDSEWLVVDEAETEAEVAAPAPTHHKQLLAATSYLDMLNDASRNRAYRLAIDATVTDPTSRVLDIGAGTGLLSMMAARALAAAGGEGRGSVSACESYLPMGKLTRRVLRANGMENKVKVFHKRSDELGVGVELDSRPDILVSEILDSELLGEGLIPTLQHAHDMLLVKNPKTVPYRATTYGVLVESTSLWKMHDLHSNEANAEDGVRLIPSGTQIVLSVKSQQHAMQCDALADEIRLLSEPFKVFEFDFSERPDSHRETKIEIKATADGHAHAIVSWWVLQLDSSGSVFYSTAPRWVRQSSGVDLPQYANGTKDWCDHWKQCVWFIQGTGAPAKKDQTLSLSASHNQTSISYQLNINDEGSRSPKSNHLTLLPERVALYGDKVWRSALISVIRNYVSNPSMYLV

SEQ ID NO: 197006 - protein, 181 aa, Zea Mays
MYVTSDDVVEVKGKVACEISSADELTLTELMFSGALKDATVEQVVALLSCFVWQEKLQDAPKPREELDLLFYQLQETARRVANLQLECKIQIDVESFVNSFRPDIMEAVYSWARGSKFYQIMEMTQVFEGSLIRAIRRLEEVLQQLILASKSIGETELEAKLEEAVNKIKRDIVFAASLYL

SEQ ID NO: 197007 - protein, 347 aa, Zea Mays
MHLQLSTTCNKRPEDSDYTVDVLTRCSVTKDNSGKKTMKIDGLSSIRMYIPKDLIPVEVRENTLRKVEEVLLRFAKDGVPLLDPEEDMKVQSKSFRKATRRIEALESLFEKHDIRNSPHIQQKLKVFHAKQELSAKIKSIKKTMRSSTALAFKDELKARKRVLRRLGYVTSDDVVEVKGKVACEISSADELTLTELMFSGALKDATVEQVVALLSCFVWQEKLQDAPKPREELDLLFYQLQETARRVANLQLECKIQIDVESFVNSFRPDIMEAVYSWARGSKFYQIMEMTQVFEGSLIRAIRRLEEVLQQLILASKSIGETELEAKLEEAVNKIKRDIVFAASLYL

SEQ ID NO: 197008 - protein, 366 aa, Zea Mays
MHLQLSTTCNKRPEDSDYTVDVLTRCSVTKDNSGKKTMKVVPLKARGEPVVVSLSLSQIDGLSSIRMYIPKDLIPVEVRENTLRKVEEVLLRFAKDGVPLLDPEEDMKVQSKSFRKATRRIEALESLFEKHDIRNSPHIQQKLKVFHAKQELSAKIKSIKKTMRSSTALAFKDELKARKRVLRRLGYVTSDDVVEVKGKVACEISSADELTLTELMFSGALKDATVEQVVALLSCFVWQEKLQDAPKPREELDLLFYQLQETARRVANLQLECKIQIDVESFVNSFRPDIMEAVYSWARGSKFYQIMEMTQVFEGSLIRAIRRLEEVLQQLILASKSIGETELEAKLEEAVNKIKRDIVFAASLYL

SEQ ID NO: 197009 - protein, 981 aa, Zea Mays
METLKRKAVDSPGDAYQASSLKPPLAAAAVEPRAPTTLAAAEPVACVHDVSYPEGYDPSASTSRAIAGGADASEPAKKFPFQLDPFQAEAIRCLDNGESVMVSAHTSAGKTVVALYAIAMSLRNQQRVIYTSPIKALSNQKYREFKEEFSDVGLMTGDVTIEPNASCLVMTTEIWRSMQYKGSEVMREVAWVIFDEVHYMRDRERGVVWEESIVMAPKNSRFVFLSATVPNAKEFADWVAKVHKQPCHIVYTDYRPTPLQHYVFPSGGDGLYLVVDEKGKFREDSFQKALNALVPASDSAKKKENGKRQKFTMAGTSSEESDIFKMVKMIIQRQYDPVILFSFSKRECEFLAMQMAKMDLNEDDEKANIETIFWSAMDMLSDDDKKLPQVSNMLPLLKRGIGVHHSGLLPILKEVIEILFQEGLIKCLFATETFSIGLNMPAKTVVFTNVRKFDGDRFRWLSSGEYIQMSGRAGRRGIDLRGICILMVDEKMEPSTAKMMLKGSADSLNSAFHLSYNMLLNQMRSEDGDPEKLLRHSFYQFQADRSLPDLEKQIKELESERNSMVIEEAESLKDYYDLLQQHRSLKKDVHDIVLSPKHVLPFLQPGRLVRIEYSTDEPANFSIDENVTWGIIINFEKVKSHGEDKRPEDSDYTVDVLTRCSVTKDNSGKKTMKIDGLSSIRMYIPKDLIPVEVRENTLRKVEEVLLRFAKDGVPLLDPEEDMKVQSKSFRKATRRIEALESLFEKHDIRNSPHIQQKLKVFHAKQELSAKIKSIKKTMRSSTALAFKDELKARKRVLRRLGYVTSDDVVEVKGKVACEISSADELTLTELMFSGALKDATVEQVVALLSCFVWQEKLQDAPKPREELDLLFYQLQETARRVANLQLECKIQIDVESFVNSFRPDIMEAVYSWARGSKFYQIMEMTQVFEGSLIRAIRRLEEVLQQLILASKSIGETELEAKLEEAVNKIKRDIVFAASLYL

SEQ ID NO: 197010 - protein, 561 aa, Zea Mays
MPAKTVVFTNVRKFDGDRFRWLSSGEYIQMSGRAGRRGIDLRGICILMVDEKMEPSTAKMMLKGSADSLNSAFHLSYNMLLNQMRSEDGDPEKLLRHSFYQFQADRSLPDLEKQIKELESERNSMVIEEAESLKDYYDLLQQHRSLKKDVHDIVLSPKHVLPFLQPGRLVRIEYSTDEPANFSIDENVTWGIIINFEKVKSHGEDKRPEDSDYTVDVLTRCSVTKDNSGKKTMKVVPLKARGEPVVVSLSLSQIDGLSSIRMYIPKDLIPVEVRENTLRKVEEVLLRFAKDGVPLLDPEEDMKVQSKSFRKATRRIEALESLFEKHDIRNSPHIQQKLKVFHAKQELSAKIKSIKKTMRSSTALAFKDELKARKRVLRRLGYVTSDDVVEVKGKVACEISSADELTLTELMFSGALKDATVEQVVALLSCFVWQEKLQDAPKPREELDLLFYQLQETARRVANLQLECKIQIDVESFVNSFRPDIMEAVYSWARGSKFYQIMEMTQVFEGSLIRAIRRLEEVLQQLILASKSIGETELEAKLEEAVNKIKRDIVFAASLYL

SEQ ID NO: 197011 - protein, 129 aa, Zea Mays
MDKETTGGGRIPRSHRASEAKPGVQVSTLQDRPRHPHSGTPQDHRSPTAAAQPAPTTYEVPILAGESLMSDQGASRPSRSSRQVPTKSSAVVAGGSSSAATPTSGAANEMPSSSVQAPPSEGIKYPTLR

SEQ ID NO: 197012 - protein, 54 aa, Zea Mays
MLVSLMITSSVVCVHPIPFHSAVCLYMFPQILLRIHNIDTAGQAALLLFKLLLN

SEQ ID NO: 197013 - protein, 416 aa, Zea Mays
MVHQGKALIRILHLIFSIEVAQAKGASHMETNSQSNQKQESCGPNGSKDRILRSTSRSSSSREKSMEKSCSSAHRGKRTLWGRTSARKDLSTEEIECCSDDESLIEKLESNKVDLQSKIAKEAKENAILQSSLEKRKEELHERRLALEKEVENLREQLQKERSLRTSLESGVMNLRRGQVSLPSTTDSKTKADLEEVATAESDIINLKQEVSDLRGQVSGQQLCCESCNKRLLNTDRLGGPESSSVAASPTIGSDSASGMVKKEQKTFQGDIEQSRKQTAQDSPSSTDKPGHEAVGGSSQRAPQRRQSIAREGQDGWSSSSSNSKWNLAQKQYSNSPLIRGLHGSSRLEDFGGSIPPAASSALVKLTNRLNFLKERRALLASEMQSLDLGRPPAAAAAPSAKSPTPKGHERKKSRD

SEQ ID NO: 197014 - protein, 870 aa, Zea Mays
MSASEFRIPYQQVSSSQPVENVNQFKTCRCGEGDPNSTSETGDSPPASCPNCQVLKSGHLLLSSKGIGWTSWKKRWFILTRASLVFFRSDPNVPPPRGAEPIVTLGGIDLNSSGSVAVKEERKLLTVFFPDGRDGRTFTLKAETTEDLNEWRNALESALAQAPSVANTMGQNPIFSTDVAAEPAEAPAEQSEDSSVIGRPAEFALVDADGSPSFLEKALKFIEDHGVKVEGILRQSADVEEVKRRIQDYEKGKNEFSPEEDAHVIGDCIKYVLREMPSSPVPASCCTALVKAYRSDKARRLDEISRVIYEVFPEPNRQLLQRTLKMMQIVESHKAVNRMSQSALAACMAPLLLRPLLLGECDIDNEFSMGGDSSFQLLQAAAAANHAQAIVIIMMEEFDQIFDDLEEGSCSSDAYTESEDDDVDKEYSTDNDINDDDDGSYDSGEDDIEEDLDYSDDSEHDSKINTNVKDGKVKNNISETAEVAQAKGASHMETNSQSNQKQESCGPNGSKDRILRSTSRSSSSREKSMEKSCSSAHRGKRTLWGRTSARKDLSTEEIECCSDDESLIEKLESNKVDLQSKIAKEAKENAILQSSLEKRKEELHERRLALEKEVENLREQLQKERSLRTSLESGVMNLRRGQVSLPSTTDSKTKADLEEVATAESDIINLKQEVSDLRGQVSGQQLCCESCNKRLLNTDRLGGPESSSVAASPTIGSDSASGMGDIEQSRKQTAQDSPSSTDKPGHEAVGGSSQRAPQRRQSIAREGQDGWSSSSSNSKWNLAQKQYSNSPLIRGLHGSSRLEDFGGSIPPAASSALVKLTNRLNFLKERRALLASEMQSLDLGRPPAAAAAPSAKSPTPKGHERKKSRD

SEQ ID NO: 197015 - protein, 751 aa, Zea Mays
MTLQALTLYPASLSREQKRQRIARTEVSSSQPVENVNQFKTCRCGEGDPNSTSETGDSPPASCPNCQVLKSGHLLLSSKGIGWTSWKKRWFILTRASLVFFRSDPNVPPPRGAEPIVTLGGIDLNSSGSVAVKEERKLLTVFFPDGRDGRTFTLKAETTEDLNEWRNALESALAQAPSVANTMGQNPIFSTDVAAEPAEAPAEQSEDSSVIGRPAEFALVDADGSPSFLEKALKFIEDHGVKVEGILRQSADVEEVKRRIQDYEKGKNEFSPEEDAHVIGDCIKDLEEGSCSSDAYTESEDDDVDKEYSTDNDINDDDDGSYDSGEDDIEEDLDYSDDSEHDSKINTNVKDGKVKNNISETAEVAQAKGASHMETNSQSNQKQESCGPNGSKDRILRSTSRSSSSREKSMEKSCSSAHRGKRTLWGRTSARKDLSTEEIECCSDDESLIEKLESNKVDLQSKIAKEAKENAILQSSLEKRKEELHERRLALEKEVENLREQLQKERSLRTSLESGVMNLRRGQVSLPSTTDSKTKADLEEVATAESDIINLKQEVSDLRGQVSGQQLCCESCNKRLLNTDRLGGPESSSVAASPTIGSDSASGMGDIEQSRKQTAQDSPSSTDKPGHEAVGGSSQRAPQRRQSIAREGQDGWSSSSSNSKWNLAQKQYSNSPLIRGLHGSSRLEDFGGSIPPAASSALVKLTNRLNFLKERRALLASEMQSLDLGRPPAAAAAPSAKSPTPKGHERKKSRD

SEQ ID NO: 197016 - protein, 737 aa, Zea Mays
MSASEFRIPYQQVSSSQPVENVNQFKTCRCGEGDPNSTSETGDSPPASCPNCQVLKSGHLLLSSKGIGWTSWKKRWFILTRASLVFFRSDPNVPPPRGAEPIVTLGGIDLNSSGSVAVKEERKLLTVFFPDGRDGRTFTLKAETTEDLNEWRNALESALAQAPSVANTMGQNPIFSTDVAAEPAEAPAEQSEDSSVIGRPAEFALVDADGSPSFLEKALKFIEDHGVKVEGILRQSADVEEVKRRIQDYEKGKNEFSPEEDAHVIGDCIKDLEEGSCSSDAYTESEDDDVDKEYSTDNDINDDDDGSYDSGEDDIEEDLDYSDDSEHDSKINTNVKDGKVKNNISETAEVAQAKGASHMETNSQSNQKQESCGPNGSKDRILRSTSRSSSSREKSMEKSCSSAHRGKRTLWGRTSARKDLSTEEIECCSDDESLIEKLESNKVDLQSKIAKEAKENAILQSSLEKRKEELHERRLALEKEVENLREQLQKERSLRTSLESGVMNLRRGQVSLPSTTDSKTKADLEEVATAESDIINLKQEVSDLRGQVSGQQLCCESCNKRLLNTDRLGGPESSSVAASPTIGSDSASGMGDIEQSRKQTAQDSPSSTDKPGHEAVGGSSQRAPQRRQSIAREGQDGWSSSSSNSKWNLAQKQYSNSPLIRGLHGSSRLEDFGGSIPPAASSALVKLTNRLNFLKERRALLASEMQSLDLGRPPAAAAAPSAKSPTPKGHERKKSRD

SEQ ID NO: 197017 - protein, 842 aa, Zea Mays
MSASEFRIPYQQVSSSQPVENVNQFKTCRCGEGDPNSTSETGDSPPASCPNCQVLKSGHLLLSSKGIGWTSWKKRWFILTRASLVFFRSDPNVPPPRGAEPIVTLGGIDLNSSGSVAVKEERKLLTVFFPDGRDGRTFTLKAETTEDLNEWRNALESALAQAPSVANTMGQNPIFSTDVAAEPAEAPAEQSEDSSVIGRPAEFALVDADGSPSFLEKALKFIEDHGVKVEGILRQSADVEEVKRRIQDYEKGKNEFSPEEDAHVIGDCIKYVLREMPSSPVPASCCTALVKAYRSDKARRLDEISRVIYEVFPEPNRQLLQRTLKMMQIVESHKAVNRMSQSALAACMAPLLLRPLLLGECDIDNEFSMGGDSSFQLLQAAAAANHAQAIVIIMMEEFDQIFDDLEEGSCSSDAYTESEDDDVDKEYSTDNDINDDDDGSYDSGEDDIEEDLDYSDDSEHDSKINTNVKDGKVKNNISETAEVAQAKGASHMETNSQSNQKQESCGPNGSKDRILRSTSRSSSSREKSMEKSCSSAHRGKRTLWGRTSARKDLSTEEIECCSDDESLIEKLESNKVDLQSKIAKEAKENAILQSSLEKRKEELHERRLALEKEVENLREQLQKERSLRTSLESGVMNLRRGQVSLPSTTDSKVSGQQLCCESCNKRLLNTDRLGGPESSSVAASPTIGSDSASGMGDIEQSRKQTAQDSPSSTDKPGHEAVGGSSQRAPQRRQSIAREGQDGWSSSSSNSKWNLAQKQYSNSPLIRGLHGSSRLEDFGGSIPPAASSALVKLTNRLNFLKERRALLASEMQSLDLGRPPAAAAAPSAKSPTPKGHERKKSRD

SEQ ID NO: 197018 - protein, 709 aa, Zea Mays
MSASEFRIPYQQVSSSQPVENVNQFKTCRCGEGDPNSTSETGDSPPASCPNCQVLKSGHLLLSSKGIGWTSWKKRWFILTRASLVFFRSDPNVPPPRGAEPIVTLGGIDLNSSGSVAVKEERKLLTVFFPDGRDGRTFTLKAETTEDLNEWRNALESALAQAPSVANTMGQNPIFSTDVAAEPAEAPAEQSEDSSVIGRPAEFALVDADGSPSFLEKALKFIEDHGVKVEGILRQSADVEEVKRRIQDYEKGKNEFSPEEDAHVIGDCIKDLEEGSCSSDAYTESEDDDVDKEYSTDNDINDDDDGSYDSGEDDIEEDLDYSDDSEHDSKINTNVKDGKVKNNISETAEVAQAKGASHMETNSQSNQKQESCGPNGSKDRILRSTSRSSSSREKSMEKSCSSAHRGKRTLWGRTSARKDLSTEEIECCSDDESLIEKLESNKVDLQSKIAKEAKENAILQSSLEKRKEELHERRLALEKEVENLREQLQKERSLRTSLESGVMNLRRGQVSLPSTTDSKVSGQQLCCESCNKRLLNTDRLGGPESSSVAASPTIGSDSASGMGDIEQSRKQTAQDSPSSTDKPGHEAVGGSSQRAPQRRQSIAREGQDGWSSSSSNSKWNLAQKQYSNSPLIRGLHGSSRLEDFGGSIPPAASSALVKLTNRLNFLKERRALLASEMQSLDLGRPPAAAAAPSAKSPTPKGHERKKSRD

SEQ ID NO: 197019 - protein, 713 aa, Zea Mays
MSASEFRIPYQQVSSSQPVENVNQFKTCRCGEGDPNSTSETGDSPPASCPNCQVLKSGHLLLSSKGIGWTSWKKRWFILTRASLVFFRSDPNVPPPRGAEPIVTLGGIDLNSSGSVAVKEERKLLTVFFPDGRDGRTFTLKAETTEDLNEWRNALESALAQAPSVANTMGQNPIFSTDVAAEPAEAPAEQSEDSSVIGRPAEFALVDADGSPSFLEKALKFIEDHGVKVEGILRQSADVEEVKRRIQDYEKGKNEFSPEEDAHVIGDCIKDLEEGSCSSDAYTESEDDDVDKEYSTDNDINDDDDGSYDSGEDDIEEDLDYSDDSEHDSKINTNVKDGKVKNNISETAEVAQAKGASHMETNSQSNQKQESCGPNGSKDRILRSTSRSSSSREKSMEKSCSSAHRGKRTLWGRTSARKDLSTEEIECCSDDESLIEKLESNKVDLQSKIAKEAKENAILQSSLEKRKEELHERRLALEKEVENLREQLQKERSLRTSLESGVMNLRRGQVSLPSTTDSKVSGQQLCCESCNKRLLNTDRLGGPESSSVAASPTIGSDSASGMKTFQGDIEQSRKQTAQDSPSSTDKPGHEAVGGSSQRAPQRRQSIAREGQDGWSSSSSNSKWNLAQKQYSNSPLIRGLHGSSRLEDFGGSIPPAASSALVKLTNRLNFLKERRALLASEMQSLDLGRPPAAAAAPSAKSPTPKGHERKKSRD

SEQ ID NO: 197020 - protein, 430 aa, Zea Mays
MTLQALTLYPASLSREQKRQRIARTEVSSSQPVENVNQFKTCRCGEGDPNSTSETGDSPPASCPNCQVLKSGHLLLSSKGIGWTSWKKRWFILTRASLVFFRSDPNVPPPRGAEPIVTLGGIDLNSSGSVAVKEERKLLTVFFPDGRDGRTFTLKAETTEDLNEWRNALESALAQAPSVANTMGQNPIFSTDVAAEPAEAPAEQSEDSSVIGRPAEFALVDADGSPSFLEKALKFIEDHGVKVEGILRQSADVEEVKRRIQDYEKGKNEFSPEEDAHVIGDCIKYVLREMPSSPVPASCCTALVKAYRSDKARRLDEISRVIYEVFPEPNRQLLQRTLKMMQIVESHKAVNRMSQSALAACMAPLLLRPLLLGECDIDNEFSMGGDSSFQLLQAAAAANHAQAIVIIMMEEFDQIFDVSSFYLIHLKYFT

SEQ ID NO: 197021 - protein, 531 aa, Zea Mays
MSASEFRIPYQQVSSSQPVENVNQFKTCRCGEGDPNSTSETGDSPPASCPNCQVLKSGHLLLSSKGIGWTSWKKRWFILTRASLVFFRSDPNVPPPRGAEPIVTLGGIDLNSSGSVAVKEERKLLTVFFPDGRDGRTFTLKAETTEDLNEWRNALESALAQAPSVANTMGQNPIFSTDVAAEPAEAPAEQSEDSSVIGRPAEFALVDADGSPSFLEKALKFIEDHGVKVEGILRQSADVEEVKRRIQDYEKGKNEFSPEEDAHVIGDCIKYVLREMPSSPVPASCCTALVKAYRSDKARRLDEISRVIYEVFPEPNRQLLQRTLKMMQIVESHKAVNRMSQSALAACMAPLLLRPLLLGECDIDNEFSMGGDSSFQLLQAAAAANHAQAIVIIMMEEFDQIFDDLEEGSCSSDAYTESEDDDVDKEYSTDNDINDDDDGSYDSGEDDIEEDLDYSDDSEHDSKINTNVKDGKVKNNISETAGNDNNQYLQPPIRATRIENGASREGTDQNSSLNFFHRSCTGKGCFSYGDQ

SEQ ID NO: 197022 - protein, 778 aa, Zea Mays
MSAYYLEHADVSHIQKHFDNFEEEARSLLSLGLPIPAYDQVLKASHAFNILDSRGFVGVTERARYFGRMRSLARQCAQLWVETRENLGHPLGAYEEDNLIYPHVSKKTHREEVLVQPRAFVLEIGTEELPPRDVVEATEQLEKSLVNTLEKRRLTHGKVHTYGTPRRLAIVVENLSMKQTEVEVELRGPPVAKAFDEEGNPTKAAEGFCRKNNVSVDHLYRRIDGKTEYIYARVRESARFADEVLTEDLPTIVSGISFPKSMRWNSNIVFSRPIRWILALHGDFVVPFYFAGISSGNQSCGLRNSSLANFKVETAESYLGTVEKAGILINMQERKEKVLHASTVLAQGVGGDFIAPDSLLQEVVNLVEAPVPILGRYDDSFLELPKDVLITVMQKHQKYFAVISKSTGDLLPYFIAVANGAISKEVVRKGNEAVLRARYEDAKFFYKMDTQKKFSEFRGQLSGILFHEKLGTMLDKMTRVENTVAELALILGINERTVPIIKDAAALAMSDLATSIVTEFTSLAGIMARHYALRDSIPEEIAEALFEITLPRSSGDVFPRTDAGIVLAVADRLDSLVGLFGAGCQPSSTNDPFGLRRVSYGLVQILVENKKSFDLRRALTLLAGVQPIAIESDVIDEAVQFVTRRLEQLLVDEGINCEIVRSVLMERANCPYLAAQTATEMEAFSRTETFQKIVEAYSRPTRIIRGKEIESALEVDPHVFEKDEEKVLWSAYLEVADKIHPGVDIKTFVDASLILIQPLEDFFNSVFVMATREFATTG

SEQ ID NO: 197023 - protein, 567 aa, Zea Mays
MSAYYLEHADVSHIQKHFDNFEEEARSLLSLGLPIPAYDQVLKASHAFNILDSRGFVGVTERARYFGRMRSLARQCAQLWVETRENLGHPLGAYEEDNLIYPHVSKKTHREEVLVQPRAFVLEIGTEELPPRDVVEATEQLEKSLVNTLEKRRLTHGKVHTYGTPRRLAIVVENLSMKQTEVEVELRGPPVAKAFDEEGNPTKAAEGFCRKNNVSVDHLYRRIDGKTEYIYARVRESARFADEVLTEDLPTIVSGISFPKSMRWNSNIVFSRPIRWILALHGDFVVPFYFAGISSGNQSCGLRNSSLANFKVETAESYLGTVEKAGILINMQERKEKVLHASTVLAQGVGGDFIAPDSLLQEVVNLVEAPVPILGRYDDSFLELPKDVLITVMQKHQKYFAVISKSTGDLLPYFIAVANGAISKEVVRKGNEAVLRARYEDAKFFYKMDTQKKFSEFRGQLSGILFHEKLGTMLDKMTRVENTVAELALILGINERTVPIIKDAAALAMSDLATSIVTEFTSLAGIMARHYALRDSIPEEIAEALFEITLPRSSGDVFPRTDADWIA

SEQ ID NO: 197024 - protein, 560 aa, Zea Mays
MVLTEDLPTIVSGISFPKSMRWNSNIVFSRPIRWILALHGDFVVPFYFAGISSGNQSCGLRNSSLANFKVETAESYLGTVEKAGILINMQERKEKVLHASTVLAQGVGGDFIAPDSLLQEVVNLVEAPVPILGRYDDSFLELPKDVLITVMQKHQKYFAVISKSTGDLLPYFIAVANGAISKEVVRKGNEAVLRARYEDAKFFYKMDTQKKFSEFRGQLSGILFHEKLGTMLDKMTRVENTVAELALILGINERTVPIIKDAAALAMSDLATSIVTEFTSLAGIMARHYALRDSIPEEIAEALFEITLPRSSGDVFPRTDAGIVLAVADRLDSLVGLFGAGCQPSSTNDPFGLRRVSYGLVQILVENKKSFDLRRALTLLAGVQPIAIESDVIDEAVQFVTRRLEQLLVDEGINCEIVRSVLMERANCPYLAAQTATEMEAFSRTETFQKIVEAYSRPTRIIRGKEIESALEVDPHVFEKDEEKVLWSAYLEVADKIHPGVDIKTFVDASLILIQPLEDFFNSVFVMAEDERVRNNRLTLLRKIESLPKGIADLSVLPGF

SEQ ID NO: 197025 - protein, 429 aa, Zea Mays
MGKCTLTGHQGDWRYHPDDFHLTFTFLTSLYIVVENLSMKQTEVEVELRGPPVAKAFDEEGNPTKAAEGFCRKNNVSVDHLYRRIDGKTEYIYARVRESARFADEVLTEDLPTIVSGISFPKSMRWNSNIVFSRPIRWILALHGDFVVPFYFAGISSGNQSCGLRNSSLANFKVETAESYLGTVEKAGILINMQERKEKVLHASTVLAQGVGGDFIAPDSLLQEVVNLVEAPVPILGRYDDSFLELPKDVLITVMQKHQKYFAVISKSTGDLLPYFIAVANGAISKEVVRKGNEAVLRARYEDAKFFYKMDTQKKFSEFRGQLSGILFHEKLGTMLDKMTRVENTVAELALILGINERTVPIIKDAAALAMSDLATSIVTEFTSLAGIMARHYALRDSIPEEIAEALFEITLPRSSGDVFPRTDADWIA

SEQ ID NO: 197026 - protein, 867 aa, Zea Mays
MDGMEITQFTYFQQSGSLPLQPVSVEITYGLERILMSLQEVDHFKNILYTEGITYGELFLENEKEMSAYYLEHADVSHIQKHFDNFEEEARSLLSLGLPIPAYDQVLKASHAFNILDSRGFVGVTERARYFGRMRSLARQCAQLWVETRENLGHPLGAYEEDNLIYPHVSKKTHREEVLVQPRAFVLEIGTEELPPRDVVEATEQLEKSLVNTLEKRRLTHGKVHTYGTPRRLAIVVENLSMKQTEVEVELRGPPVAKAFDEEGNPTKAAEGFCRKNNVSVDHLYRRIDGKTEYIYARVRESARFADEVLTEDLPTIVSGISFPKSMRWNSNIVFSRPIRWILALHGDFVVPFYFAGISSGNQSCGLRNSSLANFKVETAESYLGTVEKAGILINMQERKEKVLHASTVLAQGVGGDFIAPDSLLQEVVNLVEAPVPILGRYDDSFLELPKDVLITVMQKHQKYFAVISKSTGDLLPYFIAVANGAISKEVVRKGNEAVLRARYEDAKFFYKMDTQKKFSEFRGQLSGILFHEKLGTMLDKMTRVENTVAELALILGINERTVPIIKDAAALAMSDLATSIVTEFTSLAGIMARHYALRDSIPEEIAEALFEITLPRSSGDVFPRTDAGIVLAVADRLDSLVGLFGAGCQPSSTNDPFGLRRVSYGLVQILVENKKSFDLRRALTLLAGVQPIAIESDVIDEAVQFVTRRLEQLLVDEGINCEIVRSVLMERANCPYLAAQTATEMEAFSRTETFQKIVEAYSRPTRIIRGKEIESALEVDPHVFEKDEEKVLWSAYLEVADKIHPGVDIKTFVDASLILIQPLEDFFNSVFVMAEDERVRNNRLTLLRKIESLPKGIADLSVLPGF

SEQ ID NO: 197027 - protein, 323 aa, Zea Mays
MSAYYLEHADVSHIQKHFDNFEEEARSLLSLGLPIPAYDQVLKASHAFNILDSRGFVGVTERARYFGRMRSLARQCAQLWVETRENLGHPLGAYEEDNLIYPHVSKKTHREEVLVQPRAFVLEIGTEELPPRDVVEATEQLEKSLVNTLEKRRLTHGKVHTYGTPRRLAIVVENLSMKQTEVEVELRGPPVAKAFDEEGNPTKAAEGFCRKNNVSVDHLYRRIDGKTEYIYARVRESARFADEVLTEDLPTIVSGISFPKSMRWNSNIVFSRPIRWILALHGDFVVPFYFAGISRFALAVGISHVAFVTLLWLILRWKLQNHI

SEQ ID NO: 197028 - protein, 384 aa, Zea Mays
MVQLARKLFAKGMKLFSGQGMRMPNSFIRWIHKRNFLNSEASLVAFFFMEKLGTMLDKMTRVENTVAELALILGINERTVPIIKDAAALAMSDLATSIVTEFTSLAGIMARHYALRDSIPEEIAEALFEITLPRSSGDVFPRTDAGIVLAVADRLDSLVGLFGAGCQPSSTNDPFGLRRVSYGLVQILVENKKSFDLRRALTLLAGVQPIAIESDVIDEAVQFVTRRLEQLLVDEGINCEIVRSVLMERANCPYLAAQTATEMEAFSRTETFQKIVEAYSRPTRIIRGKEIESALEVDPHVFEKDEEKVLWSAYLEVADKIHPGVDIKTFVDASLILIQPLEDFFNSVFVMAEDERVRNNRLTLLRKIESLPKGIADLSVLPGF

SEQ ID NO: 197029 - protein, 474 aa, Zea Mays
MQCSNTEVGAGTMNPLTFLRVLGPEPWNVAYVEPSIRPDDSRYGDNPNRLQRHTQFQVILKPDPGNSQDLFLHSLSAIGINIHEHDIRFVEDNWESPVLGAWGLGWEVWMDGMEITQFTYFQQSGSLPLQPVSVEITYGLERILMSLQEVDHFKNILYTEGITYGELFLENEKEMSAYYLEHADVSHIQKHFDNFEEEARSLLSLGLPIPAYDQVLKASHAFNILDSRGFVGVTERARYFGRMRSLARQCAQLWVETRENLGHPLGAYEEDNLIYPHVSKKTHREEVLVQPRAFVLEIGTEELPPRDVVEATEQLEKSLVNTLEKRRLTHGKVHTYGTPRRLAIVVENLSMKQTEVEVELRGPPVAKAFDEEGNPTKAAEGFCRKNNVSVDHLYRRIDGKTEYIYARVRESARFADEVLTEDLPTIVSGISFPKSMRWNSNIVFSRPIRWILALHGDFVVPFYFAGISRYYILY

SEQ ID NO: 197030 - protein, 295 aa, Zea Mays
MQCSNTEVGAGTMNPLTFLRVLGPEPWNVAYVEPSIRPDDSRYGDNPNRLQRHTQFQVILKPDPGNSQDLFLHSLSAIGINIHEHDIRFVEDNWESPVLGAWGLGWEVWMDGMEITQFTYFQQSGSLPLQPVSVEITYGLERILMSLQEVDHFKNILYTEGITYGELFLENEKEMSAYYLEHADVSHIQKHFDNFEEEARSLLSLGLPIPAYDQVLKASHAFNILDSRGFVGVTERARYFGRMRSLARQCAQLWVETRENLGHPLGAYEEDNLIYPHVSKKTHREEQKSCHPVTS

SEQ ID NO: 197031 - protein, 638 aa, Zea Mays
MAEVDHLAAERATARFDVEEMKVAWAGSRHAVHVADRMARLVASDPVFRKDNRTMLSRKELFKDTLRKAAHAWKRIVELRLTEEEADLLRQYVDQPGYVDLHWGMFVPAIKGQGTEEQQHKWLPLAYKFQIIGCYAQTELGHGSNVQGLETTATFDPKTDEFVIHSPTLTSSKWWPGGLGKASTHAVVYARLITEGKDYGIHGFIVQLRSLEDHSPLPGVTLGDIGGKFGSGAYNSMDNGVLRFDHVRIPRDQMLMRLSQVTREGKYVHSNVPKQLLYGTMVYVRQSIVADASKALSRAVCIAVRYSAVRKQFGSQDGGPETQVLNYKTQQSRLFPLLASAYAFRFVGDWLNWLYTDVTQKLEAKDFSTLQEAHACTAGLKAVTTSVTADAIEECRKLCGGHGYLNSSGLPELFAVYVPACTYEGDNVVLLLQVARILMKTVSQLASGKQPVGTMAYMGKVQYLMQCKSAVSSAEDWLNPDAIQEAFEARALRMAVNCAQNISQAASQEEAAGFYERSPDLLEAAVAHIQLIIVTKFIEKVHQEIPGHGVKEQLQALCNVYALYILHKHLGDFLATGCITPRQGALANEQLGKLYACVRTLWRWWMRSTTRTTTWGLCWGGTTATCTLRSTRRRGRTR

SEQ ID NO: 197032 - protein, 243 aa, Zea Mays
MESLFGQSQRRRRAGGSGFESLKRLGHISPAVYLTLCSALAFSALGAYLHILLNVGGALTTVGCVASIAFLISLPASRDQERNRLALLMSAALLQGASVGPLVDLVIDLDSRILVTAFVGTAVAFACFSGAAIIAKRREYLYLGGLLSSGLSILLWLQFATSIFGHTSATFMFELYFGLLVFLGYMVFDTQEIIERAHRGDMDYIKHALTLFTDFVAVLVRILVIMMKNAQEKSQDEKKRKKR

SEQ ID NO: 197033 - protein, 264 aa, Zea Mays
MSSSPAALRFYCHQCDRTVSLAPPASPDADVFCPRCGGGFVEELPPNPSPAPPAAAFFAPPSFDIRHPSDLSAFFGPASPEPLAPGLFDPSNFLHDHFGGLLSGGATIQIVLEGGPPPPGLNFADYFVGSSGLEQLIQQLAENDPNRYGTPPAAKAAVASLPDVAVSADMMQADGGAQCAVCMDDFHLGAAAKQLPCKHVFHKDCIVPWLDLHSSCPVCRFELPTDDPDYNHTHQQHAMQLVALSLRLDMMISTEASIADLGNK

SEQ ID NO: 197034 - protein, 251 aa, Zea Mays
MSSSPAALRFYCHQCDRTVSLAPPASPDADVFCPRCGGGFVEELPPNPSPAPPAAAFFAPPSFDIRHPSDLSAFFGPASPEPLAPGLFDPSNFLHDHFGGLLSGGATIQIVLEGGPPPPGLNFADYFVGSSGLEQLIQQLAENDPNRYGTPPAAKAAVASLPDVAVSADMMQADGGAQCAVCMDDFHLGAAAKQLPCKHVFHKDCIVPWLDLHSSCPVCRFELPTDDPDYNHTHQQHAGGPQSQTGYDDLD

SEQ ID NO: 197035 - protein, 63 aa, Zea Mays
MLVPRRRSQSTARRLPCARSRMSSLGPCVLPSSAPPLGHGARPSHPGPPLHAGVFIFVSSNFA

SEQ ID NO: 197036 - protein, 85 aa, Zea Mays
MEKKMRHWLISHYTYKTGVCPYWFISEINYTKGTRNLGTRSSRYSSDSYVVSSSMGWFHCSLENLITFLQVTDTFDPKPFMEYSN

SEQ ID NO: 197037 - protein, 134 aa, Zea Mays
MSLSLFMPSYLLVALLYLWWMPLSMFATRLIFVQVVYCLLRFRFGYLVSVFTFPDIIRHPCVNLVDALADVSNETRLCSASLLSSSISFWMLGLHLRLPSILLPRRCRCHRHLLLLHMERVVVFIVIIADRMDM

SEQ ID NO: 197038 - protein, 1044 aa, Zea Mays
MAPAAAVIGAGDSDRLAREVARVLDECRASHAVQPRKLRELAALRSSSGGGGRLFIAAFHVAVTPLFALARRSAESDRVARFISAFASASASSADDGGNGFLEEFLRFLVTASKAAHRPARFRACQIISEIIMRLPDDAEVSDEIWDEVIDGMKVRVQDKNAAIRTYAVRALSRFAVEGEDGGIVDLFLETLDNEPNAEVRKTIVFSLPPSNNTLESVVESMLDISESVRRAAYSVLATKFPLQTLSIKQRTTVLHRGLSDRSASVNNECLKMLKDEWLVKYCGGDVISLLRFLDVETYESVGESVMAVLLKDGALRVQDGHSIRQYFTANERDSNIQLMDAEVALYWKIMCKHLQAEAQVKGSEAAATTGAEAAVYASEATDKNDLLDSVLPSTITDYVDLVKAHLSAGPNYHFTSRQLLLLGEMLEFSDTMNRKIASSFLHELLVRPLEHEVDDDGNQIAIGDGVSLGGDKDWAKAVAELAKKVHSSVGEFEMVVSTVVEELARPCRERTADFMQWMHCLAVTGLLLQNTSTLRNLQATAIEPSELLHSLLLPAAKQNHVDVQRAALRCLCLLGLLENRPNAELVKQLRLSFINGPDLVSAIACKALIDLVTWHGPQEIDRAIGIESPDPSYEKSQFTQVDLSDMNDDDLNIGVLDILFSGFHKDHWEFDLEGDNHDNVPTILGEGFAKILLLSGNFASIPADLHTVILAKLIKLYFSEETKELERLKQCMSVFFQHYPALSDKHKSCICNAFVPVMKAMWPGLYGNAGGSTHVISKRRKLAVQASRFMVQMVQTQLFSTESMDQASKSSESASGLADASNNFDISEEGLAIRIALEVASCPDKKTAAGKAYALALCKVVVLLRFRQSEQKAIKCMRGLVNHLAASVASDKELGKELAQMAARLRSLDACPDEELAQDDADAIFKKLGFDDGFKLDTNQAVPPTPAPRSVRPPAPARRRARQAPSSSDDSDEEAGEADVPATSASRVPATPSMTAAARSQRASKTAALSKMSAKPATASDDSELDGQSDVTSEEDASDEESL

SEQ ID NO: 197039 - protein, 752 aa, Zea Mays
MQSMFFQVRLFENTEESSCLCSFILFLLLGIIILIIFSAERDSNIQLMDAEVALYWKIMCKHLQAEAQVKGSEAAATTGAEAAVYASEATDKNDLLDSVLPSTITDYVDLVKAHLSAGPNYHFTSRQLLLLGEMLEFSDTMNRKIASSFLHELLVRPLEHEVDDDGNQIAIGDGVSLGGDKDWAKAVAELAKKVHSSVGEFEMVVSTVVEELARPCRERTADFMQWMHCLAVTGLLLQNTSTLRNLQATAIEPSELLHSLLLPAAKQNHVDVQRAALRCLCLLGLLENRPNAELVKQLRLSFINGPDLVSAIACKALIDLVTWHGPQEIDRAIGIESPDPSYEKSQFTQVDLSDMNDDDLNIGVLDILFSGFHKDHWEFDLEGDNHDNVPTILGEGFAKILLLSGNFASIPADLHTVILAKLIKLYFSEETKELERLKQCMSVFFQHYPALSDKHKSCICNAFVPVMKAMWPGLYGNAGGSTHVISKRRKLAVQASRFMVQMVQTQLFSTESMDQASKSSESASGLADASNNFDISEEGLAIRIALEVASCPDKKTAAGKAYALALCKVVVLLRFRQSEQKAIKCMRGLVNHLAASVASDKELGKELAQMAARLRSLDACPDEELAQDDADAIFKKLGFDDGFKLDTNQAVPPTPAPRSVRPPAPARRRARQAPSSSDDSDEEAGEADVPATSASRVPATPSMTAAARSQRASKTAALSKMSAKPATASDDSELDGQSDVTSEEDASDEESL

SEQ ID NO: 197040 - protein, 1046 aa, Zea Mays
MAPAAAVIGAGDSDRLAREVARVLDECRASHAVQPRKLRELAALRSSSGGGGRLFIAAFHVAVTPLFALARRSAESDRVARFISAFASASASSADDGGNGFLEEFLRFLVTASKAAHRPARFRACQIISEIIMRLPDDAEVSDEIWDEVIDGMKVRVQDKNAAIRTYAVRALSRFAVEGEDGGIVDLFLETLDNEPNAEVRKTIVFSLPPSNNTLESVVESMLDISESVRRAAYSVLATKFPLQTLSIKQRTTVLHRGLSDRSASVNNECLKMLKDEWLVKYCGGDVISLLRFLDVETYESVGESVMAVLLKDGALRVQDGHSIRQYFTANGEKERDSNIQLMDAEVALYWKIMCKHLQAEAQVKGSEAAATTGAEAAVYASEATDKNDLLDSVLPSTITDYVDLVKAHLSAGPNYHFTSRQLLLLGEMLEFSDTMNRKIASSFLHELLVRPLEHEVDDDGNQIAIGDGVSLGGDKDWAKAVAELAKKVHSSVGEFEMVVSTVVEELARPCRERTADFMQWMHCLAVTGLLLQNTSTLRNLQATAIEPSELLHSLLLPAKQNHVDVQRAALRCLCLLGLLENRPNAELVKQLRLSFINGPDLVSAIACKALIDLVTWHGPQEIDRAIGIESPDPSYEKSQFTQVDLSDMNDDDLNIGVLDILFSGFHKDHWEFDLEGDNHDNVPTILGEGFAKILLLSGNFASIPADLHTVILAKLIKLYFSEETKELERLKQCMSVFFQHYPALSDKHKSCICNAFVPVMKAMWPGLYGNAGGSTHVISKRRKLAVQASRFMVQMVQTQLFSTESMDQASKSSESASGLADASNNFDISEEGLAIRIALEVASCPDKKTAAGKAYALALCKVVVLLRFRQSEQKAIKCMRGLVNHLAASVASDKELGKELAQMAARLRSLDACPDEELAQDDADAIFKKLGFDDGFKLDTNQAVPPTPAPRSVRPPAPARRRARQAPSSSDDSDEEAGEADVPATSASRVPATPSMTAAARSQRASKTAALSKMSAKPATASDDSELDGQSDVTSEEDASDEESL

SEQ ID NO: 197041 - protein, 915 aa, Zea Mays
MRLPDDAEVSDEIWDEVIDGMKVRVQDKNAAIRTYAVRALSRFAVEGEDGGIVDLFLETLDNEPNAEVRKTIVFSLPPSNNTLESVVESMLDISESVRRAAYSVLATKFPLQTLSIKQRTTVLHRGLSDRSASVNNECLKMLKDEWLVKYCGGDVISLLRFLDVETYESVGESVMAVLLKDGALRVQDGHSIRQYFTANGEKAERDSNIQLMDAEVALYWKIMCKHLQAEAQVKGSEAAATTGAEAAVYASEATDKNDLLDSVLPSTITDYVDLVKAHLSAGPNYHFTSRQLLLLGEMLEFSDTMNRKIASSFLHELLVRPLEHEVDDDGNQIAIGDGVSLGGDKDWAKAVAELAKKVHSSVGEFEMVVSTVVEELARPCRERTADFMQWMHCLAVTGLLLQNTSTLRNLQATAIEPSELLHSLLLPAKQNHVDVQRAALRCLCLLGLLENRPNAELVKQLRLSFINGPDLVSAIACKALIDLVTWHGPQEIDRAIGIESPDPSYEKSQFTQVDLSDMNDDDLNIGVLDILFSGFHKDHWEFDLEGDNHDNVPTILGEGFAKILLLSGNFASIPADLHTVILAKLIKLYFSEETKELERLKQCMSVFFQHYPALSDKHKSCICNAFVPVMKAMWPGLYGNAGGSTHVISKRRKLAVQASRFMVQMVQTQLFSTESMDQASKSSESASGLADASNNFDISEEGLAIRIALEVASCPDKKTAAGKAYALALCKVVVLLRFRQSEQKAIKCMRGLVNHLAASVASDKELGKELAQMAARLRSLDACPDEELAQDDADAIFKKLGFDDGFKLDTNQAVPPTPAPRSVRPPAPARRRARQAPSSSDDSDEEAGEADVPATSASRVPATPSMTAAARSQRASKTAALSKMSAKPATASDDSELDGQSDVTSEEDASDEESL

SEQ ID NO: 197042 - protein, 822 aa, Zea Mays
MLDISESVRRAAYSVLATKFPLQTLSIKQRTTVLHRGLSDRSASVNNECLKMLKDEWLVKYCGGDVISLLRFLDVETYESVGESVMAVLLKDGALRVQDGHSIRQYFTANERDSNIQLMDAEVALYWKIMCKHLQAEAQVKGSEAAATTGAEAAVYASEATDKNDLLDSVLPSTITDYVDLVKAHLSAGPNYHFTSRQLLLLGEMLEFSDTMNRKIASSFLHELLVRPLEHEVDDDGNQIAIGDGVSLGGDKDWAKAVAELAKKVHSSVGEFEMVVSTVVEELARPCRERTADFMQWMHCLAVTGLLLQNTSTLRNLQATAIEPSELLHSLLLPAKQNHVDVQRAALRCLCLLGLLENRPNAELVKQLRLSFINGPDLVSAIACKALIDLVTWHGPQEIDRAIGIESPDPSYEKSQFTQVDLSDMNDDDLNIGVLDILFSGFHKDHWEFDLEGDNHDNVPTILGEGFAKILLLSGNFASIPADLHTVILAKLIKLYFSEETKELERLKQCMSVFFQHYPALSDKHKSCICNAFVPVMKAMWPGLYGNAGGSTHVISKRRKLAVQASRFMVQMVQTQLFSTESMDQASKSSESASGLADASNNFDISEEGLAIRIALEVASCPDKKTAAGKAYALALCKVVVLLRFRQSEQKAIKCMRGLVNHLAASVASDKELGKELAQMAARLRSLDACPDEELAQDDADAIFKKLGFDDGFKLDTNQAVPPTPAPRSVRPPAPARRRARQAPSSSDDSDEEAGEADVPATSASRVPATPSMTAAARSQRASKTAALSKMSAKPATASDDSELDGQSDVTSEEDASDEESL

SEQ ID NO: 197043 - protein, 916 aa, Zea Mays
MRLPDDAEVSDEIWDEVIDGMKVRVQDKNAAIRTYAVRALSRFAVEGEDGGIVDLFLETLDNEPNAEVRKTIVFSLPPSNNTLESVVESMLDISESVRRAAYSVLATKFPLQTLSIKQRTTVLHRGLSDRSASVNNECLKMLKDEWLVKYCGGDVISLLRFLDVETYESVGESVMAVLLKDGALRVQDGHSIRQYFTANGEKAERDSNIQLMDAEVALYWKIMCKHLQAEAQVKGSEAAATTGAEAAVYASEATDKNDLLDSVLPSTITDYVDLVKAHLSAGPNYHFTSRQLLLLGEMLEFSDTMNRKIASSFLHELLVRPLEHEVDDDGNQIAIGDGVSLGGDKDWAKAVAELAKKVHSSVGEFEMVVSTVVEELARPCRERTADFMQWMHCLAVTGLLLQNTSTLRNLQATAIEPSELLHSLLLPAAKQNHVDVQRAALRCLCLLGLLENRPNAELVKQLRLSFINGPDLVSAIACKALIDLVTWHGPQEIDRAIGIESPDPSYEKSQFTQVDLSDMNDDDLNIGVLDILFSGFHKDHWEFDLEGDNHDNVPTILGEGFAKILLLSGNFASIPADLHTVILAKLIKLYFSEETKELERLKQCMSVFFQHYPALSDKHKSCICNAFVPVMKAMWPGLYGNAGGSTHVISKRRKLAVQASRFMVQMVQTQLFSTESMDQASKSSESASGLADASNNFDISEEGLAIRIALEVASCPDKKTAAGKAYALALCKVVVLLRFRQSEQKAIKCMRGLVNHLAASVASDKELGKELAQMAARLRSLDACPDEELAQDDADAIFKKLGFDDGFKLDTNQAVPPTPAPRSVRPPAPARRRARQAPSSSDDSDEEAGEADVPATSASRVPATPSMTAAARSQRASKTAALSKMSAKPATASDDSELDGQSDVTSEEDASDEESL

SEQ ID NO: 197044 - protein, 112 aa, Zea Mays
MAMAVLTSSPSRARPLHTSSAGLPRPCTPALVVVLPKELLSPSTMLRHAERRHCSPRRPSSARDIGPFVESEGIAGEDPEQQQLGEGKCPLTHYVLSTYNLPSRITYLKPKD

SEQ ID NO: 197045 - protein, 185 aa, Zea Mays
MFTSTPSILIYLRCLPLNSYLCLPSIPHQPRLASSYIVVHYRTRNHLSRSVTARSVTILATAFHILPFICIHTVWLHNPSSFPPEPDLSFPPEPDRASPFGYWSSAGGRRTPLPPCDLLAAHGNGSLNFLAEPRPPSPHELRWPTSSLHSCTRRRLAEGAFVAIHHAATRRASSLFSSSSELCPR

SEQ ID NO: 197046 - protein, 107 aa, Zea Mays
MAMAVLTSSPSRARPLHTSSAGLPRPCTPALVVVLPKELLSPSTMLRHAERRHCSPRRPSSARDIGPFVESEGIAGEDPEEQQLGEGKCPLTHYVLSTYNLPSRITY

SEQ ID NO: 197047 - protein, 598 aa, Zea Mays
MAVASAARTATPASPARLGSLWSTLEDQRGAAVPLLSSAWTLPTTSQGGIAGDGEQLPKEGLLRRAGGVVARWWGAACGAVAELWAFARADPRKPVFAGKVALALALISLLVFLREPRDIVSHSVWAILTVVVVFEFSIGAFALVVAELSKHLGKLEEVILITSILIVAFFTTLTKLHPKMKPYEYGFRVFLLTFCYVMVSGYNTGKFTDTATSRFILIAIGAAVSLGINVGIYPIWAGEDLHNLIAKNFTGVAKSLEGCVDGYLRCMEYERIPSKILVYQASDDPVYSGYRAAVEASAQEETLLGFAIWEPPHGPYKTMNYPWRSFTKVSGALRHCSFAVMALHGCILSEIQAPPESRRVFSAEIQRVGQEGAKVLRELGSRVKTMTKLSSSGILFEVHMAAEELQKKIDEKSYLLVNTERWDASKQAQGIKEVVNGTRAVETENKNKENKDDGTSAVEKENKSKENNNGGLEPTIVDQTLVHQSKSFLANSFLSRYDSASTIDGFKPALSWPARKSFHPNIPLEDEDSQTYESASALSLATFASLLIEFVARLQNVVNAFEELSEKANFKDPVVEPTAVSTSNVRFLDKLCKFVGF

SEQ ID NO: 197048 - protein, 418 aa, Zea Mays
MKPYEYGFRVFLLTFCYVMVSGYNTGKFTDTATSRFILIAIGAAVSLGINVGIYPIWAGEDLHNLIAKNFTGVAKSLEGCVDGYLRCMEYERIPSKILVYQASDDPVYSGYRAAVEASAQEETLLGFAIWEPPHGPYKTMNYPWRSFTKVSGALRHCSFAVMALHGCILSEIQAPPESRRVFSAEIQRVGQEGAKVLRELGSRVKTMTKLSSSGILFEVHMAAEELQKKIDEKSYLLVNTERWDASKQAQGIKEVVNGTRAVETENKNKENKDDGTSAVEKENKSKENNNGGLEPTIVDQTLVHQSKSFLANSFLSRYDSASTIDGFKPALSWPARKSFHPNIPLEDEDSQTYESASALSLATFASLLIEFVARLQNVVNAFEELSEKANFKDPVVEPTAVSTSNVRFLDKLCKFVGF

SEQ ID NO: 197049 - protein, 129 aa, Zea Mays
MDQLTMSESTRSRDFDEAIWFELFTEHHVCVVLPKIKQSASQCRSSQHTTSTSPLILPNRELQGRMASEHGEAMAAQIELAARHDIHGRELDVGHGDEGSTAHGKVNDALWIWRSLQGFMVGPATGRRT

SEQ ID NO: 197050 - protein, 78 aa, Zea Mays
MFADSGNPSSRDQSHDSGGKQYPKNDHWKLLQVLVNYVSWWVPAKEGYQHVQQVSREVAWTLEWSKVYDSRQVCASVM

SEQ ID NO: 197051 - protein, 58 aa, Zea Mays
MGPNRLPSFVYHAPYIQMNCCVVLLLLYLVSRLMLYINYDHALSLLMYYLLFMISLLC

SEQ ID NO: 197052 - protein, 292 aa, Zea Mays
MVAMAAPGRVALLAAALLFGAFFPSAFATSSYPARLAGRLLSTTASAVAKQLWSLKSAATKTATASVAGRSMVRYEGGYAVDTVFDGSKLGIEPHAAQINRAGDLLLLDSINSNIYRVQLPLSPYSRPKLLAGSPEGLSGHVDGRLREARMNHPKGFTVDDRGNIYVADAMNMAIRKISDTGVTTIAGGKSIRGGYIDEPSVSDDAKFSTDFEVQYISSTCSLLVIDRGNQAIREIPLNDDDCAYQYEAGFPLETSSASKTQHCKYPSIPETFKPLCSSTIHPKRRNCKTGT

SEQ ID NO: 197053 - protein, 277 aa, Zea Mays
MVAMAAPGRVALLAAALLFGAFFPSAFATSSYPARLAGRLLSTTASAVAKQLWSLKSAATKTATASVAGRSMVRYEGGYAVDTVFDGSKLGIEPHAAQINRAGDLLLLDSINSNIYRVQLPLSPYSRPKLLAGSPEGLSGHVDGRLREARMNHPKGFTVDDRGNIYVADAMNMAIRKISDTGVTTIAGGKSIRGGYIDEPSVSDDAKFSTDFEVQYISSTCSLLVIDRGNQAIREIPLNDDDCAYQYEAGFPLAQGLHCFVLLVSLVICLHCSNTGF

SEQ ID NO: 197054 - protein, 857 aa, Zea Mays
MCVPKLVPELFPSLYRIISSPHLYENSLRAKAFAIVHSCISMLGSMSGVYKRDTASLMTSVLDPLIEQFSIVLNYPVQSQNPDDWSMQMEVLKCLLQLVQNFPRLPEAKISAILPALWQTFVSSFKTYHLSYIQGAETLDSISYDSDGSEKSLESFEIQLFELWTTIVGNSRLAKVIGGNIKELAYYTIALQQITEEQVQNWSRDANQYVADEDDLTYSCRVSGSLLLEELVTAYEDYGIDSIVEASQMRFHESRELKEAGSADWWRLHEASLFALGSLSEQLCEAQDSGLTKYNVRDLLEQMLIDIMGTGVHQYPFLHARAFSSVAKFSSLISKGVSEQYLCNAAHAIASDVPPPVKVGACRALAQLLPESNQNLIQPNIMGILSSLVDLLRQASDETLHLVLETLQSAIKSGGEQSTLIEPVISPIILDVWAQHIADPFISIDAVEVLEAIKNAPGCLQPLVSRILPTIGSILVKPKVQPDGLVAGSLDLLTMVLKNAPVAVVKAVFDTCFVSTVQIVLESDDHGEMQNATECLAAFISGGRQELLVWGGEQGQTLKMLLDAASRLLDPALESSVSLFVGSFVLQLILQIPLHLSPHIPDLIAAIMRRMQTSSIAGLKSSLIVIIARLVHMSAPNVDGFINLLLSIPAQGYDNSLVYIMSEWSQLQGEIQGAYQIKVTTTALALLISTRHPELSKVEVQGHLIKTSAGITTRSKARVTPDQWTKIPLPVKIFSLLADTLTEIQEQIGAGDDDDSEEDNDWEEVQNGDASISDDIIHSASVPSMTNPSVEHLNAMAKVFDEDDDDSYDDDLTKNDPLNEVKLADFLTNIFANLWENNRPIFEYLCQRSAVEKVLRR

SEQ ID NO: 197055 - protein, 735 aa, Zea Mays
MEAHGDQRWLVDCLTATLDTARDVRAFAEESLRQASLLPGYGAALTKVTINKEISFGLRQLAAVLLKQFIKQHWQEDEENFVPPVVSASEKVVIRQLLLTSLDDSNGKIRTAISMAVAAIGQQDWPEDWPELLPVLLKLIGDQSNGNEVRGALRCLALLSDDLDDMCVPKLVPELFPSLYRIISSPHLYENSLRAKAFAIVHSCISMLGSMSGVYKRDTASLMTSVLDPLIEQFSIVLNYPVQSQNPDDWSMQMEVLKCLLQLVQNFPRLPEAKISGKICAAILPALWQTFVSSFKTYHLSYIQGAETLDSISYDSDGSEKSLESFEIQLFELWTTIVGNSRLAKVIGGNIKELAYYTIALQQITEEQVQNWSRDANQYVADEDDLTYSCRVSGSLLLEELVTAYEDYGIDSIVEASQMRFHESRELKEAGSADWWRLHEASLFALGSLSEQLCEAQDSGLTKYNVRDLLEQMLIDIMGTGVHQYPFLHARAFSSVAKFSSLISKGVSEQYLCNAAHAIASDVPPPVKVGACRALAQLLPESNQNLIQPNIMGILSSLVDLLRQASDETLHLVLETLQSAIKSGGEQSTLIEPVISPIILDVWAQHIADPFISIDAVEVLEAIKNAPGCLQPLVSRILPTIGSILVKPKVQPDGLVAGSLDLLTMVLKNAPVAVVKAVFDTCFVSTVQIVLESDDHGEMQNAWQHSYQVAGRSCLSGVVNKDKHSRCYLMQLQGF

SEQ ID NO: 197056 - protein, 993 aa, Zea Mays
MEAHGDQRWLVDCLTATLDTARDVRAFAEESLRQASLLPGYGAALTKVTINKEISFGLRQLAAVLLKQFIKQHWQEDEENFVPPVVSASEKVVIRQLLLTSLDDSNGKIRTAISMAVAAIGQQDWPEDWPELLPVLLKLIGDQSNGNEVRGALRCLALLSDDLDDMCVPKLVPELFPSLYRIISSPHLYENSLRAKAFAIVHSCISMLGSMSGVYKRDTASLMTSVLDPLIEQFSIVLNYPVQSQNPDDWSMQMEVLKCLLQLVQNFPRLPEAKISGKICAAILPALWQTFVSSFKTYHLSYIQGAETLDSISYDSDGSEKSLESFEIQLFELWTTIVGNSRLAKVIGGNIKELAYYTIALQQITEEQVQNWSRDANQYVADEDDLTYSCRVSGSLLLEELVTAYEDYGIDSIVEASQMRFHESRELKEAGSADWWRLHEASLFALGSLSEQLCEAQDSGLTKYNVRDLLEQMLIDIMGTGVHQYPFLHARAFSSVAKFSSLISKGVSEQYLCNAAHAIASDVPPPVKVGACRALAQLLPESNQNLIQPNIMGILSSLVDLLRQASDETLHLVLETLQSAIKSGGEQSTLIEPVISPIILDVWAQHIADPFISIDAVEVLEAIKNAPGCLQPLVSRILPTIGSILVKPKVQPDGLVAGSLDLLTMVLKNAPVAVVKAVFDTCFVSTVQIVLESDDHGEMQNATECLAAFISGGRQELLVWGGEQGQTLKMLLDAASRLLDPALESSVSLFVGSFVLQLILQIPLHLSPHIPDLIAAIMRHYSDYLSFSKTCPQFTLPAGEIQGAYQIKVTTTALALLISTRHPELSKVEVQGHLIKTSAGITTRSKARVTPDQWTKIPLPVKIFSLLADTLTEIQEQIGAGDDDDSEEDNDWEEVQNGDASISDDIIHSASVPSMTNPSVEHLNAMAKVFDEDDDDSYDDDLTKNDPLNEVKLADFLTNIFANLWENNRPIFEYLCQGLSDSQRSAVEKVLRR

SEQ ID NO: 197057 - protein, 1022 aa, Zea Mays
MEAHGDQRWLVDCLTATLDTARDVRAFAEESLRQASLLPGYGAALTKVTINKEISFGLRQLAAVLLKQFIKQHWQEDEENFVPPVVSASEKVVIRQLLLTSLDDSNGKIRTAISMAVAAIGQQDWPEDWPELLPVLLKLIGDQSNGNEVRGALRCLALLSDDLDDMCVPKLVPELFPSLYRIISSPHLYENSLRAKAFAIVHSCISMLGSMSGVYKRDTASLMTSVLDPLIEQFSIVLNYPVQSQNPDDWSMQMEVLKCLLQLVQNFPRLPEAKISAILPALWQTFVSSFKTYHLSYIQGAETLDSISYDSDGSEKSLESFEIQLFELWTTIVGNSRLAKVIGGNIKELAYYTIALQQITEEQVQNWSRDANQYVADEDDLTYSCRVSGSLLLEELVTAYEDYGIDSIVEASQMRFHESRELKEAGSADWWRLHEASLFALGSLSEQLCEAQDSGLTKYNVRDLLEQMLIDIMGTGVHQYPFLHARAFSSVAKFSSLISKGVSEQYLCNAAHAIASDVPPPVKVGACRALAQLLPESNQNLIQPNIMGILSSLVDLLRQASDETLHLVLETLQSAIKSGGEQSTLIEPVISPIILDVWAQHIADPFISIDAVEVLEAIKNAPGCLQPLVSRILPTIGSILVKPKVQPDGLVAGSLDLLTMVLKNAPVAVVKAVFDTCFVSTVQIVLESDDHGEMQNATECLAAFISGGRQELLVWGGEQGQTLKMLLDAASRLLDPALESSVSLFVGSFVLQLILQIPLHLSPHIPDLIAAIMRRMQTSSIAGLKSSLIVIIARLVHMSAPNVDGFINLLLSIPAQGYDNSLVYIMSEWSQLQGEIQGAYQIKVTTTALALLISTRHPELSKVEVQGHLIKTSAGITTRSKARVTPDQWTKIPLPVKIFSLLADTLTEIQEQIGAGDDDDSEEDNDWEEVQNGDASISDDIIHSASVPSMTNPSVEHLNAMAKVFDEDDDDSYDDDLTKNDPLNEVKLADFLTNIFANLWENNRPIFEYLCQRSAVEKVLRR

SEQ ID NO: 197058 - protein, 1027 aa, Zea Mays
MEAHGDQRWLVDCLTATLDTARDVRAFAEESLRQASLLPGYGAALTKVTINKEISFGLRQLAAVLLKQFIKQHWQEDEENFVPPVVSASEKVVIRQLLLTSLDDSNGKIRTAISMAVAAIGQQDWPEDWPELLPVLLKLIGDQSNGNEVRGALRCLALLSDDLDDMCVPKLVPELFPSLYRIISSPHLYENSLRAKAFAIVHSCISMLGSMSGVYKRDTASLMTSVLDPLIEQFSIVLNYPVQSQNPDDWSMQMEVLKCLLQLVQNFPRLPEAKISGKICAAILPALWQTFVSSFKTYHLSYIQGAETLDSISYDSDGSEKSLESFEIQLFELWTTIVGNSRLAKVIGGNIKELAYYTIALQQITEEQVQNWSRDANQYVADEDDLTYSCRVSGSLLLEELVTAYEDYGIDSIVEASQMRFHESRELKEAGSADWWRLHEASLFALGSLSEQLCEAQDSGLTKYNVRDLLEQMLIDIMGTGVHQYPFLHARAFSSVAKFSSLISKGVSEQYLCNAAHAIASDVPPPVKVGACRALAQLLPESNQNLIQPNIMGILSSLVDLLRQASDETLHLVLETLQSAIKSGGEQSTLIEPVISPIILDVWAQHIADPFISIDAVEVLEAIKNAPGCLQPLVSRILPTIGSILVKPKVQPDGLVAGSLDLLTMVLKNAPVAVVKAVFDTCFVSTVQIVLESDDHGEMQNATECLAAFISGGRQELLVWGGEQGQTLKMLLDAASRLLDPALESSVSLFVGSFVLQLILQIPLHLSPHIPDLIAAIMRRMQTSSIAGLKSSLIVIIARLVHMSAPNVDGFINLLLSIPAQGYDNSLVYIMSEWSQLQGEIQGAYQIKVTTTALALLISTRHPELSKVEVQGHLIKTSAGITTRSKARVTPDQWTKIPLPVKIFSLLADTLTEIQEQIGAGDDDDSEEDNDWEEVQNGDASISDDIIHSASVPSMTNPSVEHLNAMAKVFDEDDDDSYDDDLTKNDPLNEVKLADFLTNIFANLWENNRPIFEYLCQRSAVEKVLRR

SEQ ID NO: 197059 - protein, 464 aa, Zea Mays
MEAHGDQRWLVDCLTATLDTARDVRAFAEESLRQASLLPGYGAALTKVTINKEISFGLRQLAAVLLKQFIKQHWQEDEENFVPPVVSASEKVVIRQLLLTSLDDSNGKIRTAISMAVAAIGQQDWPEDWPELLPVLLKLIGDQSNGNEVRGALRCLALLSDDLDDMCVPKLVPELFPSLYRIISSPHLYENSLRAKAFAIVHSCISMLGSMSGVYKRDTASLMTSVLDPLIEQFSIVLNYPVQSQNPDDWSMQMEVLKCLLQLVQNFPRLPEAKISAILPALWQTFVSSFKTYHLSYIQGAETLDSISYDSDGSEKSLESFEIQLFELWTTIVGNSRLAKVIGGNIKELAYYTIALQQITEEQVQNWSRDANQYVADEDDLTYSCRVSGSLLLEELVTAYEDYGIDSIVEASQMRFHESRELKEAGSADWWRLHEASLFALGSLSEQLCEAQLADLTVHTNCPT

SEQ ID NO: 197060 - protein, 657 aa, Zea Mays
MQEIIAKTRAVSRTIKLLSSSSTDERHASISFLLELSKSELLLENIGSTAGSILILTTMKFNSSSDPIAAEKAGEVLENLEKCPKNIKYMAESGYLDPLQRHLVEGPEDVQMEMVSYLGELVQKQEMTINIAGSASEILIKMVCSGNTAIRKATLDVLVQISSHHPNAKTLVDAGAVPVMVEELFIRKIDDEPMGSKTEAAAVLANIVESGLDPEAITVNKEGHVITSKYSVYNFAHMLKCSMPDTLNLSIVRVLLALTALPKPLATVVSVMKEQDSGQTVIELMGSLTESLVIAAMRLLIALSPQMGHTIAEKLCKAPGQPGRLVKSIGLHGRIMERHAMSATLLAKLPYQHIALNLALINQGAMVTVLAKIEEMQRGETRASRHAKAYMEGLMGVLVRLTTTLYDPDVLLAAMDHNLTSVLTDLVRSAGSDEVQRLAAIGLENLSSQSPNLSQPPTEERRPKKKNILRRLREAHAGRVHDNRRPPAHSRVCPVHRGVCSPSTTFCLVEAGAVEGLLCVLESSENGRVVEAALGALCTLMDDAVDVTSGVAVLAEHDAARHVLRALRQHRDDGRRGGGGAAAGETVTRRCFWAVERFLAHGSERCVREVTSDRALPSLLVGAFHKGDAATKQVAESVLRCLHRMPDYSATYESVEL

SEQ ID NO: 197061 - protein, 136 aa, Zea Mays
MHCSKKKGFSENVKKAIVDMEARVTTPVEDGQQQKSPIEVVSEVLWGSSLFLQNVGLQDNSKKSSTTTVFAKVQELHNQLESERLEKDGLQEEVETLKAQAQASKETMDNMKRSMEENNSLLRQLLSFNRSQTSPS

SEQ ID NO: 197062 - protein, 167 aa, Zea Mays
MSRYAKGWTMPNEKEEKYKDAEPSAIDLFKDMHCSKKKGFSENVKKAIVDMEARVTTPVEDGQQQKSPIEVVSEVLWGSSLFLQNVGLQDNSKKSSTTTVFAKVQELHNQLESERLEKDGLQEEVETLKAQAQASKETMDNMKRSMEENNSLLRQLLSFNRSQTSPS

SEQ ID NO: 197063 - protein, 307 aa, Zea Mays
MALGKRSTWTSRKPEELVPTDYEKIRAMNMMKNNQLFQRLGLGQLKSLVTATAANNKEDCPQQSESLYDGENTDNSNEEESQCTNGGCANISNDGDQISTKVTRGNKIIVAPTEERTIRVTRQRIAKDSCMKNKLNREKVQYQQCIGSQSYIAKAYLLKEEKYKDAEPSAIDLFKDMHCSKKKGFSENVDMEARVTTPVEDGQQQKSPIEVVSEVLWGSSLFLQNVGLQDNSKKSSTTTVFAKVQELHNQLESERLEKDGLQEEVETLKAQAQASKETMDNMKRSMEENNSLLRQLLSFNRSQTSPS

SEQ ID NO: 197064 - protein, 126 aa, Zea Mays
MVRATRGVVAGAWYFEVKVVHLGPTGHTRLGWATNKADLQMPVGFDAYGFGYRDVDGAKVTKAWRDKYADEGYGEGDVLGFYISLPDGERYEPKQPDLIQYKGMPFHVQVPKEEQKTPDPVPGTLF

SEQ ID NO: 197065 - protein, 354 aa, Zea Mays
MVSCNGGLNQMRAAICDMVVIARYLNVTLVVPELDKTSFWNDPSEFQDIFDVEHFITSLRGEVRILRELPPRMKRRVELGMFHSMPPISWSDISYYQNQILPLIRKYKVVHLNRTDARLANNGLPMETQKLRCRVNYASLKFTPQIEELGKRVIRILRQNGPFLVLHLRYEMDMLAFSGCTQGCSTEEAEELTRMRYAYPWWKEKVIDSDLKRKDGLCPLTPEETALVLRALDIDRSMQIYIAAGEIYGGKRRMAALTSAYPNVVRKETLLEPSDLMFFQNHSSQMAALDYLVSLESDIFVPTYDGNMAKVVEGHRRFMGYKKTVLLDRKLIVELVDRYTNGSLQWDEFSALIK

SEQ ID NO: 197066 - protein, 465 aa, Zea Mays
MGWKVASGCKAAGDKLRLPTSSAAARSRMKLWLVRATTTVLLWTCVVQLTAVGDTWGPRVLKGWPSCLTPREEEAAAARPRPLVVDRAALPPKRIYRNNGYLMVSCNGGLNQMRAAICDMVVIARYLNVTLVVPELDKTSFWNDPSEFQDIFDVEHFITSLRGEVRILRELPPRMKRRVELGMFHSMPPISWSDISYYQNQILPLIRKYKVVHLNRTDARLANNGLPMETQKLRCRVNYASLKFTPQIEELGKRVIRILRQNGPFLVLHLRYEMDMLAFSGCTQGCSTEEAEELTRMRYAYPWWKEKVIDSDLKRKDGLCPLTPEETALVLRALDIDRSMQIYIAAGEIYGGKRRMAALTSAYPNVVRKETLLEPSDLMFFQNHSSQMAALDYLVSLESDIFVPTYDGNMAKVVEGHRRFALFHLVIYNLYYAYRPMQFQHTRQQASLIFVIVSSERCIMMPVKR

SEQ ID NO: 197067 - protein, 223 aa, Zea Mays
MCLPRAPRLVETVVESPRNIADDPLHSLLVLHHRSLQEPTNVANRVCQIRSCVDEVAKAPHKTPVLSSIHLLRRAVTAQLQRLLHRSESWVAISEPSQLNNALGVGRLAKCDPSVTLVHLNPQVGEMPQVAHLEGGLHLFLKRRHLCILGVGDYQIVDVDTHQQGIVSIAPPIDGRLVRAWHEAHPLERGIQLGIQRPRCLSQAIKGLAQAQHLALLARDRKT

SEQ ID NO: 197068 - protein, 87 aa, Zea Mays
MQPLDHFVWIWKSKCCNKLRVFIWLLLMDRLHTRNILRRKNYQLENNDYDCILYDMERKETTYHLFFCLSIHSKLLGLDSNSVTASL

SEQ ID NO: 197069 - protein, 792 aa, Zea Mays
MILAISSFFPSLLAGLEEDIVELLKEDNEVLKEGIAHVLSKAGVNIREQLASTSSLDLLLERLCLEGTRRQAKYSVHALAAITKDDGLMSLSVLYKRLVDLLEEKKVNIPSILQSLGCIAQIAMPIFETRKEEILSFIIKKILDCNDDMVQNSSNKSEWGDSTHNCLLKIYGIKTLVKSYIPCKDAHAQPGIEKLIDILKNILTYGDISPNMVSSAADKAHLRLAAAKAVLRLSKQWDHKVPVDVFYLTLRISQDDFPQVRKLFLCKVLQYIKERALDAKYACAFMFGVNDYHGPQLEEFKYNLTEVVQICQQVKMRQLSVQADMNLLTAYPEYIISFLVHALAHDPSSPDIEEHENVKAFGPTYWRLYLILSILLGEEGLQHSVPGMKKDSFTTIISIFKSIKSSQDVVDGNKNKTLWAICDLGTLIAKRLCQDQTSLSEAQTVPLPPQLYAPLQDNQNENSVESYGQIWPGCEKVLAHFEAVMTANMDKVESPKHKMLIDMTDEFGNEVPLGKIVKLLKLRGEKKAEKKQKAPSSSSVNAENDDDVLGLVREINLSNQEDLEELQKGKPKKRQTDTKNSNKKPLDFSSPKRKRSISKSRPHSAKGSKNSDDRLIHTPNTERTSISLETKLKEKNRDDSIDTELLVSPSIRTPVSKGNKGAKRSHIDILSSVPKKSADAESTKRTVEPRSLNGSLKSQKSKPISGLVQCSTQDSSGTDLVGHRIKVWWPLDKRFYEGTVQSYDSSKKKHTVLYDDGDVEVLILAKEKWILIESNDSSVKKQKKDLGTNQGR

SEQ ID NO: 197070 - protein, 1384 aa, Zea Mays
MAAAEQLKELGEKLQAVAPAPADELAKLLEKAVECLRGIEQSPGSSVMEAIQPSLKAVTREELLKHEDDNVKVLLATCFCEITRITAPDAPYNDDILRDIFYLIVGTFGGLSDVNSQSFGRRVAILETVARYRACVVMLDLECDDLITNMFQTFLGVVSDSHEENIVKSMQAIMILIIDESEDVQESLLRVLLSALGQKKTGAAMSARKLARSVIEHSATKLEPYIKKFLTSSWAGNGSSSNDQIDHQGVVFDLYQCAPKVLKAIVPYITGELLADEVDNRSKSVELLGEIFSLPGASIVECFKTLFTEFLKRLTDRVVEIRISVVEYLKRCLISNPSRAEAPEIIKALCDRLLDYEENVRKGVVAALCDVATHSPYAIPIDTIKVVAERVRDKSQAVKCYTMERLADIYKLYCQRDSDSSTNSDDFEWIPGKILRCLYDKEFRPESIDSILSGSLFSPEYQMKGRVKHWITAATYFDKVEMKALEQILLHKQRLQQEMLKYISLREPSQEDAPDLQKRIFGCFRNISRLFSDSAKCEENLNMLHQLKDADFWKIFTSLLNCSTTFEKAWSLRAELLKILGENHVLYNFVGTLTMRCSYLLVNKEYAKEILAEASAQKTSGNTKLISSCMNLLTAISSFFPSLLAGLEEDIVELLKEDNEVLKEGIAHVLSKAGVNIREQLASTSSLDLLLERLCLEGTRRQAKYSVHALAAITKDDGLMSLSVLYKRLVDLLEEKKVNIPSILQSLGCIAQIAMPIFETRKEEILSFIIKKILDCNDDMVQNSSNKSEWGDSTHNCLLKIYGIKTLVKSYIPCKDAHAQPGIEKLIDILKNILTYGDISPNMVSSAADKAHLRLAAAKAVLRLSKQWDHKVPVDVFYLTLRISQDDFPQVRKLFLCKVLQYIKERALDAKYACAFMFGVNDYHGPQLEEFKYNLTEVVQICQQVKMRQLSVQADMNLLTAYPEYIISFLVHALAHDPSSPDIEEHENVKAFGPTYWRLYLILSILLGEEGLQHSVPGMKKDSFTTIISIFKSIKSSQDVVDGNKNKTLWAICDLGTLIAKRLCQDQTSLSEAQTVPLPPQLYAPLQDNQNENSVESYGQIWPGCEKVLAHFEAVMTANMDKVESPKHKMLIDMTDEFGNEVPLGKIVKLLKLRGEKKAEKKQKAPSSSSVNAENDDDVLGLVREINLSNQEDLEELQKGKPKKRQTDTKNSNKKPLDFSSPKRKRSISKSRPHSAKGSKNSDDRLIHTPNTERTSISLETKLKEKNRDDSIDTELLVSPSIRTPVSKGNKGAKRSHIDILSSVPKKSADAESTKRTVEPRSLNGSLKSQKSKPISGLVQCSTQDSSGTDLVGHRIKVWWPLDKRCYMMTEMLKCLYWLKRSGY

SEQ ID NO: 197071 - protein, 1348 aa, Zea Mays
MAAAEQLKELGEKLQAVAPAPADELAKLLEKAVECLRGIEQSPGSSVMEAIQPSLKAVTREELLKHEDDNVKVLLATCFCEITRITAPDAPYNDDILRDIFYLIVGTFGGLSDVNSQSFGRRVAILETVARYRACVVMLDLECDDLITNMFQTFLGVVSDSHEENIVKSMQAIMILIIDESEDVQESLLRVLLSALGQKKTGAAMSARKLARSVIEHSATKLEPYIKKFLTSSWAGNGSSSNDQIDHQGVVFDLYQCAPKVLKAIVPYITGELLADEVDNRSKSVELLGEIFSLPGASIVECFKTLFTEFLKRLTDRVVEIRISVVEYLKRCLISNPSRAEAPEIIKALCDRLLDYEENVRKGVVAALCDVATHSPYAIPIDTIKVVAERVRDKSQAVKCYTMERLADIYKLYCQRDSDSSTNSDDFEWIPGKILRCLYDKEFRPESIDSILSGSLFSPEYQMKGRVKHWITAATYFDKVEMKALEQILLHKQRLQQEMLKYISLREPSQEDAPDLQKRIFGCFRNISRLFSDSAKCEENLNMLHQLKDADFWKIFTSLLNCSTTFEKAWSLRAELLKILGENHVLYNFVGTLTMRCSYLLVNKEYAKEILAEASAQKTSGNTKLISSCMNLLTAISSFFPSLLAGLEEDIVELLKEDNEVLKEGIAHVLSKAGVNIREQLASTSSLDLLLERLCLEGTRRQAKYSVHALAAITKDDGLMSLSVLYKRLVDLLEEKKVNIPSILQSLGCIAQIAMPIFETRKEEILSFIIKKILDCNDDMVQNSSNKSEWGDSTHNCLLKIYGIKTLVKSYIPCKDAHAQPGIEKLIDILKNILTYGDISPNMVSSAADKAHLRLAAAKAVLRLSKQWDHKVPVDVFYLTLRISQDDFPQVRKLFLCKVLQYIKERALDAKYACAFMFGVNDYHGPQLEEFKYNLTEVVQICQQVKMRQLSVQADMNLLTAYPEYIISFLVHALAHDPSSPDIEEHENVKAFGPTYWRLYLILSILLGEEGLQHSVPGMKKDSFTTIISIFKSIKSSQDVVDGNKNKTLWAICDLGTLIAKRLCQDQTSLSEAQTVPLPPQLYAPLQDNQNENSVESYGQIWPGCEKVLAHFEAVMTANMDKVESPKHKMLIDMTDEFGNEVPLGKIVKLLKLRGEKKAEKKQKAPSSSSVNAENDDDVLGLVREINLSNQEDLEELQKGKPKKRQTDTKNSNKKPLDFSSPKRKRSISKSRPHSAKGSKNSDDRLIHTPNTERTSISLETKLKEKNRDDSIDTELLVSPSIRTPVSKGNKGAKRSHIDILSSVPKKSADAESTKRTVEPRSLNGSLKSQKSKPISGAQHRTQAVPTW

SEQ ID NO: 197072 - protein, 57 aa, Zea Mays
MITSQIYFPHYAKGLTASGNSFLQLFLLSVKLFQLSYAMILQLFCNCFCKWHICGCS

SEQ ID NO: 197073 - protein, 412 aa, Zea Mays
MGALCDFCGEHRSMVYCRSDAASLCLSCDRNVHSANALSRRHTRTLLCDRCASQPAMVRCLAENASLCQNCDWNGHIAGSSSAGHKRQTINCYSGCPSSAELSRIWSFVSDIPNVAPEPNCEQGISMMSISDSGVSNQDNAAGDSILLDIASATLVSDIGTCDKLLVGSSSGAGVNLLPLATGQTETAGSVDSTPDKDSCMQVPYTPDKDMFSKDSIYEDFCVDDADLAFENYEELFGTSHIQTEQLFDDAGIDIYFEMKEAPAGNSTESKLKQPANSNAVSADSGMSNPGVKGDSSVCTPLRQARSSLSLSFAGLTGESSAGDHQDCVVSSLLLMGEPPWQPPGPEGSIAGGSRDSALTRYKEKKMRRKFDKKIRYASRKARADVRKRVKGRFVKAGEAYDYDPLCQTRSY

SEQ ID NO: 197074 - protein, 287 aa, Zea Mays
MMSISDSGVSNQDNAAGDSILLDIASATLVSDIGTCDKLLVGSSSGAGVNLLPLATGQTETAGSVDSTPDKDSCMQVPYTPDKDMFSKDSIYEDFCVDDADLAFENYEELFGTSHIQTEQLFDDAGIDIYFEMKEAPAGNSTEQSKLKQPANSNAVSADSGMSNPGVKGDSSVCTPLRQARSSLSLSFAGLTGESSAGDHQDCVVSSLLLMGEPPWQPPGPEGSIAGGSRDSALTRYKEKKMRRKFDKKIRYASRKARADVRKRVKGRFVKAGEAYDYDPLCQTRSY

SEQ ID NO: 197075 - protein, 305 aa, Zea Mays
MGALCDFCGEHRSMVYCRSDAASLCLSCDRNVHSANALSRRHTRTLLCDRCASQPAMVRCLAENASLCQNCDWNGHIAGSSSAGHKRQTINCYSGCPSSAELSRIWSFVSDIPNVAPEPNCEQGISMMSISDSGVSNQDNAAGDSILLDIASATLVSDIGTCDKLLVGSSSGAGVNLLPLATGQTETAGSVDSTPDKDSCMQVPYTPDKDMFSKDSIYEDFCVDDADLAFENYEELFGTSHIQTEQLFDDAGIDIYFEMKEAPAGNSTEQSKLKQPANSNAVSADSGMSNPGVKASWPRGLNCWR

SEQ ID NO: 197076 - protein, 299 aa, Zea Mays
MGALCDFCGEHRSMVYCRSDAASLCLSCDRNVHSANALSRRHTRTLLCDRCASQPAMVRCLAENASLCQNCDWNGHIAGSSSAGHKRQTINCYSGCPSSAELSRIWSFVSDIPNVAPEPNCEQGISMMSISDSGVSNQDNAAGDSILLDIASATLVSDIGTCDKLLVGSSSGAGVNLLPLATGQTETAGSVDSTPDKVPYTPDKDMFSKDSIYEDFCVDDADLAFENYEELFGTSHIQTEQLFDDAGIDIYFEMKEAPAGNSTESKLKQPANSNAVSADSGMSNPGVKASWPRGLNCWR

SEQ ID NO: 197077 - protein, 213 aa, Zea Mays
MQVPYTPDKDMFSKDSIYEDFCVDDADLAFENYEELFGTSHIQTEQLFDDAGIDIYFEMKEAPAGNSTEQSKLKQPANSNAVSADSGMSNPGVKGDSSVCTPLRQARSSLSLSFAGLTGESSAGDHQDCVVSSLLLMGEPPWQPPGPEGSIAGGSRDSALTRYKEKKMRRKFDKKIRYASRKARADVRKRVKGRFVKAGEAYDYDPLCQTRSY

SEQ ID NO: 197078 - protein, 310 aa, Zea Mays
MGALCDFCGEHRSMVYCRSDAASLCLSCDRNVHSANALSRRHTRTLLCDRCASQPAMVRCLAENASLCQNCDWNGHIAGSSSAGHKRQTINCYSGCPSSAELSRIWSFVSDIPNVAPEPNCEQGISMMSISDSGVSNQDNAAGDSILLDIASATLVSDIGTCDKLLVGSSSGAGVNLLPLATGQTETAGSVDSTPDKDSCMQVPYTPDKDMFSKDSIYEDFCVDDADLAFENYEELFGTSHIQTEQLFDDAGIDIYFEMKEAPAGNSTEVCSLLMNIFFLIRYNHSHPCAHALLIVLVFSLLCQLTEPIL

SEQ ID NO: 197079 - protein, 224 aa, Zea Mays
MASRQALHIFTPSRRAMHILTSSRGIASTPHLSSFGWFDKIKSTITGKKPEEASEASSFTLIQFADTMEKARKLGTFKNFVAGRASEATVVNVFEKHSAVLRYLGAIDPTGENLRNTDKINATKHCNCTIADVEHILAKYTWAKEAQKKIAKLKEEGKPLPKSFNEVQNLMGSTPVDVGRSNLAKSGQISRNAFCPCGSKKRYKRFDISRTVSITKLHMPFFDD

SEQ ID NO: 197080 - protein, 53 aa, Zea Mays
MAREDGPQFVRWRGRSSCRRSTVAASCTKASLAFQHDIGCCRELCLWNGSSSL

SEQ ID NO: 197081 - protein, 60 aa, Zea Mays
MAREDGPQFVRWRGRSSCRRSTVAASCTKASLAFQVVVESFVFGMEALPYNEGIRDEDVI

SEQ ID NO: 197082 - protein, 158 aa, Zea Mays
MLSRLPATVSLLRRSLREPRGFSSSVLASSKETADGKLVASVLFERLPVVIPKIHPVVYAFQEFSFRWRQQYRRQYPEEVLGKADARVIIILIMCLLQELPRLTKQMTGSLYNELLIINFISCCMAMLMGLLMESLYGIFQKKYTKMKKLCDCVQRLH

SEQ ID NO: 197083 - protein, 450 aa, Zea Mays
MTRDSDFHPSKHADFPHRNSSGLHLTLHHPQSPCSPAPLPSDLPFSTVLTHDDARVAHLASRLAASDPPSRRPTSLRKQKKAAGGASGGHHLDDDSLASVPLSPGTSVGVGNYVTQLGLGTPSTSYAMVVDTGSSLTWLQCSPCVVSCHRQVGPLFDPRASSTYTSVRCSASQCDELQAATLNPSACSASNVCIYQASYGDSSFSVGYLSTDTVSFGSTSYPSFYYGCGQDNEGLFGRSAGLIGLARNKLSLLYQLAPSLGYSFSYCLPTAASTGYLSIGPYNTGHYYSYTPMASSSLDASLYFITLSGMSVGGSPLAVSPSEYSSLPTIIDSGTVITRLPTAVHTALSKAVAQAMAGAQRAPAFSILDTCFEGQASQLRVPTVVMAFAGGASMKLTTRNVLIDVDDSTTCLAFAPTDSTAIIGNTQQQTFSVIYDVAQSRIGFSAGGCS

SEQ ID NO: 197084 - protein, 243 aa, Zea Mays
MEDEYDMNEPVDDMEGEDEYQELVIRDSDAEDEDDADQLHKLSDTSAADARSGKDIQGIPWETIEVTRETYRQARLEQYKNYENIPNSGVAAMMACKSTEKGRTYYEFRRNTRSVKSTISHFQLRNLVWATSKHDVYLLLHYSVLHWSALNGVDTEIMDVHGHVAPSEKHPGSLLEGFLHTQISTMAVKDNLLVAGGFQGELICKHLDREGISFCCRTTYDDNAITNALEIFNTSRQVNSLAI

SEQ ID NO: 197085 - protein, 254 aa, Zea Mays
MSHYHSADFEEMEDEYDMNEPVDDMEGEDEYQELVIRDSDAEDEDDADQLHKLSDTSAADARSGKDIQGIPWETIEVTRETYRQARLEQYKNYENIPNSGVAAMMACKSTEKGRTYYEFRRNTRSVKSTISHFQLRNLVWATSKHDVYLLLHYSVLHWSALNGVDTEIMDVHGHVAPSEKHPGSLLEGFLHTQISTMAVKDNLLVAGGFQGELICKHLDREGISFCCRTTYDDNAITNALEIFNTSRQVNSLAI

SEQ ID NO: 197086 - protein, 80 aa, Zea Mays
MSNILSHIHPNITIPKDKPGSPNTQYYHRSQCTCGRRHDQSSITLPSMPRKMSLICSELSIPVILQELQKDRSQTVKTFV

SEQ ID NO: 197087 - protein, 460 aa, Zea Mays
MGHNAGRTPFIDISNTSITGDQNGSNSLRPIVDANEHKRQRDKERYATMSIEQKNEKNRKRREARQRNKGLPIKSESSREDINTNQTREAVNVEISRDVHLGSVNCRTIHITNFAFCTTVYLANARMIMVGPIKNTPSAGNSIERKRQRDRERRATMSVEQRNEYNNKRCQMRQRNKGQNVMPAISGDGDKKVNVDPDDDSDWLHRNETFQSNDYVATTDLLPPGSVHESVGTIGESGIGVREYRLERLRLYNQTPKRKEAKIEYMRKHRVLHADTLNVVSIAMEDPTYTPEVVHPATEPSTVTACDWVIPEFVRTPFLPAQTQTEDVGSFDMSTEAIKRKHHVSRGERQAILARRNQQFQASIARNVTTLNGDTISDANNNAQCSVPCQAATLPTNGSEGITEQASGVEHTQEKPRVISNDDDDEVVIFGEDDDNDERYIFDGQCTYVNFIMIMIPRLI

SEQ ID NO: 197088 - protein, 209 aa, Zea Mays
MHPQMWKLHAATRTAMQPPHTICHAPASHDPPCLRLGFPSVQPPDPPGPRLSFPSALKQPIRGNAPTNLEAAAMAPDLAMVCTIWKPHNLRCQFGKHDLGTAITTTIPQMSRPSTTRTPRFGNAPFPPTIVLDLAIVCIIFVADLESARSTTLIWKVPCQTIPAQIPQIVHPPSLKRSQLSSCSNLPTMTEIPRSHSSSVRCSCKEKSE

SEQ ID NO: 197089 - protein, 411 aa, Zea Mays
MVHDLCTVLGMDFLSTVTGVHPTLDDSVGDNCKSISDDTLSKLDKTVATLNEDKKLRLSKLQELAGQLYDLWDLMDAPKEERRMFDHVTCNRSASVDEVTAPGSLALDLIEQAEVEVQRLDQLKYSKMKEIAFKKQNELEDIYAGAHIVIDTAAAHEKILALIEAGNIEPSELIADMDAQIAKAKEEALSRKDILDKVERWMSACEEESWLEDYNRDDNRYNSSRGAHLNLKRAEKARILVNKIPALVETLVAKTRAWEENRGLSFMYDGVPLLAMLDEYVMLRQEREEEKKRTREQKRYVEQQLNTDHEGPFGSRVSPNRPASSKKAIGPKLNGSVSNGTPPNRRLSISGQQNGGGHGVRSGGKDSKKDTAKTASPGNSAAATAPVGLTATAKEDAASQISVTDLVPSTP

SEQ ID NO: 197090 - protein, 440 aa, Zea Mays
MAGDITCGSLLQKLQLIWDEVGESDEDRDKVLYQLDQECLDVYKRKVDQATNSRDLLIQALDDSKIELARLLSGLGEKAIARTPEKTTGTIKQQLAAIAPTLEQLTKQKNERRREFVNVQSQIDQICGEIAGTIEVGEQVTTPQVNEDDLTLERLEDFRSQLQELEKEKSNRLEKVLEYVIMVHDLCTVLGMDFLSTVTGVHPTLDDSVGDNCKSISDDTLSKLDKTVATLNEDKKLRLSKLQELAGQLYDLWDLMDAPKEERRMFDHVTCNRSASVDEVTAPGSLALDLIEQAEVEVQRLDQLKYSKMKEIAFKKQNELEDIYAGAHIVIDTAAAHEKILALIEAGNIEPSELIADMDAQIAKAKEEALSRKDILDKVERWMSACEEESWLEDYNRDDNRYNSSRGAHLNLKRAEKARILVNKIPDQGMGGEPWSVFYV

SEQ ID NO: 197091 - protein, 305 aa, Zea Mays
MAGDITCGSLLQKLQLIWDEVGESDEDRDKALDDSKIELARLLSGLGEKAIARTPEKTTGTIKQQLAAIAPTLEQLTKQKNERRREFVNVQSQIDQICGEIAGTIEVGEQVTTPQVNEDDLTLERLEDFRSQLQELEKEKSNRLEKVLEYVIMVHDLCTVLGMDFLSTVTGVHPTLDDSVGDNCKSISDDTLSKLDKTVATLNEDKKLRLSKLQELAGQLYDLWDLMDAPKEERRMFDHVTCNRSASVDEVTAPGSLALDLIEQAEVEVQRLDQLKYSKMKEIAFKKQNELEDIYAGAHIIWMPR

SEQ ID NO: 197092 - protein, 390 aa, Zea Mays
MPPINSGPVVWRQRQRQQYCLHCSPRLALSAVAAGDRRHPPVSTPVEWSVEPRCGPAFTSPPFPSPSPRGPLIWDEVGESDEDRDKVLYQLDQECLDVYKRKVDQATNSRDLLIQALDDSKIELARLLSGLGEKAIARTPEKTTGTIKQQLAAIAPTLEQLTKQKNERRREFVNVQSQIDQICGEIAGTIEVGEQVTTPQVNEDDLTLERLEDFRSQLQELEKEKSNRLEKVLEYVIMVHDLCTVLGMDFLSTVTGVHPTLDDSVGDNCKSISDDTLSKLDKTVATLNEDKKLRLSKLQELAGQLYDLWDLMDAPKEERRMFDHVTCNRSASVDEVTAPGSLALDLIEQAEVEVQRLDQLKYSKMKEIAFKKQNELEDIYAGAHIIWMPR

SEQ ID NO: 197093 - protein, 334 aa, Zea Mays
MAGDITCGSLLQKLQLIWDEVGESDEDRDKVLYQLDQECLDVYKRKVDQATNSRDLLIQALDDSKIELARLLSGLGEKAIARTPEKTTGTIKQQLAAIAPTLEQLTKQKNERRREFVNVQSQIDQICGEIAGTIEVGEQVTTPQVNEDDLTLERLEDFRSQLQELEKEKSNRLEKVLEYVIMVHDLCTVLGMDFLSTVTGVHPTLDDSVGDNCKSISDDTLSKLDKTVATLNEDKKLRLSKLQELAGQLYDLWDLMDAPKEERRMFDHVTCNRSASVDEVTAPGSLALDLIEQAEVEVQRLDQLKYSKMKEIAFKKQNELEDIYAGAHIIWMPR

SEQ ID NO: 197094 - protein, 403 aa, Zea Mays
MAGDITCGSLLQKLQLIWDEVGESDEDRDKVLYQLDQECLDVYKRKVDQATNSRDLLIQALDDSKIELARLLSGLGEKAIARTPEKTTGTIKQQLAAIAPTLEQLTKQKNERRREFVNVQSQIDQICGEIAGTIEVGEQVTTPQVNEDDLTLERLEDFRSQLQELEKEKSNRLEKVLEYVIMVHDLCTVLGMDFLSTVTGVHPTLDDSVGDNCKSISDDTLSKLDKTVATLNEDKKLRLSKLQELAGQLYDLWDLMDAPKEERRMFDHVTCNRSASVDEVTAPGSLALDLIEQAEVEVQRLDQLKYSKMKEIAFKKQNELEDIYAGAHIVIDTAAAHEKILALIEAGNIEPSELIADMDAQIAKAKEEALSRKDILDKVERWMSACEEESWLEDYNRLLTTKL

SEQ ID NO: 197095 - protein, 60 aa, Zea Mays
MRAASSSRRVPSSPRPAEFTPAHNRGFRCVAFLLPGLCRARQQVVHVEAAGSYDPLRRAH

SEQ ID NO: 197096 - protein, 302 aa, Zea Mays
MTRLCPLHLLLIAAAAASASGADEAHVSIAVAEKGLAFAKDVLISEAVRSLTPLRLPGVEKAVRVPFLGGIRVAASNITLFHLDVGDNSTIFPGDSGLLVVASGITANISMHWSYCYDSWLFPIEITDSGTASILVQGMEVGITMVIKNKNGSLALSVSQCGCYVKDLVISLDGGASWFYQGFINAFEDHIKAAVEKAVPENIIEGAGKLDSFLQGLPRTISLDDVAAFNLTFINDPHYGNSSIEFDINGLITSAVAETANLQKHPQLSLACGGASKMLLLSLDEDVFNSALEVHFKSWTTP

SEQ ID NO: 197097 - protein, 50 aa, Zea Mays
MQSSRREGHLLQPNCSPVLKIRLGVTVSRGWNSGRLNLRSRTGTVRGRLP

SEQ ID NO: 197098 - protein, 535 aa, Zea Mays
MGDDGRRLVRRRGMFKFISKNMKSGGFSGTKRYLGDLGKTVKTASSNALFAAVTEISDSVVRGAETNGLNGMMLEEDVAVPVSSANEAPKDTTKMDTDDAPSDPVSGTDVNVHEPDTTEAAPAAENGAENPEEKSVPMETDAKVEPSERKVKRTSVPVHALVYGALAVADLQKAVEKEYEMALQDRVMEETKEKKNVVEAYVYDMRNKLYDRYNDFVTPEEKEGLIGKLREVEDWLYEDDLKKIGDPIEARYKESTERGSSVDQLVYCINSFREAALSSDQKFGHIDISEKQKIFDKFDVIIISYSLKFYGLSEIRKNDEGGDGRAQVRLRPRARRLCVLGETKPATFMGPLIRRAFLQGMRLAAIEAAGSGPAVPEQGGAVVCHSSAHLSVRTIQWISAGTIAVLLVAKGTAIHKSFLVPFFALQTPCCIISWIKGDYGQWTAFLSLLVRLFFFIPGELELPLSTMLLVSVAPYQFMDLRGTQGGVVMSLVIAAYLAFQHFTRVGGPGKAFEQGSIVATLAIICIMIVPLMLLF

SEQ ID NO: 197099 - protein, 305 aa, Zea Mays
MKKSEGLSFETAIGDSPTIDLTSNKYAAWAVEVAERTAYLIARWQGVGFTHGVLNTDNMSVLGLTIDYGPFGFLDAFDPSYTPNTTDLPGKRYCFANQPDVGLWNIAQFTGPLSSAELISQDEANYVMERYGTKFMDEYQSIMTKKLGLTKYNKQLISKLLSNMAVDKVDYTNFFRLLSNVNADPGIPENELLVPLKAALLDIGKERKEAWISWVQTYIEELVESGVPDEERKAAMNSVNPKYILRNYLCQSAIDVAEQGDYEEVRRVLRVMHNPYDEQPGMEKYARLPPAWAYRPGVCMLSCSS

SEQ ID NO: 197100 - protein, 381 aa, Zea Mays
MGWSVGGWKSDSSWRGCQLSSGNAKEEPGAIVCRVAPSFLRFGSYQIHASRGKEDIEIVRRLADYTIHHHFPHLENMKKSEGLSFETAIGDSPTIDLTSNKYAAWAVEVAERTAYLIARWQGVGFTHGVLNTDNMSVLGLTIDYGPFGFLDAFDPSYTPNTTDLPGKRYCFANQPDVGLWNIAQFTGPLSSAELISQDEANYVMERYGTKFMDEYQSIMTKKLGLTKYNKQLISKLLSNMAVDKVDYTNFFRLLSNVNADPGIPENELLVPLKAALLDIGKERKEAWISWVQTYIEELVESGVPDEERKAAMNSVNPKYILRNYLCQSAIDVAEQGDYEEVRRVLRVMHNPYDEQPGMEKYARLPPAWAYRPGVCMLSCSS

SEQ ID NO: 197101 - protein, 159 aa, Zea Mays
MRGEFNGLQKIIRDENPHAHYIYCDDFSFDDRKIIKDQLRTFIIHVRRLEEFKVCYDLASLSKIMVRLERHIVFPLVFRLIELALLLPVATATVERAFSAMKVIKTELLNKMSDGWLNDLMVCYIERDIFKGLDLQKIKKAFQKKKDRQMQLPQSPRRN

SEQ ID NO: 197102 - protein, 79 aa, Zea Mays
MSAIKATAEDAASSAKAGVAKAKATADEKVEKAKTRDPLKKREVEEDKEDRKLQIESDERVEKAAHGPERTVAHTAGER

SEQ ID NO: 197103 - protein, 73 aa, Zea Mays
MPSHLGCRRCRPYLICAKSKSTSEDHNNKEKTNGPSRGSDKIIYKIGPPIPTHPFSQLDQTKISGSKKCKIAG

SEQ ID NO: 197104 - protein, 158 aa, Zea Mays
MEQSRALMVMGATASPLPAAPPELRRRTHQVHTHRRRRGRRRCNPTPHTGQDKPRDYLLQRRRRRTADQGAEVAVGLVRVGDQGLHTQWTMRVDQHLRHSRGRTFDTPEATVLTTTRTRPPTPCAARPQCSTSPWSTFKSRCGRWGSASTQGARRCWR

SEQ ID NO: 197105 - protein, 72 aa, Zea Mays
MHVGRLREKVYQRLAVGVGEGVADNVSTRDVGRDRSITIFHTDCGALNCIQSRAQSVKSSTTLAYRMSFIYI

SEQ ID NO: 197106 - protein, 127 aa, Zea Mays
MDGETPGFKRAVVVGLGASAAIALAGLAWRFPSSQKRIQQLIVAPLHYVQEKLPTIESTETTKEDASDRESDEIEVSSATHDKKAEAITDDSRQNYRTTIASPFPFGVPTDPVHEEALSVLKKLQVL

SEQ ID NO: 197107 - protein, 59 aa, Zea Mays
MDSVHNVCHWFLGKFESCISPSQSSCMQYVGVWLGCIGHCNLVHCHTKASPPKTDPVSM

SEQ ID NO: 197108 - protein, 111 aa, Zea Mays
MAVGLYSLGLSPPPRLDTILFPQLRPHLRRRVPARVAAAGTSWSPAAGDSEDGVGGWWFPEYEKSMKQARGRIGFKRAVVVGLGASAAIALAGLAWRFPSSQKLGCKAMTA

SEQ ID NO: 197109 - protein, 200 aa, Zea Mays
MPGIHRYTAELLVLLTIITRLLLLATAWPALPAPASLEPSLLFPSAGATSPTQTQSAGVASTIPAFPEQSEAAAAAATSVCQLTPSPPLLPAVLASSNATSSAKAKQEHREDCHLMGLTWLLNRNPTRYREAATAVIQALMAADEAGAGHPATCSLPADDELPVAVASSQINGATSASMSSAHGSLLLVVLAAAVIVLSC

SEQ ID NO: 197110 - protein, 347 aa, Zea Mays
MAAVELGPAAHGPRLHPRCHRQLLQGQQARRGRLRPRLQGVLSGGSEIAVKRLSARSRQGAAEFRNEVELIAKLQHRNLVRLLGWCAEREEKLLVYEYLPNRSLDAFLFDPSKSAQLGWSTRHNVILGIARGLLYLHEDSLLKVVHRDLKASNVLLDHKMSPKISDFGMAKIFEDDSDAINTGRVVGTYGYMAPEFALDGVFSVKSDVFSFGVLLLEILSGQRNGALYLEEHQQSLIQDAWKLWSEDRAAEFMDQSLGRSYSKDEAWRCYHVGLLCVQEDPDVRPTMSNVLLMLISDHTKLPEPAMPPLFARLRNISLLAPPLTTKTESTTSPLSINDVSITMIEPR

SEQ ID NO: 197111 - protein, 106 aa, Zea Mays
MAVVAHAGLPRPRLFLPFSFHGSPIYSSCLSLALPSVAVDYDHGNPWCRPDTPHNGASRGHHPSVSSGWPCVGRARSHEFLIKIRGPGRIVGYTCHLAYTLRKCPY

SEQ ID NO: 197112 - protein, 454 aa, Zea Mays
MEVMSGWLWKTALMEVPRKHHSPPKWSVILWMLVTANLWIMCSSSTQKKVLMPGFSASEMDYIDNDGKFLLSNGYVFGFGFATVSVSDSTYYVLAVVHLPTTSIVWSANANSPVSHSDNFVFDKDGNAYLQSGGSTVWTANISGKGATSMQLLDSGNLVVFGKDGSSPLWQSFSHPTDTLLSGQSFIEGMSLLSHSNAQNMTYTLEIKSGDMLLYAGFQLPQPYWSALQDNRVIIDKNGNNNIYSANLSSGSWSFYDQSGLLQSQLVIAQQQGDANTTLAAVLGNDGLINFYMLQSVNGKSALPITVPQDSCDMPAHCKPYSICNSGTGCQCPSALSSYANCDPGVISPCNSKNKFQLVQLDSAVGYVGTRFTLPVPKTNLTGCRNACMGNCSCIAVFFDQTSGNCFLFDQIGSLQQKDGGKSSLASFIKVSSSNGGSGQGGSSDNGWWWFVRR

SEQ ID NO: 197113 - protein, 428 aa, Zea Mays
MEVMSGWLWKTALMEVPRKHHSPPKWSVILWMLVTANLWIMCSSSTQKKVLMPGFSASEMDYIDNDGKFLLSNGYVFGFGFATVSVSDSTYYVLAVVHLPTTSIVWSANANSPVSHSDNFVFDKDGNAYLQSGGSTVWTANISGKGATSMQLLDSGNLVVFGKDGSSPLWQSFSHPTDTLLSGQSFIEGMSLLSHSNAQNMTYTLEIKSGDMLLYAGFQLPQPYWSALQDNRVIIDKNGNNNIYSANLSSGSWSFYDQSGLLQSQLVIAQQQGDANTTLAAVLGNDGLINFYMLQSVNGKSALPITVPQDSCDMPAHCKPYSICNSGTGCQCPSALSSYANCDPGVISPCNSKNKFQLVQLDSAVGYVGTRFTLPVPKTNLTGCRNACMGNCSCIAVFFDQTSGNCFLFDQIGSLQQKDGGWWWFVRR

SEQ ID NO: 197114 - protein, 71 aa, Zea Mays
MLGRRAKSMRPLQAIVAMLKRIMKNNSNFLPRTKNTPPGSCTNINRNPKSSMKEISSCVIVAKPYPLTQQL

SEQ ID NO: 197115 - protein, 155 aa, Zea Mays
MAGIFPSQGGSKTMRPALQESGTEGTQTGDPAPAHAGRLGFRCLASFRRRIVGRGEKEGVAPARENSKLWGGGDGREGAGGRSMENAREQAPGEACNAMPTRREGEGSRTCAMGLVVGGLLPESVMVIAGSAAAAVSYLPQICLSSLVFSVRLIY

SEQ ID NO: 197116 - protein, 289 aa, Zea Mays
MHVLITTPFHPAYVTAERIKKAKNLELLLTAGIGSDHIDLPAAAAAGLTVAEVTGSNTVSVAEDELLRILILLRNFLPGYQQVVQGEWNVAGIAHRAYDLEGKTVGTVGAGRIGRLLLQRLKPFNCNLLYHDRLQIDPELEKEIGAKFEEDLDAMLPKCDVIVINTPLTEKTRGMFNKERIAKMKKGVIVVNNARGAIMDAQAVADACSSGHIAGYGGDVWFPQPAPKDHPWRYMPNHAMTPHISGTTIDAQLRYADGVRDMLDRYFKGEDFPVQNYIVKEGQLASQYQ

SEQ ID NO: 197117 - protein, 347 aa, Zea Mays
MAMWRAAARQLADKNPNFVGCVEGALGIRGWLESQGHQYIVTDDKEGPNCELEKHIEDMHVLITTPFHPAYVTAERIKKAKNLELLLTAGIGSDHIDLPAAAAAGLTVAEVTGSNTVSVAEDELLRILILLRNFLPGYQQVVQGEWNVAGIAHRAYDLEGKTVGTVGAGRIGRLLLQRLKPFNCNLLYHDRLQIDPELEKEIGAKFEEDLDAMLPKCDVIVINTPLTEKTRGMFNKERIAKMKKGVIVVNNARGAIMDAQAVADACSSGHIAGYGGDVWFPQPAPKDHPWRYMPNHAMTPHISGTTIDAQLRYADGVRDMLDRYFKGEDFPVQNYIVKEGQLASQYQ

SEQ ID NO: 197118 - protein, 347 aa, Zea Mays
MAMWRAAARQLVDRNPNFVGCVEGALGIRGWLESQGHQYIVTDDKEGPNCELEKHIEDMHVLITTPFHPAYVTAERIKKAKNLELLLTAGIGSDHIDLPAAAAAGLTVAEVTGSNTVSVAEDELLRILILLRNFLPGYQQVVQGEWNVAGIAHRAYDLEGKTVGTVGAGRIGRLLLQRLKPFNCNLLYHDRLQIDPELEKEIGAKFEEDLDAMLPKCDVIVINTPLTEKTRGMFNKERIAKMKKGVIVVNNARGAIMDAQAVADACSSGHIAGYGGDVWFPQPAPKDHPWRYMPNHAMTPHISGTTIDAQLRYADGVRDMLDRYFKGEDFPVQNYIVKEGQLASQYQ

SEQ ID NO: 197119 - protein, 193 aa, Zea Mays
MVTQGERYRYLDKIGHVFFSANLASSSPSFLQVSSPPHASLGPRFSCSSSPAPASLQQPARAPSAPASGSDDDRATPALIQQCPRPVSVSAWSQLLTLAVEASSLLKHVTGTASLQGYADSLLDATVRHFGSAPSAQPEENGYTGSYVYDINGNKYLDSLAGLWCTALEQSTTTTTRRTPSYNFCITKTKKQQ

SEQ ID NO: 197120 - protein, 52 aa, Zea Mays
MVKKGLNSLIILGAWMIWNHQNRCVFYGLAPSLPSILAQSDEERRKWELAGV

SEQ ID NO: 197121 - protein, 67 aa, Zea Mays
MSHQHIYTVTQNIQNLLERYYIEHFNKLMVYLSYFRSFWQLIRSLRFVVIFYVSTAQLLQGNDVLQN

SEQ ID NO: 197122 - protein, 122 aa, Zea Mays
MAAPTPTTTTRRDYRLRPRCFSSPRSCPMAKRLAGIDKEVLVEVVRFTHKSGLRGCDGGWKDFLARNDRKFGASVSDPRKRSRDVLFAFLQTFPKDFQKKHLMPLVRREPPEGNAGIPQSPK

SEQ ID NO: 197123 - protein, 86 aa, Zea Mays
MGISRGINALAAALCMNVYVVGLNKVNKPTLPLASGEFSVPTPVLLVVAFLVMVMLYVSHRDLRTIYSGVWSWLACLHTLAKSTTI

SEQ ID NO: 197124 - protein, 102 aa, Zea Mays
MLIAIWGFLEALAAALCMNVYVVGLNKVNKPTLPLASGEFSVPTPVLLVVAFLVMVSGHGLLASTLWQRAQQFDIENKDCITQFYMFIWKLFYAEYFLIPFV

SEQ ID NO: 197125 - protein, 76 aa, Zea Mays
MAAPTPTTTTRRDYRLRPRCFSSPRSCPMAKRLAGIDKEVGGGTPTEQPTQTGQAASLRSPIWSAPGARRGGEVHA

SEQ ID NO: 197126 - protein, 647 aa, Zea Mays
MVADVHNDLRDLKFIADPAEEDAGKVILEMLRHSEVSEQTELQTFLEAASKLNITSPKAVLIERRAIKKLLAKINGTDHKKEGILKYLLYLVRKYGKNVKPETDEKNQNLNVATEVLSLDSVVNVINTAEICISATESANMIYDGQSSLSGATTPPQELCCPLSLKLMRDPVIITSGQTYERENIERWFSEGYDTCPRTNMKLKNFTVTPNTCMKAVIHNWLKDHELESTDLPKQFQNYYSVSSLHNISAPLIIEKNRDYTVDYSSSSFGLSGASYISSPMRETEQSKTSFDQFYSNANFQLYLSFCNFDKAMFLGFFHELSELPFELQRKAVRDLKTSLSGENEIWHSMVYNGFFEAFHEFLKNDSGIHTLQARRAGIQFFLAFLSSGRARIPSVCEDVVLLIASLHDSEFKQEALLIVHELLQEPSCPKSSLMASILSPSVFGALDSGETKCLDLALQIICKISSDNDIKSYLLSSGIVSRLSPLLGEGKMTECSLKILRNLSDVKETAGFIIRTGNCVSSISDHLDTGSHSEREHAVVILLGVCSHSPEVCSLSMKEGVIPALVDLSVSGTKVARDCSVKLLQLLRNFRRCDQFSSSCSRELAVDHVSENTRNGSICMQPISKSARYISRKLNLFSKPRSLTLA

SEQ ID NO: 197127 - protein, 618 aa, Zea Mays
MLRHSEVSEQTELQTFLEAASKLNITSPKAVLIERRAIKKLLAKINGTDHKKEGILKYLLYLVRKYGKNVKPETDEKNQNLNVATEVLSLDSVVNVINTAEICISATESANMIYDGQSSLSGATTPPQELCCPLSLKLMRDPVIITSGQTYERENIERWFSEGYDTCPRTNMKLKNFTVTPNTCMKAVIHNWLKDHELESTDLPKQFQNYYSVSSLHNISAPLIIEKNRDYTVDYSSSSFGLSGASYISSPMRETEQSKTSFDQFYSNANFQLYLSFCNFDKAMFLGFFHELSELPFELQRKAVRDLKTSLSGENEIWHSMVYNGFFEAFHEFLKNDSGIHTLQARRAGIQFFLAFLSSGRARIPSVCEDVVLLIASLHDSEFKQEALLIVHELLQEPSCPKSSLMASILSPSVFGALDSGETKCLDLALQIICKISSDNDIKSYLLSSGIVSRLSPLLGEGKMTECSLKILRNLSDVKETAGFIIRTGNCVSSISDHLDTGSHSEREHAVVILLGVCSHSPEVCSLSMKEGVIPALVDLSVSGTKVARDCSVKLLQLLRNFRRCDQFSSSCSRELAVDHVSENTRNGSICMQPISKSARYISRKLNLFSKPRSLTLA

SEQ ID NO: 197128 - protein, 748 aa, Zea Mays
MEKNNDEAMGTPRHNAHPKVSSILPSIEDAQPGCKAGVDELCNLYNIVDKGKLIIQNCVECSSLYLAITSEATTMRCERIRNSLRRSLFLIQNMVEQLLADEVADVHNDLRDLKFIADPAEEDAGKVILEMLRHSEVSEQTELQTFLEAASKLNITSPKAVLIERRAIKKLLAKINGTDHKKEGILKYLLYLVRKYGKNVKPETDEKNQNLNVATEVLSLDSVVNVINTAEICISATESANMIYDGQSSLSGATTPPQELCCPLSLKLMRDPVIITSGQTYERENIERWFSEGYDTCPRTNMKLKNFTVTPNTCMKAVIHNWLKDHELESTDLPKQFQNYYSVSSLHNISAPLIIEKNRDYTVDYSSSSFGLSGASYISSPMRETEQSKTSFDQFYSNANFQLYLSFCNFDKAMFLGFFHELSELPFELQRKAVRDLKTSLSGENEIWHSMVYNGFFEAFHEFLKNDSGIHTLQARRAGIQFFLAFLSSGRARIPSVCEDVVLLIASLHDSEFKQEALLIVHELLQEPSCPKSSLMASILSPSVFGALDSGETKCLDLALQIICKISSDNDIKSYLLSSGIVSRLSPLLGEGKMTECSLKILRNLSDVKETAGFIIRTGNCVSSISDHLDTGSHSEREHAVVILLGVCSHSPEVCSLSMKEGVIPALVDLSVSGTKVARDCSVKLLQLLRNFRRCDQFSSSCSRELAVDHVSENTRNGSICMQPISKSARYISRKLNLFSKPRSLTLA

SEQ ID NO: 197129 - protein, 282 aa, Zea Mays
MVHQSNKPSTKPYWPAGSCSGRRRGIAGVLEANFIRPTHDKQDFERTGLFQRLETRLKDMAKEYWTYHCHMVGYTRVMKKPPPAHYVSTIAEKGDDNLAAQSTTKTYGYNSRARVPVALQPCSNAYNTQDPMHADVGVVMDQMNYGACPSMTINVGTTLHSLRYAPQQSQSELCKRRKSSEIHWRSQKKQNTNIYSDKPESDSGTEMAEFRVVLDSSTMLKAECSELEAAGKQLASKADKLRIELDVWQRMYQGLSDKLRSYDGLQRLRCSRHCSSSSIGFI

SEQ ID NO: 197130 - protein, 519 aa, Zea Mays
MLVDIVDLSSDDDEVAVTEEHSVDGKGVYAKANFFDLTIDDGILEGEHIAYEQEQGDSAQGTSFYKQEFIADDGQAEAAQCIVTLELQNLGADGGCYASQCTETLLVQQLRRNDGQNDAAHSTGTLPIQELRTDGGQHDAAQCTTSLHMQELRATDVQGDAACFTPTLQRQEHTAGNEQGDTVQYTTTQQGQESIADDTRGDFTHCTTALQWQGSHKAQCTTTLLRQEFLAAGDRMQDAALLRNSAEATTSLTSTQQGRHMRTELFNVSTATPFPRQFWKAGEKAGDYGLASQADLNNDHNRLQIHPKFLHSNATSHKWPFGDIDKLVLELINFCYTAIAELLDNAIDEVSSGATFVKIDKMKHSPKGDYSLVIEDNGGGMSPKSLRQCMSFGFSQKSTTSSIGQYGNGFKTSTMRLGADAIVFTCTKDDRRLTRSIGLLSYTFLMRSNCNDIFVPVVDYELDALSSTFKRKMNCGEKHFLSNLFTILKWSPFSTEDELLNQQYGVPWHKNHCIQLVVE

SEQ ID NO: 197131 - protein, 620 aa, Zea Mays
MLVDIVDLSSDDDEVAVTEEHSVDGKGVYAKANFFDLTIDDGILEGEHIAYEQEQGDSAQGTSFYKQEFIADDGQAEAAQCIVTLELQNLGADGGCYASQCTETLLVQQLRRNDGQNDAAHSTGTLPIQELRTDGGQHDAAQCTTSLHMQELRATDVQGDAACFTPTLQRQEHTAGNEQGDTVQYTTTQQGQESIADDTRGDFTHCTTALQWQGSHKAQCTTTLLRQEFLAAGDRMQDAALLRNSAEATTSLTSTQQGRHMRTELFNVSTATPFPRQFWKAGEKAGDYGLASQADLNNDHNRLQIHPKFLHSNATSHKWPFGDIDKLVLELINFCYTAIAELLDNAIDEVSSGATFVKIDKMKHSPKGDYSLVIEDNGGGMSPKSLRQCMSFGFSQKSTTSSIGQYGNGFKTSTMRLGADAIVFTCTKDDRRLTRSIGLLSYTFLMRSNCNDIFVPVVDYELDALSSTFKRKMNCGEKHFLSNLFTILKWSPFSTEDELLNQFSNMECHGTKIIVFNLWLNDALEMELDFITDKEDILVSGAPEIRAGRNTVESLTQMHVANRFRYSLRVYASILYLHVPENFQIILCGRAVEPHYVVNDLIYRECIIYRPHVQVTTEPG

SEQ ID NO: 197132 - protein, 904 aa, Zea Mays
MLVDIVDLSSDDDEVAVTEEHSVDGKGVYAKANFFDLTIDDGILEGEHIAYEQEQGDSAQGTSFYKQEFIADDGQAEAAQCIVTLELQNLGADGGCYASQCTETLLVQQLRRNDGQNDAAHSTGTLPIQELRTDGGQHDAAQCTTSLHMQELRATDVQGDAACFTPTLQRQEHTAGNEQGDTVQYTTTQQGQESIADDTRGDFTHCTTALQWQGSHKAQCTTTLLRQEFLAAGDRMQDAALLRNSAEATTSLTSTQQGRHMRTELFNVSTATPFPRQFWKAGEKAGDYGLASQADLNNDHNRLQIHPKFLHSNATSHKWPFAIAELLDNAIDEVSSGATFVKIDKMKHSPKGDYSLVIEDNGGGMSPKSLRQCMSFGFSQKSTTSSIGQYGNGFKTSTMRLGADAIVFTCTKDDRRLTRSIGLLSYTFLMRSNCNDIFVPVVDYELDALSSTFKRKMNCGEKHFLSNLFTILKWSPFSTEDELLNQFSNMECHGTKIIVFNLWLNDALEMELDFITDKEDILVSGAPEIRAGRNTVESLTQMHVANRFRYSLRVYASILYLHVPENFQIILCGRAVEPHYVVNDLIYRECIIYRPHVQVTTEVDVITTIGYLKGAPRLDIYGFSVYHKNRLILPYWPAGSCSGRRRGIAGVLEANFIRPTHDKQDFERTGLFQRLETRLKDMAKEYWTYHCHMVGYTRVMKKPPPAHYVSTIAEKGDDNLAAQSTTKTYGYNSRARVPVALQPCSNAYNTQDPMHADVGVVMDQMNYGACPSMTINVGTTLHSLRYAPQQSQSELCKRRKSSEIHWRSQKKQNTNIYSDKPESDSGTEMAEFRVVLDSSTMLKAECSELEAAGKQLASKADKLRIELDVWQRMYQGLSDKLRSYDGLQRLRCSRHCSSSSIGFI

SEQ ID NO: 197133 - protein, 657 aa, Zea Mays
MLVDIVDLSSDDDEVAVTEEHSVDGKGVYAKANFFDLTIDDGILEGEHIAYEQEQGDSAQGTSFYKQEFIADDGQAEAAQCIVTLELQNLGADGGCYASQCTETLLVQQLRRNDGQNDAAHSTGTLPIQELRTDGGQHDAAQCTTSLHMQELRATDVQGDAACFTPTLQRQEHTAGNEQGDTVQYTTTQQGQESIADDTRGDFTHCTTALQWQGSHKAQCTTTLLRQEFLAAGDRMQDAALLRNSAEATTSLTSTQQGRHMRTELFNVSTATPFPRQFWKAGEKAGDYGLASQADLNNDHNRLQIHPKFLHSNATSHKWPFGDIDKLVLELINFCYTAIAELLDNAIDEVSSGATFVKIDKMKHSPKGDYSLVIEDNGGGMSPKSLRQCMSFGFSQKSTTSSIGQYGNGFKTSTMRLGADAIVFTCTKDDRRLTRSIGLLSYTFLMRSNCNDIFVPVVDYELDALSSTFKRKMNCGEKHFLSNLFTILKWSPFSTEDELLNQFSNMECHGTKIIVFNLWLNDALEMELDFITDKEDILVSGAPEIRAGRNTVESLTQMHVANRFRYSLRVYASILYLHVPENFQIILCGRAVEPHYVVNDLIYRECIIYRPHVQVTTEVDVITTIGYLKGAPRLDIYGFSVYHKNRLILALLACRFM

SEQ ID NO: 197134 - protein, 574 aa, Zea Mays
MLVDIVDLSSDDDEVAVTEEHSVDGKGVYAKANFFDLTIDDGILEGEHIAYEQEQGDSAQGTSFYKQEFIADDGQAEAAQCIVTLELQNLGADGGCYASQCTETLLVQQLRRNDGQNDAAHSTGTLPIQELRTDGGQHDAAQCTTSLHMQELRATDVQGDAACFTPTLQRQEHTAGNEQGDTVQYTTTQQGQESIADDTRAGDRMQDAALLRNSAEATTSLTSTQQGRHMRTELFNVSTATPFPRQFWKAGEKAGDYGLASQADLNNDHNRLQIHPKFLHSNATSHKWPFGAIAELLDNAIDEVSSGATFVKIDKMKHSPKGDYSLVIEDNGGGMSPKSLRQCMSFGFSQKSTTSSIGQYGNGFKTSTMRLGADAIVFTCTKDDRRLTRSIGLLSYTFLMRSNCNDIFVPVVDYELDALSSTFKRKMNCGEKHFLSNLFTILKWSPFSTEDELLNQFSNMECHGTKIIVFNLWLNDALEMELDFITDKEDILVSGAPEIRAGRNTVESLTQMHVANRFRYSLRVYASILYLHVPENFQIILCGRAVEPHYVVNDLIYRECIIYRPHVQVTTEPG

SEQ ID NO: 197135 - protein, 600 aa, Zea Mays
MLVDIVDLSSDDDEVAVTEEHSVDGKGVYAKANFFDLTIDDGILEGEHIAYEQEQGDSAQGTSFYKQEFIADDGQAEAAQCIVTLELQNLGADGGCYASQCTETLLVQQLRRNDGQNDAAHSTGTLPIQELRTDGGQHDAAQCTTSLHMQELRATDVQGDAACFTPTLQRQEHTAGNEQGDTVQYTTTQQGQESIADDTRGDFTHCTTALQWQGSHKAQCTTTLLRQEFLAAGDRMQDAALLRNSAEATTSLTSTQQGRHMRTELFNVSTATPFPRQFWKAGEKAGDYGLASQADLNNDHNRLQIHPKFLHSNATSHKWPFGDIDKLVLELINFCYTAIAELLDNAIDEVSSGATFVKIDKMKHSPKGDYSLVIEDNGGGMSPKSLRQCMSFGFSQKSTTSSIGQYGNGFKTSTMRLGADAIVFTCTKDDRRLTRSIGLLSYTFLMRSNCNDIFVPVVDYELDALSSTFKRKMNCGEKHFLSNLFTILKWSPFSTEDELLNQFSNMECHGTKIIVFNLWLNDALEMELDFITDKEDILVSGAPEIRAGRNTVESLTQMHVANRFRYSLRVDVITTIGYLKGAPRLDIYGFSVYHKNRLIL

SEQ ID NO: 197136 - protein, 73 aa, Zea Mays
MLLLATGDDNEASNWKMNVVTSVCDNTESAAAALPKQPTTHQPCSCWVFLLACCNSFTLLKKPMRLLWNYELR

SEQ ID NO: 197137 - protein, 58 aa, Zea Mays
MHGHQQQPYPYGLRQDPRRRGHWDGGAAAGPGVEAPWCPRRRRVRGAPPPATGHRRCW

SEQ ID NO: 197138 - protein, 102 aa, Zea Mays
MQHGFSDAIAKVGLTKFVSDLFLVGLFYHLYNQIATNTLERVAPLTHAVGNVLKRVFAIGFSIIVFGNKISTQTGIGTSIAIAGVAMYSYIKAKIEEEKRSA

SEQ ID NO: 197139 - protein, 67 aa, Zea Mays
MKRRKPKQYWTAFSLIRPKTSRITRAVRATYADNPRSNTWLRSPELAADDLLRRRQAPSHQPQSKAV

SEQ ID NO: 197140 - protein, 296 aa, Zea Mays
MFSDSNAINNTSQNPTILSISNSNPNTSVQAYPVPQQPVPPHHPSPYANGLNSDTMTPFDQGSKLTSASSWNEQIAHGMIPPQQFAHGQGEQSNDLPLPPWEALPAETEQLEADHPGGLSALPQFGVSQPQPVQITHSGQQVLPSQLMPTGQPGGQFQPRFGAQQPYATENTQYGGMYPPVQGNQPTGIYPQQMAGDVYQQQMFGGQMIGYGYGPQPGGYYVPNAAYAYAGANDLSQRMNGLSMQGNSLYGTPASSSLQQRNRPSRPEDSLFSDLVSIAKQSLVKLLPTRLVTCKP

SEQ ID NO: 197141 - protein, 149 aa, Zea Mays
MPTGQPGGQFQPRFGAQQPYATENTQYGGMYPPVQGNQPTGIYPQQMAGDVYQQQMFGGQMIGYGYGPQPGGYYVPNAAYAYAGANDLSQRMNGLSMQGNSLYGTPASSSLQQRNRPSRPEDSLFSDLVSIAKQSLVKLLPTRLVTCKP

SEQ ID NO: 197142 - protein, 245 aa, Zea Mays
MPQSVLVERATSESLIGPDWSLNLEICDILNHDPSQAKDVVKTIKKRIAHKNSKVQLLALTLLETLIKNCGDFVHMQVAEKDMLHEMVKIAKKKPDYHVKEKILILIDTWQEAFGGARARYPQYYAAYQEMLRAGAVFPQRPESTVPIYTPPQTQPLRNYPPPALRNTDYRHDVPESSSAPEVPALSLTEIQNARGVMDVLSEMLNAIDPGNREGLRQEVIVDLVDQCRSYKQRVVQLVNSTSSR

SEQ ID NO: 197143 - protein, 618 aa, Zea Mays
MPQSVLVERATSESLIGPDWSLNLEICDILNHDPSQAKDVVKTIKKRIAHKNSKVQLLALTLLETLIKNCGDFVHMQVAEKDMLHEMVKIAKKKPDYHVKEKILILIDTWQEAFGGARARYPQYYAAYQEMLRAGAVFPQRPESTVPIYTPPQTQPLRNYPPPALRNTDYRHDVPESSSAPEVPALRDEDLLSQGLTLNDDLQRVLAKHDAIAAGIAIRLQKPKSAPARADSSPTKPEPTKETEQRSAKVASSVTPFEQLALPAPPSSSASKSHGESAVSPNIDLLSGDEFFKPEPVHSQALVPLVTQASASSSPSTLDLLDMFSDSNAINNTSQNPTILSISNSNPNTSVQAYPVPQQPVPPHHPSPYANGLNSDTMTPFDQGSKLTSASSWNEQIAHGMIPPQQFAHGQGEQSNDLPLPPWEALPAETEQLEADHPGGLSALPQFGVSQPQPVQITHSGQQVLPSQLMPTGQPGGQFQPRFGAQQPYATENTQYGGMYPPVQGNQPTGIYPQQMAGDVYQQQMFGGQMIGYGYGPQPGGYYVPNAAYAYAGANDLSQRMNGLSMQGNSLYGTPASSSLQQRNRPSRPEDSLFSDLVSIAKQSLVKLLPTRLVTCKP

SEQ ID NO: 197144 - protein, 667 aa, Zea Mays
MPQSVLVERATSESLIGPDWSLNLEICDILNHDPSQAKDVVKTIKKRIAHKNSKLLETLIKNCGDFVHMQVAEKDMLHEMVKIAKKKPDYHVKEKILILIDTWQEAFGGARARYPQYYAAYQEMLRAGAVFPQRPESTVPIYTPPQTQPLRNYPPPALRNTDYRHDVPESSSAPEVPALSLTEIQNARGVMDVLSEMLNAIDPGNREGLRQEVIVDLVDQCRSYKQRVVQLVNSTSDEDLLSQGLTLNDDLQRVLAKHDAIAAGIAIRLQKPKSAPARADSSPTKPEPTKETEQRSAKVASSVTPFEQLALPAPPSSSASKSHGESAVSPNIDLLSGDEFFKPEPVHSQALVPLVTQASASSSPSTLDLLDMFSDSNAINNTSQNPTILSISNSNPNTSVQAYPVPQQPVPPHHPSPYANGLNSDTMTPFDQGSKLTSASSWNEQIAHGMIPPQQFAHGQGEQSNDLPLPPWEALPAETEQLEADHPGGLSALPQFGVSQPQPVQITHSGQQVLPSQLMPTGQPGGQFQPRFGAQQPYATENTQYGGMYPPVQGNQPTGIYPQQMAGDVYQQQMFGGQMIGYGYGPQPGGYYVPNAAYAYAGANDLSQRMNGLSMQGNSLYGTPASSSLQQRNRPSRPEDSLFSDLVSIAKQSLVKLLPTRLVTCKP

SEQ ID NO: 197145 - protein, 510 aa, Zea Mays
MAAAPDMDEQDAAIEGGQLVVPLLGSRSASTATGSPSQDASSLRRLYAGHALARWGARMWEFSVGLYMIRIWPGSLLFTAIYGVVESSSVAVFGPTVGTLVDNLTYLQVLGLWLLVQSLSFIVAGASVTALLVYDDLKATSFPVFMALVIMTNVAGALAALSTLAGTILIEREWVVVISSRHPPAVLTGINSVVRRIDLSCKLLAPVFSGLVISFVSAQASAAALALWNVASVGLEYWLFVSVYNGVPALAESSRLRTAGANASEAMVLPSSSSSENVVPADKELDWRVRMTEQLSIIPCWESWVVYLRQDVALPGVALAFLYFSVLSFGTLMTATLDWEGIPAYVISLARGFSAIVGIGATLLYPVVHSWVSTLRTGLWSIWMQWCCLLVCVASIWAASDVASAWMLMAGVAASRLGLWMFDLAVMQLMQDGVPDHERCVVGGVQNSLQSVFDLLTYIMGIIISDPRDFSELVVLSFFLVTCAAAMYTLHVYRVRKHLFHFDKILAKIS

SEQ ID NO: 197146 - protein, 727 aa, Zea Mays
MEQDVGGQNSHSQFINNDLRIVPADEDGPSQSINNGSSAAPINLEEGAATNNGTGDANTSENVDGKKHKRICTSKVWQDFEPLYHTVDGKRIRYGGKCHWCKCTLTAVSTSGTGHLLRHQRDCKVKLSKQGKQSVLKFNPDGSMRNWDYCPDRARTQMCRLIARLDLPLNFAESPAFEEYIRLSHNPVFKKVSHQTTARDFVKFFNDRRKIVVECLQSVSSIAITSDIWSGNAKEDYLSVVAHYVSKDWALEKRVIGLRLIETAHTGENIAERVMTVLEDYGVVNKVFSVTLDNASSNSKAMEKLSPSLAAYVGTLFLHQRCACHIINLIVKCGFKRLQPYLDSFRTAIVFLNASNQRIAAFKGYCVAMNVRPRKFGIDMPVRWNSTYLMLKHLIPYKGTFGVFMDTNYPRKPGEPNLLTNSHWYVAEKLLQFLELFYDATVTLSGVYYPTSPLIMHNILDIIQHLNQHENDALLRHAVAPMKSKFLKYWRDIPMLYAFAFILDPRAKLRGFSNILRILSGLSGTDYSLYFTCVKSELFTMFNKYDVKFGAVRQQVPPPPPITGKRKQNWGLIYGSDSNSEFSYPGSSTPNLAAGTSASALLQQAHSSVGLSSLDTELSSYLDSDTLQKFDEDFNILNWWHEHKLSYPILSILARDIISVPVSTISSESAFSLCGRIIEERRRRLAPEMVEMLLCMKDWELGEARGQHSTQDEDLEEAFEGLYPDDP

SEQ ID NO: 197147 - protein, 111 aa, Zea Mays
MEPAPSLSRVRLIRLGSCPQMYHVYCKPAGTAIFCNHSYWHYCFWLVLGLPQLPCVICAATSSSSDSGFPDEREALSCLAFLRAGAYRYRARGDAFSELLMRIRRLVSALI

SEQ ID NO: 197148 - protein, 188 aa, Zea Mays
MHQYHLGDKEEEREGELVVSKIFYQTQPRQCGVAAEPAATAASSDTVEEAADPPAPEGLVVPPPPDVAGAFQGAAGIDEFSFAQFRSSFEEVDVGASVQVSMRDEEEMHAAHLNLHQDHNLHRNQFGNQEHRRRMAATAAAFPHQHTSRAYHHDDHLLAGGSRFCHTSTSRGHMAMAARLIVIISTRW

SEQ ID NO: 197149 - protein, 397 aa, Zea Mays
MGSWQQGELQGAAMDGAAAAATGSGGGHRVVGSRNEEHGKYLSESSCCPTDWLGLPAGVKFDPTDQELIEHLQAKVRPASAAAPSHPLIDEFIPTIEGEDGICYTHPERLPGLTKDGLSRHFFHRPSKAYTTGTRKRRKIQPPVADASSSSALPAQQQHQQQQRSETRWHKTGKTRPVVVAGRQRGCKKILVLYTNFGKNRKPDKTNWVMHQYHLGDKEEEREGELVVSKIFYQTQPRQCGVAAEPAATAASSDTVEEAADPPAPEGLVVPPPPDVAGAFQGAAGIDEFSFAQFRSSFEEVDVGASVQVSMRDEEEMHAAHLNLHQDHNLHRNQFGNQEHRRRMAATAAAFPHQHTSRAYHHDDHLLAGGSRFCHTSTSRGHMAMAARLIVIISTRW

SEQ ID NO: 197150 - protein, 158 aa, Zea Mays
MHQYHLGDKEEEREGELVVSKIFYQTQPRQCGVAAEPAATAASSDTVEEAADPPAPEGLVVPPPPDVAGAFQGAAGIDEFSFAQFRSSFEEEEDEQLHQQPQNFDGRRSTSGLEEVIMGCSSRRSKRAEASGPGGNKESRGWQYPSFWPSGSQQDHHG

SEQ ID NO: 197151 - protein, 55 aa, Zea Mays
MDCGSRGYKSVSLHNLSVAVKSRSKGSLMPVPLRRVVFAKESPAYLQINPPSPYV

SEQ ID NO: 197152 - protein, 522 aa, Zea Mays
MTGNASYQHLGLGVDATMRSCFASGDGSVISSADAPFFHVPEYTLHGGGGFGFGEPAADVAASSFLADGSVLLAGQLLRATALQSVSPEERHGAYYGVTGGSSSYGPSPWDVTVAHAPSRMTKQPVAGEPEGGWIHESSYYCPATWFSGDGFRDPFAGAAASELSLRLRAGSSPTAGAASVSLPDQSSEVSCSGLTHWSSGGGPGMFQLPCGGAGQVAVAARPGPMHFSQVLSRWSGYADVTQQVLDEFVIRLLQDVAGFAGGGEASCPLPSSSYCSKTTSSNPNPSVFVSSEEHHNELKNDFQKLLQIMDQRCKQCLDEIQNAASKYGSLVRPGGGGGALSTLFAQRAVSATHRRLRARITGEIAAATRGGNQPSSSSSLSLADRERSWESAFIQKHWALRQLRRGDQQSWRPQRGLPEKSVAVLKAWMFENFLRPYPRDKEKEMLAARSGLSRSQVQFLHAFQPASDQISATLTGSSLRLFHVHWQVSNWFINARVRLWKPMIEEMYEDLKKASAGIMEA

SEQ ID NO: 197153 - protein, 247 aa, Zea Mays
MHETIIESVDNLGGSVEVTKEDEEKMSKDQSANVHAELPKEGQIKLGTDHPIVNHGEPAKEGDENMNTDHSEAVLDKPAADANMAEEDPEYEEDPEEIEIYEDDEDMDDAHAGAQNGEQNENTNDRDVKPEVATADGGNNRSSTQPEVGNITNTHERAASMEDKLSVAEKGDSVEGGEKVVSKEVKPAKDEVVDKDLLQAFRYFDINRAGYLKMDDLKCILHNLGKFLSSRDVKLLLLRAILQGTLA

SEQ ID NO: 197154 - protein, 171 aa, Zea Mays
MSGMSKGAFADITSLRSTEERVVHLNNILKFALFKKDRSLFAIGGPWNAAIDGGDPSVDCSCLIQTAIRCVKEMVQVDLSSCTHWNRFVEVHYNRIGKDGLFSHKEITVLFVPNLSECLPSVDIWKNNWILYKKSKAEREELTVKKEKSPGDSKEQMQVSGELNKGKSLDA

SEQ ID NO: 197155 - protein, 373 aa, Zea Mays
MSCKKISMLRVAQAEYMIEALKLGEIETGQGLNQEMGLARPGDTRWGSHYRTVMHVMALYPSIKKVLSKIGKEHKGGESLGAQTMLQVFQSFEFVFMMHLMNEIFGYTNDLCIALQRREQDIVNAMDLLEFTKVELSVLREDDGWNEFNGKVNSFCEKHKVKVVDMDGKYKPIQRDKKFYKNAINYHRFHADMFLGVIDRKLMELNSRFDEVNTELLRCMACFNPINSFAAFNQEKLVRLAGFYPHDFEFEEMNQLPFQLNRYIENMKRDDNFKNLRSLAELSMMFVKTQMTQRYDIVYKLLKLVLVLPVATAGVERVFSSMNHIKSKLRNKMGQEFLNGCLVTFIEREFFLQAKDKDIIARFQNMKDRKLVL

SEQ ID NO: 197156 - protein, 545 aa, Zea Mays
MELLRPRGDGCCPRVLSVSLLLLAALLWKHVSAAAITRGDFPEGFVFGAGASAYQIEGAWAEDGKKPSIWDTYTHSGYSIDRDTGDVAADQYHHYKEDVKLMHDMGLDAYRFSIAWSRLIPDGRGAVNPKGLEYYNSLIDELLRYGRHLPHVTIYHFDLPQALQDEYNGLLSPRIIDDFTAYADVCFRSFGDRVKHWITVNEPNIEPIGGYDQGYLPPRRCSYPFGLGVTCTHGNSTTEPYAVAHHLLLAHASAVSLYRRKYQGEQGGRIGLTLLAWWYEPATQKPEDVEAAARANDFSLGWFMHPLVYGDYPPVMKRNVGARLPSLTARDSAMVRGSLDFVGINQYGAILVEADLGQLDRDLRDYYGDMATNFVTVPFESTVTRNQQVPRLGLRNHEAPWALSKLLEHLQTHYGNPPVMIHENGAGHEPDPSGGFLYDDEFRAHFLRVYVEAALASVRNGSDLRGYFVWSFMDVFEFLFSYRFRFGLYGVDFAADNRTRYARRSARWYAGFLRGGAATSRPPLFQRGHTAPPIRSENQPHVSVL

SEQ ID NO: 197157 - protein, 242 aa, Zea Mays
MHPLVYGDYPPVMKRNVGARLPSLTARDSAMVRGSLDFVGINQYGAILVEADLGQLDRDLRDYYGDMATNFVTVPFESTVTRNQQVPRLGLRNHEAPWALSKLLEHLQTHYGNPPVMIHENGAGHEPDPSGGFLYDDEFRAHFLRVYVEAALASVRNGSDLRGYFVWSFMDVFEFLFSYRFRFGLYGVDFAADNRTRYARRSARWYAGFLRGGAATSRPPLFQRGHTAPPIRSENQPHVSVL

SEQ ID NO: 197158 - protein, 508 aa, Zea Mays
MELLRPRGDGCCPRVLSVSLLLLAALLWKHVSAAAITRGDFPEGFVFGAGASAYQDIRLTVILEMWLRTSITITRFSIAWSRLIPDGRGAVNPKGLEYYNSLIDELLRYGIQPHVTIYHFDLPQALQDEYNGLLSPRIIDDFTAYADVCFRSFGDRVKHWITVNEPNIEPIGGYDQGYLPPRRCSYPFGLGVTCTHGNSTTEPYAVAHHLLLAHASAVSLYRRKYQGEQGGRIGLTLLAWWYEPATQKPEDVEAAARANDFSLGWFMHPLVYGDYPPVMKRNVGARLPSLTARDSAMVRGSLDFVGINQYGAILVEADLGQLDRDLRDYYGDMATNFVTVPFESTVTRNQQVPRLGLRNHEAPWALSKLLEHLQTHYGNPPVMIHENGAGHEPDPSGGFLYDDEFRAHFLRVYVEAALASVRNGSDLRGYFVWSFMDVFEFLFSYRFRFGLYGVDFAADNRTRYARRSARWYAGFLRGGAATSRPPLFQRGHTAPPIRSENQPHVSVL

SEQ ID NO: 197159 - protein, 541 aa, Zea Mays
MVVARACSRFLCCSSPPCCGSTSLRRRLPGVISRRGSSSAPAHRLTRSKAHGQRTGRSPASGTHTRTVVSERARYSIDRDTGDVAADQYHHYKEDVKLMHDMGLDAYRFSIAWSRLIPDGRGAVNPKGLEYYNSLIDELLRYGIQPHVTIYHFDLPQALQDEYNGLLSPRIIDDFTAYADVCFRSFGDRVKHWITVNEPNIEPIGGYDQGYLPPRRCSYPFGLGVTCTHGNSTTEPYAVAHHLLLAHASAVSLYRRKYQGEQGGRIGLTLLAWWYEPATQKPEDVEAAARANDFSLGWFMHPLVYGDYPPVMKRNVGARLPSLTARDSAMVRGSLDFVGINQYGAILVEADLGQLDRDLRDYYGDMATNFVTVPFESTVTRNQQVPRLGLRNHEAPWALSKLLEHLQTHYGNPPVMIHENGAGHEPDPSGGFLYDDEFRAHFLRVYVEAALASVRNGSDLRGYFVWSFMDVFEFLFSYRFRFGLYGVDFAADNRTRYARRSARWYAGFLRGGAATSRPPLFQRGHTAPPIRSENQPHVSVL

SEQ ID NO: 197160 - protein, 443 aa, Zea Mays
MHDMGLDAYRFSIAWSRLIPDGRGAVNPKGLEYYNSLIDELLRYGIQPHVTIYHFDLPQALQDEYNGLLSPRIIDDFTAYADVCFRSFGDRVKHWITVNEPNIEPIGGYDQGYLPPRRCSYPFGLGVTCTHGNSTTEPYAVAHHLLLAHASAVSLYRRKYQGEQGGRIGLTLLAWWYEPATQKPEDVEAAARANDFSLGWFMHPLVYGDYPPVMKRNVGARLPSLTARDSAMVRGSLDFVGINQYGAILVEADLGQLDRDLRDYYGDMATNFVTVPFESTVTRNQQVPRLGLRNHEAPWALSKLLEHLQTHYGNPPVMIHENGAGHEPDPSGGFLYDDEFRAHFLRVYVEAALASVRNGSDLRGYFVWSFMDVFEFLFSYRFRFGLYGVDFAADNRTRYARRSARWYAGFLRGGAATSRPPLFQRGHTAPPIRSENQPHVSVL

SEQ ID NO: 197161 - protein, 402 aa, Zea Mays
MSSSDMPHVTIYHFDLPQALQDEYNGLLSPRIIDDFTAYADVCFRSFGDRVKHWITVNEPNIEPIGGYDQGYLPPRRCSYPFGLGVTCTHGNSTTEPYAVAHHLLLAHASAVSLYRRKYQGEQGGRIGLTLLAWWYEPATQKPEDVEAAARANDFSLGWFMHPLVYGDYPPVMKRNVGARLPSLTARDSAMVRGSLDFVGINQYGAILVEADLGQLDRDLRDYYGDMATNFVTVPFESTVTRNQQVPRLGLRNHEAPWALSKLLEHLQTHYGNPPVMIHENGAGHEPDPSGGFLYDDEFRAHFLRVYVEAALASVRNGSDLRGYFVWSFMDVFEFLFSYRFRFGLYGVDFAADNRTRYARRSARWYAGFLRGGAATSRPPLFQRGHTAPPIRSENQPHVSVL

SEQ ID NO: 197162 - protein, 238 aa, Zea Mays
MHPLVYGDYPPVMKRNVGARLPSLTARDSAMVRGSLDFVGINQYGAILVEADLGQLDRDLRDYYGDMATNFTNNLLWCTCKVPRLGLRNHEAPWALSKLLEHLQTHYGNPPVMIHENGAGHEPDPSGGFLYDDEFRAHFLRVYVEAALASVRNGSDLRGYFVWSFMDVFEFLFSYRFRFGLYGVDFAADNRTRYARRSARWYAGFLRGGAATSRPPLFQRGHTAPPIRSENQPHVSVL

SEQ ID NO: 197163 - protein, 522 aa, Zea Mays
MVVARACSRFLCCSSPPCCGSTSLRRRLPGVISRRGSSSAPAHRLTRSKAHGQRTGRSPASGTHTRTVDIRLTVILEMWLRTSITITRFSIAWSRLIPDGRGAVNPKGLEYYNSLIDELLRYGRHLPHVTIYHFDLPQALQDEYNGLLSPRIIDDFTAYADVCFRSFGDRVKHWITVNEPNIEPIGGYDQGYLPPRRCSYPFGLGVTCTHGNSTTEPYAVAHHLLLAHASAVSLYRRKYQGEQGGRIGLTLLAWWYEPATQKPEDVEAAARANDFSLGWFMHPLVYGDYPPVMKRNVGARLPSLTARDSAMVRGSLDFVGINQYGAILVEADLGQLDRDLRDYYGDMATNFVTVPFESTVTRNQQVPRLGLRNHEAPWALSKLLEHLQTHYGNPPVMIHENGAGHEPDPSGGFLYDDEFRAHFLRVYVEAALASVRNGSDLRGYFVWSFMDVFEFLFSYRFRFGLYGVDFAADNRTRYARRSARWYAGFLRGGAATSRPPLFQRGHTAPPIRSENQPHVSVL

SEQ ID NO: 197164 - protein, 519 aa, Zea Mays
MELLRPRGDGCCPRVLSVSLLLLAALLWKHVSAAAITRGDFPEGFVFGAGASAYQIEGAWAEDGKKPSIWDTYTHSGYSIDRDTGDVAADQYHHYKEDVKLMHDMGLDAYRFSIAWSRLIPDGRGAVNPKGLEYYNSLIDELLRYGIQPHVTIYHFDLPQALQDEYNGLLSPRIIDDFTAYADVCFRSFGDRVKHWITVNEPNIEPIGGYDQGYLPPRRCSYPFGLGVTCTHGNSTTEPYAVAHHLLLAHASAVSLYRRKYQGEQGGRIGLTLLAWWYEPATQKPEDVEAAARANDFSLGWFMHPLVYGDYPPVMKRNVGARLPSLTARDSAMVRGSLDFVGINQYGAILVEADLGQLDRDLRDYYGDMATNFTNNLLWCTCKVPRLGLRNHEAPWALSKLLEHLQTHYGNPPVMIHENGAGHEPDPSGGFLYDDEFRAHFLRVYVEAALASVRNGSDLRGYFVWSFMDVFEFLFSYRFRFGLYGVDFAADNRTRYARRSARWYAGSVSTRTHGSTYSE

SEQ ID NO: 197165 - protein, 314 aa, Zea Mays
MGLNFVQPMSLLYSYRWINGEGCRLADCSLTLSSLNPTTPPHARLPRLNAATQSNRLDATTPPHLGAAAPSNYLDAAIHPTASVSAPQYLAVFNMPPGRMDGARTCRDLGEVPITEYEKERALNVMRNNKMLSSLGITGLTSLIRSSSTRKNSIAREDFDPLYEPDHSEDNDHHVANQDDPFYIERRNTNMSTGFGGTKGSKRVVAPNVEDQVGRVTRQKTKELSLVEKDIHGLTANTDEHTLISANFPAHHDDEIQMCDEGNRRPEVPMQAAMLASEGGIVIRQHMPILTHWKEYKNDKSYLEDFVGRIGVSK

SEQ ID NO: 197166 - protein, 601 aa, Zea Mays
MGLNFVQPMSLLYSYRWINGEGCRLADCSLTLSSLNPTTPPHARLPRLNAATQSNRLDATTPPHLGAAAPSNYLDAAIHPTASVSAPQYLAVFNMPPGRMDGARTCRDLGEVPITEYEKERALNVMRNNKMLSSLGITGLTSLIRSSSTRKNSIAREDFDPLYEPDHSEDNDHHVANQDDPFYIERRNTNMSTGFGGTKGSKRVVAPNVEDQVGRVTRQKTKELSLVEKDIHGLTANTDEHTLISANFPAHHDDEIQMCDEDVMTDKWIRGKSMGRQLERISRGLNTKIPLVITEGNRRPEVPMQAAMLASEGGIVIRQHMPILTHWKEYKNDKSYLEDFVGRIGGQFAIDTKNKDVKYACADLMRCNQRQMRYKLKKAYFNGVAADKVRTTSPLSTMTDEQWMQLVNMWSTPKHKEKCVNNKVIRGKVRFQQKTGSRSYIAHMHAVKQAKYGDAPPSAIDLFKECHCSRKTGFAEPVKEAIDTMEALVAEPGVEGKESKTPTEAVAQVLSSSKFLYNIGLVPATKKSCNGGDPTRVAELEAELESEKQNSLEVRAQLDALKKKVEESEEARAKELEKINDLQKGADETNALLRRLFSLNK

SEQ ID NO: 197167 - protein, 568 aa, Zea Mays
MMGLNFVQPMSLLYSYRWINGEGCRLADCSLTLSSLNPTTPPHARLPRLNAATQSNRLDATTPPHLGAAAPSNYLDAAIHPTASVSAPQYLAVFNMPPGRMDGARTCRDLGEVPITEYEKERALNVMRNNKMLSSLGITGLTSLIRSSSTRKNSIAREDFDPLYEPDHSEDNDHHVANQDDPFYIERRNTNMSTGFGGTKGSKRVVAPNVEDQVGRVTRQKTKELSLVEKDIHGLTANTDEHTLISANFPAHHDDEIQMCDEGNRRPEVPMQAAMLASEGGIVIRQHMPILTHWKEYKNDKSYLEDFVGRIGGQFAIDTKNKDVKYACADLMRCNQRQMRYKLKKAYFNGVAADKVRTTSPLSTMTDEQWMQLVNMWSTPKHKEKCVNNKVIRGKVRFQQKTGSRSYIAHMHAVKQAKYGDAPPSAIDLFKECHCSRKTGFAEPVKEAIDTMEALVAEPGVEGKESKTPTEAVAQVLSSSKFLYNIGLVPATKKSCNGGDPTRVAELEAELESEKQNSLEVRAQLDALKKKVEESEEARAKELEKINDLQKGADETNALLRRLFSLNK

SEQ ID NO: 197168 - protein, 345 aa, Zea Mays
MMGLNFVQPMSLLYSYRWINGEGCRLADCSLTLSSLNPTTPPHARLPRLNAATQSNRLDATTPPHLGAAAPSNYLDAAIHPTASVSAPQYLAVFNMPPGRMDGARTCRDLGEVPITEYEKERALNVMRNNKMLSSLGITGLTSLIRSSSTRKNSIAREDFDPLYEPDHSEDNDHHVANQDDPFYIERRNTNMSTGFGGTKGSKRVVAPNVEDQVGRVTRQKTKELSLVEKDIHGLTANTDEHTLISANFPAHHDDEIQMCDEDKWIRGKSMGRQLERISRGLNTKIPLVITEGNRRPEVPMQAAMLASEGGIVIRQHMPILTHWKEYKNDKSYLEDFVGRIGVSK

SEQ ID NO: 197169 - protein, 279 aa, Zea Mays
MMGLNFVQPMSLLYSYRWINGEGCRLADCSLTLSSLNPTTPPHARLPRLNAATQSNRLDATTPPHLGAAAPSNYLDAAIHPTASVSAPQYLAVFNMPPGRMDGARTCRDLGEVPITEYEKERALNVMRNNKMLSSLGITGLTSLIRSSSTRKNSIAREDFDPLYEPDHSEDNDHHVANQDDPFYIERRNTNMSTGFGGTKGSKRVVAPNVEDQVGRVTRQKTKELSLVEKDIHGLTANTDEHTLISANFPAHHDDEIQMCDEGSICHRHQKQRCQICMC

SEQ ID NO: 197170 - protein, 446 aa, Zea Mays
MEQSNFIMGLLIPGPECPGKDFDVFMEQLIEELLELWKGVTTWDALSGNNFELHAAVIWCIHDYPALSTLSGRVTKGYYACVHCDKNPCSKRIRNKICYVYHRRFLPKDHLWRRNKTFDGHSEQREKPEEFTIDELMQQLERVKDVRPGKHTKSKKRKREVEGQCWKRRSCLWDLPYWSSLKLRHNLDVMHIEKNICEYFLGTFLGIVGKTKDTINARLDLEDMGIRRHLHLKHNGDSYNFPHAPYTMNKTQKVAFCDFLRSVKFPDGYVSNLATCFSTDGCNLQALKTHDCHFLLQRILPAAIRGIMSKDIYEALAELGIFFQHICAKTLKLDVLQRMKVEIPIILCKLEKIFPPFFDVMLHLAIHLPDEAILRGPVQYGWMYPIERRLYTLKRFVRNMARPEGSIAEAYVANECLTACSRYFDDVDTRHNREDCKFAFCRWRRH

SEQ ID NO: 197171 - protein, 139 aa, Zea Mays
MEHRTIVLFRCDWFDTHSKKQHKQLRYFICKTSRILETGRLFKNLHIGTCGVWLKMTLMKDLVPQDYHTKMIHVLVLKCKLMKEIWRYLDIRMLTNLLMSMQVWLMNFGCNEKRKWKSMRQATMKMKLDGNMLVTTKNQ

SEQ ID NO: 197172 - protein, 184 aa, Zea Mays
MDKSWINATLFSKPHLEGVSEFMKLVIERFNANEEILCPCRKCLNRLSGHRGQVEDHLYLHGIASTYTRWIYHGEAMDDIINENGDYEDEHVSFNDDAGMNQDEEDPDDRINGMVEELYTAEDQGKRKSMFGDILEEMKQELYPGATYTRFSFVVKLLHIKSFYRISNVGFTAILKLLKSGFPN

SEQ ID NO: 197173 - protein, 122 aa, Zea Mays
MTDEQDSHEEGGGEHEAYGYHDDGQRRVPLHRHGARDCLRRLRHESPGSAQRAPKQNPGSTQEKAVESSPFREICCRCSRRPLRLPRRPLVAAAMHKQLCDDQSQMDPSGTIASFSGLRIRI

SEQ ID NO: 197174 - protein, 201 aa, Zea Mays
MMHEELLLEMVRGALTLPHGTGKTVRVAVFAEGPGADEARAAGADVVGGDELIEEIRTGGGKLSFDKCIATPMFMPRLSKVARILGPRGLMPNPKLGSVTNDVSGAVKAAKSGRVDFKIDKTAIVHVGLGKVNFTEESLRENIGAFVHALLLAKPVGLKKTSKYVGYVKKFTLSSTMGPGLPVTIPSLSVAADHYNKVQVS

SEQ ID NO: 197175 - protein, 254 aa, Zea Mays
MAHLRLLFSYLRRNPQRHRLLSLFHFSSDAKSSSASPPPPPIKPVSYAPKPQQQAPPEESAAPTTPDVAPRDQSPLPRRPQQPMPPREWTRQDMRYVKDAAPAISPVSYPSRVAPLPEDRPVGGEVEEVQDGGLQGESERIQMNAARPTRSVFGMHEEDRLPYPTVIPVVKRPQKVAIDLIDAIRLVKTSANEKKRNFVETVEAHVILGVDPRRGDQMVRGALTLPHGTGKYLLKVLEQTKLELPEQMLLVVMS

SEQ ID NO: 197176 - protein, 250 aa, Zea Mays
MAHLRLLFSYLRRNPQRHRLLSLFHFSSDAKSSSASPPPPPIKPVSYAPKPQQQAPPEESAAPTTPDVAPRDQSPLPRRPQQPMPPREWTRQDMRYVKDAAPAISPVSYPSRVAPLPEDRPVGGEVEEVQDGGLQGESERIQMNAARPTRSVFGMHEEDRLPYPTVIPVVKRPQKVAIDLIDAIRLVKTSANEKKRNFVETVEAHVILGVDPRRGDQMVRGALTLPHGTGKVLEQTKLELPEQMLLVVMS

SEQ ID NO: 197177 - protein, 236 aa, Zea Mays
MAHLRLLFSYLRRNPQRHRLLSLFHFSSDAKSSSASPPPPPIKPVSYAPKPQQQAPPEESAAPTTPDVAPRDQSPLPRRPQQPMPPREWTRQDMRYVKDAAPAISPVSYPSRVAPLPEDRPVGGEVEEVQDGGLQGESERIQMNAARPTRSVFGMHEEDRLPYPTVIPVVKRPQKVAIDLIDAIRLVKTSANEKKRNFVETVEAHVILGVDPRRGDQMVRGALTLPHGTGKGSSIC

SEQ ID NO: 197178 - protein, 536 aa, Zea Mays
MPLQVHPLLLLLLVSSLPSCAISSGSSSCAGRDDAAIVAAAFRHVRNFRAPRTKACQPVRALRLPSRNLTGAVSWAALANLSALAAVDLSGNALQGAIPGGFWRAPSLRAVDVSRNQLGGALRVEPNPQLQSLNVSGNRFTGVDGVEGLSGLVALDVSTNRIRAVPRGLRRLTRLKRLDLSSNGMRGWFPGDLPPLGGVRSLNVSYNKFSGVVDTGAVTKFGHSAFVHAGNASLVFSGHSTEPRRPRPSPPHGKSKKNGGSAGTSTESKATRSSKKRKHLSTGLGEDDNPAAAATAFRELARLRHPNILPLLGYCIAGKEKLLLYEYMEKGDLHRWLHELPAGRPDMDDTGSGDIWEAAEVKRSISDWPTRHRIALGVARGLAFLHQGWAGGSGRAAVVHGHLVPTNVLLCDDLEPRISDFGHNNDPPSAATPEGDVYGFGVLVLELMTGQAGWDEASVSWARGIIRDGKGLDIVDPRVRDEAAGAEAEAEREMVECLRVGYLCTAHAPDKRPTMQQVVGVLKDIRPAPPTPGPGS

SEQ ID NO: 197179 - protein, 638 aa, Zea Mays
MPLQVHPLLLLLLVSSLPSCAISSGSSSCAGRDDAAIVAAAFRHVRNFRAPRTKACQPVRALRLPSRNLTGAVSWAALANLSALAAVDLSGNALQGAIPGGFWRAPSLRAVDVSRNQLGGALRVEPNPQLQSLNVSGNRFTGVDGVEGLSGLVALDVSTNRIRAVPRGLRRLTRLKRLDLSSNGMRGWFPGDLPPLGGVRSLNVSYNKFSGVVDTGAVTKFGHSAFVHAGNASLVFSGHSTEPRRPRPSPPHGKSKKNGGSAGTSTESKATRSSKKRKHLSIVAVAVICGVVSLAMLLCLVGCVACGVLKSRQKGGKDDDEKKPQWGEKGEEEKEEDVVVAAARGASAAPVVLFERPLMQLTLANLAAATSGFGRESQLAERGGRSGAAYRAVLPGDQHVVVRVVEGAMAGLGEDDNPAAAATAFRELARLRHPNILPLLGYCIAGKEKLLLYEYMEKGDLHRWLHELPAGRPDMDDTGSGDIWEAAEVKRSISDWPTRHRIALGVARGLAFLHQGWAGGSGRAAVVHGHLVPTNVLLCDDLEPRISDFGHNNDPPSAATPEGDVYGFGVLVLELMTGQAGWDEAAGAEAEAEREMVECLRVGYLCTAHAPDKRPTMQQVVGVLKDIRPAPPTPGPGS

SEQ ID NO: 197180 - protein, 233 aa, Zea Mays
MTKTYAYAGPANCTALHLQGNGALPCLESGTRIVDTLMNTSPICQVLPPGFGIICTHPMFGPESGKHGWGKLPFVFDKVRVADDGDQAATCDRFLSIFEQEGCRMVEMSCAEHDRYAAGSQFITHTIGRVLSQLNLSSTPINTKGYETLLQLTQNTVSDSFDLYYGLFMYNINATEQLDRLEMAFEKVRQMLSGRLHDFIRKQIVERADPSGKLANGRCEVTMNLKSNLWVNI

SEQ ID NO: 197181 - protein, 250 aa, Zea Mays
MASSLRHFAGLGCFSAAASSSASTSFLPGYAPDFCVFVALRPIKPPATAVANPPASPSPLEEEHRQQAAVPWHSDDPPAPSVPAPLRVGIVGFGNFGQFIAGGVQRQGHTVLAASRTDYSAYCAQHGIRFFRSVDALCEEQPDVLLICSSILSTESVVRAIPFHKLRPDTIVADVLSVKEFPRNLLLEVLPPGFGIICTHPMFGPESGKHGWGKLPFVFDKVRVADDGDQAATCDRFLSIFEQETILVGL

SEQ ID NO: 197182 - protein, 69 aa, Zea Mays
MATRSRVRDSIPIFAGEGFYPEVHKHNTSQADSAILALNCSGIVLGTLPVRVSPSKTPVRSRSPRVTSY

SEQ ID NO: 197183 - protein, 75 aa, Zea Mays
MCTPHASLLLSLSKDIDGHSTLIFSVEIAHSWFKWKADSAILALNCSGIVLGTLPVRVSPSKTPVRSRSPRVTSY

SEQ ID NO: 197184 - protein, 59 aa, Zea Mays
MVSRTVYCTNIDKKIAEDEVKQFFEGTCGEVSRLRLLGDYVHSTCIAFVEFVQIVLFSL

SEQ ID NO: 197185 - protein, 222 aa, Zea Mays
MVAVAVDGLIRGADAVPAAEREAVRAAAAEAAAKGGEGESGKEEVREYESDMRKLEELLSKLNPSAEEFVPQSRRRVDGGAPRLSADAPVFVSPAIDYYARHHQLPPPPLLQQQQPMHVLQFVGGVGGVGMGGGGGMDSSSDGSANGQPNRRRRNGFIQGRRRMMGARPRRADREDSVRRTVYVSDVDQHVTEQKLAEVFSTCGQICASGILLSRMQATTTT

SEQ ID NO: 197186 - protein, 247 aa, Zea Mays
MVAVAVDGLIRGADAVPAAEREAVRAAAAEAAAKGGEGESGKEEVREYESDMRKLEELLSKLNPSAEEFVPQSRRRVDGGAPRLSADAPVFVSPAIDYYARHHQLPPPPLLQQQQPMHVLQFVGGVGGVGMGGGGGMDSSSDGSANGQPNRRRRNGFIQGRRRMMGARPRRADREDSVRRTVYVSDVDQHVTEQKLAEVFSTCGQVWLLFMFPCIDTSQDLCFWYTFVKNAGNNNNIAFCPNQVGVG

SEQ ID NO: 197187 - protein, 146 aa, Zea Mays
MEPSFPPPHVSEFLDSKSETDVDVDYNSLYSKQDFLQGEVTEENLAALFINCGQVVDCRMCGDPNSVLRFAFIEFTDEEGARAALNLSGTVLGYYPINVLLSKTAIAPVNETFLPRSDDEREMCARTIYCTNIDKKVWYLHSCYYH

SEQ ID NO: 197188 - protein, 204 aa, Zea Mays
MAPTWMMPRQTAHSVKPAPLPQCLTSRLYMNVGTAAATALSGSSSSGSAEPPEELVARTSAVGCCGRRCARCLHSATRAKEAATDAVTEQKKRRLSGDIANCMAPNSDGDGSLAVWLRMQAGTLPQVPLLVLGFYSSFLELKWSLLMIAVGVSEGYEALTNTFAVVSIATTVFLSLVWKTLPRVCIRPSTWQVCCRSGAFSGQI

SEQ ID NO: 197189 - protein, 138 aa, Zea Mays
MLAASLLALRFLLVGATAAGMGTGTVGVSGGGQLWCVAKNNAEDGALQSAIDWACSVDGGRADCAAIQQGGACYDPPDLQQHASYAFNDYFLRSGGAGSPAACDFSGAAALTALNPSHGSCVFPSSVISSTLAMLVSV

SEQ ID NO: 197190 - protein, 161 aa, Zea Mays
MDRESAMQGSSGGNPGAATQEEWLYPGGWQPEQAVVDGAFLMELLEDAPVADQPPEDVDRLSRVIRSLEAEIDGGGQPPSAVADAGTAEQVLGDVHIGALEDYRLLPYLGSIPSPCVAEAPLELWTEVPAAVGHGMGGWYLDGDGVMVGMSSRQTNSNIAC

SEQ ID NO: 197191 - protein, 51 aa, Zea Mays
MRGCLDFRWGRPLWLVGFRLADTLARRCRGPAVVKETKTEGLNAWDFDSLQ

SEQ ID NO: 197192 - protein, 59 aa, Zea Mays
MAVTNTVPPPAYPSCKGWVAVPSTWEIRPRAPTPLLLILRARLIETATRERVGRAVAAA

SEQ ID NO: 197193 - protein, 309 aa, Zea Mays
MTGCGRRDKHARRENGCIFHTAKGAHHSETVSRANNRRRTGAARARLFLARSCPLAAPESSIHTLGRASLVPEARGRHADAAPEVGVVERRGRRGPLRELRLLLRHGVLRLAAALHRAGCRGQHPEGLRHRRRHAAPAGARRLARAHGEWSRSGGAAAAAAGPGCCRSWGAAAGGAPPVRVRANGRRYRRAAGGVHVLRGARGEEWSGERGRQAAARQLLAVRGLPGRRAGRRDGAAAAGVPPPVSRRLRRRLVARSPDVPALPLPALPEERRQHKAGRRGRRGVIHRRVAAGVSVTHSSILRSWPAHW

SEQ ID NO: 197194 - protein, 77 aa, Zea Mays
MMGMRIAKDSLFICTHPTFCMPILSFIVQSCSTWSPLMLASHGAALNNNLMDCAEAQFSMRKFRATPSNIFPPFENS

SEQ ID NO: 197195 - protein, 99 aa, Zea Mays
MLGCRGYLCQKAASYQLKIVCAQTLLCAIFGRGGTLLILGFCTGQGYPFVCVVYWFRFLMTQLNCCVYAMGKHIQITIHVFFTRPVRLSTYGQAVFKSN

SEQ ID NO: 197196 - protein, 91 aa, Zea Mays
MPRIPLIKFPKRNLKAPSAPVPSQPADQHATLMSRLGAKAEAPSSGGIKNYRFSSDVPSPPSHTAVGGQASLLPKRKPLTEEEIEAIMEHQ

SEQ ID NO: 197197 - protein, 104 aa, Zea Mays
MPRIPLIKFPKRNLKAPSAPVPSQPADQHATLMSRLGAKAEAPSSGGIKNYRFSSDVPSPPSHTAVGGQASLLPKRKPLTEEEIEAIMIQSVLRSGQTMGVFGM

SEQ ID NO: 197198 - protein, 131 aa, Zea Mays
MWLHTHLIQDMLAICRQTFKGAVHYAWTSVPTYPSGVIGFLLCAKEGRAVNFLTPANPIEKIEGAAKAGRELRFYNSEIHRAAFVLPTFVRRELEAYTTPISSAENEKPKESVSEPQKIKILSNNAILTAS

SEQ ID NO: 197199 - protein, 290 aa, Zea Mays
MEVGDARNGSAAAALTKGGADDAARKPLPPCCVKAKARVPETEANCHDTVVSGWFTEPRSRFGKTSKVQYFNNPMWPGEAHSLKVEKILFQGKSPYQEILVFESSTYGNVLVLDGIVQLTDKDECAYQEMVTHLPLCSIPAPKNVLVVGGGDGGVLREIARHDSVETIDICEIDQLVIDVSKEFFPNLSIGFKDPRVRLHVGDAVDFLRNSPEGKYDAIIVDSSDPIGPAQALVEKPFIQTIARALKPDIQRCCALCLDKCSNISQWCHWIFAMCKRRSCSELLDSCESN

SEQ ID NO: 197200 - protein, 277 aa, Zea Mays
MMPPANRSLLAASRPRRGCLKPRPTAMILWFQGGSRNPDRVLYQIDVCAGKTSKVQYFNNPMWPGEAHSLKVEKILFQGKSPYQEILVFESSTYGNVLVLDGIVQLTDKDECAYQEMVTHLPLCSIPAPKNVLVVGGGDGGVLREIARHDSVETIDICEIDQLVIDVSKEFFPNLSIGFKDPRVRLHVGDAVDFLRNSPEGKYDAIIVDSSDPIGPAQALVEKPFIQTIARALKPDIQRCCALCLDKCSNISQWCHWIFAMCKRRSCSELLDSCESN

SEQ ID NO: 197201 - protein, 275 aa, Zea Mays
MEVGDARNGSAAAALTKGGADDAARKPLPPCCVKAKARVPETEANCHDTVVSGWFTEPRSRFGEAHSLKVEKILFQGKSPYQEILVFESSTYGNVLVLDGIVQLTDKDECAYQEMVTHLPLCSIPAPKNVLVVGGGDGGVLREIARHDSVETIDICEIDQLVIDVSKEFFPNLSIGFKDPRVRLHVGDAVDFLRNSPEGKYDAIIVDSSDPIGPAQALVEKPFIQTIARALKPDIQRCCALCLDKCSNISQWCHWIFAMCKRRSCSELLDSCESN

SEQ ID NO: 197202 - protein, 252 aa, Zea Mays
MATIFMAAVVASDLGGISVRLGNHSRSMAVMAWEQVSDLEEVGHFQARPRLPPHGAPHLPAQAIQPHQARLLPALVVPLVRNLQDTPRARGASARPAQLDLIGFHTFDYARHFLSCCGRMLGLSYEFKRGHIRLEYYGRTVSIKILPVGVHMEQLKTVPEVMSGCQQYQFYCDLLAQPEADAIGVAFSDDWIFVGSVSKQLIVVFDFWFVRVGSSWGFLGRLFLRRDGRAGLGRGPSSGRGRRRAKGWRWAC

SEQ ID NO: 197203 - protein, 154 aa, Zea Mays
MEPSAIDLFKEMHCSKKKGFSEAVQKAIGDMEAMVATPVEDGQHVLSSTEVVSNVLPGSSKFLHNAGLLLASKRSNTRTISTRMQELQTQLDTERQEKNGFREEMETLKAQSQASEATIANQSTEIADLKKSLSENNSLLRQILSINRGQMTPP

SEQ ID NO: 197204 - protein, 818 aa, Zea Mays
MEGEAAAAEAVARIRLVRCPKCDKFLPELPAYSVYVCGGCGATLQAKKKNSAQSSDDADNGNVKYLEVLECIPQASARKHGASTTDKSETSKIADVHSKPVYGNHDRIQTGPSPSNLNTSIRDDGKEAKYRHIRYCENGEMGQSLRVRDMSPKSPINHISDNNRSEYHLKQRYSYSTKECPGERNLDGPSKVRGLEKDRAEILRMLDELRDQVQQSCNATNGASGIAPSTAAADSNSSHGTSDRLSQLRQVAPQLHQNGSHHSPSLNVGSPSVSRVYAPLPAQQDCVRYAEPISHARASSYPASLYPWRNFDNYFFGQHDPDPLLSCRHDGFYHQAACSCLHCCHQEFLPIQGNHIGFHDQRAPYLLNNYGAYPVDSPLLGQQRYSARVTNTTLQQNHMRVNVSKKAAQTCEPVAGGAPFTICCNCYEVLQIPRKQSLSGNEYKLRCGSCSHAIIVKLDGNRLNVSEFALCTRLSDGQENDMGTDGQTQDNRSIPAYHLSVGSPASQERDLHSNLSESENNHTPLGTDSEGTSLSRDLPAEDSAVSHVPNLPHHSHSGSSPTEHFGVGSRSTHSEPEKVILLTESSKQTSVRGICVTNKMQSPNNEFDVPEYTDDTLNDQQDTDHPRTTKASDSFLTNLIKRSFKINNGLRNRRARVYVNGFPISDHVVRKAEKLAGSICPGNYWYDYHAGFWGVMGHPCLGMIPPYIPEFNFPMPKNCAGGNTSIFVNGRELHQKDLDLLVTRGLSDSPGRSYVVENSGKVSDEVSGEELYGLGKLAPTVEKMGRGFGMRIPRFIKRQANSIYRGYFNCEESSIPCT

SEQ ID NO: 197205 - protein, 826 aa, Zea Mays
MEGEAAAAEAVARIRLVRCPKCDKFLPELPAYSVYVCGGCGATLQAKKKNSAQSSDDADNGNVKYLEVLECIPQASARKHGASTTDKSETSKIADVHSKPVYGNHDRIQTGPSPSNLNTSIRDDGKEAKYRHIRYCENGEMGQSLRVRDMSPKSPINHISDNNRSEYHLKQRYSYSTKECPGERNLDGPSKVRGLEKDRAEILRMLDELRDQVQQSCNATNGASGIAPSTAAADSNSSHGTSDRLSQLRQVAPQLHQNGSHHSPSLNVGSPSVSRVYAPLPAQQDCVRYAEPISHARASSYPASLYPWRNFDNYFFGQHDPDPLLSCRHDGFYHQAACSCLHCCHQEFLPIQGNHIGFHDQRAPYLLNNYGAYPVDSPLLGQQRYSARVTNTTLQQNHMRVNVSKKAAQTCEPVAGGAPFTICCNCYEVLQIPRKQSLSGNEYKLRCGSCSHAIIVKLDGNRLNVSEFALCTRLSDGQENDMGTDGQTQDNRSIPAYHLSVGSPASQERDLHSNLSESENNHTPLGTDSEGTSLSRDLPAEDSAVSHVPNLPHHSHSGSSPTEHFGVGSRSTHSEPEKVILLTESSKQTSVRGICVTNKMQSPNNEFDVPEYTDDTLNDQQDTDHPRTTKASDSFLTNLIKRSFKINNGLRNRRARVYVNGFPISDHVVRKAEKLAGSICPGNYWYDYHAGFWGVMGHPCLGMIPPYIPEFNFPMPKNCAGGNTSIFVNGRELHQKDLDLLVTRGLSDSPGRSYVVENSGKVSDEVSGEELYGLGKLAPTVEKMGRGFGMRIPRFIKRQANSIYRGYFNCEESSIPCIFLFLLYSD

SEQ ID NO: 197206 - protein, 660 aa, Zea Mays
MGQSLRVRDMSPKSPINHISDNNRSEYHLKQRYSYSTKECPGERNLDGPSKVRGLEKDRAEILRMLDELRDQVQQSCNATNGASGIAPSTAAADSNSSHGTSDRLSQLRQVAPQLHQNGSHHSPSLNVGSPSVSRVYAPLPAQQDCVRYAEPISHARASSYPASLYPWRNFDNYFFGQHDPDPLLSCRHDGFYHQAACSCLHCCHQEFLPIQGNHIGFHDQRAPYLLNNYGAYPVDSPLLGQQRYSARVTNTTLQQNHMRVNVSKKAAQTCEPVAGGAPFTICCNCYEVLQIPRKQSLSGNEYKLRCGSCSHAIIVKLDGNRLNVSEFALCTRLSDGQENDMGTDGQTQDNRSIPAYHLSVGSPASQERDLHSNLSESENNHTPLGTDSEGTSLSRDLPAEDSAVSHVPNLPHHSHSGSSPTEHFGVGSRSTHSEPEKVILLTESSKQTSVRGICVTNKMQSPNNEFDVPEYTDDTLNDQQDTDHPRTTKASDSFLTNLIKRSFKINNGLRNRRARVYVNGFPISDHVVRKAEKLAGSICPGNYWYDYHAGFWGVMGHPCLGMIPPYIPEFNFPMPKNCAGGNTSIFVNGRELHQKDLDLLVTRGLSDSPGRSYVVENSGKVSDEVSGEELYGLGKLAPTGLLVGEKWGRTDLCALHVMT

SEQ ID NO: 197207 - protein, 74 aa, Zea Mays
MPSSYEYVHQSPPNSSSMYGCCRRSALRHGQRGRHRNPRHRWGQHCGGWWRQHAQSARKEDDVCAVHLLLNGGD

SEQ ID NO: 197208 - protein, 79 aa, Zea Mays
MILEQLSNRFSYPGEIWNKTTVIPCHSKETSDLVYCSGWFPFQNVLDFTWVDCNTFGRQDMTQEWNCVQSKFTFAELGI

SEQ ID NO: 197209 - protein, 133 aa, Zea Mays
MNWSALPGSTLPYHPASCQEDNCYSHHLPRPVRGCYFTYGIAGFRLNHDEVCGQLKGPRSTGLQSVRSLIDTDEDPTTRLCSGASQPPGLKFTYAISQNIWHLTEGSCLDNEFITADDAFIIPSKFSFGNYES

SEQ ID NO: 197210 - protein, 1303 aa, Zea Mays
MKCHSVAALWSPLPPSHHVTAAATTPVALFTGAADGTVLHWPLALASASPSPRPSSLLCAHAAAITSLCPLPSPASLLVACTAGVLSLFSTYAPLRCLRRRSLPLWVGSPSLIASLPSITSADPRVAILCHAPDDGHRHVSALVVVDARTLAVLYTVFHGILSVGTPNAIAVSGGGDDAVSVVLADAQGRVQVMPVAEGAAVEVDPPRRLIVSSVASVASAELADERVEAVALSHDGKNVALVLKTRCLLKCVTEGVVLGEVSLLGTSLCKDKNTVDKVCTAGAFFLSSDEWDAHVSDDGVVVRNLVLWSNNGAVTMYRIALGSSYFDSEIVCEIPSNLSMQGEGLEVKFCWSNQHLVRVECCSYKVAGSLLWKPTVAIWCMDQFELSKTVNTQKPPMRKMLGEGGLQGEEFRPEPSHSQYNINRGSEVISQMCSLERYRGTVSSSMLLSEDSYAPYAVVYGFHNGDIEVIRFLNLSPAAAKFGGRGLYPHISERLFLGHKGAILCLAAHYMHAHPDSRNFHRALISGSLDCTVRVWDLDAGTLLSVMHHHVGSVKQIVLPPPWTYHPWDDCFLSVGEDGLVALVSLQTMRVERMFPGHPDYASLVAWDGVKGYIACLCKNLHSCNDAGSGLYIWDLKTGARERVINGTASQLAFEHFCRGISKNTVTGSILGGTTSASSLLVPIFEDMSHIRSHADKNGHDISSVSTNLHNGCTDSVTVNAPTTYDFKGKTPAPDEAHEFHGDNSVYNSGKAVSSHSIHNKKIKCPIKCSCPYPGIASLRFDLTAIMSTQGMTNSNSDRHLKDHLHSENPKEMLQPGTLDSPSRVHEMDSPSRESLEGCLLRFSLCFLHLWDVDCELDKLLVDEMQVCKPEGCHIATGVVGDKGSFTLMFPGKEATLELWKSSAEFCAMRSLSIISLAQLMIKLSRSCTNSSSALAAFYTRHFAEKVPDIKPPSLQLLVSFWQHPSEHVRMAARSLFHCAAPRSIPQPLRVNKNKVVNAPLSSSDNMNVLICAVQTASVSNHGELKEDDENVDKDDIDTANMILWLESFENQEWLSWIGGTSQDAVASNIIVAAALVVWYPSVVKAKLSSLVVSQLIKLVMSMNDRYSSTAAELLAEGMENTWKACLGAEITHFMSDILFQIECLSTAPSSNAINKTAVAITMREALVGTLLPSLAMADVTGFFGVIESQIWATSSDSPVHVASIKTIIRVVRGAPKSLVPYLDKAINYILHTMDPSNLIMRKACIISSMMALREMARVFPMVALNESMTKLAVGDAIGEIYDGTIRVYDIERVWLPSLRTD

SEQ ID NO: 197211 - protein, 1403 aa, Zea Mays
MKCHSVAALWSPLPPSHHVTAAATTPVALFTGAADGTVLHWPLALASASPSPRPSSLLCAHAAAITSLCPLPSPASLLVACTAGVLSLFSTYAPLRCLRRRSLPLWVGSPSLIASLPSITSADPRVAILCHAPDDGHRHVSALVVVDARTLAVLYTVFHGILSVGTPNAIAVSGGGDDAVSVVLADAQGRVQVMPVAEGAAVEVDPPRRLIVSSVASVASAELADERVEAVALSHDGKNVALVLKTRCLLKCVTEGVVLGEVSLLGTSLCKDKNTVDKVCTAGAFFLSSDEWDAHVSDDGVVVRNLVLWSNNGAVTMYRIALGSSYFDSEIVCEIPSNLSMQGEGLEVKFCWSNQHLVRVECCSYKVAGSLLWKPTVAIWCMDQFELSKTVNTQKPPMRKMLGEGGLQGEEFRPEPSHSQYNINRGSEVISQMCSLERYRGTVSSSMLLSEDSYAPYAVVYGFHNGDIEVIRFLNLSPAAAKFGGRGLYPHISERLFLGHKGAILCLAAHYMHAHPDSRNFHRALISGSLDCTVRVWDLDAGTLLSVMHHHVGSVKQIVLPPPWTYHPWDDCFLSVGEDGLVALVSLQTMRVERMFPGHPDYASLVAWDGVKGYIACLCKNLHSCNDAGSGLYIWDLKTGARERVINGTASQLAFEHFCRGISKNTVTGSILGGTTSASSLLVPIFEDMSHIRSHADKNGHDISSVSTNLHNGCTDSVTVNAPTTYDFKGKTPAPDEAHEFHGDNSVYNSGKAVSSHSIHNKKIKCPIKCSCPYPGIASLRFDLTAIMSTQGMTNSNSDRHLKDHLHSENPKEMLQPGTLDSPSRVHEMDSPSRESLEGCLLRFSLCFLHLWDVDCELDKLLVDEMQVCKPEGCHIATGVVGDKGSFTLMFPGKEATLELWKSSAEFCAMRSLSIISLAQLMIKLSRSCTNSSSALAAFYTRHFAEKVPDIKPPSLQLLVSFWQHPSEHVRMAARSLFHCAAPRSIPQPLRVNKNKVVNAPLSSSDNMNVLICAVQTASVSNHGELKEDDENVDKDDIDTANMILWLESFENQEWLSWIGGTSQDAVASNIIVAAALVVWYPSVVKAKLSSLVVSQLIKLVMSMNDRYSSTAAELLAEGMENTWKACLGAEITHFMSDILFQIECLSTAPSSNAINKTAVAITMREALVGTLLPSLAMADVTGFFGVIESQIWATSSDSPVHVASIKTIIRVVRGAPKSLVPYLDKAINYILHTMDPSNLIMRKACIISSMMALREMARVFPMVALNESMTKLAVGDAIGEIYDGTIRVYDIESVTKIRILDASGPPGLPSLLAGSSNRTTTILISVLSFSPDGEGLVAFSENGLMIRWWSLGSAWWERLSRSLTPIQCTKLIYVPPWEGFSPNSARLSIISSILDDKPGRRN

SEQ ID NO: 197212 - protein, 1427 aa, Zea Mays
MKCHSVAALWSPLPPSHHVTAAATTPVALFTGAADGTVLHWPLALASASPSPRPSSLLCAHAAAITSLCPLPSPASLLVACTAGVLSLFSTYAPLRCLRRRSLPLWVGSPSLIASLPSITSADPRVAILCHAPDDGHRHVSALVVVDARTLAVLYTVFHGILSVGTPNAIAVSGGGDDAVSVVLADAQGRVQVMPVAEGAAVEVDPPRRLIVSSVASVASAELADERVEAVALSHDGKNVALVLKTRCLLKCVTEGVVLGEVSLLGTSLCKDKNTVDKVCTAGAFFLSSDEWDAHVSDDGVVVRNLVLWSNNGAVTMYRIALGSSYFDSEIVCEIPSNLSMQGEGLEVKFCWSNQHLVRVECCSYKVAGSLLWKPTVAIWCMDQFELSKTVNTQKPPMRKMLGEGGLQGEEFRPEPSHSQYNINRGSEVISQMCSLERYRGTVSSSMLLSEDSYAPYAVVYGFHNGDIEVIRFLNLSPAAAKFGGRGLYPHISERLFLGHKGAILCLAAHYMHAHPDSRNFHRALISGSLDCTVRVWDLDAGTLLSVMHHHVGSVKQIVLPPPWTYHPWDDCFLSVGEDGLVALVSLQTMRVERMFPGHPDYASLVAWDGVKGYIACLCKNLHSCNDAGSGLYIWDLKTGARERVINGTASQLAFEHFCRGISKNTVTGSILGGTTSASSLLVPIFEDMSHIRSHADKNGHDISSVSTNLHNGCTDSVTVNAPTTYDFKGKTPAPDEAHEFHGDNSVYNSGKAVSSHSIHNKKIKCPIKCSCPYPGIASLRFDLTAIMSTQGMTNSNSDRHLKDHLHSENPKEMLQPGTLDSPSRVHEMDSPSRESLEGCLLRFSLCFLHLWDVDCELDKLLVDEMQVCKPEGCHIATGVVGDKGSFTLMFPGKEATLELWKSSAEFCAMRSLSIISLAQLMIKLSRSCTNSSSALAAFYTRHFAEKVPDIKPPSLQLLVSFWQHPSEHVRMAARSLFHCAAPRSIPQPLRVNKNKVVNAPLSSSDNMNVLICAVQTASVSNHGELKEDDENVDKDDIDTANMILWLESFENQEWLSWIGGTSQDAVASNIIVAAALVVWYPSVVKAKLSSLVVSQLIKLVMSMNDRYSSTAAELLAEGMENTWKACLGAEITHFMSDILFQIECLSTAPSSNAINKTAVAITMREALVGTLLPSLAMADVTGFFGVIESQIWATSSDSPVHVASIKTIIRVVRGAPKSLVPYLDKAINYILHTMDPSNLIMRKACIISSMMALREMARVFPMVALNESMTKLAVGDAIGEIYDGTIRVYDIESVTKIRILDASGPPGLPSLLAGSSNRTTTILISVLSFSPDGEGLVAFSENGLMIRWWSLGSAWWERLSRSLTPIQCTKLIYVPPWEGFSPNSARLSIISSILDDKPGRSESFFVAAAAIASIFWTQLLQRIRAM

SEQ ID NO: 197213 - protein, 148 aa, Zea Mays
MRSRPAAPSCWSPAEPPSVPDAASPWCSPLFPPALVDLALPPCSRFLHATSHGRQPSAMDAEPPLFSAFLCSPCVPVRVRCLYKCSRGVSCRGQPFWRRRMFDVLRIPSTTPSTIGEDSFLLCHFIDRRLFANVNCVYVPMCVEERNP

SEQ ID NO: 197214 - protein, 67 aa, Zea Mays
MPRLGQVSSSVSACPQPSSTVHGPPAASRVSPPRCHWSGGTSSPAKLYHGRRHSRALRPASRPGRGG

SEQ ID NO: 197215 - protein, 442 aa, Zea Mays
MVGAMRGGAMELEDRLATLPRFRGDHDDDGKERRTGTVWTATAHIITAVIGSGVLSLAWAMAQLGWVAGPLTLVLFAAITFYTCGLLADCYRVGDPVTGKRNYTYTEAVKSNLGGWAINKSNCFHWHGHDADCSQNTSAYIIGFGVVQVIFSQLHNFHKLWWLSIIAAIMSFSYSAIAVGLSLAQIVMGPTGKTTMTGTLVGVDVDAAQKVWMTFQALGNVAFAYSYAIILIEIQDTLRSPPAENKTMRRATMMGISTTTGFYMLCGCLGYAAFGNAASGNILTGFGFYEPFWLVDFANACIVVHLVGGFQVFCQPLFAAVEGAVAARYPGSTREYGAAGLNVFRLVWRTAFVAVITLLAILMPFFNSILGILGSIAFWPLTVFFPVEMYIRQRQVRRFSTKWIALQSLSFVCFLVTAASCAASVQGVVDSLKTYVPFKTRS

SEQ ID NO: 197216 - protein, 158 aa, Zea Mays
MSFGSPQSDGDSSKKPYFTLGKNLVLGRPGDSPSPRASPRPPSPRAPPSPRLLSRHLREHLRCRISSAAISTSTSAASPTYSPTLSPFPRQGSVATRELNFTSTFVDLPPPSAPSRSVSAQSLNPLVLIHLIWMDKKPQNQAREKVAVGESVSKAMLD

SEQ ID NO: 197217 - protein, 212 aa, Zea Mays
MSFGSPQSDGDSSKKPYFTLGKNLVLGRPGDSPSPRASPRPPSPRAPPSPRLLSRHLREHLRCRISSAAISTSTSAASPTYSPTLSPFPRQGSVATRELNFTSTFVDLPPPSAPSRSVSAQSLNPLVLIHLIWMDKKPQNQAREKVAVGESVELKGMDGLTTMNKSYALELFVSATNREMFLTTTEHDVREIWLKRKIRLLRGSDAWTEQMI

SEQ ID NO: 197218 - protein, 112 aa, Zea Mays
MSFGSPQSDGDSSKKPYFTLGKNLVLGRPGDSPSPRASPRPPSPRAPPSPRLLSRHLREHLRCRISSAAISTSTSAASPTYSPTLSPFPRQAPSRSVSAQSLNPLVLIHLIW

SEQ ID NO: 197219 - protein, 96 aa, Zea Mays
MSFGSPQSDGDSSKKPYFTLGKNLVLGRPGDSPSPRASPRPPSPRAPPSPRLLSRHLREHLRCRISSAAISTSTSAASPTYSPTLSPFPRQVLNKV

SEQ ID NO: 197220 - protein, 67 aa, Zea Mays
MVEYDGVMVPAYSFDHYAIAPDAEDRVGRVFNNKAERVKQELISTDVRRDMRAGQMRWLPDVVKNSS

SEQ ID NO: 197221 - protein, 121 aa, Zea Mays
MAPQPAEQLVELPWRSTPAAARALLPASGSEAPWRVRPAKLPRQTAPPLLAGAHRARPALCSSLRIASQAPWPVPCSRRGLPARQYLFSHLGWLGLKFQRLALLSWFSDGRREPGRGDVVA

SEQ ID NO: 197222 - protein, 215 aa, Zea Mays
MGGVEGSSLIPWLKNLSSSSSFASSSKFPQLHHLYFNGGSISAPVTPPSSSPTRTPRIKTDWENPSVQPPWAGANYASLPNSQPPSPGHQVAPDPAWLAGFQISSAGPSSPTYSLVAPNPFGIFKETIVSTSRMCTPGQSGTCSPVMGGAPIHHDVQMADGAPDDFAFGSSSNGNNESPGLVKAWEGERIHEECASDEHELELTLGSSKTRADPS

SEQ ID NO: 197223 - protein, 274 aa, Zea Mays
MGCKPLATERPDPIGRSASPSPCSSYQPSPRASYNPSAASSSFPSSGSSSHITLGGSNFMGGVEGSSLIPWLKNLSSSSSFASSSKFPQLHHLYFNGGSISAPVTPPSSSPTRTPRIKTDWENPSVQPPWAGANYASLPNSQPPSPGHQVAPDPAWLAGFQISSAGPSSPTYSLVAPNPFGIFKETIVSTSRMCTPGQSGTCSPVMGGAPIHHDVQMADGAPDDFAFGSSSNGNNESPGLVKAWEGERIHEECASDEHELELTLGSSKTRADPS

SEQ ID NO: 197224 - protein, 86 aa, Zea Mays
MPKITPGKKLKNKYLGLRENCISRPAAAWPQMVRTINSSHWPSRRGKEYGFSVTKFKLVHNQHANFENEKFTTNNKPKSGVLRPQI

SEQ ID NO: 197225 - protein, 178 aa, Zea Mays
MVFDLARARRADAVLCSLSLALGFRNRCRVPGVCLFFFVMLVQVNFSLVHFLPCLLWFWSDQQWGHAGRGRFGRRPGSDRRGKAYKEVAEEGGVCGVGLAGRADLMAIVRSEPEVVDFLGDRRRRRAEGSCGRGVATRPATCPTLPHADISVAHPCSAVVSVAHPCLVIFYPIYISDV

SEQ ID NO: 197226 - protein, 76 aa, Zea Mays
MERLLKVFIYHDGEQTYFPFPRVERFYVSQGSFMKLETNQNFVVIKLLVLVHVLIETETTVGGDDMMLRFTLETAC

SEQ ID NO: 197227 - protein, 167 aa, Zea Mays
MRRQGYSFLNLSSTWWRGIYQMPALHGCHTCPTSIYTTLAHNLAQISPLSMTENIKQLDRDPPARSSQTAKTGYFLVESGTSSTYALHPIFIQIHRQVHLLQLPIAALNSSIMKPAAPFHFSLFKSLHLTILHDNRPVLFNQSYSLDVALLLWYINPWLKTYRTKIV

SEQ ID NO: 197228 - protein, 291 aa, Zea Mays
MQSLLAGIPAGGAAAAAAVGGLVAAAALAERADQKNRLNLPPAVPGLPIIGNLHQLKEKKPHQTFARWSEEYGPIYSIRTGASSVVVVNSAEVAKEAMVAKYSSINTRKLPKALSVLTRDKKIVAMSDQGELYKMVKRYIMVSMLGAAAQKQFRDTRNTMIDNMLSTFHALVADDPKAPLNFRDVFQNELFGLSMTQALSEDVSSVYVEEFGKALSREEIYQTAVADMMMCAIEVDWRDFFPYLGWIPNRSFETRVLTTEARRTALMQALINQQKERIARGEDVVRGLPAG

SEQ ID NO: 197229 - protein, 347 aa, Zea Mays
MMVDNMLNTFHTLLMDDPNSPLNFREVFKNELFRLSLVQALGEDVSSIYVEEYGKVISKEEIYKATVVDMMMCAIEVDWRDFFPYLSWIPNRTFETRVLTTEARRTTVMQALIKQQKERIARGETRISYLDFLLAENTLTDEQLLMLVWEAVIEAADTTLVTTEWAMYEIAKHPEKQEYLYQEIQKVCGNKTVTEDHLPELPYLNAVFHETMRRHSPVPLVPPRLVHENTNLAGYEVPAGTEIIINLYGCNMNKNDWAEPEEWKPERFLDGRFEAVDMHKTMAFGAGRRACAGSMQAMNISCTAIGRFVQEFAWRLEEGDEDKVDTIQLTTNRLYPLHVYLAPRGRK

SEQ ID NO: 197230 - protein, 160 aa, Zea Mays
MASSSSSPAPALAGEALRQKRILSSKLYLEVPSSKAPVVYSPAYDISFLGLEKLHPFESAKWGRICRYLTREGYLDKKQMVEPLEACKEDLLVVHTEAYLNSLKCSFRVSSIVEVPPVSLVPNWIVHRKLLHPFRKQQMKGVDFVHTLTSLSASSLLLSV

SEQ ID NO: 197231 - protein, 159 aa, Zea Mays
MASSSSSPAPALAGEALRQKRILSSKLYLEVPSSKAPVVYSPAYDISFLGLEKLHPFESAKWGRICRYLTREGYLDKKQMVEPLEACKEDLLVVHTEAYLNSLKCSFRVSSIVEVPPVSLVPNWIVHRKLLHPFRKQMKGVDFVHTLTSLSASSLLLSV

SEQ ID NO: 197232 - protein, 282 aa, Zea Mays
MASSSSSPAPALAGEALRQKRILSSKLYLEVPSSKAPVVYSPAYDISFLGLEKLHPFESAKWGRICRYLTREGYLDKKQMVEPLEACKEDLLVVHTEAYLNSLKCSFRVSSIVEVPPVSLVPNWIVHRKLLHPFRKQVGGSILSAKLAFERGWAINVGGGFHHCSADEGGGFCAYADISLCIQFAFVRLNISSVLIIDLDAHQGNGHEKDFANDGRVYILDMYNAGIYPFDFTAKQYIDQKVELVSGSKTDEYLEQLDKALEVHLHTCRIFCENKYLHWVLG

SEQ ID NO: 197233 - protein, 218 aa, Zea Mays
MASSSSSPAPALAGEALRQKRILSSKLYLEVPSSKAPVVYSPAYDISFLGLEKLHPFESAKWGRICRYLTREGYLDKKQMVEPLEACKEDLLVVHTEAYLNSLKCSFRVSSIVEVPPVSLVPNWIVHRKLLHPFRKQVGGSILSAKLAFERGWAINVGGGFHHCSADEGGGFCAYADISLCIQFAFVRLNISSVLIIDLDAHQGNGHEKDFANDGFHC

SEQ ID NO: 197234 - protein, 194 aa, Zea Mays
MALVLHSGAGNKNAFKALIAAEYSGVKVELTKDFEMGVSNKTPEFLKMNPLGKVPVLETPDGPVFESNAIARYVARLKDDNPLFGSSRIEQAHVEQWMDFAATEVDPGVGWYLYPRLGYIPYAHTTEETAIASLKRSLGALNTHLALNTYLVGHSVTLADIVLTCNLYHGIARILTKSFTSDFPHVERSQRQRM

SEQ ID NO: 197235 - protein, 418 aa, Zea Mays
MMYDRACGNLAHASKKIQLFSSDCCEDVNKVQDALQREEVLKQTVPDEKNKHLEAIGAVEMAKNAFTHETYSKHQAENAKAVDALLSTGKSCRRYSKHEIELATDYFSDAKKIGEGGYGNVYRCTLDHTEVAVKVVEQDSINKIDEFLREVEILGQLHHPNLVLLLGFCPEIGCLVYEYMENGSLEDLLINDKGQPLHWFLRFQIIFDVACGLAFLHGTKPEPIVHRDLKPGNILLDKNYVSKIGDVGFAKPISDLVPEGLTEYRDTVIAGTLYYMDPEYQLTGTVRPKSDLYALGIIILQLLTGKRPPGLVNSVEEGIKRGILSDILDKSQPDWPIAEAEMLAKLGLWCTALKCRDRPNLESVVLPELENILSRVTVSLKLENILAPSHFFCPILQMGTPMNTGQSKLGSKNTRYPQ

SEQ ID NO: 197236 - protein, 842 aa, Zea Mays
MDATTKRRHQPGGAQPTRRKVVEEPFHTAPPTPAAASPSRLVGAIVEKGYSAAAPSSAPRPSVLPFPVARHRSHGPHWVPLVKDAPKDETADNDDEMDMDETDYHPVAAAAAGPVRRKEKKGMDFSRWREFVGDAPPKRRQGKPVQAKKQSDQRIDAGAVASKVGGVAAEGRGLEGGAMRLDSGNASEGPGPVLLVSDVVSKKPMSQVESRDELVNTSEARNLASQAESMDLDGRESSMEAEISAENMARLAGMSAGEIAEAQADIVNKLNPALLEMLRRRGREKSGGTKDVGKDKGLKNSGLQKNKRATPGDWLTAGEHTGHSWKVWSERVERIRSCRFTLDGDILGFQSSHEQQDGKKMPSESVAERDFLRTEGDPAAVGYTINEAVALTRSMVPGQRVLALQLLASILNRALQSLHKTDLMDNVKGMNSKDNIDDWQAVWSYALGPEPELVLSLRMALDDNHDSVVLSCTKVVNVMLSCEFNESYFEFSEKVGNGKDICTAPVFRSKPDLDGGFLEGGFWKYNTKPSNILPHCGDNDEDEADEKHTIQDDVVVSGQDVAAGFVRMGILPRICFLLEMDPSPALEDYLVSVLVALARHSPQSADAILNCPRLIQSVTKLLINQGSMEIRSSQIRGVTLLKVLSKYNRQTCLNFVNHGVFQQALWHWYRKAGTIEDWVRSGKEKCKLSSAMMVEQLRFWRTCISYGFCIAHFADFFPVLCLWLSRPDFKKLSEHNVLVEFSSVARESYLVLAALAQRLPLLHSVEQLANQDLGVSASYIETCSWSHVVPMVDLALSWLHLNDIPYACLIQFWKEYHQMSLLRIKVTACPGYLILSPKLAWA

SEQ ID NO: 197237 - protein, 374 aa, Zea Mays
MKSKKSVHGSSCKKAKLFDGLIGRHGSEIDPCYKLFLEHLSKDRNTYVLDVPKGDHGLPFSVRYEEDYTSYGNTKSRSSPNFPNHSRRTSWGIPDGKQPDVKAVKAASRNMCCSFSPKRSYVKKKTTTSLVDESYELFLSLVKFKDGFMVIEPEPGVTIVYEREEDMPAGYDEWRTGSSTNELSLVSPLENTEGDYTMQRYDYGLAPANKISSEHEMAAPSSENIAGQDIICTDEHGLVLYAEPSDLNACEDEQATPLAISYGGSSTFDEKLNAVLSQPYDQNEYEELWRKATDRKPVSRQRHLRSASKRYVTEAIGLSYLDYYPDLAVQIKSSDRDKRLSLLRRFFFWLEQNAVKRFHPISEKICFLLMATVV

SEQ ID NO: 197238 - protein, 91 aa, Zea Mays
MAPSSDCPCSLFLQLAPVRLVVGRVGRRPHLTLRRRASLAALASTGAHALLLFPWSLARMLSPCSMPPASASLPTSPSRPRSSFLPLVFEF

SEQ ID NO: 197239 - protein, 208 aa, Zea Mays
MVTRRLPNPKQRWCPYASASTQYSPFPASTSLVPRPLIPLQATPPVPPLLVGQAAAAAAGGTYRLALRIQRRLIPPNHPRIRDFVYRYCLRRAPLSCVRAQDAVGHCQPNRISASSQCRHISYSYAPFPSVTARRKGVFREDIAQLMGSADITVKMSYLKVRIIQRSVVSREYEHSRDAIFEWYFQTVATNHHGEDASSVAVRIILVF

SEQ ID NO: 197240 - protein, 172 aa, Zea Mays
MVTRRLPNPKQRWCPYASASTQYSPFPASTSLVPRPLIPLQATPPVPPLLVGQAAAAAAGGTYRLALRIQRRLIPPNHPRIRDFVYRYCLRRAPLSCVRAQDAVGHCQPNRISASSQCRHISYSYAPFPSVTARRKGVFREDIAQLMVCLMCLGLIIKKRASAEEIVTAAAV

SEQ ID NO: 197241 - protein, 174 aa, Zea Mays
MVTRRLPNPKQRWCPYASASTQYSPFPASTSLVPRPLIPLQATPPVPPLLVGQAAAAAAGGTYRLALRIQRRLIPPNHPRIRDFVYRYCLRRAPLSCVRAQDAVGHCQPNRISASSQCRHISYSYAPFPSVTARRKGVFREDIAQLMVGSTLFKILLMTSDMWTVAIQVLLYHQ

SEQ ID NO: 197242 - protein, 151 aa, Zea Mays
MVTRRLPNPKQRWCPYASASTQYSPFPASTSLVPRPLIPLQATPPVPPLLVGQAAAAAAGGTYRLALRIQRRLIPPNHPRIRDFVYRYCLRRAPLSCVRAQDAVGHCQPNRISASSQCRHISYSYAPFPSVTARRKGVFREDIAQLMVSDV

SEQ ID NO: 197243 - protein, 76 aa, Zea Mays
MVNLVIVLNTELDHALDEFGKVRAEVAELRAECVARHYLDGGSPTPIGIQHPYRSPPRGRFEYGTPDCRTQIDLDP

SEQ ID NO: 197244 - protein, 56 aa, Zea Mays
MGFLIQKSKQSKVMIPLRPEWTRHSKRVPLSGTKNGEMVNKSRSGTEQTESPVCVD

SEQ ID NO: 197245 - protein, 221 aa, Zea Mays
MGFMHYSPSQSATAVTNFMGTAFLLALLGGFLSDAFFTTYTIYIASAFIELMGLVILTVQARTQSLMPPQCAKPGAPCEPVSGAKKAMLFAGLYLTALGVGGIKGSLPSHGAEQFDEHAARGRKGRSTFFNYFVFCLSCGALVAVTFAVWVEDNKGWQWGFGISTIAILLSIPLFVAGSSRYRNKVPTGSPLTTIAKVLIAAALARRGCAPSSSNGAVIDR

SEQ ID NO: 197246 - protein, 83 aa, Zea Mays
MPPNEYYEYFGPDYTLHVAPSNMENKNTRHQLDDIKSKLLDNLSKLRHAPSVQFQERPPEAELPEMKTKRILMKDMMLILMWR

SEQ ID NO: 197247 - protein, 422 aa, Zea Mays
MDASAGGGGNSLPTTGADGSKRRVCYFYDAEVGNYYYGQGHPMKPHRIRMTHALLGRYGLLDQMQVFRPHPARDRDLCRFHADDYVSFLRSVTPETQQDQIRALKRFNVGEDCPVFDGLYSFCQTYAGGSVGGAVKLNHGHDIAINWAGGLHHAKKCEASGFCYVNDIVLAILELLKYHQRVLYVDIDIHHGDGVEEAFYTTDRVMTVSFHKFGDYFPGTGDIRDVGHSKGKYYSLNVPLDDGIDDESYQSLFKPIMGKVMEVFNPGAVVLQCGADSLSGDRLGCFNLSIKGHAECVRFMRSFNVPLLLLGGGGYTIRNVARCWCYETGVALGHELTDKMPPNEYYEYFGPDYTLHVAPSNMENKNTRHQLDDIKSKLLDNLSKLRHAPSVQFQERPPEAELPEMKTKRILMKDMMLILMWR

SEQ ID NO: 197248 - protein, 349 aa, Zea Mays
MDASAGGGGNSLPTTGADGSKRRVCYFYDAEVGNYYYGQGHPMKPHRIRMTHALLGRYGLLDQMQVFRPHPARDRDLCRFHADDYVSFLRSVTPETQQDQIRALKRFNVGEDCPVFDGLYSFCQTYAGGSVGGAVKLNHGHDIAINWAGGLHHAKKCEASGFCYVNDIVLAILELLKYHQRVLYVDIDIHHGDGVEEAFYTTDRVMTVSFHKFGDYFPGTGDIRDVGHSKGKYYSLNVPLDDGIDDESYQSLFKPIMGKVMEVFNPGAVVLQCGADSLSGDRLGCFNLSIKGHAECVRFMRSFNVPLLLLGGGGYTIRNVARCWCYEITLYMSLQVTWRIKTHGINWMT

SEQ ID NO: 197249 - protein, 455 aa, Zea Mays
MDASAGGGGNSLPTTGADGSKRRVCYFYDAEVGNYYYGQGHPMKPHRIRMTHALLGRYGLLDQMQVFRPHPARDRDLCRFHADDYVSFLRSVTPETQQDQIRALKRFNVGEDCPVFDGLYSFCQTYAGGSVGGAVKLNHGHDIAINWAGGLHHAKKCEASGFCYVNDIVLAILELLKYHQRVLYVDIDIHHGDGVEEAFYTTDRVMTVSFHKFGDYFPGTGDIRDVGHSKGKYYSLNVPLDDGIDDESYQSLFKPIMGKVMEVFNPGAVVLQCGADSLSGDRLGCFNLSIKGHAECVRFMRSFNVPLLLLGGGGYTIRNVARCWCYETGVALGHELTDKMPPNEYYEYFGPDYTLHVAPSNMENKNTRHQLDDIKSKLLDNLSKLRHAPSVQFQERPPEAELPEQDEDKENPDERHDADSDVEMNDAKPLQDSGRAPAIALKKRTWLLSSSPTKQ

SEQ ID NO: 197250 - protein, 63 aa, Zea Mays
MFLESLAPLSLSCSLRLSILLADAFSLSDSFHLRATVLPPRSHSLFIAMIFFGLRSTAPTHSS

SEQ ID NO: 197251 - protein, 93 aa, Zea Mays
MLGFCVFLYSLRSSLLDAEDGSSGESLQFSSLVFMMRCRDVSWYSVRDCVNCSCFALMVLPLSLTRATSRIGCCQVVAVNWFMRCSCSMLCPS

SEQ ID NO: 197252 - protein, 88 aa, Zea Mays
MAPASSLVAGSSTHSVASATSSGYDALSPSDPAMILVPRGAQVAPHATLLASFVAPSAHGGVGVSKCLFVMFSIDECGMSCEMSPPSS

SEQ ID NO: 197253 - protein, 79 aa, Zea Mays
MESDEEIRRVPEVGLELLTSPSTSGREATAAAAAAGTSSASQAASASRRGRSPADKEHRRLKRCVHASSNTSLGDPLRA

SEQ ID NO: 197254 - protein, 102 aa, Zea Mays
MQDQTTTSSLLSSSERSSSSAPETGETREEAMESDEEIRRVPEVGLELLTSPSTSGREATAAAAAAGTSSASQAASASRRGRSPADKEHRRLKRHGKGRRRT

SEQ ID NO: 197255 - protein, 252 aa, Zea Mays
MSNMRDVEGAVCKRSWMFTTRPHAHTHTKTVDHVEHTQQIVQEGDSADREKAHTINKKSIPCRLPTAGRLPTSRDPRGRARRNMQDQTTTSSLLSSSERSSSSAPETGETREEAMESDEEIRRVPEVGLELLTSPSTSGREATAAAAAAGTSSASQAASASRRGRSPADKEHRRLKRLLRNRVSAQQARERKKAYLSELEVRVKELEKRNSELEEKLSTLQNENQMLRQILKNTTVNNRRGPGSSSAGGDSQ

SEQ ID NO: 197256 - protein, 332 aa, Zea Mays
MATVLPLAAASASATPRTCISGGPVPARFLGTCMRLRIHIPPRGVACALRRRPTKYKTKIQSEEDVVAAEDVMDDDDDEDGALEALFKQLEEDLDNDDLSVDDNDISEEDMARFEKELAEAIEDVSGVDDSAGDSLLSSGDYGIDEQLDGSERAELKTWQLRRLARALKIGRRKTSIKNLAGELGLDRGLVIEMLRNPPPKLLLMSDSLPDEVPSKSEVKEIETPSTTTVDEVDTSEIKPQLELPVHVMSAEWSARKRLKKVQLETLERVYLRSKRPTNTMVSSIVQVTNLPRKTIVKWFEDRREQDGVPDHRAAFKRSLSEIVGSGGPSIK

SEQ ID NO: 197257 - protein, 182 aa, Zea Mays
MATVLPLAAASASATPRTCISGGPVPARFLGTCMRLRIHIPPRGVACALRRRPTKYKTKIQSEEDVVAAEDVMDDDDDEDGALEALFKQLEEDLDNDDLSVDDNDISEEDMARFEKELAEAIEDVSGVDDSAGDSLLSSGDYGIDEQLDGSERAELKTWQLRRLARALKIGRRKTSSLLNLK

SEQ ID NO: 197258 - protein, 64 aa, Zea Mays
MDFRSFYIFNFIRLSLSNKYSDYIVTFISIHSVIIYVVFFGACMRCTRRCPLKPSVTEVVLEEY

SEQ ID NO: 197259 - protein, 57 aa, Zea Mays
MLLLYVVLGIEIYITHVHTFVISLLFTVHDKIIMLMGTWRTTRENSATTRVVWDALG

SEQ ID NO: 197260 - protein, 123 aa, Zea Mays
MFLDGEFLTSPATPTVARLHHVQLPGKPPAITCPSVRSPCFLAPAASLSLLVSKLCSSKLLCSSSPTARSQPRRIPRLHHSITGALVVVELLARRDVIVVFSPVMLDPQLLRVIVFDNPQPLL

SEQ ID NO: 197261 - protein, 85 aa, Zea Mays
MFLDGEFLTSPATPTVARLHHVQLPGKPPAITCPSVRSPCFLAPAASLSLLVSKLCSSKLLCSSSPTARSQPVRSCVLQHCSTAV

SEQ ID NO: 197262 - protein, 343 aa, Zea Mays
MWSLTKISGCEEEKITFLQELKDIRMLCNEPWLTAGDFNMIYQASDKNNDNLDRDMMGRFWRFLNKFDLKEIPLLGRKYTWSNERSSPTLVRLDRAFCCLEWENIFPDSVLQSSASNVSDHCPLILGLKLQTKGKRRFHFESFWAKVPGFLEVVQRNWEAHVQSTSAVERLFLKLQRLSKDLQKWGQRKVGNIKLHIEMAKEIIHRLEIARDSRDLSNREEWLKKKLKLHLLGLASLERTIARLHSRILYLKEGDANTFFFHHQARFRKKKNFIAKLHTETSMAITQEEKQAAVLKFYEKALGTAESRPLTLNLSEIGMQQHDLASVDNPFTEEGLWAAVKDL

SEQ ID NO: 197263 - protein, 72 aa, Zea Mays
MAERRKERKSASRERETREEEKEIEGGGVLSTTKGGRQQGKASTRPRVCRCMRRRCTVLRVPTSSSNGMLNN

SEQ ID NO: 197264 - protein, 493 aa, Zea Mays
MASSGLAYPDRFYAAAAYAGFGAGGATSSSTACTAGDASADAFANFGDQATVGPCNVPKPRAWNPVEQSKWASWHGLGSMPSAEAMRLFVKILEEEDPGWYSRVPEFNSEPIVDIQMHKPKEEPQIVPASTNGTSISEPKIISENGSSVETQDIDVILEGLSTVSSLDEWTPLAISGHRPKPRYEDKMYIFGGNHNGCYLSDLQALDLKNLTWSKIDAKLEAESSDSAKTSQIAPCAGHSLFFSIAGHTKDPSEGVTVKEFDPHTCTWSIVRTYGKSPVSRGGQTVTLVGTTLVLFGGEDAKRCLLNDLHILDLETMTWDDVDAIGTPPPRSDHAAACHADRYLLIFGGGSHATCFNDLHVLDLQTMEWSRPKQQGLTPSPRAGHAGATVGENWYIVGGGNNKSGVSDTLVLNMSTLTWSVVSTAEGRVPLASEGMTLVHSNYNGYDYLISFGGYNGRYSNEVYTLSLKSDFKSTTKEETVSDLGSSNQRLKW

SEQ ID NO: 197265 - protein, 421 aa, Zea Mays
MPSAEAMRLFVKILEEEDPGWYSRVPEFNSEPIVDIQMHKPKEEPQIVPASTNGTSISEPKIISENGSSVETQDIDVILEGLSTVSSLDEWTPLAISGHRPKPRYEHGATVLQDKMYIFGGNHNGCYLSDLQALDLKNLTWSKIDAKLEAESSDSAKTSQIAPCAGHSLFFSIAGHTKDPSEGVTVKEFDPHTCTWSIVRTYGKSPVSRGGQTVTLVGTTLVLFGGEDAKRCLLNDLHILDLETMTWDDVDAIGTPPPRSDHAAACHADRYLLIFGGGSHATCFNDLHVLDLQTMEWSRPKQQGLTPSPRAGHAGATVGENWYIVGGGNNKSGVSDTLVLNMSTLTWSVVSTAEGRVPLASEGMTLVHSNYNGYDYLISFGGYNGRYSNEVYTLSLKSDFKSTTKEETVSDLGSSNQRLKW

SEQ ID NO: 197266 - protein, 396 aa, Zea Mays
MPSAEAMRLFVKILEEEDPGWYSRVPEFNSEPIVDIQMHKPKEEPQIVPASTNGTSISEPKIISENGSSVETQDIDVILEGLSTVSSLDEWTPLAISGHRPKPRYEHGATVLQDKMYIFGGNHNGCYLSDLQALDLKNLTWSKIDAKLEAESSDSAKTSQIAPCAGHSLFFSIAGHTKDPSEGVTVKEFDPHTCTWSIVRTYGKSPVSRGGQTVTLVGTTLVLFGGEDAKRCLLNDLHILDLETMTWDDVDAISHATCFNDLHVLDLQTMEWSRPKQQGLTPSPRAGHAGATVGENWYIVGGGNNKSGVSDTLVLNMSTLTWSVVSTAEGRVPLASEGMTLVHSNYNGYDYLISFGGYNGRYSNEVYTLSLKSDFKSTTKEETVSDLGSSNQRLKW

SEQ ID NO: 197267 - protein, 384 aa, Zea Mays
MPSAEAMRLFVKILEEEDPGWYSRVPEFNSEPIVDIQMHKPKEEPQIVPASTNGTSISEPKIISENGSSVETQDIDVILEGLSTVSSLDEWTPLAISGHRPKPRYEHGATVLQDKMYIFGGNHNGCYLSDLQFFSIAGHTKDPSEGVTVKEFDPHTCTWSIVRTYGKSPVSRGGQTVTLVGTTLVLFGGEDAKRCLLNDLHILDLETMTWDDVDAIGTPPPRSDHAAACHADRYLLIFGGGSHATCFNDLHVLDLQTMEWSRPKQQGLTPSPRAGHAGATVGENWYIVGGGNNKSGVSDTLVLNMSTLTWSVVSTAEGRVPLASEGMTLVHSNYNGYDYLISFGGYNGRYSNEVYTLSLKSDFKSTTKEETVSDLGSSNQRLKW

SEQ ID NO: 197268 - protein, 161 aa, Zea Mays
MSIEQKNEKNRKRREARQRNKALPLKSESSREDINTNQTRETVNVEISRDVHLGSGPIKNTPSPGNSIERKRQRDRERRATMSVEQRNEYNNKRRQMRQRNKGQNVMPNVSGDGDKKVNVDPDDDSDWLHRNETFQSNDYVATTDLLPPACTGRLCVCAGR

SEQ ID NO: 197269 - protein, 441 aa, Zea Mays
MLRNGETGDWIGTFQGHKGAVWSCCLDRNALRAASASADFSAKVWDALTGDELHSFEHKHIVRACAFSEDTHLLLTGGMEKILRVYDMNRPDAAPRELDKSPGSVRTAAWLHSDQTILSSCTDMGGVRLWDVRTGKIVQTLETKASVTSAEVSQDGRFITTADGSSVKFWDANHFGLVKSYDMPCNVESASLEPKSGSKFVAGGEDLWVHVFDFFTGEEIACNKGHHGPVHCVRFAPCGESYASGSEDGTIRIWQLSPANADDNEVANANGKTTAGVNEVTTKIEGFHIPKEGQTEGRLPSELQWSFSFPLRSHHVCDPRVSWLHESSSALGKNKQANGGGFLDGALALIEHSNCSVKNKQELGSLGTVFAFIKVKYSVSPQSPKKILEAFIVGTPTFKAVDHFLILRYPIRRTSGIWHMFRFAANIPAFAKGNRVTCPAM

SEQ ID NO: 197270 - protein, 200 aa, Zea Mays
MLSYFCVWMLNRSLLVANAGDCRAVLCRRGKAIEMSRDHKPSCNREKIRIEALGGYVDDGYLNGQLNVARAIGDWHMEGMKACGGLGPLTAEPEVMTMDLTDEDEFLIMGCDGIWDVFLSQNAVDFARRKLQEHNDPAACCKELVDEAIKRKSGDNLSVVVVCFNSRPPPVLTTPRPRVQRSISAEGLRELQSFLDSLAD

SEQ ID NO: 197271 - protein, 257 aa, Zea Mays
MSLSALIISCKILELKVLKKDPVPFMGFLMGMVESMQLILCAVIYQDACSLNCSLSSGTTALAALVVGRSLLVANAGDCRAVLCRRGKAIEMSRDHKPSCNREKIRIEALGGYVDDGYLNGQLNVARAIGDWHMEGMKACGGLGPLTAEPEVMTMDLTDEDEFLIMGCDGIWDVFLSQNAVDFARRKLQEHNDPAACCKELVDEAIKRKSGDNLSVVVVCFNSRPPPVLTTPRPRVQRSISAEGLRELQSFLDSLAD

SEQ ID NO: 197272 - protein, 380 aa, Zea Mays
MAASIAASSFFPGSPAPAAPKNGLGERPESLDVRGVAAKPGASSSAVRASKTRAHAAVPKMNGGGKSAVADGEHETVPSSVPKTFYNQLPDWSMLLAAITTIFLAAEKQWTMLDWKPRRPDMLTDTFGFGRIIHDGLMFRQNFSIRSYEIGADRTASIETLMNHLQETALNHVKTAGLLGDGFGSTPEMSKRNLFWVVSQMQAIIERYPCCKWVMMNKLTRKLARIPDEVRTEIEPYFFEHSAIVDEDNRKLPKLPEGQSTSVAKYVRTGLTPRWADLDINQHVNNVKYIAWILESAPISILENHELASIVLDYKRECGRDSVLQSHTSVHTDCNSESGETTLHCEHVLSLESGPTMVKARTMWRPKRTKAQETVVPSSI

SEQ ID NO: 197273 - protein, 340 aa, Zea Mays
MDVRYKALLDEWETNPSVKCILVESSSSRAFSAGGDVKRLANDCTMPEIIEVFTVEYSLICKIHEYAKPYICLMDGVTMGFGIGLSGHGRYRIITERTLLAMPENGIGLFPDVGFAYIGAKAPGGGAVGVYLGITGKRISSPADAMFIGLGTHYVPSANLGSLKESLLSANFTNDPHRDVESVLTGYKKEPESEPQLKKLLPYIISSFSPDKSVAESVEELKKCSRSGDAAVAEWANEALAGIEKGAPFSLCLTQKHFSQVASAYGTSEHYLSKLAGVMKLEYRIALRSSIRNDFVEGVRAVLVDKDQNPKWNPATLEEVNMAEVESVFEPLGAEAELSV

SEQ ID NO: 197274 - protein, 151 aa, Zea Mays
MRALVRIHLPTAISTGSFLHTSSTAASKTLVPNPNLVPLRLVRHFPAMAATAADEFVKGRVFPNGVAVITLDRPKALNAMNLEMDVRYKALLDEWETNPSVKCILVESSSSRAFSAGMDIKGVAVEIQKDKKTPLVQKGMAATALLQREHS

SEQ ID NO: 197275 - protein, 86 aa, Zea Mays
MALLVDPPDIKREMQPAPPPSAAASASQMAWPLDWPVDGCSLNPPSPPLYQSSVWTGMLTVCYFDGKTYELVGQSRQRSTMGCAEQ

SEQ ID NO: 197276 - protein, 175 aa, Zea Mays
MAAARRGRGDGANGVVRPRPRDRGIGGGSMAGRVAVLAFCVAGIWSAYIYQGVLQETLSTKRFGPDARRFEHLAFLNFAQNVICFVWSFIMIKLWSGGSSSNGSAPIWKYWGVSVTNTIGPTMGIEALKYISYPAQVLAKSSKMIPVHTSRVFMHLSCCRRCVLLCVVEDKLQDN

SEQ ID NO: 197277 - protein, 214 aa, Zea Mays
MLMGTLLYGVKYTLPEYLCTFLVAGGVSSFALLKTSSKTIKKLANPNAPLGYTLCFLNLAFDGYTNSTQDLIKSRYPKTNPWDIMLGMNLWGTIYNAVIMFVAPLLFSNWPYANGFEALRFCQENPEVAWDIFLFCLCGAVGQNFIFLTISRFGSLTNTTITTTRKFMSIVVSSVISGNPLSLKQWGSVVMVFLGLSIQIYLKWKRKKGREHKE

SEQ ID NO: 197278 - protein, 239 aa, Zea Mays
MGIEALKYISYPAQVLAKSSKMIPVMLMGTLLYGVKYTLPEYLCTFLVAGGVSSFALLKTSSKTIKKLANPNAPLGYTLCFLNLAFDGYTNSTQDLIKSRYPKTNPWDIMLGMNLWGTIYNAVIMFVAPLLFSNWPYANGFEALRFCQENPEVAWDIFLFCLCGAVGQNFIFLTISRFGSLTNTTITTTRKFMSIVVSSVISGNPLSLKQWGSVVMVFLGLSIQIYLKWKRKKGREHKE

SEQ ID NO: 197279 - protein, 213 aa, Zea Mays
MAEECLLQATDFSGLLLLYSSLGDAEGITKLASMSKELGKNNVAFLCLFMLGKLEECLQLLVDSNRIPEAALMARSYLPSKVSDIVSIWKKDLQKVNSKAAESLADPAEYPNLFEDWQIALNVEATVAPKRGVYPPAEEYMTYAERSNDSLVEVFKSMNVEEVPSDNGDPVHEVTEDDGVEGSMDDVVEVEPDDSTDGGVLVNGNDVLTPDQQ

SEQ ID NO: 197280 - protein, 225 aa, Zea Mays
MSTGKLEMAEECLLQATDFSGLLLLYSSLGDAEGITKLASMSKELGKNNVAFLCLFMLGKLEECLQLLVDSNRIPEAALMARSYLPSKVSDIVSIWKKDLQKVNSKAAESLADPAEYPNLFEDWQIALNVEATVAPKRGVYPPAEEYMTYAERSNDSLVEVFKSMNVEEVPSDNGDPVHEVTEDDGVEGSMDDVVEVEPDDSTDGGVLVNGNDGEEHWVLTPDQQ

SEQ ID NO: 197281 - protein, 119 aa, Zea Mays
MEKGPPKESLADPAEYPNLFEDWQIALNVEATVAPKRGVYPPAEEYMTYAERSNDSLVEVFKSMNVEEVPSDNGDPVHEVTEDDGVEGSMDDVVEVEPDDSTDGGVLVNGNDVLTPDQQ

SEQ ID NO: 197282 - protein, 660 aa, Zea Mays
MPLQLEIKRKLAQRSERVKSVDLHPTEPWIMSSLYSGSVCIWNYQTQTMVKSFEVSELPVRSAKFIAQKQWVVAGADDMFIRVYNYNTMDKVKLFEAHTDYIRCVAVHPTLPYVLSSSDDMLIKLWDWDKGWMCTQIFEGHSHYVMQVTFNPKDTNTFASASLDRTVKIWSLGSPDPNFTLDGHSKGVNCVDYFTGGDRPYLITGSDDQTAKVWDYQTKSCVQTLEGHAHNVSAVCFHPELPIIMTGSEDGTVRLWHSTTYRLENTLNYGLERVWALGYMKGSRRVVIGYDEGTIMIKIGREAPVASMDSSGKIIWAKHNEVQTVNIKAVGADAEIADGERLPLAVKELGSCDLYPQSLRHNPNGRFVAVCGDGEYIIYTALAWRNRSFGSALEIVWSTEGEYAARESTSKIKIYSKNFQERKSIRPAFSGERIYGGVLLAICTNDFICFYDWAECRLIRRIDVNVKNVYWADSGDLVTIASDSSFYILKYNRDLVSSHLDGGASVGEEGVEDAFELLHEINERVRTGLWVGDCFIYNNSSWRLNYCVGGEVTTMFHLDRPMYLLGYLANQSRVYLIDKEFNVVGYTLLLSLIEYKTLVMRGDLEHANIILPSIPKEQHNSVAHFLESRGMLEEALDIATDPNYRFDLAVQLGSLEVAKA

SEQ ID NO: 197283 - protein, 305 aa, Zea Mays
MLLDYVCVSVCGSAPLLGCRPIRVRVPVSLYIVTPSIINTTVHLPTWYQIRVSPTSHCSSRRLLPPATATGRLQPLQSSPREAHPSSLPPGAAPFPAAGHPSSRSSPSLGSGRRSDPPPRSTLPRRQQPRRRQQPRRAAPARARVPLRGAATASGPGAGARLPCAGRPRRGLARRRPWRTRPAASRPLVGALLSHSSSLSPCLPCLPLLLRAAARDRARRAQSALSSALSSLTPLLSLPAFPCSCAQPPGTEPDAPRAQPRQDAAPGRRARTPPLPCSPASWPPLPSAHHRLLPLHCVLRRHPRP

SEQ ID NO: 197284 - protein, 125 aa, Zea Mays
MVWMVCVRAGRLHQLRVCNCNASNTPSMDAWTDGRKPTDGTDYRARSARRRSGRWRAAAARSGCASRTTSWAGTMPPPPPPPRQGRRPSRRAPQRSGRPCRPTGRRCTAACSAAAPCSGSPAPTS

SEQ ID NO: 197285 - protein, 240 aa, Zea Mays
MVWMVCVRAGRLHQLRVCNCNASNTPSMDAWTDGRKPTDGTDYRASGVLRAPLQDSSATVLASLSRSADSVAPPPSASERASSPTLWLDLARGMAPSSSPSPSAAGSHAGLAIAATAMALSGTLVLYSLCRAKQQRLVLPSSSSDDAPSPRPRLRPCLSSSEKRKKKKREMARRGSQKRVRFADDVVGRDNAASAAAAAPREEAEPSCAAALRTPMPANREALYRGMLRGRSMLRVACSY

SEQ ID NO: 197286 - protein, 399 aa, Zea Mays
MTVVEAGEVLNLKVGENPLLEDEAKTGYVSPDDQDGETASEKPSGAPQLKKGPWSPDEDKLLKNYVEAHGEGKWNKVQRNSGLNRCGKSCRLRWTNHLRPDLKKGSFDNEEIDKILKFYLKWGPKWAKIASRLPGRTDNEIKNFWNTRIKKTEKQGLPIYPEHVLSQVKQPQQDMNCETPGLSHGKKRIREIEIHDLMDVKILFQHLDYHKDLVVPTKPLKRRASIGSLKISGETKETYCSTDLNYVLARSESVPTGSAIASGYPVELPSVQSSSSTLSNDWLLQCVSASVEQQIHSSIQSTETISSQTTGLLPTMSEISFETLIPMVYPMIHSFGYSEHESSPNTDIQAANLSLDDVSQYYQVASFFDPGVPDTELGASFFNDTPPETSFLNQQKQVS

SEQ ID NO: 197287 - protein, 136 aa, Zea Mays
MTKLFDRTFGTSTEDAVSDMDILEKIGLLQQFVKPHHLDIPKVLHNEASWLTETVLCLRRNSSRILARKSAQRSRVRKLQYISELERSVTTLQKWYDTTGVHLHHRQATIIHADDLPYSSKSFERAMFSRMYIPFG

SEQ ID NO: 197288 - protein, 134 aa, Zea Mays
MTKLFDRTFGTSTEDAVSDMDILEKIGLLQQFVKPHHLDIPKVLHNEASWLTETVLCLRRNSSRILARKSAQRSRVRKLQYISELERSVTTLQKWYDTTGVHLHHRQATIIHADDLPYSSKSFERAMFSQPVSD

SEQ ID NO: 197289 - protein, 130 aa, Zea Mays
MFIFALKVVCFFAKRACMRLVSCGSRQAGGQCVLQEIHLLLICMQTETVLCLRRNSSRILARKSAQRSRVRKLQYISELERSVTTLQKWYDTTGVHLHHRQATIIHADDLPYSSKSFERAMFSRMYIPFG

SEQ ID NO: 197290 - protein, 83 aa, Zea Mays
MTKLFDRTFGTSTEDAVSDMDILEKIGLLQQFVKPHHLDIPKVLHNEASWLDPCPEVSSEVASEEVAVHLRARAQRHNTAEMV

SEQ ID NO: 197291 - protein, 114 aa, Zea Mays
MMNAFEMIALSQGLDLSALFDRQQEFVKRQTRFVSRKPAKTVVATIEVVAESMGLKVHSRNYKVRLEGPASNRASQFAVVLEVVKPCMQRISWSLVLYTVLFPCSEVHLIESGL

SEQ ID NO: 197292 - protein, 308 aa, Zea Mays
MPLIIATAKGVYHRDLKPQNLLLDSRGNLKLSDFGLSTLSQNGVGLVHTTCGTPNYVAPEVLSSNGYDGSAADIWSCGVILYVLMAGYLPFEENDLPHLYEKITAAQYSCPYWFSPGAKSLIQRILDPNPRTRITIEEIREDPWFKKNYVTIRCGEDENVSLDDVQAIFDNIEDKYVSDEVTHKDGGPLMMNAFEMIALSQGLDLSALFDRQQEFVKRQTRFVSRKPAKTVVATIEVVAESMGLKVHSRNYKVFEVAPSLFMVDVRKVAGDTPEYHRFYENLCSKLCSIIWRPTEVSAKSTPLRTTTC

SEQ ID NO: 197293 - protein, 222 aa, Zea Mays
MPLIIATAKGVYHRDLKPQNLLLDSRGNLKLSDFGLSTLSQNGVGLVHTTCGTPNYVAPEVLSSNGYDGSAADIWSCGVILYVLMAGYLPFEENDLPHLYEKITAAQYSCPYWFSPGAKSLIQRILDPNPRTEFVKRQTRFVSRKPAKTVVATIEVVAESMGLKVHSRNYKVRLEGPASNRASQFAVVLEVVKPCMQRISWSLVLYTVLFPCSEVHLIESGL

SEQ ID NO: 197294 - protein, 106 aa, Zea Mays
MPLIIATAKGVYHRDLKPQNLLLDSRGNLKLSDFGLSTLSQNGVGLVHTTCGTPNYVAPEVLSSNGYDGSAADIWSCGVILYVLMAGYLPFEENDLPHLYEKEPSH

SEQ ID NO: 197295 - protein, 75 aa, Zea Mays
MTGLKLSALHQMKIVTAISTVDDLNYPEKTETYYIVNAPYIFSACWKVVKPLLQERTRKKVHVLRGCGRDELLQF

SEQ ID NO: 197296 - protein, 95 aa, Zea Mays
MSFKSGKKIAFIIDMTDLNRSVYPSEPSELIKVFEAHTTLAQPSIDETMASIRNLQSGRTAILRLCRMVSRLIHGYNDDLITGVQAVGSKHHPDM

SEQ ID NO: 197297 - protein, 822 aa, Zea Mays
MDIGGSGGIILSPGSEDDKFARRRSRRVSFADTTAVHVFDRDEDFETPPEEREPDSTPAPPSPRRSSVGREVEDDTEEDFNRPPVIFLHDVDSSYPDSAAESIASADDENFFGPVSASFIQTGRPSDSGMSEDDNHDITMDSRTFSLHFRNIAPPDDCTAYSAGSLMTPNTASEGPLKELTASNPARASINGRDTLTDMSLLSGNPRTYGYDKLSPTLNSMMKKIKGSKQTNSPKLGISDVTSDCVLTLSTSEEESREENLCIDNGVSSDELVMVNTIAEHISMRNPVSTSTDLIQDDNEMIIDVQENSKNCNHDHMDDDPGANNTAEPPAKISPAYKSFMINGDVQSHLVDQSSSKDRPSGSNCTASVSSMCNVDMETHLLDQLPGKDNTYAAQSSSEATAILLMDAEQLRQKNEVMDTETVLHTPRTAGLQLQVPRGSISSLRSKRHKLFTNTVSNSKVARQEGCSSGTEFVHHDKRLSSLKHQELAAASQLQLVEKNELGHRASDMFSNTEDHDSTLSVSSHSVPKLKKTNESFVLGTPRRHGLNESTKVLDTLCHAFTLDSQPSRECNSHVDLNGVGRKRTAEENGYAVQECPEKTTKTARSPRKSRKEIPCVSQPSMIEEKQNGAHDNGKSVDIDWSKVVCTITNATEQVLPASISKYNLQQLDMLSDRLDEIHMARKYKRLSTAVRIKAFCGDKQKRLEEARFLHDKLFYEKAKLQINNMKLVKLQKKAQLCQDGIQECCFLKSKILGAGHMEDSSLPAATTVSAGDRQEELDIISEKRLELKIIQRKVEKLRSSLECFHNIEGGIGSDSVVSSAS

SEQ ID NO: 197298 - protein, 1037 aa, Zea Mays
MDIGGSGGIILSPGSEDDKFARRRSRRVSFADTTAVHVFDRDEDFETPPEEREPDSTPAPPSPRRSSVGREVEDDTEEDFNRPPVIFLHDVDSSYPDSAAESIASADGSQVAAFFNWIMSDENFFGPVSASFIQTGRPSDSGMSEDDNHDITMDSRTFSLHFRNIAPPDDCTAYSAGSLMTPNTASEGPLKELTASNPARASINGRDTLTDMSLLSGNPRTYGYDKLSPTLNSMMKKIKGSKQTNSPKLGISDVTSDCVLTLSTSEEESREENLCIDNGVSSDELVMVNTIAEHISMRNPVSTSTDLIQDDNEMIIDVQENSKNCNHDHMDDDPGANNTAEPPAKISPAYKSFMINGDVQSHLVDQSSSKDRPSGSNCTASVSSMCNVDMETHLLDQLPGKDNTYAAQSSSEATAILLMDAEQLRQKNEVMDTETVLHTPRTAGLQLQVPRGSISSLRSKRHKLFTNTVSNSKVARQEGCSSGTEFVHHDKRLSSLKHQELAAASQLQLVEKNELGHRASDMFSNTEDHDSTLSVSSHSVPKLKKTNESFVLGTPRRHGLNESTKVLDTLCHAFTLDSQPSRECNSHVDLNGVGRKRTAEENGYAVQECPEKTTKTARSPRKSRKEIPCVSQPSMIEEKQNGAHDNGKSVDIDWSKVVCTITNATEQVLPASISKYNLQQLDMLSDRLDEIHMARKYKRLSTAVKKAQLCQDGIQECCFLKSKILGAGHMEDSSLPAATTVSAGDRQEELDIISEKRLELKIIQRKVEKLRSSLECFHNIEGGIGSDSVVRYAEEQLMMRNQHRIIHWQAGLCKLNDIVKRGNKCDIILNYHNLLFQRIILNISDTSSIFVNNSLNGNQIGKTFPNLDASLAFNFVFEAEENQRVSDLQSLQKKTMETSLLLGNLIDVLEEIKLSKLELVNLTSAAFVLESQTRKLGLHLSFMSFKSGKKIAFIIDMTDLNRSVYPSEPSELIKVFEAHTTLAQPSIDETMASIRNLQSGRTAILRLCRMVSRLIHGYNDDLITGVQAVGSKHHPDM

SEQ ID NO: 197299 - protein, 872 aa, Zea Mays
MDIGGSGGIILSPGSEDDKFARRRSRRVSFADTTAVHVFDRDEDFETPPEEREPDSTPAPPSPRRSSVGREVEDDTEEDFNRPPVIFLHDVDSSYPDSAAESIASADDENFFGPVSASFIQTGRPSDSGMSEDDNHDITMDSRTFSLHFRNIAPPDDCTAYSAGSLMTPNTASEGPLKELTASNPARASINGRDTLTDMSLLSGNPRTYGYDKLSPTLNSMMKKIKGSKQTNSPKLGISDVTSDCVLTLSTSEEESREENLCIDNGVSSDELVMVNTIAEHISMRNPVSTSTDLIQDDNEMIIDVQENSKNCNHDHMDDDPGANNTAEPPAKISPAYKSFMINGDVQSHLVDQSSSKDRPSGSNCTASVSSMCNVDMETHLLDQLPGKDNTYAAQSSSEATAILLMDAEQLRQKNEVMDTETVLHTPRTAGLQLQVPRGSISSLRSKRHKLFTNTVSNSKVARQEGCSSGTEFVHHDKRLSSLKHQELAAASQLQLVEKNELGHRASDMFSNTEDHDSTLSVSSHSVPKLKKTNESFVLGTPRRHGLNESTKVLDTLCHAFTLDSQPSRECNSHVDLNGVGRKRTAEENGYAVQECPEKTTKTARSPRKSRKEIPCVSQPSMIEEKQNGAHDNGKSVDIDWSKVVCTITNATEQVLPASISKYNLQQLDMLSDRLDEIHMARKYKRLSTAVRIKAFCGDKQKRLEEARFLHDKLFYEKAKLQINNMKLVKLQKKAQLCQDGIQECCFLKSKILGAGHMEDSSLPAATTVSAGDRQEELDIISEKRLELKIIQRKVEKLRSSLECFHNIEGGIGSDSVVRYAEEQLMMRNQHRIIHWQAGLCKLNDIVKRGNKCDIILNYHNLLFQRDHLKHQ

SEQ ID NO: 197300 - protein, 1078 aa, Zea Mays
MDIGGSGGIILSPGSEDDKFARRRSRRVSFADTTAVHVFDRDEDFETPPEEREPDSTPAPPSPRRSSVGREVEDDTEEDFNRPPVIFLHDVDSSYPDSAAESIASADGSQVAAFFNWIMSDENFFGPVSASFIQTGRPSDSGMSEDDNHDITMDSRTFSLHFRNIAPPDDCTAYSAGSLMTPNTASEGPLKELTASNPARASINGRDTLTDMSLLSGNPRTYGYDKLSPTLNSMMKKIKGSKQTNSPKLGISDVTSDCVLTLSTSEEESREENLCIDNGVSSDELVMVNTIAEHISMRNPVSTSTDLIQDDNEMIIDVQENSKNCNHDHMDDDPGANNTAEPPAKISPAYKSFMINGDVQSHLVDQSSSKDRPSGSNCTASVSSMCNVDMETHLLDQLPGKDNTYAAQSSSEATAILLMDAEQLRQKNEVMDTETVLHTPRTAGLQLQVPRGSISSLRSKRHKLFTNTVSNSKVARQEGCSSGTEFVHHDKRLSSLKHQELAAASQLQLVEKNELGHRASDMFSNTEDHDSTLSVSSHSVPKLKKTNESFVLGTPRRHGLNESTKVLDTLCHAFTLDSQPSRECNSHVDLNGVGRKRTAEENGYAVQECPEKTTKTARSPRKSRKEIPCVSQPSMIEEKQNGAHDNGKSVDIDWSKVVCTITNATEQVLPASISKYNLQQLDMLSDRLDEIHMARKYKRLSTAVRIKAFCGDKQKRLEEARFLHDKLFYEKAKLQINNMKLVKLQKKAQLCQDGIQECCFLKSKILGAGHMEDSSLPAATTVSAGDRQEELDIISEKRLELKIIQRKVEKLRSSLECFHNIEGGIGSDSVVRYAEEQLMMRNQHRIIHWQAGLCKLNDIVKRGNKCDIILNYHNLLFQRIILNISDTSSIFVNNSLNGNQIGKTFPNLDASLAFNFVFEAEENQRVSDLQSLQKKTMETSLLLGNLIDVLEEIKLSKLELVNLTSAAFVLESQTRKLGLHLSFMSFKSGKKIAFIIDMTDLNRSVYPSEPSELIKVFEAHTTLAQPSIDETMASIRNLQSGRTAILRLCRMVSRLIHGYNDDLITGVQAVGSKHHPDM

SEQ ID NO: 197301 - protein, 709 aa, Zea Mays
MDIGGSGGIILSPGSEDDKFARRRSRRVSFADTTAVHVFDRDEDFETPPEEREPDSTPAPPSPRRSSVGREVEDDTEEDFNRPPVIFLHDVDSSYPDSAAESIASADDENFFGPVSASFIQTGRPSDSGMSEDDNHDITMDSRTFSLHFRNIAPPDDCTAYSAGSLMTPNTASEGPLKELTASNPARASINGRDTLTDMSLLSGNPRTYGYDKLSPTLNSMMKKIKGSKQTNSPKLGISDVTSDCVLTLSTSEEESREENLCIDNGVSSDELVMVNTIAEHISMRNPVSTSTDLIQDDNEMIIDVQENSKNCNHDHMDDDPGANNTAEPPAKISPAYKSFMINGDVQSHLVDQSSSKDRPSGSNCTASVSSMCNVDMETHLLDQLPGKDNTYAAQSSSEATAILLMDAEQLRQKNEVMDTETVLHTPRTAGLQLQVPRGSISSLRSKRHKLFTNTVSNSKVARQEGCSSGTEFVHHDKRLSSLKHQELAAASQLQLVEKNELGHRASDMFSNTEDHDSTLSVSSHSVPKLKKTNESFVLGTPRRHGLNESTKVLDTLCHAFTLDSQPSRECNSHVDLNGVGRKRTAEENGYAVQECPEKTTKTARSPRKSRKEIPCVSQPSMIEEKQNGAHDNGKSVDIDWSKVVCTITNATEQVLPASISKYNLQQLDMLSDRLDEIHMARKYKRLSTAVRIKAFCGDKQKRGGKVSP

SEQ ID NO: 197302 - protein, 866 aa, Zea Mays
MDIGGSGGIILSPGSEDDKFARRRSRRVSFADTTAVHVFDRDEDFETPPEEREPDSTPAPPSPRRSSVGREVEDDTEEDFNRPPVIFLHDVDSSYPDSAAESIASADDENFFGPVSASFIQTGRPSDSGMSEDDNHDITMDSRTFSLHFRNIAPPDDCTAYSAGSLMTPNTASEGPLKELTASNPARASINGRDTLTDMSLLSGNPRTYGYDKLSPTLNSMMKKIKGSKQTNSPKLGISDVTSDCVLTLSTSEEESREENLCIDNGVSSDELVMVNTIAEHISMRNPVSTSTDLIQDDNEMIIDVQENSKNCNHDHMDDDPGANNTAEPPAKISPAYKSFMINGDVQSHLVDQSSSKDRPSGSNCTASVSSMCNVDMETHLLDQLPGKDNTYAAQSSSEATAILLMDAEQLRQKNEVMDTETVLHTPRTAGLQLQVPRGSISSLRSKRHKLFTNTVSNSKVARQEGCSSGTEFVHHDKRLSSLKHQELAAASQLQLVEKNELGHRASDMFSNTEDHDSTLSVSSHSVPKLKKTNESFVLGTPRRHGLNESTKVLDTLCHAFTLDSQPSRECNSHVDLNGVGRKRTAEENGYAVQECPEKTTKTARSPRKSRKEIPCVSQPSMIEEKQNGAHDNGKSVDIDWSKVVCTITNATEQVLPASISKYNLQQLDMLSDRLDEIHMARKYKRLSTAVRIKAFCGDKQKRLEEARFLHDKLFYEKAKLQINNMKLVKLQKKAQLCQDGIQECCFLKSKILGAGHMEDSSLPAATTVSAGDRQEELDIISEKRLELKIIQRKVEKLRSSLECFHNIEGGIGSDSVVRYAEEQLMMRNQHRIIHWQAGLCKLNDIVKRGNKCDIILNYHNLLFQR

SEQ ID NO: 197303 - protein, 1024 aa, Zea Mays
MDIGGSGGIILSPGSEDDKFARRRSRRVSFADTTAVHVFDRDEDFETPPEEREPDSTPAPPSPRRSSVGREVEDDTEEDFNRPPVIFLHDVDSSYPDSAAESIASADDENFFGPVSASFIQTGRPSDSGMSEDDNHDITMDSRTFSLHFRNIAPPDDCTAYSAGSLMTPNTASEGPLKELTASNPARASINGRDTLTDMSLLSGNPRTYGYDKLSPTLNSMMKKIKGSKQTNSPKLGISDVTSDCVLTLSTSEEESREENLCIDNGVSSDELVMVNTIAEHISMRNPVSTSTDLIQDDNEMIIDVQENSKNCNHDHMDDDPGANNTAEPPAKISPAYKSFMINGDVQSHLVDQSSSKDRPSGSNCTASVSSMCNVDMETHLLDQLPGKDNTYAAQSSSEATAILLMDAEQLRQKNEVMDTETVLHTPRTAGLQLQVPRGSISSLRSKRHKLFTNTVSNSKVARQEGCSSGTEFVHHDKRLSSLKHQELAAASQLQLVEKNELGHRASDMFSNTEDHDSTLSVSSHSVPKLKKTNESFVLGTPRRHGLNESTKVLDTLCHAFTLDSQPSRECNSHVDLNGVGRKRTAEENGYAVQECPEKTTKTARSPRKSRKEIPCVSQPSMIEEKQNGAHDNGKSVDIDWSKVVCTITNATEQVLPASISKYNLQQLDMLSDRLDEIHMARKYKRLSTAVKKAQLCQDGIQECCFLKSKILGAGHMEDSSLPAATTVSAGDRQEELDIISEKRLELKIIQRKVEKLRSSLECFHNIEGGIGSDSVVRYAEEQLMMRNQHRIIHWQAGLCKLNDIVKRGNKCDIILNYHNLLFQRIILNISDTSSIFVNNSLNGNQIGKTFPNLDASLAFNFVFEAEENQRVSDLQSLQKKTMETSLLLGNLIDVLEEIKLSKLELVNLTSAAFVLESQTRKLGLHLSFMSFKSGKKIAFIIDMTDLNRSVYPSEPSELIKVFEAHTTLAQPSIDETMASIRNLQSGRTAILRLCRMVSRLIHGYNDDLITGVQAVGSKHHPDM

SEQ ID NO: 197304 - protein, 1065 aa, Zea Mays
MDIGGSGGIILSPGSEDDKFARRRSRRVSFADTTAVHVFDRDEDFETPPEEREPDSTPAPPSPRRSSVGREVEDDTEEDFNRPPVIFLHDVDSSYPDSAAESIASADDENFFGPVSASFIQTGRPSDSGMSEDDNHDITMDSRTFSLHFRNIAPPDDCTAYSAGSLMTPNTASEGPLKELTASNPARASINGRDTLTDMSLLSGNPRTYGYDKLSPTLNSMMKKIKGSKQTNSPKLGISDVTSDCVLTLSTSEEESREENLCIDNGVSSDELVMVNTIAEHISMRNPVSTSTDLIQDDNEMIIDVQENSKNCNHDHMDDDPGANNTAEPPAKISPAYKSFMINGDVQSHLVDQSSSKDRPSGSNCTASVSSMCNVDMETHLLDQLPGKDNTYAAQSSSEATAILLMDAEQLRQKNEVMDTETVLHTPRTAGLQLQVPRGSISSLRSKRHKLFTNTVSNSKVARQEGCSSGTEFVHHDKRLSSLKHQELAAASQLQLVEKNELGHRASDMFSNTEDHDSTLSVSSHSVPKLKKTNESFVLGTPRRHGLNESTKVLDTLCHAFTLDSQPSRECNSHVDLNGVGRKRTAEENGYAVQECPEKTTKTARSPRKSRKEIPCVSQPSMIEEKQNGAHDNGKSVDIDWSKVVCTITNATEQVLPASISKYNLQQLDMLSDRLDEIHMARKYKRLSTAVRIKAFCGDKQKRLEEARFLHDKLFYEKAKLQINNMKLVKLQKKAQLCQDGIQECCFLKSKILGAGHMEDSSLPAATTVSAGDRQEELDIISEKRLELKIIQRKVEKLRSSLECFHNIEGGIGSDSVVRYAEEQLMMRNQHRIIHWQAGLCKLNDIVKRGNKCDIILNYHNLLFQRIILNISDTSSIFVNNSLNGNQIGKTFPNLDASLAFNFVFEAEENQRVSDLQSLQKKTMETSLLLGNLIDVLEEIKLSKLELVNLTSAAFVLESQTRKLGLHLSFMSFKSGKKIAFIIDMTDLNRSVYPSEPSELIKVFEAHTTLAQPSIDETMASIRNLQSGRTAILRLCRMVSRLIHGYNDDLITGVQAVGSKHHPDM

SEQ ID NO: 197305 - protein, 1106 aa, Zea Mays
MDIGGSGGIILSPGSEDDKFARRRSRRVSFADTTAVHVFDRDEDFETPPEEREPDSTPAPPSPRRSSVGREVEDDTEEDFNRPPVIFLHDVDSSYPDSAAESIASADGSQVAAFFNWIMSDENFFGPVSASFIQTGRPSDSGMSEDDNHDITMDSRTFSLHFRNIAPPDDCTAYSAGSLMTPNTASEGPLKELTASNPARASINGRDTLTDMSLLSGNPRTYGYDKLSPTLNSMMKKIKGSKQTNSPKLGISDVTSDCVLTLSTSEEESREENLCIDNGVSSDELVMVNTIAEHISMRNPVSTSTDLIQDDNEMIIDVQENSKNCNHDHMDDDPGANNTAEPPAKISPAYKSFMINGDVQSHLVDQSSSKDRPSGSNCTASVSSMCNVDMETHLLDQLPGKDNTYAAQSSSEATAILLMDAEQLRQKNEVMDTETVLHTPRTAGLQLQVPRGSISSLRSKRHKLFTNTVSNSKVARQEGCSSGTEFVHHDKRLSSLKHQELAAASQLQLVEKNELGHRASDMFSNTEDHDSTLSVSSHSVPKLKKTNESFVLGTPRRHGLNESTKVLDTLCHAFTLDSQPSRECNSHVDLNGVGRKRTAEENGYAVQECPEKTTKTARSPRKSRKEIPCVSQPSMIEEKQNGAHDNGKSVDIDWSKVVCTITNATEQVLPASISKYNLQQLDMLSDRLDEIHMARKYKRLSTAVRIKAFCGDKQKRLEEARFLHDKLFYEKAKLQINNMKLVKLQKKAQLCQDGIQECCFLKSKILGAGHMEDSSLPAATTVSAGDRQEELDIISEKRLELKIIQRKVEKLRSSLECFHNIEGGIGSDSVVRYAEEQLMMRNQHRIIHWQAGLCKLNDIVKRGNKCDIILNYHNLLFQRIILNISDTSSIFVNNSLNGNQIGKTFPNLDASLAFNFVFEAEENQRVSDLQSLQKKTMETSLLLGNLIDVLEEIKLSKLELVNLTSAAFVLESQTRKLGLHLSFMSFKSGKKIAFIIDMTDLNRSVYPSEPSELIKVFEAHTTLAQPSIDETMASIRNLQSGRTAILRLCRMVSRLIHGYNDDLITGVQAVGSKHHPDIPFQVDVQAILVTANPCNCPFITATMHNW

SEQ ID NO: 197306 - protein, 817 aa, Zea Mays
MDIGGSGGIILSPGSEDDKFARRRSRRVSFADTTAVHVFDRDEDFETPPEEREPDSTPAPPSPRRSSVGREVEDDTEEDFNRPPVIFLHDVDSSYPDSAAESIASADDENFFGPVSASFIQTGRPSDSGMSEDDNHDITMDSRTFSLHFRNIAPPDDCTAYSAGSLMTPNTASEGPLKELTASNPARASINGRDTLTDMSLLSGNPRTYGYDKLSPTLNSMMKKIKGSKQTNSPKLGISDVTSDCVLTLSTSEEESREENLCIDNGVSSDELVMVNTIAEHISMRNPVSTSTDLIQDDNEMIIDVQENSKNCNHDHMDDDPGANNTAEPPAKISPAYKSFMINGDVQSHLVDQSSSKDRPSGSNCTASVSSMCNVDMETHLLDQLPGKDNTYAAQSSSEATAILLMDAEQLRQKNEVMDTETVLHTPRTAGLQLQVPRGSISSLRSKRHKLFTNTVSNSKVARQEGCSSGTEFVHHDKRLSSLKHQELAAASQLQLVEKNELGHRASDMFSNTEDHDSTLSVSSHSVPKLKKTNESFVLGTPRRHGLNESTKVLDTLCHAFTLDSQPSRECNSHVDLNGVGRKRTAEENGYAVQECPEKTTKTARSPRKSRKEIPCVSQPSMIEEKQNGAHDNGKSVDIDWSKVVCTITNATEQVLPASISKYNLQQLDMLSDRLDEIHMARKYKRLSTAVKKAQLCQDGIQECCFLKSKILGAGHMEDSSLPAATTVSAGDRQVGDEGIPIPSERGGEDGGCGASMGRKGNAGRRDGDEATRSGGGVLQARRGDGNEAARVCGGGVQSPLSRPHGGCSRVRRDEQD

SEQ ID NO: 197307 - protein, 252 aa, Zea Mays
MIETAIGIVDSTGGQYHVLLIIADGQVTRSVDTQSGQLSPQERDTIDAIVRASQFPLSIVLVGVGDGPWDMMHQFDDNIPARSFDNFQFVNFTEIMSKSIAADRKEAEFALSALMEIPTQYKATLDLQLLGRRQRITPRIALPPPTRTAYSRTTSFSQQSGVYSRSSSFDQQTSVYQQRSESLKQQQPAAPKGPDTYVSESALEDRILCPICMYKSKDLAFGCGHQTCYECGRDLERCPLCQQHITTRIRLY

SEQ ID NO: 197308 - protein, 68 aa, Zea Mays
MTRNYAGCISQWLNHEEQETCLAAKDVMSFDLLKKSLMYLLNAMGVRIRKVYDEVRGSAILNSNSFIF

SEQ ID NO: 197309 - protein, 133 aa, Zea Mays
MEAVRTSESVVEYVAQEEAEEKKEALNPNSWSSTSKNYAGCISQWLNHEEQETCLAAKDVMSFDLLKKSLMYLLNAMGVRIRKVYDEEWSYISVGWSLPNTDQKNLAFGATTSMVHPATSTDESSSFYTPVST

SEQ ID NO: 197310 - protein, 471 aa, Zea Mays
MRLLSPPLPSLRSSVPAVLLHLLLLLLLLSSCPSPANGRAAPSSPGATAPVTRHVRAAGANGTAPVAPAVPAPPPVVIIVERHRHFHRELVIASILASIAIVAIILSTLYAWILWRRSRRLPRGKSADTARGIMLAPILSKFNSLKTSRKGLVAMIEYPSLEAATGEFSESNVLGVGGFGCVYKAVFDGGVTAAVKRLEGGGPECEKEFENELDLLGRIRHPNIVSLLGFCVHEGNHYIVYELMEKGSLDTQLHGASHGSALTWHIRMKIALDMARGLEYLHEHCSPPVIHRDLKSSNILLDSDFNAKISDFGLAVTSGNIDKGSMKLSGTLGYVAPEYLLDATVSISGKLTEKSDVYAFGVVLLELLMGRKPVEKMSQTQCQSIVTWAMPQLTDRTKLPNIVDPVIRDTMDPKHLYQVAAVAVLCVQPEPSYRPLITDVLHSLVPLVPVELGGTLRVVEPPSPNLKHSPC

SEQ ID NO: 197311 - protein, 322 aa, Zea Mays
MLAPILSKFNSLKTSRKGLVAMIEYPSLEAATGEFSESNVLGVGGFGCVYKAVFDGGVTAAVKRLEGGGPECEKEFENELDLLGRIRHPNIVSLLGFCVHEGNHYIVYELMEKGSLDTQLHGASHGSALTWHIRMKIALDMARGLEYLHEHCSPPVIHRDLKSSNILLDSDFNAKISDFGLAVTSGNIDKGSMKLSGTLGYVAPEYLLDGKLTEKSDVYAFGVVLLELLMGRKPVEKMSQTQCQSIVTWVRCTQSYTKHSISLIKSNSSTWNFSSNGQLSTLIFTQCLLHLSFILSYTRKTSTSRSVLTFKESNAVSLCADI

SEQ ID NO: 197312 - protein, 594 aa, Zea Mays
MAATAGASDDGGSVGGGGGGERMKLLCSLGGRILPRPGDGTLRYAGGDTRIVSVPRGVSLPDLLGRLADAYGGATGPHFAVKYQLPDEGLDALISVSSPEDLDNMVEEYDKLSGASPKLRVFIFPILDAAGGSGAAGGEDLETGNFDSGLRYLEAVNGIVRKDSIASLSSTQCSDGGLPPPAPSGGGGPGSPAALSPTSTSSNDAARSNITGAGAAPPPLVDVFSNAAPAPVHVKPQEIGAEGRAPQANPHPHPEAATNTHPEAARYRQPLSQLPPLPPVFMNDHRDAIQGLNQQLPGNGARFDDCHMCLKALPHAHSDPVVNEYGNEVHGGAAPEPGPVFMSLRPEDVARMMIPERGVQPPMGAYGYTHMHPVPQERMYVPKMEGVTNSVFIDPTGLHQHVYVQQQQQQQQMPPQQLPSTYGFSHIPVISSEKDRVVSPSSAHNDVANSHHQFMQQSQQQLPSGHGMPQYPVKPTSPSNPLAGEGSVSGNSRHNEDGQVYRDNMPPVAPVAVPTYMANVDRMMDSLRMSPSEVSGSTEQRKHAMSPDSGLPQNAVPDYSQGHPENSISTWPDTRANDVHPSNTNTFFDVSEPK

SEQ ID NO: 197313 - protein, 599 aa, Zea Mays
MPYAYIHYPFENRELFEKNFPGNFVAEGLDQTRGWFYTLMVLSTALFGKPAFKNLICNGLVLAEDGKKMSKSKKNYPPPKDLIDEFGADALRLYLVNSPVVRAESLRFKRTGVFAVVKDVFLPWYNAYRFFVQNAKRLEVEGLASFSPMEQVVLLKSSNVLDHWINSATESLVVPYLVKYIDYLTNIYVRLNRKRFKGRTGEEDCRISLSTLYHVLVTTCVVMAPFTPFFTEVLYQNLRKVSSNSEESIHFCKFPSTTGERDERVEQSVKRMVTIIDLARNIRERHNKALKTPLKEMVVVHPDNDFLEDITGKLKEYVMEEINVKNVTPCNDPLMYASLRAEPNFSVLGKRLGKDMGKVSNVVKKMTQEQILAFEKSGEVSFFGHCLKLDDIKVVRQFKRPENVSEKEIDAAGDGDVLVILDLRTDQSLFEAGVAREVVNRIQKLRKTAQLEPADPVDVYYESVGNDKNTLEEILKSQDQYIRDALGSPIVPKEMAPTDVVVLGEESHNVHDMSFVICIARSTPIISPDLLSHASGNSNHVEALRVYLLSKSLSRLKNQFQSGNGVITVDCIEGYPLIRLQLGKHVFLSAGDFYLASRS

SEQ ID NO: 197314 - protein, 653 aa, Zea Mays
MDSIEKLEKLSGVKVTDLHRHYVDDITIPSKRGPEFGVLKRVDDVFDCWFESGSMPYAYIHYPFENRELFEKNFPGNFVAEGLDQTRGWFYTLMVLSTALFGKPAFKNLICNGLVLAEDGKKMSKSKKNYPPPKDLIDEFGADALRLYLVNSPVVRAESLRFKRTGVFAVVKDVFLPWYNAYRFFVQNAKRLEVEGLASFSPMEQVVLLKSSNVLDHWINSATESLVVPYLVKYIDYLTNIYVRLNRKRFKGRTGEEDCRISLSTLYHVLVTTCVVMAPFTPFFTEVLYQNLRKVSSNSEESIHFCKFPSTTGERDERVEQSVKRMVTIIDLARNIRERHNKALKTPLKEMVVVHPDNDFLEDITGKLKEYVMEEINVKNVTPCNDPLMYASLRAEPNFSVLGKRLGKDMGKVSNVVKKMTQEQILAFEKSGEVSFFGHCLKLDDIKVVRQFKRPENVSEKEIDAAGDGDVLVILDLRTDQSLFEAGVAREVVNRIQKLRKTAQLEPADPVDVYYESVGNDKNTLEEILKSQDQYIRDALGSPIVPKEMAPTDVVVLGEESHNVHDMSFVICIARSTPIISPDLLSHASGNSNHVEALRVYLLSKSLSRLKNQFQSGNGVITVDCIEGYPLIRLQLGKHVFLSAGDFYLASRS

SEQ ID NO: 197315 - protein, 587 aa, Zea Mays
MLMILQFPLREDLSLGCSNVLMMFYTLMVLSTALFGKPAFKNLICNGLVLAEDGKKMSKSKKNYPPPKDLIDEFGADALRLYLVNSPVVRAESLRFKRTGVFAVVKDVFLPWYNAYRFFVQNAKRLEVEGLASFSPMEQVVLLKSSNVLDHWINSATESLVVPYLVKYIDYLTNIYVRLNRKRFKGRTGEEDCRISLSTLYHVLVTTCVVMAPFTPFFTEVLYQNLRKVSSNSEESIHFCKFPSTTGERDERVEQSVKRMVTIIDLARNIRERHNKALKTPLKEMVVVHPDNDFLEDITGKLKEYVMEEINVKNVTPCNDPLMYASLRAEPNFSVLGKRLGKDMGKVSNVVKKMTQEQILAFEKSGEVSFFGHCLKLDDIKVVRQFKRPENVSEKEIDAAGDGDVLVILDLRTDQSLFEAGVAREVVNRIQKLRKTAQLEPADPVDVYYESVGNDKNTLEEILKSQDQYIRDALGSPIVPKEMAPTDVVVLGEESHNVHDMSFVICIARSTPIISPDLLSHASGNSNHVEALRVYLLSKSLSRLKNQFQSGNGVITVDCIEGYPLIRLQLGKHVFLSAGDFYLASRS

SEQ ID NO: 197316 - protein, 814 aa, Zea Mays
MDDVCEGKDFSFPEQEEGVIELWAKLDAFHEQLRRTEGGEEFVFYDGPPFATGLPHYGHILAGTIKDVVTRHQSMRGRHVSRRFGWDCHGLPVEFEIDKALGITNRQQVFDLGIGKYNETCRSIVTKYVSEWEAMVTRTGRWIDFKNDYKTMDLNFMESVWWVFAQLWEKDLVYRGFKVMPYSTGCKTALSNFEAALDYRTVPDPAVMVSFPIVGDADNAALVAWTTTPWTLPKSRLGQLPVKAKASGKKQAPSKGSNIEAVQDGLDKESYELLSKIPGVSLVGLKYTPLFDFFIELQGTAFRVIADNYVTDDSGTGVVHCAPAFGEDDHRVCLAAGIFETAGLVVAVDDDGCFIEKISDFKGRYVKEADKDIINAVKDKGRLISKGSIEHSYPFCWRSGTPLIYRAVPSWFVKVEKIKDQLLECNKETYWVPDYVKEKRFHNWLEGARDWAVSRSRFWGTPLPLWISQDGEEIVVMDSIEKLEKLSGVKVTDLHRHYVDDITIPSKRGPEFGVLKRVDDVFDCWFESGSMPYAYIHYPFENRELFEKNFPGNFVAEGLDQTRGWFYTLMVLSTALFGKPAFKNLICNGLVLAEDGKKMSKSKKNYPPPKDLIDEFGADALRLYLVNSPVVRAESLRFKRTGVFAVVKDVFLPWYNAYRFFVQNAKRLEVEGLASFSPMEQVVLLKSSNVLDHWINSATESLVSFVHQEMDAYRLYTVVPYLVKYIDYLTNIYVRLNRKRFKGRTGEEDCRISLSTLYHVLVTTCVVMAPFTPFFTEVLYQNLRKVSSNSEESIHFCKFPSTTGEGNGGCASRQ

SEQ ID NO: 197317 - protein, 337 aa, Zea Mays
MLYQMWIFDSNDGGARLLRFRSGHSAPPRCIRFYGNGKCILSAGQDRAFRLFSVIQDQQSRELSQRHVAKRAKKLRVKEEEIKLKPVVTFDCAEIRARDWCNVVTCHMDTPQAYVWRLQNFVIGEHVLTPSSSTVTPIKACVISACGNFTILGTEGGWIEKFNLQSGFSRGSYIDTSLAMQCAHDGEVVGLACDARNGFLISAGYQGDIKAWDFKTCKLKSRLDVGKSVTKIAFHRPNGLLATVAGDMVLILFDTVSMKMVRRFEGHTDRITDLCFSEDGKWLISSSMDGTLRIWDISLARQIDAMHVDVSITSISMSPNMDVLATTHVDQNGVYLW

SEQ ID NO: 197318 - protein, 620 aa, Zea Mays
MSSAADNSVKMWIFDSNDGGARLLRFRSGHSAPPRCIRFYGNGKCILSAGQDRAFRLFSVIQDQQSRELSQRHVAKRAKKLRVKEEEIKLKPVVTFDCAEIRARDWCNVVTCHMDTPQAYVWRLQNFVIGEHVLTPSSSTVTPIKACVISACGNFTILGTEGGWIEKFNLQSGFSRGSYIDTSLAMQCAHDGEVVGLACDARNGFLISAGYQGDIKAWDFKTCKLKSRLDVGKSVTKIAFHRPNGLLATVAGDMVLILFDTVSMKMVRRFEGHTDRITDLCFSEDGKWLISSSMDGTLRIWDISLARQIDAMHVDVSITSISMSPNMDVLATTHVDQNGVYLWVNQSLFSVSTNTENYASGKHVRNVCLPAVSSTERSEEEQVQNLGESYKSSIKPFVITDHQIPNLVTLSLLPKSQWQSLTNLDIIKVRNKPIEPPKKPEKAPFFLPSVPSLSGEILFEPPASSKDTDISTTKNTNHKMSELSSHFSQQLQFCGETKNYSAFTDYLKGLSPSSLDMELRMLQILDDEESEDLEQRPELQSISSLLDYFIHELSFRNNFEFVQAVLKLFLKIHGETIRRHSMLQSKVKKLLEVQSLVWQKIDKIFQGARCMVTFLSNSQF

SEQ ID NO: 197319 - protein, 627 aa, Zea Mays
MGIFEPFRAIGYITASGVPFSVQRLSTETFVTVSVGKAFQVYNCAKLNLVLAGPQLPKKIRAIASYKDYTFAAYGSDIAVFKRTDQVATWSRHEEKVNMLYLFGEYVLSADAKGNVFMWAFRGAEPNTEPVGSISLGDKFTPTCIMHPDTYLNKVIVGSEEGSLQLWNISTKKKLYDFNGWNSPVRCCVSSPALDVVAVGCSDGSVHVHNVRYDEELMSFNHQIRGAVTALSFRTDGQPLLASGGSSGVISIWNLEKRRLHSVIREAHDGSIVSLHFFANEPILMSSAADNSVKMWIFDSNDGGARLLRFRSGHSAPPRCIRFYGNGKCILSAGQDRAFRLFSVIQDQQSRELSQRHVAKRAKKLRVKEEEIKLKPVVTFDCAEIRARDWCNVVTCHMDTPQAYVWRLQNFVIGEHVLTPSSSTVTPIKACVISACGNFTILGTEGGWIEKFNLQSGFSRGSYIDTSLAMQCAHDGEVVGLACDARNGFLISAGYQGDIKAWDFKTCKLKSRLDVGKSVTKIAFHRPNGLLATVAGDMVLILFDTVSMKMVRRFEGHTDRITDLCFSEDGKWLISSSMDGTLRIWDISLARQIDAMHVDVSITSISMSPNMDVLATTHVDQNGVYLW

SEQ ID NO: 197320 - protein, 342 aa, Zea Mays
MLITYTHSVISGQYAMTTTAPFGIFAWSGVFLATAGLVMFYKCSRKDPGYININARGSQNQRDDEPLLKMELENPALLSGNWSQLCITCKIVRPVRSKHCSTCDRCVEQFDHHCPWVSNCIGKKNKWEFFMFLTLEVFAMIITGSAAIIRIVRDPNSPSSFGAWIHYSAFQHPGVVSFLALDCFLFFGVAVLTVVQASQIARNITTNEMANSMRYAYLRGPGGRFRNPYDHGIRKNCSDFLLNGYNEDTERLEQTLPTDEEMGMIQMTSAVSQQNGDNHLHHGNGTDHSCAVSQANSKPHSQVGSSQCCDHSKRTDRTPLGLGLGLGRNSASRQYVRSLIPL

SEQ ID NO: 197321 - protein, 403 aa, Zea Mays
MVKDKTGLTPAQLAADKNHRQVAFFLDNARRVHGKGCGANTRFGKLSKLGLAPLLWCTIIGMLITYTHSVISGQYAMTTTAPFGIFAWSGVFLATAGLVMFYKCSRKDPGYININARGSQNQRDDEPLLKMELENPALLSGNWSQLCITCKIVRPVRSKHCSTCDRCVEQFDHHCPWVSNCIGKKNKWEFFMFLTLEVFAMIITGSAAIIRIVRDPNSPSSFGAWIHYSAFQHPGVVSFLALDCFLFFGVAVLTVVQASQIARNITTNEMANSMRYAYLRGPGGRFRNPYDHGIRKNCSDFLLNGYNEDTERLEQTLPTDEEMGMIQMTSAVSQQNGDNHLHHGNGTDHSCAVSQANSKPHSQVGSSQCCDHSKRTDRTPLGLGLGLGRNSASRQYVRSLIPL

SEQ ID NO: 197322 - protein, 186 aa, Zea Mays
MVKDKTGLTPAQLAADKNHRQVAFFLDNARRVHGKGCGANTRFGKLSKLGLAPLLWCTIIGMLITYTHSVISGQYAMTTTAPFGIFAWSGVFLATAGLVMFYKCSRKDPGYININARGSQNQRDDEPLLKMELENPALLSGNWSQLCITCKIVRPVRSKHCSTCDRCVEQFDHHCPWVSNCIGKEL

SEQ ID NO: 197323 - protein, 429 aa, Zea Mays
MASEIEVLEDTTTSSTSLVAAASTVPSLAEGAEAPAEDDSLKNDVYTAAAYGDLEKLQRLVEGEGRPVTEPDGGGYHALQWAALNNRVAAAQYILEHGADINAVDHTGQTALHWSAVRGHIQVAELLLKEGAKVDATDLYGYQATHVAAQYGQTAFIYHIVAKWNADPDIPDNDGRSPLHWAAYKGFADSIRLLLFLDAYRGRQDKEGCTPLHWAAIRGNLEACTVLVQVGKKDDLMVKDKTGLTPAQLAADKNHRQVAFFLDNARRVHGKGCGANTRFGKLSKLGLAPLLWCTIIGMLITYTHSVISGQYAMTTTAPFGIFAWSGVFLATAGLVMFYKCSRKDPGYININARGSQNQRDDEPLLKMELENPALLSGNWSQLCITCKIVRPVRSKHCSTCDRCVEQFDHHCPWVSNCIGKILKQQILKA

SEQ ID NO: 197324 - protein, 68 aa, Zea Mays
MEASSSNGFRGRMEDGWVVYFCRGRALDICHREVSVYPYGALHPFLFRLYCVAVLLNLSAVVSPSFWV

SEQ ID NO: 197325 - protein, 148 aa, Zea Mays
MAASSLCHGHLLLFLLVSVTSACLGTAAAHQAGSGEGYTIAGRVKIDGMSEKGYGLPAKTSNTKVILNGGQRVTFARPDGYFAFHNVPAGTHLIEVSSIGYFFSPVRVDISARNPGYIQAALTETRRVLNELVLEPLKEEQYYEIPRR

SEQ ID NO: 197326 - protein, 209 aa, Zea Mays
MAASSLCHGHLLLFLLVSVTSACLGTAAAHQAGSGEGYTIAGRVKIDGMSEKGYGLPAKTSNTKVILNGGQRVTFARPDGYFAFHNVPAGTHLIEVSSIGYFFSPVRVDISARNPGYIQAALTETRRVLNELVLEPLKEEQYYEGAVLHHVTFEEPHGVNGWFYGLNGLCDAQDDGEHRSRGDEASSRTNEEQPCIILWLARQSAGLEK

SEQ ID NO: 197327 - protein, 151 aa, Zea Mays
MRLPYACKLLLKMGDVLIPSLQCGNLFVTICVRVSRFWDFSDPQDDARLLHCDMVLLDEEGNSIHATIYPPFIEKFRPLIKEGSVYNMTYFRVRASNNLYKPVPNDIMITFTNWTKLEQIHSRVDHKDYYTDAIGIVTSVSNVSPHRSKGQ

SEQ ID NO: 197328 - protein, 63 aa, Zea Mays
MVGEQFLLIWILLFLLQIDSKFCSKSSCQSGEMLNFFQLVKATIQDFHPTLRHNNSLSVSFRP

SEQ ID NO: 197329 - protein, 149 aa, Zea Mays
MPAVAFASAPAIFASASARPCRSAAPGILSSDSGRPRRGARGAVQCEVASSSAPSAAGPQAARWAQRTVVIPPQRRGCHLITNKIVNEIGNDLADFKCGMAHLFLQHTSASLTINENYDSDVQVDTETFLSRIVPEGPSAPWRHTIEVS

SEQ ID NO: 197330 - protein, 1108 aa, Zea Mays
MPMDPSAFQIIECAEAPNTGVVSSKFALNVACDSPMDLNLTNVGTSDNILYTSEFAVPGRTEDRSMQVDFHDAKAALHKPNLPLEVVDTDTHDLQSSRNTESTILPSFGDDPMKDSSGALNNGLGRSTSSQVTELTHLHRSHPPADYNPFSLHSHDSPSVSGNSEHSVPTALTLGNNIYFSSAESEGQPEENHNLLDVNLGFDVTTTEFGNVVKRKGESGNDLMNAGSQNWLTLPLTVSCLDNASAVSNGRIGLEQIVDEGVPVICQDHDIMLDIDQRGSIDVLSGQDHNLKLCGISIPQAVLLATEERNKDVDDEIVRPGRDLASQISVDSDHTYHGSTEDPVGMSSTTPDSVSSWIEAIVPEANKEHQSCKSSLLPICSSEKVSAPKEDSKKALSDSVVNSVVKSPPRINIASSTVLKVPTKQVALPGSLLEPPRLNQNARNRTWRRDNASSSNSSLHVSQTSGLPPKLPLKKNSKSQNSYIRKGNALIRNPANGNHLHSSSSLDSQNKLSKPVMRRSMNFVRNVDSKDAAHSHISVERPKTPPLPLHTKSISCAVNVLEPLSQNLQQQVLETEKEDSSGQVNSGADNLSIISLHKSEALDAGKAIYVRPKLNQLVAQGRHLGESSNISLDKVTLLQPSATSDLYFKKRKNQIILGPSTSDAPSSKDTFQAENIKSGESKVLMSSSSNNNITVAKDRLHKALQTTNTVRSFSHVWTLNGQNPRKKSYVGASHMKVLPRILPWKRKIFCQNFRGSYSSLLNTSSIGIMRKLLQTRKRSTIYTVSTDGFSLRKSGVLSIGGSSLKWSRSLEKHSRKVNEEATQAVAEVERKKREKRKRQSLRSKGRNDRYSASVAANQLTNRSRASSDSRVSSTCNEYVRVNKGNQLVRNPKKVIRMLASEKVRWSLHTVRTRLAKKRQYCQFFTRFGECKKSGGKCPYIHDRAKVVICTKFLKGLCSSTSCKLTHKVLPERMPDCSYFLQGLCTNTACPYRHVKVNSNAPVCEDFLKGYCADGDECRKKHSYVCLVFEATGECPQGSRCKLHHPKKKSKSKRSKVDTVQNNSWGRYFETNVGHGSGARIVYLEEDERQKPEQVSADGTGLRESRGAG

SEQ ID NO: 197331 - protein, 1065 aa, Zea Mays
MPMDPSAFQIIECAEAPNTGVVSSKFALNVACDSPMDLNLTNVGTSDNILYTSEFAVPGRTEDRSMQVDFHDAKAALHKPNLPLEVVDTDTHDLQSSRNTESTILPSFGDDPMKDSSGALNNGLGRSTSSQVTELTHLHRSHPPADYNPFSLHSHDSPSVSGNSEHSVPTALTLGNNIYFSSAESEGQPEENHNLLDVNLGFDVTTTEFGNVVKRKGESGNDLMNAGSQNWLTLPLTVSCLDNASAVSNGRIGLEQIVDEGVPVICQDHDIMLDIDQRGSIDVLSGQDHNLKLCGISIPQAVLLATEERNKDVDDEIVRPGRDLASQISVDSDHTYHGSTEDPVGMSSTTPDSVSSWIEAIVPEANKEHQSCKSSLLPICSSEKVSAPKEDSKKALSDSVVNSVVKSPPRINIASSTVLKVPTKQVALPGSLLEPPRLNQNARNRTWRRDNASSSNSSLHVSQTSGLPPKLPLKKNSKSQNSYIRKGNALIRNPANGNHLHSSSSLDSQNKLSKPVMRRSMNFVRNVDSKDAAHSHISVERPKTPPLPLHTKSISCAVNVLEPLSQNLQQQVLETEKEDSSGQVNSGADNLSIISLHKSEALDAGKAIYVRPKLNQLVAQGRHLGESSNISLDKVTLLQPSATSDLYFKKRKNQIILGPSTSDAPSSKDTFQAENIKSGESKVLMSSSSNNNITVAKDRLHKALQTTNTVRSFSHVWTLNGQNPRKKSYVGASHMKVLPRILPWKRKIFCQNFRGSYSSLLNTSSIGIMRKLLQTRKRSTIYTVSTDGFSLRKSGVLSIGGSSLKWSRSLEKHSRKVNEEATQAVAEVERKKREKRKRQSLRSKGRNDRYSASVAANQLTNRSRASSDSRVSSTCNEYVRVNKGNQLVRNPKKVIRMLASEKVRWSLHTVRTRLAKKRQYCQFFTRFGECKKSGGKCPYIHDRAKVVICTKFLKGLCSSTSCKLTHKVLPERMPDCSYFLQGLCTNTACPYRHVKVNSNAPVCEDFLKGYCADGDEVFMISLELYRCLLFFCTLHRRVGRHMNSYGDGMKLASIGFLANNILYQN

SEQ ID NO: 197332 - protein, 109 aa, Zea Mays
MLARFPSSLCPTFSTSSFLLLRHYHCCVLWPSGCPVSKLSSIWLISQQVAAISGDLFDHHLQRSSMIYTPFQLTLAILRIFRSSLFFVSSRPSLAIPCGFLMHSLRSDP

SEQ ID NO: 197333 - protein, 62 aa, Zea Mays
MITVGGSTSPSPCSSAALSIIHQRQPREWDAVWCRQSSLSLSAVLLPAGTGREEGTEERMNR

SEQ ID NO: 197334 - protein, 197 aa, Zea Mays
MYPVKHTYWFDIYKNIDKIPLVRCPVLVIHGTADEVVDCSHGRALWELSKVKYEPLWIKGGNHCNLELYPEYIKHLKKFVTAIEKSQPVKDESPESSGPSDPSEIGSESAENSRRSTDIRDKPRSSIDHRPSIDRREKPRGSIDRRDKNRKSIDQLDKPRASVDQPDRARKSIDRFGGMMRSVKLCNIDCFTAASGS

SEQ ID NO: 197335 - protein, 198 aa, Zea Mays
MENVLKLILVLDTLIGDVLSGTTSGDVHHRGILEGWFGAHLWNSRAIVLLATALLVFAPLVSFKRLDSLRYTSALSVALAVVFVVITAGIAIIKLFNGTVAMPKLFPELDGLNSIWNLFTAVPVLVTAYICHYNALTMNLKTEHRSSRLCEHRCSCAPVFTLPQVSLLISSSVKAHWTTCSPTLTQILAFHSVQSSMT

SEQ ID NO: 197336 - protein, 174 aa, Zea Mays
MQRDDMATLVCHTLGAADLASFYFVTPHHHHGSLAQGPSSCPGTAAGGGHGAGASMLAGELEQQEQAAAGAAARDERKARRQASNRESARRARARRRGQLDELSSRVAALRAANARLAVELSRVSAARAREARENARLRAEAGALRERLAAAEAAAAAAGHGQVRVVPEGRRRR

SEQ ID NO: 197337 - protein, 107 aa, Zea Mays
MRRRRPCMRRLARLKALDAPSPQIPTQIILHDEERIQTSWMIPYPWFCHAGLHSRRGADPRWLNFSGEQLVVLWWTTSPEKATTTCSAPPRTVSSTSPASVSCPDKE

SEQ ID NO: 197338 - protein, 87 aa, Zea Mays
MQQAALERSIQRGKRYKQCFAFIFPACANRHKIKLQLTIHAIYYLPRVHGRAYYTSILKRWCRCIFLVWTSPVLYSKNLIDNPNKFM

SEQ ID NO: 197339 - protein, 109 aa, Zea Mays
MTTRFKKPISMDYSSHSSRMCCWLQRRQTLGTAAREASSLSAGCERSTMSPLRLYSGDIVAKALGTIAVTYWSTGDADFSLPKLGVSRTVAMQFFLTPIDGHRFFRIGQ

SEQ ID NO: 197340 - protein, 739 aa, Zea Mays
MSLDFKLILDELNRRFDELEVRWDRRFSPSAYLDLPPTLLSVHQSSDTSASMPPTPTAAVGAVVIADNWGGCFDDGKEYYAAPSVVADNWGGLFEGCDADGDISSNLRDSDPDEAFVTSHSDKALLDNHHAGELIATGIEYGSYNSVHGSGGAALSQLAHSNTNFAMPTTCSTWGLTEHAMAEAVHRRALWLPRREPLPRLLRAFLTLERLDLSACASLDDASLAASVGDGPAAATTWWWCASASATGDMESTLKGIRGSDAPFVMDLNDAATVAGGIEDTYGEDRAIEEQLATPLDTLLCARLDPVKSHIGCLLLQYLKLSPTLIGAKVAFGRFDGHFFHDFTIIKLKTDSSSSPLECSTKCLSHDIGHDSRNYAHKLQNAVTHGITAAGHDILQVGLASTPAMFNIILIEDERSHLPVDAICSPDELIKTSRLCALEMVHCRKPWMRSLGNTDRLGLFSEARAVLNAARQQAMKIALNMPQHQTCIDVMGEGILYGGRPGVLKEAIVCSIPGVMVFTWTVRNFSGVTHLYSQHDRGVVWLIVAPDCYFIQHNERMHMIFYGFDLLSLQHFHGHFIEADMFAPWDGQELTQFLFSELPIYWQQSHGEFFSASIIRQFQFISQLILLAITGMNSLLFFRKLKYSSSVEIFCGAQFSFPNILLPKSWSQELATNIERHLLSEMLEVANGYNFHELHLMLASIGVTQMISCGKYLIWIIGLLTPWDPGRMVFDLKFVMLLA

SEQ ID NO: 197341 - protein, 84 aa, Zea Mays
MVLSYPLVYTFSLFIGTHATHLPSIQGPDTALHYFVTVTADALRYSQPSNVCDLLSSYLQCPERTSYNNCMQEPTCFYCTCEAT

SEQ ID NO: 197342 - protein, 825 aa, Zea Mays
MDAGGLGFLVAGSRREFVVLNVDDFSKQGSSQGCPDYICQICGDDIDILQEENEYFVACNDCAFPVCRTCYEYERQEGTQVCPRCKTRYKRHKGSPRVHGDEEEEGSDDIESEFASSIAGRSNIVHPYRVSVAESSINSWDIDSVSITNSGASVHFYEEHVGTPTNHHALVVHPNTGEIMRYNPLQTRPINPNRDLALYGYGSVAWKNRVEWKTKQQNKMQKVSSDGEGSDLNDFDSDCDIPRCAEIICEIWFAFSWILDQFPKWHPIQRETYLDRLSLRYEKEGKPPELARIDVFVSTVDPMKEPPLIIANTVLSILAVDYPVDKVCCYVSDDGAAMLTFEALTETCLFARKWVPFCKKHKIEPRAPEWYFAQKIDYLREKVHPEFVRERRAMKREYEEFKVRINTVVANSCKVPEGGWSLPEGAPWHGNNVRDHAGMVQVITGNDCVMDDAGNKLPWLVYVSREKRPGHDHHKKAGALNALLRTSAILSNAPFVLNVDCDHYMNNSKALREAMCFLMDPVLGEKICYVQFPQRFDGIDQHDRYSNHNVVFFDINMKGLDGIQGPIYVGTGCVFRRHALYGYDAPTATKPPSKTCNCWPKSCCLCCGSKRKCSKAKKKQEHQKKVKCRNASKQVHALEVAGRETAPPVPREKFEKRFGQSDAFLASTLQDNGEGCHFDMLKSLDDCIHVLSCGYENKTQWGKEVGWIYGSVTEDILTGFKMHCHGWRSVYCMPKRPAFKGSAPINLTDRLHQVLRWALGSVEIFLSKHCPIWYGYRCGLKPLERLSYINCVIYPWTSIPLLIYCALPAFCLLSGKFMVPELPAS

SEQ ID NO: 197343 - protein, 576 aa, Zea Mays
MILTATAIFPDQFPKWHPIQRETYLDRLSLRYEKEGKPPELARIDVFVSTVDPMKEPPLIIANTVLSILAVDYPVDKVCCYVSDDGAAMLTFEALTETCLFARKWVPFCKKHKIEPRAPEWYFAQKIDYLREKVHPEFVRERRAMKREYEEFKVRINTVVANSCKVPEGGWSLPEGAPWHGNNVRDHAGMVQVITGNDCVMDDAGNKLPWLVYVSREKRPGHDHHKKAGALNALLRTSAILSNAPFVLNVDCDHYMNNSKALREAMCFLMDPVLGEKICYVQFPQRFDGIDQHDRYSNHNVVFFDINMKGLDGIQGPIYVGTGCVFRRHALYGYDAPTATKPPSKTCNCWPKSCCLCCGSKRKCSKAKKKQEHQKKVKCRNASKQVHALEVAGRETAPPVPREKFEKRFGQSDAFLASTLQDNGEGCHFDMLKSLDDCIHVLSCGYENKTQWGKEVGWIYGSVTEDILTGFKMHCHGWRSVYCMPKRPAFKGSAPINLTDRLHQVLRWALGSVEIFLSKHCPIWYGYRCGLKPLERLSYINCVIYPWTSIPLLIYCALPAFCLLSGKFMVPELPAS

SEQ ID NO: 197344 - protein, 743 aa, Zea Mays
MPSVQDPVQTPQSPRVHGDEEEEGSDDIESEFASSIAGRSNIVHPYRVSVAESSINSWDIDSVSITNSGASVHFYEEHVGTPTNHHALVVHPNTGEIMRYNPLQTRPINPNRDLALYGYGSVAWKNRVEWKTKQQNKMQKVSSDGEGSDLNDFDSDCDIPRCAEIICEIWFAFSWILDQFPKWHPIQRETYLDRLSLRYEKEGKPPELARIDVFVSTVDPMKEPPLIIANTVLSILAVDYPVDKVCCYVSDDGAAMLTFEALTETCLFARKWVPFCKKHKIEPRAPEWYFAQKIDYLREKVHPEFVRERRAMKREYEEFKVRINTVVANSCKVPEGGWSLPEGAPWHGNNVRDHAGMVQVITGNDCVMDDAGNKLPWLVYVSREKRPGHDHHKKAGALNALLRTSAILSNAPFVLNVDCDHYMNNSKALREAMCFLMDPVLGEKICYVQFPQRFDGIDQHDRYSNHNVVFFDINMKGLDGIQGPIYVGTGCVFRRHALYGYDAPTATKPPSKTCNCWPKSCCLCCGSKRKCSKAKKKQEHQKKVKCRNASKQVHALEVAGRETAPPVPREKFEKRFGQSDAFLASTLQDNGEGCHFDMLKSLDDCIHVLSCGYENKTQWGKEVGWIYGSVTEDILTGFKMHCHGWRSVYCMPKRPAFKGSAPINLTDRLHQVLRWALGSVEIFLSKHCPIWYGYRCGLKPLERLSYINCVIYPWTSIPLLIYCALPAFCLLSGKFMVPELPAS

SEQ ID NO: 197345 - protein, 883 aa, Zea Mays
MDAGGLGFLVAGSRREFVVLNVDDFSKQGSSQGCPDYICQICGDDIDILQEENEYFVACNDCAFPVCRTCYEYERQEGTQVCPRCKTRYKRHKGSPRVHGDEEEEGSDDIESEFASSIAGRSNIVHPYRVSVAESSINSWDIDSVSITNSGASVHFYEEHVGTPTNHHALVVHPNTGEIMRYNPLQTRPINPNRDLALYGYGSVAWKNRVEWKTKQQNKMQKVSSDGEGSDLNDFDSDCDIPRPISQVAPNTERNILRSIIIKREYEEFKVRINTVVANSCKVPEGGWSLPEGAPWHGNNVRDHAGMVQVITGNDCVMDDAGNKLPWLVYVSREKRPGHDHHKKAGALNALLRTSAILSNAPFVLNVDCDHYMNNSKALREAMCFLMDPVLGEKICYVQFPQRFDGIDQHDRYSNHNVVFFDINMKGLDGIQGPIYVGTGCVFRRHALYGYDAPTATKPPSKTCNCWPKSCCLCCGSKRKCSKAKKKQEHQKKVKCRNASKQVHALEVAGRETAPPVPREKFEKRFGQSDAFLASTLQDNGEGCHFDMLKSLDDCIHVLSCGYENKTQWGKEVGWIYGSVTEDILTGFKMHCHGWRSVYCMPKRPAFKGSAPINLTDRLHQVLRWALGSVEIFLSKHCPIWYGYRCGLKPLERLSYINCVIYPWTSIPLLIYCALPAFCLLSGKFMVPEMNVYSSILFIALFVSIAATSILEMQWGGVGIDDWWRNEQFWVIGGVSSHLFALCQGLLKVLGGVSTKFRVTLKGGGTDEFSELYEFKWTWLLVPPMTLLLLNVVAVLAGVSKAVTDGYEAWGPLLGKLFFSFWVVLHLHPFLKGVIGRQDRVPTVVVVLSMLLASILSLLWVRVSPFATKFDGPVLEVCGLDCE

SEQ ID NO: 197346 - protein, 826 aa, Zea Mays
MDAGGLGFLVAGSRREFVVLNVDDFSKQGSSQGCPDYICQICGDDIDILQEENEYFVACNDCAFPVCRTCYEYERQEGTQVCPRCKTRYKRHKGSPRVHGDEEEEGSDDIESEFASSIAGRSNIVHPYRVSVAESSINSWDIDSVSITNSGASVHFYEEHVGTPTNHHALVVHPNTGEIMRYNPLQTRPINPNRDLALYGYGSVAWKNRVEWKTKQQNKMQKVSSDGEGSDLNDFDSDCDIPRCAEIICEIWFAFSWILDQFPKWHPIQRETYLDRLSLRYEKEGKPPELARIDVFVSTVDPMKEPPLIIANTVLSILAVDYPVDKVCCYVSDDGAAMLTFEALTETCLFARKWVPFCKKHKIEPRAPEWYFAQKIDYLREKVHPEFVRERRAMKREYEEFKVRINTVVANSCKVPEGGWSLPEGAPWHGNNVRDHAGMVQVITGNDCVMDDAGNKLPWLVYVSREKRPGHDHHKKAGALNALLRTSAILSNAPFVLNVDCDHYMNNSKALREAMCFLMDPVLGEKICYVQFPQRFDGIDQHDRYSNHNVVFFDINMKGLDGIQGPIYVGTGCVFRRHALYGYDAPTATKPPSKTCNCWPKSCCLCCGSKRKCSKAKKKQEHQKKVKCRNASKQVHALEVAGRETAPPVPREKFEKRFGQSDAFLASTLQDNGEGCHFDMLKSLDDCIHVLSCGYENKTQWGKEVGWIYGSVTEDILTGFKMHCHGWRSVYCMPKRPAFKGSAPINLTDRLHQVLRWALGSVEIFLSKHCPIWYGYRCGLKPLERLSYINCVIYPWTSIPLLIYCALPAFCLLSGKFMVPEQLPAS

SEQ ID NO: 197347 - protein, 271 aa, Zea Mays
MEGAAGIRTRPAVCVTGAGGFVASWLVERLLAGGRYMVHGTVRDPGRAARSGRDGHQERPEGVLGGQGEEGRRGVVGGRRDGEPWLAPERGHGRGLLVRRRILQNHSGQNWYCLSKTLAELEALDYAKRSGLDVVSVCPSLVIGPLLQSTVNASSSVIVDCLKGDREVKLKLRNFVDVRDVADALLLVYETPEASGRYICDANARQMSEVVALLKDWYPAYSHAATKFVQVSDEPLFSSKKLQALGWKFRTLEESLRDSVESFKAAGVLVD

SEQ ID NO: 197348 - protein, 1662 aa, Zea Mays
MPRAPSAAPPHPPACSPAPSTRSSSTPPGAGTPLSSPPPKSALDLLSSSPAPDDEPETSSPSPVPGLPAPAAEAALTALLLALDPASPKVAEPALECVAGLLSLRLLLGDVDAADPSLISKLFAAVLSCVSLGGSGDEALELSVLRVLVAFARCPGVSVSGECLGQVVKACYNVYLGSPSGGNQLCAKLALAQVLVIVFARVEADAMDVRVRTVSAADMMDLSDRSLNDSSVVQAAQVFINEAMEGSDVPEEAPHVDEASVEAEGAGEDGGISKIREDGLALFKNLCKLSMKFGTPDSPDDPMLLRGKVLSLELVRMVIDNAGLFWKTNEKYLEAVKQYLCLSLLKNSALSAMSVFQLLCSIFMSLISRFRSGLKEEIGMFFPMLILRVLENVLQPSFLQKMTVLNFLEKMSKEPQVIIDIFVNFDCDVDAPNIFERIVNGLLKTALGVPTGSTTTLTVAQDQTFRLESVKCLAIVVKSMSAWMDQQLRIGEFSPGNSETLSSADNHNIHNGEEWSGIDYELQFDTSSSDITDSSSLEQRRAYKMELQKGITLFNKKPSKGIDFLIRSKKIGNSPEGVASFLRSTAGLNATMIGDYLGERDDFPLKVMHAYVDALNFEGMDFGQAIRFFLQGFRLPGEAQKIDRIMEKFAQGYCKCNPNAFISADTAYVLAYSVILLNTDAHNPMVKNKMSKADFMRNNRGIDDGKDLPEDYLSALYDQIVNNEIKMSADSSVAQTKQSNSVGRLLGLDNIINFVNWRPAEDKAVGANDLLIKHIQEKIKAKRGKSESTFYVVADATILRFMMESCWAPMMAAFSVLLDQCDDKAATSQCLKGLRFSVHITSVMCMQTQRDAFLTSIAKFTSLHSAAEMKQKSIDSMKAIISIAIEDGNYLQEAWEHVLTCLSRFEHLHLLGEGVPTDASFLTVPLIESEEKTKKSTSVLSSKKTSALQNPAVMAAVRGGTYDSTVAKGSVSALVTPEQINNFLSSINLLDQIGIVELNHIFAHSQRLNSDAIVAFVKALCKVSMTELQSPTDPRIFCLTKIVEIAHYNMNRIRLVWSRIWKVLSDFFVSVGLLENLSVAIFVMDSLRQLAMKFLEREELANYNFQNEFLRPFVIVMQRSNAPEVFTFAAADDTRSTVLLAFETVEKIVRDYFHHITETETTAFTDCVTCLIAFTSSQFNSDANLNAIAFLRFCAVKLAEEGFSCQDRAFEQPRNSAMVCGGNATVQKDGHISLWMPLLAGLAKLTSDSRLNIKKGAVGVLFDILKDHGHLFSLTFWTDIFEHVVYPLFSNERSTPSDQISTSNSAEYNLPDLETQTLAVKCLVGLFVNFFDVIRPELGRTASIVTSFIRSPYKHCATIGVSAIMRLADGVGNKLSKEEWKEILIFFRESVTHTFITFSKIVRMMQDIDIPDRIDSYSETEQYLDHEMYVNDEEEANMETASYAIVKLKNHMALLLMVIQNIIKLYEEHSKYLHAEHISILLEMMSAIAIHSSEVSSELSLQSKFHKACSLLEVSEPAIVHFENDSYQSYLKLLQALQHDYPSLSEEMNIESQVLDTCEQILQTYLKCAGHKPCDGASQRNPPLHCAVPLSASKKEELAARTPLVLQVMKLLGDLERDSFRRILPCFFPLLADLIRCEHSSGEVQHALYNIFQSAILPMIRV

SEQ ID NO: 197349 - protein, 94 aa, Zea Mays
MQEGEAELGGEVDGISVDQFFDALYDGEEAKGEREAGASADVDSGRDDVLEVVTPEAGTVEVDGDDPISKKKMRYVVSAVALDIRRFFPLRLRN

SEQ ID NO: 197350 - protein, 142 aa, Zea Mays
MFHLTSIMPLLANCCSAKRKRIPSLEDDMVIPYKSDKLQNDSMVIDMGPPADWVKINVRKTKDCYEVYALVPGLLREEVHVQSDPAGRLIVTGEPEQLDNPWGVTPFKKVIRLPSRIDPHQTSAVVTLHGQLFVRAPFEQSK

SEQ ID NO: 197351 - protein, 412 aa, Zea Mays
MSQEQGMEEPPPQAVGEAQSAADVPMSEAAAVEDEDEEPVMGEGQGGESGTADAVDSVKASVKPEAEGAEEGDREELNGGPTADLTDEVVKLENGDGPVPVGGSADECGAGDGGVDKGLVGQNEPVVNQLVLVQAEEELALSKISNSSFMFDYTTGGDDSGTEEEQAAFMKELERFHREKMLEFKPPKFYGEGLNCLKLWRQVTGLGGYDQVTSCKLWRQVGESFKPPKTCTTVSWTFRNFYEKALLEYEKHKIETGEFQVASSALPDRVGSESQVGGSHVSGSGRARRESATRAMQGWHSHRLLGNGENADPIIKDKGPIVLKKDKTPKSSGSAKRKRIPSLEDDMVIPYKSDKLQNDSMVIDMGPPADWVKINVRKTKDCYEVYALVPGLLREEVSKCKSFLMVVFCPSC

SEQ ID NO: 197352 - protein, 295 aa, Zea Mays
MSQEQGMEEPPPQAVGEAQSAADVPMSEAAAVEDEDEEPVMGEGQGGESGTADAVDSVKASVKPEAEGAEEGDREELNGGPTADLTDEVVKLENGDGPVPVGGSADECGAGDGGVDKGLVGQNEPVVNQLVLVQAEEELALSKISNSSFMFDYTTGGDDSGTEEEQAAFMKELERFHREKMLEFKPPKFYGEGLNCLKLWRQVTGLGGYDQVTSCKLWRQVGESFKPPKTCTTVSWTFRNFYEKALLEYEKHKIETGEFQVASSALPDRVGSESQKRICNSCNARLAFSPPTRQW

SEQ ID NO: 197353 - protein, 357 aa, Zea Mays
MSQEQGMEEPPPQAVGEAQSAADVPMSEAAAVEDEDEEPVMGEGQGGESGTADAVDSVKASVKPEAEGAEEGDREELNGGPTADLTDEVVKLENGDGPVPVGGSADECGAGDGGVDKGLVGQNEPVVNQLVLVQAEEELALSKISNSSFMFDYTTGGDDSGTEEEQAAFMKELERFHREKMLEFKPPKFYGEGLNCLKLWRQVTGLGGYDQVTSCKLWRQVGESFKPPKTCTTVSWTFRNFYEKALLEYEKHKIETGEFQVASSALPDRVGSESQVGGSHVSGSGRARRESATRAMQGWHSHRLLGNGENADPIIKDKGPIVLKKDKTPKSSGSAKRKRIPSLEDDMVIPYKSDKLQ

SEQ ID NO: 197354 - protein, 382 aa, Zea Mays
MSQEQGMEEPPPQAVGEAQSAADVPMSEAAAVEDEDEEPVMGEGQGGESGTADAVDSVKASVKPEAEGAEEGDREELNGGPTADLTDEVVKLENGDGPVPVGGSADECGAGDGGVDKGLVGQNEPVVNQLVLVQAEEELALSKISNSSFMFDYTTGGDDSGTEEEQAAFMKELERFHREKMLEFKPPKFYGEGLNCLKLWRQVTGLGGYDQVTSCKLWRQVGESFKPPKTCTTVSWTFRNFYEKALLEYEKHKIETGEFQVASSALPDRVGSESQVGGSHVSGSGRARRESATRAMQGWHSHRLLGNGENADPIIKDKGPIVLKKDKTPKSSGSAKRKRIPSLEDDMVIPYKSDKLQNDSMVIDMGPPADWVKINVRKTVSI

SEQ ID NO: 197355 - protein, 114 aa, Zea Mays
MTSSVSGSSKSPRKPPVSYRKWMDADNPVCCKCSGVMLELTSWTDSNPSRGFLRCQKGSEGCNLFQWEAEIARLRMQLEKITSDRQTENDFSCSVCCNLVFAHALVSTWGCGRQ

SEQ ID NO: 197356 - protein, 71 aa, Zea Mays
MTSSVSGSSKSPRKPPVSYRKWMDADNPVCCKCSGVMLELTSWTDSNPSRGFLRCQKKGVIFSNGKLRSPD

SEQ ID NO: 197357 - protein, 623 aa, Zea Mays
MDADTFPVGLRVLAVDDDRVCLKILERQLKCCNYNTTVVTDAQTALDMLRERKDGNQFDLVISDVVMTKMDGFKLLELIGLEMDLPVIMLSANSETQTIMKGIKHGACDYMVKPVRLEQLRGIWTHVVKNSKIDPRNNIGSDSDDVVQKLPSGDGDKGEKVGETRQKKYPKKNKKTVDVADEDNEKTSAQKKQRVQWCGELHQKFVQAVRQIGIDRAVPKKILEIMDVEGLTRENVASHLQKYRIYLRKLGDGTLRSSSPFADETEAFRRNMNVPSFISSSSSSNHFAKMNSSSLIGTETLLPTESVYIMSPQKNLGISRSNMEPVSHGVNLPKDVIPMPVQDISRFISSGKSYAPVWSDGLLGRSQCFPSGPSGSSFANISNSVVLNASKPFSVDISGRSLANGSNDRPPLTSNMCFSSSHSCSSYASILGGKILGSSRRIPFEDIADGEMLAPGNLPLQSPQLVKQPSSAGLFNEVARDVHQFAGLSNSWKVAVPPRFSDLGHNVGTSEGHSQGNIFKINRLSRLARSSAQIPTFRNEYQKKTTGIMGKAVPVVLNGGGANDNLHGVSTVNQQAVNDQVNNEFFMGTNEAHNAESDDLDDFLAYLVNQDFINNGDSFIDRD

SEQ ID NO: 197358 - protein, 672 aa, Zea Mays
MDADTFPVGLRVLAVDDDRVCLKILERQLKCCNYNTTVVTDAQTALDMLRERKDGNQFDLVISDVVMTKMDGFKLLELIGLEMDLPVIMLSANSETQTIMKGIKHGACDYMVKPVRLEQLRGIWTHVVKNSKIDPRNNIGSDSDDVVQKLPSGDGDKGEKVGETRQKKYPKKNKKTVDVADEDNEKTSAQKKQRVQWCGELHQKFVQAVRQIGIDRAVPKKILEIMDVEGLTRENVASHLQKYRIYLRKLGDGTLRSSSPFADETEAFRRNMNVPSFISSSSSSNHFAKMNSSSLIGTETLLPTESVYIMSPQKNLGISRSNMEPVSHGVNLPKDVIPMPVQDISRFISSGKSYAPVWSDGLLGRSQCFPSGPSGSSFANISNSVVLNASKPFSVDISGRSLANGSNDRPPLTSNMCFSSSHSCSSYASILGGKILGSSRRIPFEDIADGEMLAPGNLPLQSPQLVKQPSSAGLFNEVARDVHQFAGLSNSWKVAVPPRFSDLGHNVGTSEGHSQGNIFKINRLSRLARSSAQIPTFRNEYQKKTTGIMGKAVPVVGFREQVAPFSFENNTRSTVTLIGNSALSSSSSTRPGLNINNSAMLTQVLNGGGANDNLHGVSTVNQQAVNDQVNNEFFMGTNEAHNAESDDLDDFLAYLVNQGLRICPLTLEERCC

SEQ ID NO: 197359 - protein, 389 aa, Zea Mays
MNVPSFISSSSSSNHFAKMNSSSLIGTETLLPTESVYIMSPQKNLGISRSNMEPVSHGVNLPKDVIPMPVQDISRFISSGKSYAPVWSDGLLGRSQCFPSGPSGSSFANISNSVVLNASKPFSVDISGRSLANGSNDRPPLTSNMCFSSSHSCSSYASILGGKILGSSRRIPFEDIADGEMLAPGNLPLQSPQLVKQPSSAGLFNEVARDVHQFAGLSNSWKVAVPPRFSDLGHNVGTSEGHSQGNIFKINRLSRLARSSAQIPTFRNEYQKKTTGIMGKAVPVVGFREQVAPFSFENNTRSTVTLIGNSALSSSSSTRPGLNINNSAMLTQVLNGGGANDNLHGVSTVNQQAVNDQVNNEFFMGTNEAHNAESDDLDDFLAYLVNQLG

SEQ ID NO: 197360 - protein, 662 aa, Zea Mays
MDADTFPVGLRVLAVDDDRVCLKILERQLKCCNYNTTVVTDAQTALDMLRERKDGNQFDLVISDVVMTKMDGFKLLELIGLEMDLPVIMLSANSETQTIMKGIKHGACDYMVKPVRLEQLRGIWTHVVKNSKIDPRNNIGSDSDDVVQKLPSGDGDKGEKVGETRQKKYPKKNKKTVDVADEDNEKTSAQKKQRVQWCGELHQKFVQAVRQIGIDRAVPKKILEIMDVEGLTRENVASHLQKYRIYLRKLGDGTLRSSSPFADETEAFRRNMNVPSFISSSSSSNHFAKMNSSSLIGTETLLPTESVYIMSPQKNLGISRSNMEPVSHGVNLPKDVIPMPVQDISRFISSGKSYAPVWSDGLLGRSQCFPSGPSGSSFANISNSVVLNASKPFSVDISGRSLANGSNDRPPLTSNMCFSSSHSCSSYASILGGKILGSSRRIPFEDIADGEMLAPGNLPLQSPQLVKQPSSAGLFNEVARDVHQFAGLSNSWKVAVPPRFSDLGHNVGTSEGHSQGNIFKINRLSRLARSSAQIPTFRNEYQKKTTGIMGKAVPVVGFREQVAPFSFENNTRSTVTLIGNSALSSSSSTRPGLNINNSAMLTQVLNGGGANDNLHGVSTVNQQAVNDQVNNEFFMGTNEAHNAESDDLDDFLAYLVNQLHQQ

SEQ ID NO: 197361 - protein, 338 aa, Zea Mays
MHVLPLALHPLMLLACHHRRLRPPPPLKKKKLGLRRPTTDEAMLSSLHHHSSSSSDTDNNNGNNKNGSSNNSDVLAAAAVPSARDLVLACADLLQRGDLQAARRAVGVLLSAASPRADAADRLAYHFARALALRADARAAATGLVAAAAARPASSAAYLAFNQIAPFLRFAHLTANQAILDAVEGARRIHILDLDAAHGVQWPPLLQAIAERADPAAGPPEVRITGAGADRDTLLRTGSRLRAFARSIQLPFHFTPLLLSCAALGPSGGRWWRGLERWGAAARGAGFAARPLSAFAVSQARLLLRLHYPSEGYLVQEARGACFLGWQTRPLLSVSSWQ

SEQ ID NO: 197362 - protein, 59 aa, Zea Mays
MLYALILLMFLSCCLYVCVMLLFYPLPLGACCWLATPMYTCTPFFLLLLLCSLACYSCV

SEQ ID NO: 197363 - protein, 356 aa, Zea Mays
MAAATAFRSGTRRGDALAPVEDAGSATRERQAAGRGGGSVRRSKSLSRFPPPSPSTEDTATPSSRFVNKVRGGGSGGVFPPQVSLDDLADEFFRARAESEDDDDEETAARGRSRLPAAAERGGGGAGGRRSSTARYARQTESSRQRGRSVSRPPAERRGVAANAVDGGPAARRQRYASVDRRAAMDRQRWCDSDNDMEVPHQYVSRGMHTKSSSGNSLQSSFHKPSKANQALKRSTSQKDFFHSRDSSSSHSSITDDESRSSLSFHSRNQKAVCAVYGLDKEHGIDDGAGNVLYDVMRKEVRQAVEEIRNQLEEAMTKSEPSEKAINSDAQPTQVITQLRRSYTSKLEERSGSRNC

SEQ ID NO: 197364 - protein, 549 aa, Zea Mays
MAAPTVLAFLPLPLLLLAAFSSASASAHPNSFRPIVPLRLQALLQQQQRRRASSDAKLVSAAADGTNSTAQPFTTHYFPQELDHFTFTPNASMLFRQKYLVNDTFWRRPRRGGGGGAGPLFVYTGNEGDIEWFATNTGFMFDIAPKFGALLVFIEHRFYGESLPFGDDSYSSAETEGYLTSTQALADFAILITGLKRNLSAETAPVVVFGGSYGGMLASWFRLKYPHVAIGALASSAPILQFDHITPWNSFSDAVSQDYKSESLNCFSVIKAAWDVLDERGSTDTGLLELSKLFRACKSVKHADSIAGWLQTAFTYTAMVDYPTPANFLMDLPAYPVKEMCKIIDGFPAGADILEKVFAAANLYYNYTGDQACNQIESDSDDSSSSLGLSGWGWQACTEMIMPMSTSNASMFPPSSFSYEDTSNACFQSTGVRPRPHWITTEYGGYRIDKVLKRFGSNIIFSNGMRDPWSRGGVLKNISSSIVALVTEKGEHGNLRRKKKKKKKKWAHHLDLRFATDEDPDWVTEQRRQEVEIIEGWIDQYHRDMAQVS

SEQ ID NO: 197365 - protein, 840 aa, Zea Mays
MLSQHVLTLTIFLFFLVCFCHSLHDRLTSVTPLYPGDKLVSDNGGMFALGFFNLTTVNSTRSLYLGIWYNNIPERTYVWVANRNSPITTPSAKLVLTNTSRLVLSDSEGRVVWATDNSVVAGGSGTGTGGSGVLRSTGSFELELQLPNGTAGVVWKSLDHPTDTILPTFRLWTNYRAHTAVRVVAWKGPRDPSAGEFSLSGDPGSRGLQIVIWRGTGTGTAGGRSWRSGVWNGAGAFSSINRFVYSQVVDDGGTIYAAYNAAGGPTTHWKLDYTGNVSLRVWNVESSSWSVLFEGPGTGCLGYGACGPFGYCDATGRDGGVQECKCLDGFEPEDGFFRDFSRGCRRKEALQACGGGGEGGGGRRHYFLALPGMKVPDKFLYVRNRSFEECAAECDRNCSCTAYAYANLSGIVTMSATSDVSRCLLWMGELVDTGKDSDLGNNNKKKIGSMAMEIVLPVMACLLMLTSCVCLVTICKSRARTRRWNKEAHERSVHGFWDQNPELSCTSFAELKAATNSFHEANLLGQGGFGKVYKGTLEDGREVAVKRLSNGSEQGKEQLRNELVLIASLQHKNLVRLLGCCIHEDEKLLIYEYLPNKSLDKFLFDPALKSMLDWPKRFNIIKGVARGILYLHQDSRMVIIHRDLKASNILLDAEMDPKISDFGIARIFGCREQQATCFACEMVRTHSGYMSPEYTMEGIFSVKSDTYSFGILLLEIVSGLKISAPPHLLTGYPSLIAYAWNLWKDGTAREFVDAMVVESRCSLDEALQCIHIGLLCVQDSPNDRPLMSLVVSMLNNEAAPRPVPSQPLFFAQRYHEALATRGDYSEHSANDVSLSMLQGR

SEQ ID NO: 197366 - protein, 282 aa, Zea Mays
MRSNKEVCLARIYHRALYFSLRGISRLSGCESSAASDKRHPDLGVGLSLLFLLAKTSDEFNKMAKVRAEMEALLRELKDGVRTKSGGTEGHGAPKDRNRESTTSSCVTDGNDQTASARLEYQLASSCVEPAGYERSSEDDGGCCARMELDVLEEEFHAELELLQGNYESGTPSFLPEEEEEEHYSEPYDEMADYRDGVDEDSRGGVEDEDDDDDHDAEYNGVSAVQLERRLHELLHERNRDRIEELEAALRRAEKKLVEKEMEVSLWKDTAKFALRQDKELQ

SEQ ID NO: 197367 - protein, 481 aa, Zea Mays
MATNSAVIVLLLVAAAVLACAGGARGFYLPGVAPAGFLKKDPLAVKVNQLSSIKTQLPYSYYSLPFCRPGTIVDSAENLGEVLRGDRIENSLYVFEMMEPRLCQIVCKIAPTQDEAKDLKEKIEDEYRINMILDNLPLVVPIKRLDQEAPTVYQQGVHIGIKGQYSGSKEEKHFIHNHFTFLVKYHKDDTGLARIVAFEVKPYSIKHEFDGDWKGNATLLKTCDPHSRRLVVDSDSPQEVDANKEIIFTYDINFEESPIKWASRWDTYLLMADDQIHWFSIVNSLMIVLFLSGMVAMIMLRTLYRDISKYNQLEDQEDAQEETGWKLVHGDVFRPPVNADLLCVYVGTGVQFLGMLLVTLLFAILGLLSPANRGGLMTAMLLLWVFMGLFAGDRHRALLLPALRRGLPVVVEILPDVWLVSAVPLPLRHVLLLHQAGNNEDRLRRPILWLHAHCLLRLLCAHRHHWLLRLLLVHQAHLLFG

SEQ ID NO: 197368 - protein, 355 aa, Zea Mays
MVIYLSTPKTDKVSEDGENDKLKFGLSSMQGWRATMEDAHSALLDLDNDTASFGVFDGHGGKVVAKFCAKYLHIEVLHTEAYAAGDLGAAVHRAYLRMDEMMRGQRGWQELQALGDKINQFTGITEGLIWSPKASDSNDRHDDWAFEEGPHSDFTGPNCGSTACVALVRNRQLVVANAGDSRCVISRNGQAYNLSRDHKPELEAERERIQSAGGYIKMGHVNGSLNLSRAIGDMELKQNKFLSPDKQILTANPDINIVELCDDDEFIVLACDGIWDCMSSQQLVDFIREHINTEESLSAVCEGVLDRCLAPSTMGGEGCDNMTMILVQFKKPFAQVKDASDAEQLTGDAGCSETQ

SEQ ID NO: 197369 - protein, 211 aa, Zea Mays
MVIYLSTPKTDKVSEDGENDKLKFGLSSMQGWRATMEDAHSALLDLDNDTASFGVFDGHGGKVVAKFCAKYLHIEVLHTEAYAAGDLGAAVHRAYLRMDEMMRGQRGWQELQALGDKINQFTGITEGLIWSPKASDSNDRHDDWAFEEVLVELAWFHNSILIFLCLGEHAICLLFINLAVIGFHSESVTGLSLIRDHTLTLLGQIVGVQHV

SEQ ID NO: 197370 - protein, 126 aa, Zea Mays
MVIYLSTPKTDKVSEDGENDKLKFGLSSMQGWRATMEDAGPHSDFTGPNCGSTACVALVRNRQLVVANAGDSRCVISRNGQAYNLSRDHKPELEAERERIQSAGGYIKMGHVNGSLNLSRAIGRAM

SEQ ID NO: 197371 - protein, 144 aa, Zea Mays
MVADLAAGDRPASRSTKLVLSDPSKSLSSIVAAICYAWMLPSKGDGQATVPVVNMSRSRMARCRQAAWLLYHVGVDASALLFADEVDTDGLIMDQRVNLLVVGQDILKSKAEVGSVCTTLTHTYCEDAYSLLQNLDIKKLLVSC

SEQ ID NO: 197372 - protein, 250 aa, Zea Mays
MVADLAAGDRPASRSTKLVLSDPSKSLSSIVAAICYAWMLPSKGDGQATVPVVNMSRSRMARCRQAAWLLYHVGVDASALLFADEVDTDGLIMDQRVNLLVVGQDILKSKAEVGSVCTTLTHTYCEDAYSLLQNLDIKKLLLAGILLDTNNLSKKCSNRDSDAVQLLLFGTSEHMRHELFQQLMLDHNDHSFVEYLKNTYRYSTINANQRTSRGSGGKASDEASRGKNKFFLANGLVLVQIILLSFVLVW

SEQ ID NO: 197373 - protein, 55 aa, Zea Mays
MPRHLISDAHEWINEIPTVPVYYPAKPQPRERAWRNQRGKKTLLSLTLVRLCEMT

SEQ ID NO: 197374 - protein, 180 aa, Zea Mays
MPCFPPSISPLPPQLKKRSHPRSLVHISFHTCTGDAHAQAAQHNCCCREAKNPSALLPRLPPQAHPGMGNIAASGGVQVRRRPPAVDERLTRPRRLVRELPDLDAGRLRRLIRTGDLAPCFDPAEDASAGLTEECPICFFFYLSLNRSRCCGKGICTECFLQLMPSGASKVIHTSSRHRH

SEQ ID NO: 197375 - protein, 260 aa, Zea Mays
MELTARPRPGHAPCARQPCASPSARARLRPAPRTPPWSFPELAPWRPAELLPAVFLLGVRVFLCATVFLPELAPAPCIPHGPEPSSSSSSDPSPMALCVLAAARPSISRGSPSPAPLCSCRRPACWRAHAPLAAPPCFSSSPSLLAACALRSARSAAVLSPGSLCPFSTAPCTASHASLAIMASLFPVAPRHRRARVLSVEVAAPLSFWLPLSSCGFWSCPHLRHQHLHPSIVIVSAALLHLAITPKDEREAPVPRSSNR

SEQ ID NO: 197376 - protein, 197 aa, Zea Mays
MRGPNAATATSKGGAMAGFKQDLLRNLLLGIRACRPFDATSLEDRKRAVKRSADVAMAAARAAAGGGRARWPKAILAAAAASGHSPGGIRKARKSACKRVVRRPRRATASCDVVARRLVRSRTMALRKVIPGADATAAMDDEAVLLRETIDYAVHLRAQVDVLRRVSAAVQRSTFLRRGEGPIMAYYDPSHTKKKIR

SEQ ID NO: 197377 - protein, 142 aa, Zea Mays
MILYIATVAEPPPSAKARPDRARVQASAEEHLGGLSIGLAHGCLDGSGSGVDFRPAPPLYCIARCIYSKTPDSCNNSQGFVKFVTLKLVIYLFARLSCWMVSTLSSRRKKKLLRVLVGNRDLVVAALKLNGAFSFQFMPAET

SEQ ID NO: 197378 - protein, 336 aa, Zea Mays
MQRAPERRRGAGPLLLLALLVALAAAPRLVRAVTDATDVSAINGLYMSLGSPLLPGWTGNGGDPCGESWQGVVCTGSSITGITMNAANLGGQLGSLGNFTAITSLELNNNNIGGTIPEDLPVTLQSLFLSANQLTGSIPSSLSKLENLTAMSVNGNHLNGDLPDTFDSLNRLVNLDISSNNLSGVLPSSMKNLASLTSLHMQDNQLSGTLNVLQDLPLKDLNIENNLFSGPVPASLLNIPNFKTGIHSIPASSHLHLRLQQDQLQHQQHQNQLQHQHPPLQIQRPQHQHPHFLQDLLPRLKQPQTLLKDQLPEIALHHLRNTVHQPSRLLALFLPE

SEQ ID NO: 197379 - protein, 630 aa, Zea Mays
MSVNGNHLNGDLPDTFDSLNRLVNLDISSNNLSGVLPSSMKNLASLTSLHMQDNQLSGTLNVLQDLPLKDLNIENNLFSGPVPASLLNIPNFKKDGNPFNTSIVPSASPPSTGPAPTPAASKPAPTPAPTTSNSTPPAPAPSFPSRSPPPPKTTSNSSEGSTTRDSTSPSKKHSTSTLKIVGFVLAGVVLFIIIVLLVLFCLSKYQERRSRYDHNRSQQARVHHRVEPQIKPPPVQQSNDLKKGSGEVLDRRGHELSSSTAALAKKSPENQKEHVINFDRTDSDLFPVSLPPPPPPPPLPPIERVIANPIVPPEKRYSPPPKTSSSTSATSFSIASLQQYTNSFREENVIRESRLGKVYLAELPDGKLLEVLKIDNANGRISVDDFLEEVECILDIKHPNILELVGYCAEYGQRLLVYNHFSRTTLDDTLHDGEDTESALSWNARLQVALGSGKALEYLHASFQPPIVHQNFEPANVLLDKKFSVCVAECGLAELMPPSSVTQLSGRMRALLNYEAPELQDSGVVSERGDVYSFGVVMLELLTGRKPYDSSRPRHEQHLVRWASSQLHDIESLSKMVDPSIRGQCSEKALSRFADIISRCIQQQPEFRPPMSEIVQDLARLVNATGEESE

SEQ ID NO: 197380 - protein, 627 aa, Zea Mays
MSVNGNHLNGDLPDTFDSLNRLVNLDISSNNLSGVLPSSMKNLASLTSLHMQDNQLSGTLNVLQDLPLKDLNIENNLFSGPVPASLLNIPNFKKDGNPFNTSIVPSASPPSTGPAPTPAASKPAPTPAPTTSNSTPPAPAPSFPSRSPPPPKTTSNSSEGSTTRDSTSPSKKHSTSTLKIVGFVLAGVVLFIIIVLLVLFCLSKYQERRSRYDHNRSQQARVHHRVEPQIKPPPVQQSNDLKKGEVLDRRGHELSSSTAALAKKSPENQKEHVINFDRTDSDLFPVSLPPPPPPPPLPPIERVIANPIVPPEKRYSPPPKTSSSTSATSFSIASLQQYTNSFREENVIRESRLGKVYLAELPDGKLLEVLKIDNANGRISVDDFLEEVECILDIKHPNILELVGYCAEYGQRLLVYNHFSRTTLDDTLHDGEDTESALSWNARLQVALGSGKALEYLHASFQPPIVHQNFEPANVLLDKKFSVCVAECGLAELMPPSSVTQLSGRMRALLNYEAPELQDSGVVSERGDVYSFGVVMLELLTGRKPYDSSRPRHEQHLVRWASSQLHDIESLSKMVDPSIRGQCSEKALSRFADIISRCIQQPEFRPPMSEIVQDLARLVNATGEESE

SEQ ID NO: 197381 - protein, 222 aa, Zea Mays
MATNENLPPNVIKQLAKELKNLDESPPEGINVIVNDDDFTTIFADIEGPAGTPYENGVFRMKLLLSRDFPQSPPKGFFLTKIFHPNIATSGEICVNTLKKDWNPGLGLRHVLLVVRCLLIEPFPESALNEQAGKMLLENYEEYARHARLYTGIHALKPKNTSKTGAISESTTALNVDKSSTASSKNTPSMPPAELRRHERRMAQWLPKFLWIRKGWMRGRRA

SEQ ID NO: 197382 - protein, 240 aa, Zea Mays
MATNENLPPNVIKQLAKELKNLDESPPEGINVIVNDDDFTTIFADIEGPAGTPYENGVFRMKLLLSRDFPQSPPKATSGEICVNTLKKDWNPGLGLRHVLLVVRCLLIEPFPESALNEQAGKMLLENYEEYARHARLYTGIHALKPKNTSKTGAISESTTALNVDKSSTASSKNTPSMPPAVSTSSASRAFGTSLQDQNPTVSDPAVGAAAARKKDGPMASKVPVDKKRLDARKKSLKRL

SEQ ID NO: 197383 - protein, 118 aa, Zea Mays
MLLENYEEYARHARLYTGIHALKPKNTSKTGAISESTTALNVDKSSTASSKNTPSMPPAVSTSSASRAFGTSLQDQNPTVSDPAVGAAAARKKDGPMASKVPVDKKRLDARKKSLKRL

SEQ ID NO: 197384 - protein, 212 aa, Zea Mays
MATNENLPPNVIKQLAKELKNLDESPPEGINVIVNDDDFTTIFADIEGPAGTPYENGVFRMKLLLSRDFPQSPPKGFFLTKIFHPNIATSGEICVNTLKKDWNPGLGLRHVLLVVRCLLIEPFPESALNEQAGKMLLENYEEYARHARLYTGIHALKPKNTSKTGAISESTTALNVDKSRAAAARKKDGPMASKVPVDKKRLDARKKSLKRL

SEQ ID NO: 197385 - protein, 192 aa, Zea Mays
MKLLLSRDFPQSPPKGFFLTKIFHPNIATSGEICVNTLKKDWNPGLGLRHVLLVVRCLLIEPFPESALNEQAGKMLLENYEEYARHARLYTGIHALKPKNTSKTGAISESTTALNVDKSSTASSKNTPSMPPAVSTSSASRAFGTSLQDQNPTVSDPAVGAAAARKKDGPMASKVPVDKKRLDARKKSLKRL

SEQ ID NO: 197386 - protein, 246 aa, Zea Mays
MAPGRKTTAKSTKPTEVPLTEYEKLRAENLMRNNQKLQRLGVTTLASILNHTSAKSKVDTREKSGSLYEVLEGEGSEDEEVNQCATNRRNRLKRVLAPAQQDEPTRFTRQNTRDLALTFSPELQQVETLGISTITSTPQQDQNNSSDQGALKATIDPNGKRNRSMGRELDRISRGLCTNIPIHIAEGKIRPEAPMQAAKLASEGGIILRQQMPILRHWKEYKKDKSIVTNYIDKVAAQFTMDTNNN

SEQ ID NO: 197387 - protein, 56 aa, Zea Mays
MRGRGGKDRPLGRSEFVAGHTTPPSLRRRRGHLTGGYHTEEKNRWPRRSRTTRSST

SEQ ID NO: 197388 - protein, 109 aa, Zea Mays
MLAASTRTSKTDVRGWPGSREIVRVGTVIQSGEQLMILYTVKLEYNFSSGLRLGTSHPLEENGKRYMCKWKRRLIWACLVFGRRHPGLCLRDLADLEQVYVSQAPEKRK

SEQ ID NO: 197389 - protein, 74 aa, Zea Mays
MAPWWLSLSVVPLLCARLACAMSNSCLLSSPDVVAGPPHAREDHRSSSWAWLCQAIIAHHLVDALSLSSYSSAP

SEQ ID NO: 197390 - protein, 90 aa, Zea Mays
MAPWWLSLSVVPLLCARLACAMSNSCLLSSPDVVAGPPHAREDHRRSSSIHRDHHRGLGFAKPSSLTISLMPFLCLHIRQHPSLLSLHNK

SEQ ID NO: 197391 - protein, 61 aa, Zea Mays
MLFLRKYHLLCYSLKLIMEGGYLLMIHLSFVILTLSCPCYLRVIFFKQIVSRRWHYGFVDL

SEQ ID NO: 197392 - protein, 248 aa, Zea Mays
MGGWHGGATMPASPRRQCALAWLAYGGGTCSLVLLARIGACARCWLAAAGAQLARAHGRVGLGLAAVLRMPMTSSRWRDCWWWVVGQLVLCTRSWGERSSGESHARLREDGGDAYGRHSYPIEGAVLGPLVLHLGVLASDFLGFLAGCSVDVETLKVGAYWVGASVDGKRWQQAAAWQGDIGVVVPAGFSLVLVISIALLGLRRKLFLVGSRRVATAFRRHFSFLKVLPRRPSVCMVVSGMEAFRRST

SEQ ID NO: 197393 - protein, 581 aa, Zea Mays
MCGILAVLGVAEVSLAKRSRIIELSRRLRHRGPDWSGLHCHEDCYLAHQRLAIIDPTSGDQPLYNEDKTVVVTVNGEIYNHEELKAKLKTHEFQTGSDCEVIAHLYEEYGEEFVDMLDGMFSFVLLDTRDKSFIAARDAIGICPLYMGWGLDGSVWFSSEMKALSDDCERFITFPPGHLYSSKTGGLRRWYNPPWFSETVPSTPYNALFLREMFEKAVIKRLMTDVPFGVLLSGGLDSSLVASVASRHLNETKVDRQWGNKLHTFCIGLKGSPDLKAAREVADYLSTEGIDALEEVIYHIETYDVTTIRASTPMFLMSRKIKSLGVKMVISGEGSDEIFGGYLYFHKAPNKKEFHEETCRKIKALHLYDCLRANKATSAWGVEARVPFLDKSFISVAMDIDPEWKMIKRDLGRIEKWVIRNAFDDDERPYLPKHILYRQKEQFSDGVGYSWIDGLKDHASQHVSDSMMMNAGFVYPENTPTTKEGYYYRMIFEKFFPKPAARSTVPGGPSVACSTAKAVEWDASWSKNLDPSGRAALGVHDAAYEDTAGKTPASADPVSDKGLRPAIGESLGTPVASATAV

SEQ ID NO: 197394 - protein, 452 aa, Zea Mays
MAVSMREVDPVFQGAGQKDGLEIWRIEKLQAVPVPKESYGKFFTGDSYIVLKTTALKNGSFRHDIHYWLGKDTSQDEAGTAAIKTVELDAALGGRAVQYREIQGNETEKFLSYFKPCIIPEEGGVASGFRHTEVNEREHKTRLFVCRGKHTVHVKEVPFARASLNHDDIFILDTKSKIFQFNGSNSSIQERAKALEVVQHLKDTNHEGKCEVAAVEDGKLMADADAGEFWGLFGGFAPLPRKTFSELNGKDSTSTSKLLCVNKGQFAPIDCEILKRELLDSTKCYLLDCGSEIYVWMGRETTLEERKRGGSAAEELLREGNRQKSHIIRLMEGFETVTFKSKFDKWPKKADAVVSDESRGKVAALLKRQGFNFKDPAKAAPVKQEPQPQIDCTGNLQVWRVNGSDKTFLSFSEQCKFYSGDCYIFQYTYPGYIGDECLIGTWFGKKSVQVTV

SEQ ID NO: 197395 - protein, 371 aa, Zea Mays
MDALRLRPSLLPVRPGAARPRDHFLPPCCSIQRNGEGRICFSSQRTQGPTLHHHQKFFEWKSSYCRISHRSLNTSVNASGQQLQSEPETHDSTTIWRAISSSLDAFYRFSRPHTVIGTALSIVSVSLLAVQSLSDISPLFLTGLLEAVVAALFMNIYIVGLNQLFDIEIDKSFGLGWAVGSQPLFWALFISFVLGTAYSINLPYLRWKRFAVVAALCILAVRAVIVQLAFFLHIQTFVFRRPAVFSRPLLFATGFMTFFSVVIALFKDIPDIEGDRIFGIRSFSVRLGQKKVFWICVGLLEMAYSVAILMGATSSCLWSKTATIAGHSILAAILWSCARSVDLTSKAAITSFYMFIWKLFYAEYLLIPLVR

SEQ ID NO: 197396 - protein, 320 aa, Zea Mays
MDALRLRPSLLPVRPGAARPRDHFLPPCCSIQRNGEGRICFSSQRTQGPTLHHHQKFFEWKSSYCRISHRSLNTSVNASGQQLQSEPETHDSTTIWRAISSSLDAFYRFSRPHTVIGTALSIVSVSLLAVQSLSDISPLFLTGLLEAVVAALFMNIYIVGLNQLFDIEIDKVNKPTLPLASGEYTLATGVAIVSVFAAMSFGLGWAVGSQPLFWALFISFVLGTAYSINLPYLRWKRFAVVAALCILAVRAVIVQLAFFLHIQTFVFRRPAVFSRPLLFATGFMTFFSVVIALFKFAISRRIYLTSKGTAYSGSDPSASG

SEQ ID NO: 197397 - protein, 500 aa, Zea Mays
MESSAVRGDTPRRPSAFAGASPPPPPPPPPRGWLAGLVSGAGRILAAVLGPEPSSSGSGSIASSAASDGDSPSASYSPAWFPPPGPHGEGCNDATDNNDSPVFPLSNNQSNQGKKETALKDYTGSLAIISEIEPKDAIMQLLMQETYSRSECSKFIKIIQERVLDSDSGDIDAGGFALTSARKASRLAVDGYSSFSPHESSPATSSLQMHGCDNSAAVGTIPKLTHTNQSPFINNAKNINPVLKRNYSVREDPYGEIRRVRPKINGNSWDISKFKQVDIIRNHPAANSREELTARNPNASRDGKKLLKDIMGASNLTYPNFISKAETADETSDVPDKPSAVTPQQHDSSFPQAGKKQKGFAATTLNQCSNEVEPLNAFIPFEQQMMDLSHRKQENAACDDSCSLSKLMLKEDIEAAPSLPTGIQVQNGSKNRRRRQPNVQKTTATPTRSPARGQRRKNNDAMVKSEMGLIEQSKLVLTEQEPELGDVPVKRPVGRPRKAR

SEQ ID NO: 197398 - protein, 558 aa, Zea Mays
MESSAVRGDTPRRPSAFAGASPPPPPPPPPRGWLAGLVSGAGRILAAVLGPEPSSSGSGSIASSAASDGDSPSASYSPAWFPPPGPHGEGCNDATDNNDSPVFPLSNNQSNQGKKETALKDYTGSLAIISEIEPKDAIMQLLMQETYSRSECSKFIKIIQERVLDSDSGDIDAGGFALTSARKASRLAVDGYSSFSPHESSPATSSLQMHGCDNSAAVGTIPKLTHTNQSPFINNAKNINPVLKRNYSVREDPYGEIRRVRPKINGNSWDISKFKQVDIIRNHPAANSREELTARNPNASRDGKKLLKDIMGASNLTYPNFISKAETADETSDVPDKPSAVTPQQHDSSFPQAGKKQKGFAATTLNQCSNEDLKKGFALKVEPLNAFIPFEQQMMDLSHRKQENAACDDSCSLSKLMLKEDIEAAPSLPTGIQVQNGSKNRRRRQPNVQKTTATPTRSPARGQRRKNNDAMVKSEMGLIEQSKLVLTEQEPELGDVPVKRPVGRPRKARLELRLAWIPAPFPVSCDFCTVQAILTPPRLTYRNIWRTWKQTAKFFRVR

SEQ ID NO: 197399 - protein, 509 aa, Zea Mays
MESSAVRGDTPRRPSAFAGASPPPPPPPPPRGWLAGLVSGAGRILAAVLGPEPSSSGSGSIASSAASDGDSPSASYSPAWFPPPGPHGEGCNDATDNNDSPVFPLSNNQSNQGKKETALKDYTGSLAIISEIEPKDAIMQLLMQETYSRSECSKFIKIIQERVLDSDSGDIDAGGFALTSARKASRLAVDGYSSFSPHESSPATSSLQMHGCDNSAAVGTIPKLTHTNQSPFINNAKNINPVLKRNYSVREDPYGEIRRVRPKINGNSWDISKFKQVDIIRNHPAANSREELTARNPNASRDGKKLLKDIMGASNLTYPNFISKAETADETSDVPDKPSAVTPQQHDSSFPQAGKKQKGFAATTLNQCSNEDLKKGFALKVEPLNAFIPFEQQMMDLSHRKQENAACDDSCSLSKLMLKEDIEAAPSLPTGIQVQNGSKNRRRRQPNVQKTTATPTRSPARGQRRKNNDAMVKSEMGLIEQSKLVLTEQEPELGDVPVKRPVGRPRKAR

SEQ ID NO: 197400 - protein, 519 aa, Zea Mays
MESSAVRGDTPRRPSAFAGASPPPPPPPPPRGWLAGLVSGAGRILAAVLGPEPSSSGSGSIASSAASDGDSPSASYSPAWFPPPGPHGEGCNDATDNNDSPVFPLSNNQSNQGKKETALKDYTGSLAIISEIEPKDAIMQLLMQETYSRSECSKFIKIIQERVLDSDSGDIDAGGFALTSARKASRLAVDGYSSFSPHESSPATSSLQMHGCDNSAAVGTIPKLTHTNQSPFINNAKNINPVLKRNYSVREDPYGEIRRVRPKINGNSWDISKFKQVDIIRNHPAANSREELTARNPNASRDGKKLLKDIMGASNLTYPNFISKAETADETSDVPDKPSAVTPQQHDSSFPQAGKKQKGFAATTLNQCSNEKGFALKVEPLNAFIPFEQQMMDLSHRKQENAACDDSCSLSKLMLKEDIEAAPSLPTGIQVQNGSKNRRRRQPNVQKTTATPTRSPARGQRRKNNDAMVKSEMGLIEQSKLVLTEQEPELGDVPVKRPVGRPRKARNGPSSDDPGTPAS

SEQ ID NO: 197401 - protein, 105 aa, Zea Mays
MLVSRMMGCCTMFVGMALSLIGLIDLVMVEESMDTVADAPQGTVHGSKSFTSRVQRVAELKRGIGEVRKFYRRFEISFLVFYVFSICDWDLGASANITCLWDWEF

SEQ ID NO: 197402 - protein, 67 aa, Zea Mays
MLVSRMMGCCTMFVGMALSLIGLIDLVMVEESMDTVADAPQGTGCIAIALTNLHVHVCLAPCSAYLL

SEQ ID NO: 197403 - protein, 158 aa, Zea Mays
MCLLRSWSTGFLLSASADILSIIKTGEAKLVPRMSANKRLSQTPWQAPTAPAIYSASQDDRATTRCFCDCQVTGHSLRKNITPVVLFPSFASPPWSLSLYPVRLSSSPILLYTSPWFTVPAMYLRTRFIATKCSCLGSCMKRLKYPTEKARSGLVFIR

SEQ ID NO: 197404 - protein, 570 aa, Zea Mays
MLHYISSSPLRPRFLLLPSPPSNLRFLTMSASPSSSSSRSVRGAAVSVPSLGADEACAVADEAFRRYTSPSLLRRGGVGVAVVWFRNDLRVIDNEALLRAWAASEAVLPVYCVDPRVFAGSTHYFGFPKKGECLGDLKQSLRKKGLDLLVRHGKPEEILPSIAKAVSAHTIYAHKETCSEELLVERLVSKGLEQVQIAQGGASVPKRPLNPRLQLIWGATMYHIDDLPFPVSSLPDVYTQFRKAVESKCSVRNCAKLPTSLGPPPSSSIDEIGGWGTVPTLESLGPSVTKSEKGMHFIGGESAALGRVHEYFWKKDQLKDYKVTRNGMLGPDYSTKFSPWLASGSLSPRYICEEVKRYEKQRVANDSTYWVLFELIWRDYFRFLSAKYGNAIFHLGGPRKVVSKWSQDQALFESWRDGRTGYPLIDANMRELSATGYMSNRGRQIVCSFLVRDMGVDWRMGAEWFETCLLDYDPASNYGNWTYGAGVGNDPREDRYFSIPKQAKSYDPEGEYVAYWLPELRSLAKERRNFPGASYIRQVVPLKFDGGNQRKDQQFNRQRRPNNVYIRQVK

SEQ ID NO: 197405 - protein, 232 aa, Zea Mays
MGGFRGGPAGVLCRSAGLCGEHALLWVPQEGRVLFELIWRDYFRFLSAKYGNAIFHLGGPRKVVSKWSQDQALFESWRDGRTGYPLIDANMRELSATGYMSNRGRQIVCSFLVRDMGVDWRMGAEWFETCLLDYDPASNYGNWTYGAGVGNDPREDRYFSIPKQAKSYDPEGEYVAYWLPELRSLAKERRNFPGASYIRQVVPLKFDGGNQRKDQQFNRQRRPNNVYIRQVK

SEQ ID NO: 197406 - protein, 306 aa, Zea Mays
MLHYISSSPLRPRFLLLPSPPSNLRFLTMSASPSSSSSRSVRGAAVSVPSLGADEACAVADEAFRRYTSPSLLRRGGVGVAVVWFRNDLRVIDNEALLRAWAASEAVLPVYCVDPRVFAGSTHYFGFPKKGGGPRKVVSKWSQDQALFESWRDGRTGYPLIDANMRELSATGYMSNRGRQIVCSFLVRDMGVDWRMGAEWFETCLLDYDPASNYGNWTYGAGVGNDPREDRYFSIPKQAKSYDPEGEYVAYWLPELRSLAKERRNFPGASYIRQVVPLKFDGGNQRKDQQFNRQRRPNNVYIRQVK

SEQ ID NO: 197407 - protein, 223 aa, Zea Mays
MTVMMPQRHRATAKKPMWIIVLLCMVCIVLIGAYVFPPRRFSNCYLSASSVCAPFKDWLPSMGRRERTDEEIISSVVIRDILSMPMPMPKNPKIALMFLTPGSLPFEKLWEKFLQGHEGRYSIYVHASREKPVHTSSLFAGRDIHSDAVVWGLISMVDAEKRLLANALEDVDNQVFILLSDSCVPLHSFDYVYNYLMGTNVSFIDWIQVHMAVEGTLLRCILK

SEQ ID NO: 197408 - protein, 272 aa, Zea Mays
MTVMMPQRHRATAKKPMWIIVLLCMVCIVLIGAYVFPPRRFSNCYLSASSVCAPFKDWLPSMGRRERTDEEIISSVVIRDILSMPMPMPKNPKIALMFLTPGSLPFEKLWEKFLQGHEGRYSIYVHASREKPVHTSSLFAGRDIHSDAVVWGLISMVDAEKRLLANALEDVDNQVFILLSDSCVPLHSFDYVYNYLMGTNVSFIDCFKDPGPHGSGRYSIEMYPEIDERDFRKGAQWFAVTRRHALMILADSLYYKKFKLYCKVCCGIIIFS

SEQ ID NO: 197409 - protein, 227 aa, Zea Mays
MGTYGYAAPEYVMTGHLTARSDVYGFGVVLLEMIIGRRAVDKSRPSREHNLVDWARPLLVHNRKLFRIIDPRMEGQYSTKAATEVASLAYRCLSQNPKGRPTMSQVVETFEAVQNMPECQDILLQNSITGAVTLYEVPKEPADRVELEKAKQEPAVKSAAMPPMNGKPVPQSRRTRPGNGRSKSEPSLECKMYIPSPDSDGHQLGLEAVASPDGSIRDPPDEDLYKI

SEQ ID NO: 197410 - protein, 489 aa, Zea Mays
MSSCVLADALSSLIGLCFCSLCSMGLTPQGNRLACKSEAQAEAAGADGLRKSKSDSKAVASVLAPPKDVVDLQVEGYGNVNIFTYDELRAATKNFRPDQILGEGGFGVVYKGVIDENVRAGFPSRQVAVKELNPEGFQGDKEWLAEVNYLGQLSHPNLVELIGYCCEGSHRLLVYEYMACGSLEKHLFRRVCLNMPWSTRMKIALGAARGLEYLHGAERSIIYRDFKTSNILLDADYNAKLSDFGLARTGPSGDQTHVSTRVMGTYGYAAPEYVMTGHLTARSDVYGFGVVLLEMIIGRRAVDKSRPSREHNLVDWARPLLVHNRKLFRIIDPRMEGQYSTKAATEVASLAYRCLSQNPKGRPTMSQVVETFEAVQNMPECQDILLQNSITGAVTLYEVPKEPADRVELEKAKQEPAVKSAAMPPMNGKPVPQSRRTRPGNGRSKSEPSLECKMYIPSPDSDGHQLGLEAVASPDGSIRDPPDEDLYKI

SEQ ID NO: 197411 - protein, 224 aa, Zea Mays
MGGCLSQEEHRLQSRPAEAAGADGLRKSKSDSKAVASVLAPPKDVVDLQVEGYGNVNIFTYDELRAATKNFRPDQILGEGGFGVVYKGVIDENVRAGFPSRQVAVKELNPEGFQGDKEWLAEVNYLGQLSHPNLVELIGYCCEGSHRLLVYEYMACGSLEKHLFRRVCLNMPWSTRMKIALGAARGLEYLHGAERSIIYRDFKTSNILLDAEGDCGGGWSEGGQ

SEQ ID NO: 197412 - protein, 162 aa, Zea Mays
MPLSSFSFLRHHLPLPLQLPPTSNRQPPHPRLFHLLLPPFTPRRTFVCQPLTAATDDMAAAAAAASPPTLLEHMGQAGTAADLTVLVAHIQSACKRIAALVASPGNAELSRAKARGGAMAAGRDAPKPLDELSNCVKHPFCLLGFRMISSCQRSKVLERLQR

SEQ ID NO: 197413 - protein, 52 aa, Zea Mays
MHGYYELLPVLEYYYPTWLARIIVWSKLQLFRYVNCNSELLHSLLVYSSGQF

SEQ ID NO: 197414 - protein, 840 aa, Zea Mays
MTCANCVNSVEGILKKLPGVKGAVVALATSLGEVEYIPSAISKDEIVQAIEDAGFEAAFLQSTEQDKVLLGLIGLHTERDVELLSDILKKIDGLRQFGVNSVLSEVEIVFDPEAVGLRSIVDTIEMTSNGSLKAHVQNPYTRGASNDAQEASKMLNLLRSSLFLSIPVFFIRMVCPSIPFLSTLLSMHCGPFLMGDLLKWILVSIVQFVVGKRFYVAAYRAVRHGSTNMDVLVVLGTTASYAYSVCALLYGAFTGYHPPIYFETSAMIITFVLLGKYLEVLAKGKTSDAIKKLVELVPSTAVLVLKDKEGKHVGEREIDARLVQPGDVLKVLPGSKIPADGVVVWGTSHVNESMITGESAPIPKEVSSVPTTAIWYKSFRHGFVFIYPSETYRQEVASIFVPIVITLSIVTFSAWFLCGWLGAYPNSWVAENSNCFVFSLMFAISVVVIACPCALGLATPTAVMVATGIGANHGVLVKGGDALERAQNVNYVVFDKTGTLTQGKAVVTAAKVFSGMDLGDFLTLVASAEASSEHPLAKAILDYALHFHFFGKLPSSKDGIEQRKDKVLSQWLLEAEDFSAVPGKGVQCSINGKHVLVGNRSLMTENGVTIPPEAETFLIDLESNAKTGILVAYDGDFVGLMGITDPLKREAAVVVEGLKKLGVHPVMLTGDNWRTAQAVAKEVGIEDVRAEVMPAGKADVVRSLQKDGGTVAMVGDGINDSPALAAADVGMAIGGGTDIAIEAADYVLVRNNLEDVITAIDLSRKTFSRIRWNYFFAMAYNVVAIPIAAGALFPFTGLQMPPWLAGACMAFSSVSVVCSSLLLRRYRKPRLTTVLQITVE

SEQ ID NO: 197415 - protein, 509 aa, Zea Mays
MITGESAPIPKEVSSVVIGGTINLHGILHIQATKVGSGTVLSQIISLVETAQMSKAPIQKFADYVASIFVPIVITLSIVTFSAWFLCGWLGAYPNSWVAENSNCFVFSLMFAISVVVIACPCALGLATPTAVMVATGIGANHGVLVKGGDALERAQNVNYVVFDKTGTLTQGKAVVTAAKVFSGMDLGDFLTLVASAEASSEHPLAKAILDYALHFHFFGKLPSSKDGIEQRKDKVLSQWLLEAEDFSAVPGKGVQCSINGKHVLVGNRSLMTENGVTIPPEAETFLIDLESNAKTGILVAYDGDFVGLMGITDPLKREAAVVVEGLKKLGVHPVMLTGDNWRTAQAVAKEVGIEDVRAEVMPAGKADVVRSLQKDGGTVAMVGDGINDSPALAAADVGMAIGGGTDIAIEAADYVLVRNNLEDVITAIDLSRKTFSRIRWNYFFAMAYNVVAIPIAAGALFPFTGLQMPPWLAGACMAFSSVSVVCSSLLLRRYRKPRLTTVLQITVE

SEQ ID NO: 197416 - protein, 767 aa, Zea Mays
MAHLQLSAVAGARPAAAGGRGDEMEDVALLDSYDEEMGLPLPGASGAEAAEAHVRVTGMTCSACTSAVEAAVSARRGVRRVAVSLLQNRAHVMFDPALAKVEDIIEAIEDAGFEAEIIPESAVSQPKSQKTLSAQFRIGGMTCANCVNSVEGILKKLPGVKGAVVALATSLGEVEYIPSAISKDEIVQAIEDAGFEAAFLQSTEQDKVLLGLIGLHTERDVELLSDILKKIDGLRQFGVNSVLSEVEIVFDPEAVGLRSIVDTIEMTSNGSLKAHVQNPYTRGASNDAQEASKMLNLLRSSLFLSIPVFFIRMVCPSIPFLSTLLSMHCGPFLMGDLLKWILVSIVQFVVGKRFYVAAYRAVRHGSTNMDVLVVLGTTASYAYSVCALLYGAFTGYHPPIYFETSAMIITFVLLGKYLEVLAKGKTSDAIKKLVELVPSTAVLVLKDKEGKHVGEREIDARLVQPGDVLKVLPGSKIPADGVVVWGTSHVNESMITGESAPIPKEVSSVVIGGTINLHGILHIQATKVGSGTVLSQIISLVETAQMSKAPIQKFADYVASIFVPIVITLSIVTFSAWFLCGWLGAYPNSWVAENSNCFVFSLMFAISVVVIACPCALGLATPTAVMVATGIGANHGVLVKGGDALERAQNVNYVVFDKTGTLTQGKAVVTAAKVFSGMDLGDFLTLVASAEASSEHPLAKAILDYALHFHFFGKLPSSKDGIEQRKDKVLSQWLLEAEDFSAVPGKGVQCSINGKHVLVSHRSETVL

SEQ ID NO: 197417 - protein, 362 aa, Zea Mays
MAHLQLSAVAGARPAAAGGRGDEMEDVALLDSYDEEMGLPLPGASGAEAAEAHVRVTGMTCSACTSAVEAAVSARRGVRRVAVSLLQNRAHVMFDPALAKVEDIIEAIEDAGFEAEIIPESAVSQPKSQKTLSAQFRIGGMTCANCVNSVEGILKKLPGVKGAVVALATSLGEVEYIPSAISKDEIVQAIEDAGFEAAFLQSTEQDKVLLGLIGLHTERDVELLSDILKKIDGLRQFGVNSVLSEVEIVFDPEAVGLRSIVDTIEMTSNGSLKAHVQNPYTRGASNDAQEASKMLNLLRSSLFLSIPVFFIRMVCPSIPFLSTLLSMHCGPFLMGDLLKWILKGNMLVRGRLMHGWSNLVMS

SEQ ID NO: 197418 - protein, 101 aa, Zea Mays
MLVSPCLLDEKLPAVFYYTAVWCGPCRAIAPLVSKLSSQYPKIPVYKVDIELEGLGNKLRDLNICSVPTFHFYHKGQRISEIVGADAKKIEATMESLHKQQ

SEQ ID NO: 197419 - protein, 80 aa, Zea Mays
MLRPALHNLPNIERALVGRRQLLLQRASRIAAPHVGIRLPSGEEAVRGEKPARRLLERATTEITRSWDLGLVGRWGRDER

SEQ ID NO: 197420 - protein, 109 aa, Zea Mays
MNQDAPTSRRDYFEDRRDCARASNVEDLMNATKNGVLNSHNRRDDYEEGRDSARALNSENYEEGRDCTRASNAENIVNATKKADRTEEKRGHGKNKCKKLAKLKPGEKN

SEQ ID NO: 197421 - protein, 224 aa, Zea Mays
MFSGIATRCNHLLVSTTAVRALHCCNLHPPGTISLLNGSGRRSIICMNMIQVKKMDDLLSLSRGPLQNTTCFAGYDINGFRYRIEIRDRNRCTQNSGVAVFSEGNTTDDNAEYYGVLTEIIELQFLGGRRVPLFRCKWVDIFNKKRGIKKDTYGLVSVNFKCLLRTDEPFVLASQASQVFFVKDNVIKGCHLVVKMQPRDTYDVADVSDDEDIEDEDANAEEDT

SEQ ID NO: 197422 - protein, 236 aa, Zea Mays
MGSSLSNLTDAACIVHQFKINGYSATKSMARTDSLPSKRLAVGGYEWEVHYTPSLLVDGSYMIAFRLVLLGAPRRNDVKAAFRCRLLYPSTNYGHQRGACVSDSMGNVEGQMSHAFKRAKESSGWIPLRKRNVVEAARVIENDSLTAECTITVVTELPEPDTAKTNAVLPRIRRLTGVHSLHHDLGELLGKGTGSDVVLVVCGDALAVAEGGDHGHGGGRIRGHASLHVHRRGARA

SEQ ID NO: 197423 - protein, 884 aa, Zea Mays
MQTDYMSLNASLVLFAEAVKGSLLSTNLEVQAGTLDLIFHFLSSDANICALLQTLIDENVADYIFEVLRLSEIPFHPVQSHVLRLVWICMANCSGILSLPQEEQIACTLTAILRRNLNGELDMSSETFILVCSILIEILKSPHAHDIEKLPSFIEEASKYAISSTLSHGYDSTILSTHSLLLLKEALIFCLEGSKYNIARTKDLEDSIMGTCGTILLQWLESAVVDGNDEETLAEILQIFQIILSRASDKKPLKFAELLASSSWLCANNQILASVEQYILLNGGTFPYEINGSIMLTLLVHLYAFIRGLSHSCSIPHSPEAENTLFHLIIHKDWDLLVIRVHSVAIKWLFQKQEIMEPLAFQMLKFCRTFCEDETVMLSNSSQLVDMQMIAELALSGETTISSLLVSLLDQMLKEGTEDELFSVVSVIAEILMISPCSSDQFISCGIIGSFHGIYCLPYSSRSRTVCSYLIFNILCSANASTFGQEDEWLPLVLKQSRLASRCRLLGSVLTDVVVNNACVKGPSLFQHNQETTFGEFLILVLLLVFFSLRSLHSILEVSIDWQDFLQHSDDVQSFSVLGIPCHDLCRLMHFGSPSIKLIASQCLLELLTRISDQRSCNNAELRCSVGYLKSIIAVTEGLVFSEDSKVAGNCSACLSVILGWEKFGSQEKVAVRESKWFRLIMEEFVVALTAPGLTSKSFSSQQKFAANMAVSLLRLSQVPDWLTSLFDGHLISGIVANLSARNVTAEIINLFSELMARKYLSQEHIVDLHNLLQVCRSQVYEGSSKAPLPEQRVEKVARSTNDVLASLFGLMVNQCTDSGTAQAEQQRLLHAIDVFFQESGRRQQQHATARQETVPGDYGPRQGSRARRPKEKISGPGWIRIRH

SEQ ID NO: 197424 - protein, 535 aa, Zea Mays
MQTDYMSLNASLVLFAEAVKGSLLSTNLEVQAGTLDLIFHFLSSDANICALLQTLIDENVADYIFEVLRLSEIPFHPVQSHVLRLVWICMANCSGILSLPQEEQIACTLTAILRRNLNGELDMSSETFILVCSILIEILKSPHAHDIEKLPSFIEEASKYAISSTLSHGYDSTILSTHSLLLLKEALIFCLEGSKYNIARTKDLEDSIMGTCGTILLQWLESAVVDGNDEETLAEILQIFQIILSRASDKKPLKFAELLASSSWLCANNQILASVEQYILLNGGTFPYEINGSIMLTLLVHLYAFIRGLSHSCSIPHSPEAENTLFHLIIHKDWDLLVIRVHSVAIKWLFQKQEIMEPLAFQMLKFCRTFCEDETVMLSNSSQLVDMQMIAELALSGETTISSLLVSLLDQMLKEGTEDELFSVVSVIAEILMISPCSSDQFISCANASTFGQEDEWLPLVLKQSRLASRCRLLGSVLTDVVVNNACVKGPSLFQHNQETTFGEFLILVLLLVFFSLRRYGAVACMLHFICLGLH

SEQ ID NO: 197425 - protein, 518 aa, Zea Mays
MQTDYMSLNASLVLFAEAVKGSLLSTNLEVQAGTLDLIFHFLSSDANICALLQTLIDENVADYIFEVLRLSEIPFHPVQSHVLRLVWICMANCSGILSLPQEEQIACTLTAILRRNLNGELDMSSETFILVCSILIEILKSPHAHDIEKLPSFIEEASKYAISSTLSHGYDSTILSTHSLLLLKEALIFCLEGSKYNIARTKDLEDSIMGTCGTILLQWLESAVVDGNDEETLAEILQIFQIILSRASDKKPLKFAELLASSSWLCANNQILASVEQYILLNGGTFPYEINGSIMLTLLVHLYAFIRGLSHSCSIPHSPEAENTLFHLIIHKDWDLLVIRVHSVAIKWLFQKQEIMEPLAFQMLKFCRTFCEDETVMLSNSSQLVDMQMIAELALSGETTISSLLVSLLDQMLKEGTEDELFSVVSVIAEILMISPCSSDQFISCGIIGSFHGIYCLPYSSRSRTVCSYLIFNILCSANASTFGQEDEWLPLVLKLLEFISSGIDYTSSGQEHKIVML

SEQ ID NO: 197426 - protein, 965 aa, Zea Mays
MQTDYMSLNASLVLFAEAVKGSLLSTNLEVQAGTLDLIFHFLSSDANICALLQTLIDENVADYIFEVLRLSGNNDLLVISSIRVLLLFARSEENFKEKLAIGFSTLLPVLHYVAEIPFHPVQSHVLRLVWICMANCSGILSLPQEEQIACTLTAILRRNLNGELDMSSETFILVCSILIEILKSPHAHDIEKLPSFIEEASKYAISSTLSHGYDSTILSTHSLLLLKEALIFCLEGSKYNIARTKDLEDSIMGTCGTILLQWLESAVVDGNDEETLAEILQIFQIILSRASDKKPLKFAELLASSSWLCANNQILASVEQYILLNGGTFPYEINGSIMLTLLVHLYAFIRGLSHSCSIPHSPEAENTLFHLIIHKDWDLLVIRVHSVAIKWLFQKQEIMEPLAFQMLKFCRTFCEDETVMLSNSSQLVDMQMIAELALSGETTISSLLVSLLDQMLKEGTEDELFSVVSVIAEILMISPCSSDQFISCGIIGSFHGIYCLPYSSRSRTVCSYLIFNILCSANASTFGQEDEWLPLVLKLLEFISSGIDYTSSGQEHKIVVGILCLVLHHSSSNFLIEPAKAIILNSSLVSLTDVVVNNACVKGPSLFQHNQETTFGEFLILVLLLVFFSLRSLHSILEVSIDWQDFLQHSDDVQSFSVLGIPCHDLCRLMHFGSPSIKLIASQCLLELLTRISDQRSCNNAELRCSVGYLKSIIAVTEGLVFSEDSKVAGNCSACLSVILGWEKFGSQEKVAVRESKWFRLIMEEFVVALTAPGLTSKSFSSQQKFAANMAVSLLRLSQVPDWLTSLFDGHLISGIVANLSARNVTAEIINLFSELMARKYLSQEHIVDLHNLLQVCRSQVYEGSSKAPLPEQRVEKVARSTNDVLASLFGLMVNQCTDSGTAQAEQQRLLHAIDVFFQESGRRQQQHATARQETVPGDYGPRQGSRARRPKEKISGPGWIRIRH

SEQ ID NO: 197427 - protein, 562 aa, Zea Mays
MQTDYMSLNASLVLFAEAVKGSLLSTNLEVQAGTLDLIFHFLSSDANICALLQTLIDENVADYIFEVLRLSGNNDLLVISSIRVLLLFARSEENFKEKLAIGFSTLLPVLHYVAEIPFHPVQSHVLRLVWICMANCSGILSLPQEEQIACTLTAILRRNLNGELDMSSETFILVCSILIEILKSPHAHDIEKLPSFIEEASKYAISSTLSHGYDSTILSTHSLLLLKEALIFCLEGSKYNIARTKDLEDSIMGTCGTILLQWLESAVVDGNDEETLAEILQIFQIILSRASDKKPLKFAELLASSSWLCANNQILASVEQYILLNGGTFPYEINGSIMLTLLVHLYAFIRGLSHSCSIPHSPEAENTLFHLIIHKDWDLLVIRVHSVAIKWLFQKQEIMEPLAFQMLKFCRTFCEDETVMLSNSSQLVDMQMIAELALSGETTISSLLVSLLDQMLKEGTEDELFSVVSVIAEILMISPCSSDQFISCGIIGSFHGIYCLPYSSRSRTVCSYLIFNILCSANASTFGQEDEWLPLVLKVLLFCLFNLNLVSYIQIILLFAGY

SEQ ID NO: 197428 - protein, 796 aa, Zea Mays
MESDGDTSPPRPPTPAPVRACGAGHPASHSLPTSAGGRVCLSCVVALLSSAGNASTPSHHVAHALANLSLALADPAFLRPLRAAHPHLLAAPLAEALEGAAERRDAALAAQACDVAADLAAVVGAPADSELVARLARVLSSGSLVKHLHTLHCLGLLLNSTKDAGAYIGDKCSLFLNLVNDLRLPSDEIRGEILFVLYKLALLNATPWDDICETGDLDLLAIGRSLLQLSLEVLLKTQNDAVRLNCIALLLTLAKKEPFDHLLISNQSSNKCIEAESMQTDYMSLNASLVLFAEAVKGSLLSTNLEVQAGTLDLIFHFLSSDANICALLQTLIDENVADYIFEVLRLSEIPFHPVQSHVLRLVWICMANCSGILSLPQEEQIACTLTAILRRNLNGELDMSSETFILVCSILIEILKSPHAHDIEKLPSFIEEASKYAISSTLSHGYDSTILSTHSLLLLKEALIFCLEGSKYNIARTKDLEDSIMGTCGTILLQWLESAVVDGNDEETLAEILQIFQIILSRASDKKPLKFAELLASSSWLCANNQILASVEQYILLNGGTFPYEINGSIMLTLLVHLYAFIRGLSHSCSIPHSPEAENTLFHLIIHKDWDLLVIRVHSVAIKWLFQKQEIMEPLAFQMLKFCRTFCEDETVMLSNSSQLVDMQMIAELALSGETTISSLLVSLLDQMLKEGTEDELFSVVSVIAEILMISPCSSDQFISCGIIGSFHGIYCLPYSSRSRTVCSYLIFNILCSANASTFGQEDEWLPLVLKVLLFCLFNLNLVSYIQIILLFAGY

SEQ ID NO: 197429 - protein, 423 aa, Zea Mays
MESDGDTSPPRPPTPAPVRACGAGHPASHSLPTSAGGRVCLSCVVALLSSAGNASTPSHHVAHALANLSLALADPAFLRPLRAAHPHLLAAPLAEALEGAAERRDAALAAQACDVAADLAAVVGAPADSELVARLARVLSSGSLVKHLHTGMAPEVERVGRTQSVSAEVEVVVVPALLLTLAKKEPFDHLLISNQSSNKCIEAESMQTDYMSLNASLVLFAEAVKGSLLSTNLEVQAGTLDLIFHFLSSDANICALLQTLIDENVADYIFEVLRLSGNNDLLVISSIRVLLLFARSEENFKEKLAIGFSTLLPVLHYVAEIPFHPVQSHVLRLVWICMANCSGILSLPQEEQIACTLTAILRRNLNGELDMSSETFILVCSILIEILKSPHAHDIEKLPSFIEEASKYAISSTLSHGEQIQYC

SEQ ID NO: 197430 - protein, 78 aa, Zea Mays
MAFCCVSCEVLYIFLFLFADEESTSLLSVCKGILNQSPVVILVFVSTLVGWAVKQATNVIQMKTAADACVVYDLKRSK

SEQ ID NO: 197431 - protein, 110 aa, Zea Mays
MYSSFLSGKTSHKDVKHTGNWLLKLYYGYRPFMAFCCVSCEVLYIFLFLFADEESTSLLSVCKGILNQSPVVILVFVSTLVGWAVKQATNVIQMKTAADACVVYDLKRSK

SEQ ID NO: 197432 - protein, 108 aa, Zea Mays
MPSVYLYIPNIIGYFRIIINFIAFAVCYSNKALFAILYFISFVLDGVDGWFARKFNQASTFGAVLDMVTDRVSTACLLALLSQFYRPGLVFLILLGLDITSHWFQMYR

SEQ ID NO: 197433 - protein, 516 aa, Zea Mays
MSELNSSFVSRINIATGDVIPETRSIAKGILDVLSGDLPKSTKLQNKHLQALIELHNMTGTFARNIQYLFSESDLAVVLNTLKAIYSPYETFKARYGQMERAILSAEMTSIDIRGAVPRGVGAQGIELSETVRRMEESIPEMIVLLEAAVERCISLTGGSEADELVLALDDVMLQYISNLQETLKSLRIICGLDSDALKKDAGLEKKEVQRLVDVSEEEEWSIVQGALQILTVADCLTSRTSVFEASLRATLARIGTNFSVSGFGSSLDKSPAATADENADLSFAGRAALDIAAIRLSDLPDKSKKFLTVLEQSKDPRFHALPLTSQRVAAFSDTVNELVYDVLISKVRQRLSEVARLPIWSSVEEQGGLPLPSFSAYPQAYVTSVGEYLLTLPQQLEPLAEGISGNEAGNDEAQFFATEWIFKVAEGATALFMEQLRGIHYITDRGSQQLAADIEYLNNVLSALSMPIPPFLSTFHACVSTPRDQVRDLIKSDGASQLDLPTTHLVCKIRRITLD

SEQ ID NO: 197434 - protein, 315 aa, Zea Mays
MVSMNTTPNPLDSAAGSAAVAGGSVDEGGGGGGRKKRMRGAVAAAMVPPPMAVPLPAAAPAAGEEVRKVRKPYTITKSRESWTEPEHDKFLEALQLFDRDWKKIEAYVGSKTVIQIRSHAQKYFLKVQKNGTGEHLPPPRPKRKAAHPYPQKSSKNVSQTILLQEQPTQREQGSVMPMDTATVINTNANVAVAVAVPSWDNTLAQSLSAGLVPGATNNCSSSIESPSGTWPTSEAVEQEIVVPSLHAMPDFARVYSFLGSIFDPDTSGHLQRLKVMDPIDIQTVLLLMRNLSTNLRSPDFEQHVRHDFAQQVYAD

SEQ ID NO: 197435 - protein, 68 aa, Zea Mays
MFSSIIYYHMKLRLWDEGVHDLKGATWKKDELVPKLWTKELRLSVKTTMENETDLKGKRQLSPRQLTF

SEQ ID NO: 197436 - protein, 51 aa, Zea Mays
MFRKVFSICVYNTFNHATSYSLRIFYLSRFSLAHDKIFENGGNIIFQIVFL

SEQ ID NO: 197437 - protein, 825 aa, Zea Mays
MAVSDNKESEKQIPRPPPCPSGEQQKPKDDGDLSDDSPSNSTNQSDHIDGEHHYNIPIYRPYKYDPYRFMCRRERRNHWNDDYPYMCGFQNPWNPKTSLHTDDYWSPWPSPEPDQRMERYNSGSCWSWPSPEPDCEKERYTVAAGLSNPHLWTCFLNCVLQCMVHTVPLLLKLRKADHPDPCPRVSIGFCCYCSLKHHVDECMRLSGSSFYPEIFVNHLKSISSNFRSGVQQDAQEFLRCLLDKLDEDSIAPRFSEESSSSEESSSTEEGSVVKEIFSGCLKSQLRCPECNHYSDKSEPFLDLSLDLNMVETLMDALQSFTNTELIKDFMCDGCKSRVNLEKHFKIEQAPEVLVIHLKRFTNFESKIRDKVKFPIELDINSFMSSSDDTLQKYDLYGVVEHLGAYGSGHYVCYIRSSEADWYKFNDDKVCKCSVASALDSAAYLLFYVKQGSSPWFSTLLEKEDKCPLAGSVSLEEQGETAPFNKEGQARYNNESCLVESPGPHLWRKDLPQFIHSSDPTHASSTGSANKEEEAASSHGQGKIARNNKEEATTSLEQRNGSTLLDLSEQLQRNGNVNTLSDASDKLEEGCRMGETSTGTQGPSCLIGSGDKNGHADGCWEPSGKMKDVSPGGSLNKKEAKPMTCGSVEVEVDHAVTQGGSPRNENNCHSLQLSHKHKDNCDFLEVDHAVTQGVSPQINENNCHVLQLPHDRRDNFCRRSLSLQVDEIGGCCGAPSTGMGASNSENERVEPISNELRDDNRDTSCGEERRGRGGGESKKRKSANGGRSKALRKRMKRTHRTVARHFAFCRWRAVAGTVWKSKTRRR

SEQ ID NO: 197438 - protein, 1611 aa, Zea Mays
MVVRRGAGARRGGGFGGDVGEDAASRICMGGAALRAVFLLSANDARQTLLVPVFISITQLPAACLIANITSTVTDGREIRVGDCALFRAVGAPPFIGLIRWIEKKEEAHPKLRVSWLYRPTDVKLNKDIQLSAAPNEIFYSFHQDEASAVSLLHPCKVAFLRKGVELPAGISSFVCWRVYDIDNKCLWWLTDKDYINEEVNRLLHRTRLEMRAALQSGGRSPKRLNGPSASQQLKTASVGTQNGGLSKGKKRDRSEQGVDPAKRDRDHLLKVDESEPGNFNLDDIKSEISKITEKGGLPNAEAVEKLVHLMQLDRTEQKIDLSGRVILADVIAATESPDCLGRFVQSRGLPVLDSWLQEAHKGKSGDGTSPKEADKPIDELLSALLRALAKLPINLSALQSCSIGKSVNHLRSHKNLEIQKKAKCLVENWKKRVDAEMKSNDVKPLVSGQSVSWSGKAGFQEISNAGTKRGGSSENSPKNPVPTLSSSKILTDKPGGTDAEAKLNPGVSALSNSQHVQPTNVTTNLKDQPCKSTGGTGPELPTVKEEKSSSSSQSPNNSQSISSEPSKDARSSTAASGGASKTSESSSRSHRKANNGLVSGNLKEASVGRSVSLDRSLLQDKSSQTGTASEKGVDMPPDHGNNHRLIVRFPNPGRSPANSASAGSFDGPSVTGDRASSPVVADRHDQTERWVKGKTENSRPHLASDANTESWHSNDGAAGSEEGDKSPCAILDDDNSRTPDDSVKDAHASRVACSSHMNEKDVSETKVGTLFSPMNALIEIKYSEASHSRQAGDDAAMNLLASVAGEISKSELVSPVSSPRSSSAKKLARESDNIGKVKVESDMGPSHPGQADAKKGAMGKEVKNDACLVSMDEQRQTTPSPELPYSKAVVSSAKIETHEVEAKIANKCNSQHASIDSKGESQDACTAHGNVEDGSTDKDGAMESALGSQCSLVVSSRNSRLVHAGESALSAADKQAQGLLKSTNHKQLLSVSDNPGAFDRRDSMAGKLDLMAAEVRKTDVLGNSSIVQNEAEKKEHASSFLPDVPKLVVAAASPVGVANVNKEIKESKDSSSESNSHVKSEGVNSHQSEQSAKQSSKKSSDGVSGKEDEKEDHVLSDEGSSLAANTKSNATAKLDFDLNEGIPGDDGHQSEPTISPVVCSSAIHLTGILPFTSPITTGLQPASVTVAAPAKGPFVPPENLLRAKPEIGWKGSAATSAFRPAEPRKILEMPVAARDISVSHAAGKQSRPTLGFDLNVADDQALEEDIPQSSAQTTCSESGNTRSRDGSSRSAGIEFDLNRADEVADNGQFVPSASHRVEVPLLSTRSLHGVFSNAGLNSSRDFDLNSGPGLDDVGTEAAPKSLPSKNTSSIQFLPQVPVRMNSAAMSNISPWLASASPCGPVAIQSFLPTREQPYPIEAAAGAQRIIAPTADAGQFGGDPCRPPVVSTSPAMVYHPPAYQYPGFPFPPSVHLQTPAFSIGSATFNNSASPGVPYFPTVSPSFVGPAGALTPQHLRQFAINLAEGSSSSGRDSNRKWESQGLDLNSGPGSIDLEGKDERVPLPVRQNLIPPPHGFVEDQGRIYQMPVVGTKRKEPDGSWDSERSTYKQLSWQ

SEQ ID NO: 197439 - protein, 1620 aa, Zea Mays
MHGWRGAEGCDVRRRRLVRLMWPAARVEAEAPPPPAQGPATSPSGSSVPPSRTTSLPPESAAQQECIDLPRPVSPGSFVKDGREIRVGDCALFRAVGAPPFIGLIRWIEKKEEAHPKLRVSWLYRPTDVKLNKDIQLSAAPNEIFYSFHQDEASAVSLLHPCKVAFLRKGVELPAGISSFVCWRVYDIDNKCLWWLTDKDYINKRQEEVNRLLHRTRLEMRAALQSGGRSPKRLNGPSASQQLKTASVGTQNGGLSKGKKRDRSEQGVDPAKRDRDHLLKVDESEPGNFNLDDIKSEISKITEKGGLPNAEAVEKLVHLMQLDRTEQKIDLSGRVILADVIAATESPDCLGRFVQSRGLPVLDSWLQEAHKGKSGDGTSPKEADKPIDELLSALLRALAKLPINLSALQSCSIGKSVNHLRSHKNLEIQKKAKCLVENWKKRVDAEMKSNDVKPLVSGQSVSWSGKAGFQEISNAGTKRGGSSENSPKNPVPTLSSSKILTDKPGGTDAEAKLNPGVSALSNSQHVQPTNVTTNLKDQPCKSTGGTGPELPTVKEEKSSSSSQSPNNSQSISSEPSKDARSSTAASGGASKTSESSSRSHRKANNGLVSGNLKEASVGRSVSLDRSLLQDKSSQTGTASEKGVDMPPDHGNNHRLIVRFPNPGRSPANSASAGSFDGPSVTGDRASSPVVADRHDQTERWVKGKTENSRPHLASDANTESWHSNDGAAGSEEGDKSPCAILDDDNSRTPDDSVKDAHASRVACSSHMNEKDVSETKVGTLFSPMNALIEIKYSEASHSRQAGDDAAMNLLASVAGEISKSELVSPVSSPRSSSAKKLARESDNIGKVKVESDMGPSHPGQADAKKGAMGKEVKNDACLVSMDEQRQTTPSPELPYSKAVVSSAKIETHEVEAKIANKCNSQHASIDSKGESQDACTAHGNVEDGSTDKDGAMESALGSQCSLVVSSRNSRLVHAGESALSAADKQAQGLLKSTNHKQLLSVSDNPGAFDRRDSMAGKLDLMAAEVRKTDVLGNSSIVQNEAEKKEHASSFLPDVPKLVVAAASPVGVANVNKEIKESKDSSSESNSHVKSEGVNSHQSEQSAKQSSKKSSDGVSGKEDEKEDHVLSDEGSSLAANTKSNATAKLDFDLNEGIPGDDGHQSEPTISPVVCSSAIHLTGILPFTSPITTGLQPASVTVAAPAKGPFVPPENLLRAKPEIGWKGSAATSAFRPAEPRKILEMPVAARDISVSHAAGKQSRPTLGFDLNVADDQALEEDIPQSSAQTTCSESGNTRSRDGSSRSAGIEFDLNRADEVADNGQFVPSASHRVEVPLLSTRSLHGVFSNAGLNSSRDFDLNSGPGLDDVGTEAAPKSLPSKNTSSIQFLPQVPVRMNSAAMSNISPWLASASPCGPVAIQSFLPTREQPYPIEAAAGAQRIIAPTADAGQFGGDPCRPPVVSTSPAMVYHPPAYQYPGFPFPPSVHLQTPAFSIGSATFNNSASPGVPYFPTVSPSFVGPAGALTPQHLRQFAINLAEGSSSSGRDSNRKWESQGLDLNSGPGSIDLEGKDERVPLPVRQNLIPPPHGFVEDQGRIYQMPVVGTKRKEPDGSWDSERSTYKQLSWQ

SEQ ID NO: 197440 - protein, 1617 aa, Zea Mays
MHGWRGAEGCDVRRRRLVRLMWPAARVEAEAPPPPAQGPATSPSGSSVPPSRTTSLPPESAAQQECIDLPRPVSPGSFVKDGREIRVGDCALFRAVGAPPFIGLIRWIEKKEEAHPKLRVSWLYRPTDVKLNKDIQLSAAPNEIFYSFHQDEASAVSLLHPCKVAFLRKGVELPAGISSFVCWRVYDIDNKCLWWLTDKDYINEEVNRLLHRTRLEMRAALQSGGRSPKRLNGPSASQQLKTASVGTQNGGLSKGKKRDRSEQGVDPAKRDRDHLLKVDESEPGNFNLDDIKSEISKITEKGGLPNAEAVEKLVHLMQLDRTEQKIDLSGRVILADVIAATESPDCLGRFVQSRGLPVLDSWLQEAHKGKSGDGTSPKEADKPIDELLSALLRALAKLPINLSALQSCSIGKSVNHLRSHKNLEIQKKAKCLVENWKKRVDAEMKSNDVKPLVSGQSVSWSGKAGFQEISNAGTKRGGSSENSPKNPVPTLSSSKILTDKPGGTDAEAKLNPGVSALSNSQHVQPTNVTTNLKDQPCKSTGGTGPELPTVKEEKSSSSSQSPNNSQSISSEPSKDARSSTAASGGASKTSESSSRSHRKANNGLVSGNLKEASVGRSVSLDRSLLQDKSSQTGTASEKGVDMPPDHGNNHRLIVRFPNPGRSPANSASAGSFDGPSVTGDRASSPVVADRHDQTERWVKGKTENSRPHLASDANTESWHSNDGAAGSEEGDKSPCAILDDDNSRTPDDSVKDAHASRVACSSHMNEKDVSETKVGTLFSPMNALIEIKYSEASHSRQAGDDAAMNLLASVAGEISKSELVSPVSSPRSSSAKKLARESDNIGKVKVESDMGPSHPGQADAKKGAMGKEVKNDACLVSMDEQRQTTPSPELPYSKAVVSSAKIETHEVEAKIANKCNSQHASIDSKGESQDACTAHGNVEDGSTDKDGAMESALGSQCSLVVSSRNSRLVHAGESALSAADKQAQGLLKSTNHKQLLSVSDNPGAFDRRDSMAGKLDLMAAEVRKTDVLGNSSIVQNEAEKKEHASSFLPDVPKLVVAAASPVGVANVNKEIKESKDSSSESNSHVKSEGVNSHQSEQSAKQSSKKSSDGVSGKEDEKEDHVLSDEGSSLAANTKSNATAKLDFDLNEGIPGDDGHQSEPTISPVVCSSAIHLTGILPFTSPITTGLQPASVTVAAPAKGPFVPPENLLRAKPEIGWKGSAATSAFRPAEPRKILEMPVAARDISVSHAAGKQSRPTLGFDLNVADDQALEEDIPQSSAQTTCSESGNTRSRDGSSRSAGIEFDLNRADEVADNGQFVPSASHRVEVPLLSTRSLHGVFSNAGLNSSRDFDLNSGPGLDDVGTEAAPKSLPSKNTSSIQFLPQVPVRMNSAAMSNISPWLASASPCGPVAIQSFLPTREQPYPIEAAAGAQRIIAPTADAGQFGGDPCRPPVVSTSPAMVYHPPAYQYPGFPFPPSVHLQTPAFSIGSATFNNSASPGVPYFPTVSPSFVGPAGALTPQHLRQFAINLAEGSSSSGRDSNRKWESQGLDLNSGPGSIDLEGKDERVPLPVRQNLIPPPHGFVEDQGRIYQMPVVGTKRKEPDGSWDSERSTYKQLSWQ

SEQ ID NO: 197441 - protein, 57 aa, Zea Mays
MVEFAPLLSSLACQDKSRRDIIPSLPISRPDLPRRLCCALPLSLLTQLRSLSLSLNP

SEQ ID NO: 197442 - protein, 1473 aa, Zea Mays
MSGPQERNMRDLYNRTRHKDFPALEESAEGRSGGRPSGSEQRELASKMEDKAVVRKRLVSSNNTHAKVESGTCNVCYAPCSSCLHPHIRVVDSNVECASSQTCSTRRLLNENTRLPRAEYLEDSNSCVTGISAEGKLHVDKKKLSTSASSRDLTAKDYKVNSMANHSKLRNQCIDESKKGSDGRDMHPSSSGRFSPVDSSVMTKKMLRTQSSVSALSRLSPNRQAHEFGKALDNLSHQPCEKASLLKNNEQLRCGQLNPCIAGENNHGTLAGYSNRHADKDVFSLKDLDNGTLCSKDEIQEHGGIHSNDDVKKNVCGEQALDQDCSRDISSDRKLNIQHDVTDCGNSEGLIDVNVCDICGDVGREYLLATCTRCLEGAEHIYCMRVKLEKVPVGEWFCEECQLKEDQNNTSNYGISVVNVTEGKNQRTESRSKPKTLQIVVPDFDALEVTHSALTADRCDGNSKRLHLASTDTQTRQLKDTTPAAQRLDVKNKKSLSVTNRNKLQVLTSDLDTRPHNYGTSTSGVYTNKSQSSEFLLNHKKLRVSTDMQSPLSSEGLRSPPISCKRHAESMSSPKPRIVKAGTLGKQDVISRANSFKKSNKGGLSSVDNIPVRTTQAVKSSDSQTLSRSYSLGNMVNAKAPVPSPRGFLSKQLSFNSTNNGPKVKQLADGVSSKLRPAEHSPRDPRDKKSIKKIVQSGSFKHEGSDSIVAGSSKKKQTFHLSQDEKPGVLKVIKENNLTERRASFSLKKRNIPSSPRPDSCMKSGERKNDQDISRSGTSILKSSKKPGYAEKKQNNDLSRSDNGKEDVTVHPKTMEVSGKDAYVVKTSDPPVQPQCAKKDRPNDVEDDDLLISVNNVNIAPNEHAEVVPTTFAAMTYESDLQDVPRESTSDDSAPKVVCCQQKLLENTGDDSGKIVEVVQDSGDILSVTPHGLQMAHNLYPPDNKLHKPDLKKEAFADQSSALGNCLKDFVIPEQSYIWQGGFEVSGHGNSPEMFDGFQAYLSTCASSKVREVGEQLPDKIQLAEVPRHSSWPLQFNEVNPTEDNIALFFFAKDVESYERAYGKLLDNMLLGDLSLKANIGGTELLIFPSDKLPERIQRWNGLPFFWGIFYARKASSPLELPTNNCPLEQINEPVIQHDIGSPKAHQPLGIDLNECPNDYISDLSLSLGSESEKSGASLDRNIVLESKREDRSLNASEIHHEETAGTRQIIPGHPSVASCGTNLPTISTGGHDMIQDYLAAAKGSTGTPGGNKMEKTDQNETLFRFSQQLGATRSISHEIELNKHGLLPSHCHLSGSKICDDQTKSTPNSDMGPLDFDITNKRQKTYGKHSCIFGDAMTPMKCLSKIHPLPAGQDNPCDVLQHCHRGPSDPASLKKPLPDHFIHVLSSDDEDSPEPSTSLNKASSKADEGSSILCSLSLSMVATKRNLSGSDIVDDEPLSLSLGLPSVVGGRADQEMKQFLPEKPEERSIWIK

SEQ ID NO: 197443 - protein, 1086 aa, Zea Mays
MRVKLEKVPVGEWFCEECQLKEDQNNTSNYGISVVNVTEGKNQRTESRSKPKTLQIVVPDFDALEVTHSALTADRCDGNSKRLHLASTDTQTRQLKDTTPAAQRLDVKNKKSLSVTNRNKLQVLTSDLDTRPHNYGTSTSGVYTNKSQSSEFLLNHKKLRVSTDMQSPLSSEGLRSPPISCKRHAESMSSPKPRIVKAGTLGKQDVISRANSFKKSNKGGLSSVDNIPVRTTQAVKSSDSQTLSRSYSLGNMVNAKAPVPSPRGFLSKQLSFNSTNNGPKVKQLADGVSSKLRPAEHSPRDPRDKKSIKKIVQSGSFKHEGSDSIVAGSSKKKQTFHLSQDEKPGVLKVIKENNLTERRASFSLKKRNIPSSPRPDSCMKSGERKNDQDISRSGTSILKSSKKPGYAEKKQNNDLSRSDNGKEDVTVHPKTMEVSGKDAYVVKTSDPPVQPQCAKKDRPNDVEDDDLLISVNNVNIAPNEHAEVVPTTFAAMTYESDLQDVPRESTSDDSAPKVVCCQQKLLENTGDDSGKIVEVVQDSGDILSVTPHGLQMAHNLYPPDNKLHKPDLKKEAFADQSSALGNCLKDFVIPEQSYIWQGGFEVSGHGNSPEMFDGFQAYLSTCASSKVREVGEQLPDKIQLAEVPRHSSWPLQFNEVNPTEDNIALFFFAKDVESYERAYGKLLDNMLLGDLSLKANIGGTELLIFPSDKLPERIQRWNGLPFFWGIFYARKASSPLELPTNNCPLEQINEPVIQHDIGSPKAHQPLGIDLNECPNDYISDLSLSLGSESEKSGASLDRNIVLESKREDRSLNASEIHHEETAGTRQIIPGHPSVASCGTNLPTISTGGHDMIQDYLAAAKGSTGTPGGNKMEKTDQNETLFRFSQQLGATRSISHEIELNKHGLLPSHCHLSGSKICDDQTKSTPNSDMGPLDFDITNKRQKTYGKHSCIFGDAMTPMKCLSKIHPLPAGQDNPCDVLQHCHRGPSDPASLKKPLPDHFIHVLSSDDEDSPEPSTSLNKASSKADEGSSILCSLSLSMVATKRNLSGSDIVDDEPLSLSLGLPSVVGGRADQEMKQFLPEKPGINT

SEQ ID NO: 197444 - protein, 497 aa, Zea Mays
MGCFQSKVAGPLPPNDAAALPADKPADPEAANGGADGEGDGDDKEAVKRAVPVFREFALAELRAATKGFSADLIVSESGEKAPNAVYRGRLDGGRLIAVKRFSRLSWPDPQQFLAEAAGVGKVRHKRLVNLIGCCAEGDERLLVAEYMPNDTLSKHLFHWDKQPLPWEMRLRVAYFIAQALDHCNAENRKIYHDLNAYRVLFDEEGDPRLSSFGLMKNSRDGKSYSTNLAYTPPEFLRTGRVIPESVIYSYGTVLLDLLSGKHIPPSHALDLIRGKNILLLMDSSLEGQYANEDASKLVDLASKCLQFESRDRPNIKYLLSSVGPLQNQKEVASHVFMGITKATSVLPTICSPLRKACTGMDLSAVHDILLKTGYKDDEGAENEQVQEMLNTKKFGDIAFRDKDFKTAIDYYSKLVAMMSTPSATVFVRRSFSYLMNGQAELALRDAMQAQVCMPEWPTAFYLQALALSKLGMETDAQDMLNDGATFEAKKQNGWRS

SEQ ID NO: 197445 - protein, 290 aa, Zea Mays
MKNSRDGKSYSTNLAYTPPEFLRTGRVIPESVIYSYGTVLLDLLSGKHIPPSHALDLIRGKNILLLMDSSLEGQYANEDASKLVDLASKCLQFESRDRPNIKYLLSSVGPLQNQKEVASHVFMGITKATSVLPTICSPLRKACTGMDLSAVHDILLKTGYKDDEGAENELSFQEWTQQVQEMLNTKKFGDIAFRDKDFKTAIDYYSKLVAMMSTPSATVFVRRSFSYLMNGQAELALRDAMQAQVCMPEWPTAFYLQALALSKLGMETDAQDMLNDGATFEAKKQNGWRS

SEQ ID NO: 197446 - protein, 478 aa, Zea Mays
MGCFQSKVAGPLPPNDAAALPADKPADPEAANGGADGEGDGDDKEAVKRAVPVFREFALAELRAATKGFSADLIVSESGEKAPNAVYRGRLDGGRLIAVKRFSRLSWPDPQQFLAEAAGVGKVRHKRLVNLIGCCAEGDERLLVAEYMPNDTLSKHLFHWDKQPLPWEMRLRVAYFIAQALDHCNAENRKIYHDLNAYRVLFDEEGDPRLSSFGLMKNSRDGKSYSTNLAYTPPEFLRTGRVIPESVIYSYGTVLLDLLSGKHIPPSHALDLIRGKNILLLMDSSLEGQYANEDASKLVDLASKCLQFESRDRPNIKYLLSSVGPLQNQKEVASHVFMGITKATSVLPTICSPLRKACTGMDLSAVHDILLKTGYKDDEGAENELSFQEWTQQVQEMLNTKKFGDIAFRDKDFKTAIDYYSKFFLLDEWASRARSTGRNASPGLHARVAYGLLPPGPGSFKARHGNRCPGHAQRWRHV

SEQ ID NO: 197447 - protein, 213 aa, Zea Mays
MGCFQSKVAGPLPPNDAAALPADKPADPEAANGGADGEGDGDDKEAVKRAVPVFREFALAELRAATKGFSADLIVSESGEKAPNAVYRGRLDGGRLIAVKRFSRLSWPDPQQFLAEAAGVGKVRHKRLVNLIGCCAEGDERLLVAEYMPNDTLSKHLFHWDKQPLPWEMRLRVAYFIAQALDHCNAENRKIYHDLNAYRVLFDEVIPACQVLD

SEQ ID NO: 197448 - protein, 324 aa, Zea Mays
MFVEKVLLCHLSLDWEDIKFGVENGVDFYAVSFVKDAKVIHELKDYLKGVNADIHVIPKIESADSIPNLQSIIAASDGAMVARGDLGAELPIEDVPLLQAEIVQTCRNMEKPVIVATNMLESMIDHPTPTRAEVSDIAIAVREGADAIMLSGETAHGKYPLKAVKVMHTVALRTESSIYNPTTSPSVIASAQGLQNEEFSPSQLSKMFGSHATMMANTLRTPIIVFTQTGSMAVLLSHYRPSSTIFAFTNEERVKLRLALYQGVIPIHMEFSDDAEETFSRAISSLLKAQYVKKGDYVTLVQSGVTSIWREESTHNIQVRRAQV

SEQ ID NO: 197449 - protein, 498 aa, Zea Mays
MYSEASSEIPSQAAIANSRRKTKIVCTIGPSTNTREMIWKLAETGMNVARLNMSHGDHQSHQKVINLVKEYNAQNTDGNVIAIMLDTKGPEVRSGDVPEPIMLSEGQEFNFTIKRGVSTEDTVSVNYDDFINDVEAGDILLVDGGMMSLAVKSKTADTVKCEVVDGGELKSRRHLNVRGKSATLPSITEKDWEDIKFGVENGVDFYAVSFVKDAKVIHELKDYLKGVNADIHVIPKIESADSIPNLQSIIAASDGAMVARGDLGAELPIEDVPLLQAEIVQTCRNMEKPVIVATNMLESMIDHPTPTRAEVSDIAIAVREGADAIMLSGETAHGKYPLKAVKVMHTVALRTESSIYNPTTSPSVIASAQNEEFSPSQLSKMFGSHATMMANTLRTPIIVFTQTGSMAVLLSHYRPSSTIFAFTNEERVKLRLALYQGVIPIHMEFSDDAEETFSRAISSLLKAQYVKKGDYVTLVQSGVTSIWREESTHNIQVRRAQV

SEQ ID NO: 197450 - protein, 94 aa, Zea Mays
MNKPAEYDSDDEIIAIGRSPTIRQPLIHTQNVPATGVPVPTLDQRASRNDAWSQRMREKYGLDTSQFTYNPSDPSRYQQNGTPRAEERSRCTIM

SEQ ID NO: 197451 - protein, 142 aa, Zea Mays
MVIPVDKTHNFDVMYDFLKENWEIARWVALGVVVFEAVLLLLALAVRAMNKPAEYDSDDEIIAIGRSPTIRQPLIHTQNVPATGVPVPTLDQRASRNDAWSQRMREKYGLDTSQFTYNPSDPSRYQQNGTPRAEERSRCTIM

SEQ ID NO: 197452 - protein, 191 aa, Zea Mays
MCGGPSYQVQLGRRDGMVSQASMASILPGPNVDVPTAIDLFARKGLNSFEMVSLMGAHTVGVTHCSVIHDRLFNFNGTGSPDPAMDPMYVWILTTYACPRGQAFDNIVYLDDPSSILLVDRSYYSQIMKRHGVLSVDQALGDSSATAWMVKFLATTDFFPSMFSYALNKLAALDVLTGTDGEIRKSCRRTN

SEQ ID NO: 197453 - protein, 198 aa, Zea Mays
MQPACSGAALLAAFIAVLAYSAARCRGQLADNYYAGKCGNFSVEAIIRDAVKARLAWDKRMVAGLLHLQFHDCFVAGCDASILLDGPDTEKTAVQNSGIFGYDFIDDVKAALERVCPGVVSCADIIIAATRDAVGMSSAGGRATKCSWAEGTAWCRRRPWRAFCRAPTSTSPPPSICSRGRASTASRWSASWARTRWG

SEQ ID NO: 197454 - protein, 70 aa, Zea Mays
MDCYFLSILKMQVNHGRFSSLVQTNTSTHVPFSGGAREQQVHFTPQPNQVRNHFIFSLLRVLCQRKYVNL

SEQ ID NO: 197455 - protein, 116 aa, Zea Mays
MYPFLVELENNKFTLLLNQTKWCRFRWSKKVVCWQSSLKYYRRPIEIDVGPTHAPMSLPPMSSWSHELHVGHPRRISTMPLLAGCVANTQRNAKCSTCRQRPVFYRRLYRLLLDQQ

SEQ ID NO: 197456 - protein, 319 aa, Zea Mays
MGFGQIWCDVVSGLLATSSTRILLNGVPGEIIAHQRGLRQGDPLSPMLFILVMDALNLLIQKASDEGLLQRLSSGALHHRLSLYADDAVVFLRPVASDINIILEILRLFGEASGLKTNVQKSSVFPIRCTEDDLVRVRDCLPCPLSDFPCQYLGLPLSLGKLSKVQLQALVDKAANVLPGWKADLMTKAGRVVYVQSVLTAKMIYAAMALDLPSWTVKAIDKIRRGFLWKGRKQVNGGHCLVAWGKVTRPKDLGGLGITDLRLLSVALRARWPWLQRTDHSKPWAVLPVQACGSVQALINIAVVSELGDGNDILFWKDR

SEQ ID NO: 197457 - protein, 320 aa, Zea Mays
MHHHHHHPAAVLESAAPAADPPPPPVLDPSSLRIHIPSSPHHALPSTPHKRPVVMTSSSSSSTPTRPSPSPFTPPRRRKVPAPAAPAGGAAARYLLRCLHLRLRILLLISLPSLYFLSPTPAILPHSLLADFLSAAAFSCALLLLLCLSLPRLPFALPLPLPLRRARRSPILWSIGSSPSASATTPTTGHFVQVYSNGDVYEGQFHRGRCTGSGVYYYYMSGRYEGDWVDGKYDGFGVETWARGSRYRGQYRHGLRHGYGVYRFYTGDVYAGEWSNGQSHGYGVHTCEDGSRYVGEFKRGVKHGLGHYHFRAYRVPEAAA

SEQ ID NO: 197458 - protein, 284 aa, Zea Mays
MHHHHHHPAAVLESAAPAADPPPPPVLDPSSLRIHIPSSPHHALPSTPHKRPVVMTSSSSSSTPTRPSPSPFTPPRRRKVPAPAAPAGGAAARFYTGDVYAGEWSNGQSHGYGVHTCEDGSRYVGEFKRGVKHGLGHYHFRNGDTYAGEYFADRMHGFGIYSFANGHRYEGAWHEGRRQGLGMYSFRNGETQAGHWQNGVLDTLCTQNFIPGSPIAVNHSKVLNAVQEARRAAEKAYDIPRVDDRVNRAVAAANKAANAARVAAVKAAQKRNPNNGDDLPLSVV

SEQ ID NO: 197459 - protein, 154 aa, Zea Mays
MVPYYDYALDLILDIESSDDTYTEERKEFIELSAEILYGLIHARYILTSKGLAAMLEKFKNRDFGGCPRVYCCGQPCLPAGQSDVPRSSTVKIYCPKCEELNYPISMYQGSIDGSYFGTTFPHLFLMTYPHLKPQKPPQQYTPRVFGFKHHKPS

SEQ ID NO: 197460 - protein, 155 aa, Zea Mays
MVPYYDYALDLILDIESSDDTYTEERKEFIELSAEILYGLIHARYILTSKGLAAMLEKFKNRDFGGCPRVYCCGQPCLPAGQSDVPRSSTVKIYCPKCEELNYPISMYQGSILLICSFNCFVQYDISILPFASTGHFMLFFSSDLYFDHHSKLLK

SEQ ID NO: 197461 - protein, 188 aa, Zea Mays
MVRNLKLTVKMKILISVVLRARAHPGFHGSVHCEVPYYDYALDLILDIESSDDTYTEERKEFIELSAEILYGLIHARYILTSKGLAAMLEKFKNRDFGGCPRVYCCGQPCLPAGQSDVPRSSTVKIYCPKCEELNYPISMYQGSILLICSFNCFVQYDISILPFASTGHFMLFFSSDLYFDHHSKLLK

SEQ ID NO: 197462 - protein, 114 aa, Zea Mays
MNRGRETGGNLRESGLFSGCDGDGGAGMDRKRIKDVLEKHLERSSPSTSRGVVSKERERLAAGKLPASLGKAEKVSDGEEFETDSEDEDSDISGSESEGTSWISWFCTLRGAIL

SEQ ID NO: 197463 - protein, 89 aa, Zea Mays
MDEKIDFSFKLYDMDSTGFIERKEVKQMLIALLGESEMRLSDDIIETILDKTFSDADANQDGKIDRTEWENFVTRNPSLMKIMTLPYLN

SEQ ID NO: 197464 - protein, 196 aa, Zea Mays
MGCFHSTAKRQHPGYEDPVDLASQTSFSVSEVEALFELFKSISGSVIDDGLINKIGARCHIRLWAVMWDHRYTHLTHARDTQCTQEVPSNYLTVSFKLYDMDSTGFIERKEVKQMLIALLGESEMRLSDDIIETILDKTFSDADANQDGKIDRTEWENFVTRNPSLMKIMTLPYLKDITTTFPSFVFNSEVDDLVT

SEQ ID NO: 197465 - protein, 96 aa, Zea Mays
MDSTGFIERKEVKQMLIALLGESEMRLSDDIIETILDKTFSDADANQDGKIDRTEWENFVTRNPSLMKIMTLPYLKDITTTFPSFVFNSEVDDLVT

SEQ ID NO: 197466 - protein, 210 aa, Zea Mays
MLPFHGQAAASWLRGPRGPRLPDLLVSEVEALFELFKSISGSVIDDGLINKEEFQLALFKNQRKENLFANRIFDLFDVKKRGAIDFGDFVRALNVFHPNIPMDEKIDFSFKLYDMDSTGFIERKEVKQMLIALLGESEMRLSDDIIETILDKTFSDADANQDGKIDRTEWENFVTRNPSLMKIMTLPYLKDITTTFPSFVFNSEVDDLVT

SEQ ID NO: 197467 - protein, 134 aa, Zea Mays
MEDYLKGCKFLPKLNNEIPSARNTTYKERFSSLENLVLIMFEDDAVLIPRETAWFGYYPDGAFSPVLPPQETKLYTEDWIGLKTLDEAGRVKFVSVPGGHLRITRSDMKKYIVPYLTPEASSKKNIHIHRMLSL

SEQ ID NO: 197468 - protein, 204 aa, Zea Mays
MPLQEQANTVCKKVKKMKELSEGYNIVGLSQGNLIGRAVIEYCDCGPPVKNFISIGGPHAGTASVPLCGDMEDYLKGCKFLPKLNNEIPSARNTTYKERFSSLENLVLIMFEDDAVLIPRETAWFGYYPDGAFSPVLPPQETKLYTEDWIGLKTLDEAGRVKFVSVPGGHLRITRSDMKKYIVPYLTPEASSKKNIHIHRMLSL

SEQ ID NO: 197469 - protein, 180 aa, Zea Mays
MLVQLQCHFVSGFLCILIDDLIKSEIYSDYVQAHLAPSGYLKIPTDMEDYLKGCKFLPKLNNEIPSARNTTYKERFSSLENLVLIMFEDDAVLIPRETAWFGYYPDGAFSPVLPPQETKLYTEDWIGLKTLDEAGRVKFVSVPGGHLRITRSDMKKYIVPYLTPEASSKKNIHIHRMLSL

SEQ ID NO: 197470 - protein, 239 aa, Zea Mays
MPLQEQANTVCKKVKKMKELSEGYNIVGLSQGNLIGRAVIEYCDCGPPVKNFISIGGPHAGTASVPLCGSGFLCILIDDLIKSEIYSDYVQAHLAPSGYLKIPTDMEDYLKGCKFLPKLNNEIPSARNTTYKERFSSLENLVLIMFEDDAVLIPRETAWFGYYPDGAFSPVLPPQETKLYTEDWIGLKTLDEAGRVKFVSVPGGHLRITRSDMKKYIVPYLTPEASSKKNIHIHRMLSL

SEQ ID NO: 197471 - protein, 296 aa, Zea Mays
MDPPRAVAFLLILLPVLAPVASGVPFVVLHGIGDECGNDGLSSFTKMLGEWSGSKGYCIEIGRGAWDSWLMPLQEQANTVCKKVKKMKELSEGYNIVGLSQGNLIGRAVIEYCDCGPPVKNFISIGGPHAGTASVPLCGSGFLCILIDDLIKSEIYSDYVQDMEDYLKGCKFLPKLNNEIPSARNTTYKERFSSLENLVLIMFEDDAVLIPRETAWFGYYPDGAFSPVLPPQETKLYTEDWIGLKTLDEAGRVKFVSVPGGHLRITRSDMKKYIVPYLTPEASSKKNIHIHRMLSL

SEQ ID NO: 197472 - protein, 140 aa, Zea Mays
MDPPRAVAFLLILLPVLAPVASGVPFVVLHGIGDECGNDGLSSFTKMLGEWSGSKGYCIEIGRGAWDSWLMPLQEQANTVCKKVKKMKELSEGYNIVGLSQGNLIGRAVIEYCDCGPPSGFLCILIDDLIKSEIYSDYVQ

SEQ ID NO: 197473 - protein, 66 aa, Zea Mays
MDPPRAVAFLLILLPVLAPVASGVPFVVLHGIGDECGNDGLSSFTKMLGEWSGSKGYCMKNQKRRM

SEQ ID NO: 197474 - protein, 178 aa, Zea Mays
MGCPRERTVVATLSMTLLFLLADQAGVVSCHPFPAVAVAAKHQTAVQVRNLLIDTRNAAGMAAYGAEKTEEAAPPDLCSGVVAVSQGSAGSLSNGTPSYSVTITNTCLGCTVRDVHVSCGEFAAPTELVDPSDFRRLSYDDCLVKNGGPMGPGETISFEYSNSFIYKMDVATVSCGDV

SEQ ID NO: 197475 - protein, 334 aa, Zea Mays
MAIGAFVEGAPADGGEGYSGRVTPFVVLSCVVAGSGGVLFGYDLGISGGLTSMDCFLKRFFPKVYRQKQDSKVSHYCEFNSELLTVFTSSLYIAGLVATLAAATITRRYGRRTSMLIGGSVFIAGSVFGGAATNIPMLLMNRILLGIGLGFTNQSIPLYLSEMAPPRYRGAINNGFELCISLGILFANVLNYFVIKITAGWGWRISLSMAALPAAFLTIGAIFLPETPSFIIQRDGNNTDKARVLLQKLRGTASVQKELDDLVRASDLSRATRYPFRSILERKYRPQLVVALLVPFFNQALRGRGALSPSWSLPRFARWRSGPRGRASWSLWFS

SEQ ID NO: 197476 - protein, 358 aa, Zea Mays
MAPPRYRGAINNGFELCISLGILFANVLNYFVIKITAGWGWRISLSMAALPAAFLTIGAIFLPETPSFIIQRDGNNTDKARVLLQKLRGTASVQKELDDLVRASDLSRATRYPFRSILERKYRPQLVVALLVPFFNQVSGINVVNFYAPVMFRTIGLKESASLLSSVVTRLCATSANVVAMVVVDRVGRRKLFLAGGVQMILSQFTVGAILAAKFRDYEEMGDGYAYLVLTTLCVFVAGFAWSWGPLTFLVPAEVCPLEIRSAGQSIVVAVVFLMTFVISQTFLEVLCRVKSATFFVFGGWICLMTLFVYLFLPETKKLPMEQMEQVWKTHWFWKKVVGEEADRKEAGAGNIALSGLS

SEQ ID NO: 197477 - protein, 235 aa, Zea Mays
MVSVARVAAAVAAVASATSSNAQATTTKMATAMASATELLASHCVEAAQHAGARHDQVAAAVQAAVGVRSPGDLMTLTAAAATGTHYAVRRSCVIASQVFHCRFLKQDAKLPCTFGSRRPALRGAATLRQRAQRETRSNASILLPYEKAANSWSPDIWCKEGALLKRARKGGLHKIRVCIYINKRSEVILKLKSKHIGGALTKKNKSRSRHLLPKHWIQPTSSLRTSVSVLTLSA

SEQ ID NO: 197478 - protein, 273 aa, Zea Mays
MIPFNPAVAAEVRALIQGVEDSTFDPIYRELSQPWWVRFLLQVCVDEILLNIGGANNHRLKHDLVAIIFRYCVDKPYFSTNFCEALRAMPDSDGLLETLSNELELSTTERVVVGLALSDSENPDLNLEEMCLGRLDDDFDSHISKIGEQISLSDIISELGCGCTCNTTHCKEMLSLLEPLDDMGISKLLGAVVCTRIGVGEAQNTYSIFLLTFGNNQTIDSSQLTSWNIDVLVDSINEIAPGTNWTHVIENLDHEGFIIPDEAAFRLLMSICY

SEQ ID NO: 197479 - protein, 139 aa, Zea Mays
MIPFNPAVAAEVRALIQGVEDSTFDPIYRELSQPWWVRFLLQVCVDEILLNIGGANNHRLKHDLVAIIFRYCVDKPYFSTNFCEALRAMPDSDGLLETLSNELELSTTERVVVGLALSDSENPDLNLEGRKFTIAQIKE

SEQ ID NO: 197480 - protein, 237 aa, Zea Mays
MRQGMSSPSAAAALVLLLALLAGGQCREAQLDAADAGTGTENYTASDAAVYWGPWQRARATWYGQPNGAGPDDNGGACGFKHTNQYPFMSMGSCGNQPLFKDGKGCGSCYKIRCRKDPSCSGRTETVIITDMNYYPVSKYHFDLSGTAFGRLAKPGLNDKLRHSGIIDIEFTRVPCEFPGLKIGFHVEEYSNPVYFAVLPPFSIRIRNESGKTLVANNVIPANWRPNTFYRSFVQYS

SEQ ID NO: 197481 - protein, 246 aa, Zea Mays
MAPPTDVCLQGAVRVPGPEDRVPRGGVLEPRLLRGAGGVRGRRRRRGAGGPDGVQDGARPADGAVDADARVLGLRLAHGHQPPHAAALLHPHPQRVRQDARRQQRHPGQLAPQHLLPLLRPVQLTDRDPCPARNWSWLAGALLGSVTIVYSTILCSTTTRLLLLLLVYYHQVRRNGTASRRRRPWEGRCLRSPCRCSCIVIMVLGVVASGARFLGQASCAMFVGSGWHVMPCVTLIASRQARRQKN

SEQ ID NO: 197482 - protein, 72 aa, Zea Mays
MDSADSIADKAIEASEPGVIPTAPQFGEVGFVRWELSARGEGPREGDPPPDGDVTTLMHRFRQGNKRTRRET

SEQ ID NO: 197483 - protein, 260 aa, Zea Mays
MAGLPPVARRLRLRLATAALLLVLLLAVTAAVAAREGRGLARVQGPPPRHRHAYAAMMYMGTPRDYEFYVAVRVMMRSLTRVRADADRVLIASADVPRDWVRAMTEEDGMRVVIVENLRNPYEGNLGGTNKRFKLTLNKLYAWTLVDYERVVMIDSDNIFLQNTDELFQCGQFCAVFINPCYFHTGLFVLQPSIDVFKGMLHDLETGRENSDGADQGFLVGCYPDLLDKPMFHPPENGTKLNGTYRLPLGYQMDASYYCE

SEQ ID NO: 197484 - protein, 410 aa, Zea Mays
MLSHPKRRSQLPEPIEKEKGVSLWSMIKDNVGKDLTRVCLPVYFNEPLSSLQKCFEELEYSYLLDRAYECGLRGNGLMRIIYVAAFAVSGYASTDSRPCKPFNPLLGETYEADYPEKGIRFFSEKVSHHPMVMACHCEGKGWKFWGDSNLKSKFWGQSIRLDPNGVLTLEFDDGETFQWSKVTTTINNLILGRVYCHHHGTMNISGNRRYSCKLTFKEQSFLDRNPRQVQGVVNDADGSKVATLMGKWDESMHYIINNDASKTNSHGSHEGSGATLLWEKNEPPVNPTRYNLSTFAITLNELTPELKEKLPPTDSRLRPDQRHLENGEYEKANAEKLRLETRQRMARKMQESGWKPRWFQRDSEDGTYRYVGGYWEAREQRTWVGCNDIFGNLSSSPKLPPSGLNTSSSI

SEQ ID NO: 197485 - protein, 568 aa, Zea Mays
MRAWEMHPLCCLAAGEWPASGAARDDRSPPPEGSGEAPAVAGVLYKWTNIGKGWRPRWFAIRGGVLAYSKIRRRVAAAPPRPASEAAGGVRLIGVARGAGERPIGFVPLKMSSFSESKSDDKRFYIITPTKTLQLRTGCAKDRATWIEALVTARSEYSFNGDLSGDQNVASFSTEKLRNRLHVEGVGEAVIKDCEQIIQSEFSQYQTQMKQRCEEYLSFIGSLPREVEVVNSVDSTVPEKSQLELFKHDCSSSGKCSEYSNTESSDDVGKQEISELSDGDDFHFYDTRQSFSEFTTTPADLRKGCVNTGNEDHKSVESLTVDEAEKYMLSHPKRRSQLPEPIEKEKGVSLWSMIKDNVGKDLTRVCLPVYFNEPLSSLQKCFEELEYSYLLDRAYECGLRGNGLMRIIYVAAFAVSGYASTDSRPCKPFNPLLGETYEADYPEKGIRFFSEKVSHHPMVMACHCEGKGWKFWGDSNLKSKFWGQSIRLDPNGVLTLEFDDGETFQWSKVTTTINNLILGRVYCHHHGTMNISGNRRYSCKLTFKEQSFLDRNPRQELSTMLMEARSQH

SEQ ID NO: 197486 - protein, 516 aa, Zea Mays
MEDLNKFYASFWKQSSSSLSSLHSVHEHKLMNLGSKRNQTQEVSTNYNKRKSLSGIVELSSDVRSSIRRKSDAYREVIDLEKPSVYGDAVEAIGCSGLGNLANQNGKSQDVSPQNNSLAESLQLCRDWKTSRVSVVGSSHTPDCQSPTKTSNNEARQSLFDLNVPPEESLLMPSTLFPSSSTYCGNFSDRPRETSEKERVSGIGSTKGSSITVITPDSAADSSRDVVTESSVQQKFPFDLNVSPENTNMPSEINDYRDKVVNNGVSKGTAPDHSFSTKNGLLAETSTKHVVLGHDSVLAHKQDDSHVLLTVPTANGIDKAHSPQPGTINKEFLDPGSPLLDNNFHPRLGTSHNGASDIQELSMLQCKVDDGGTTADTAARTLLSMFQHSSECVAHRPGSSNQTAAQKVDDEPQPSLDSFEKTVLDSEEAKDDGQSVTVTPPFKEGPACRIKLKRGRGMRNFQREIVPGLLLGRQEICEDLKAIGYEAKKARSRKPRKGPGASSARPRPRKRGAAKH

SEQ ID NO: 197487 - protein, 165 aa, Zea Mays
MAGRLTAAGSRILGGGGARAAASALRHRAGMGLPVGRHIVPDKPLPVNDELVWDNGTPFPEPCIDRLAPHIGKYEALAWLCGGLGFFAALGMAAVVNDKASNIPYGLTGGVPGERPTASGGRRRLLSLGATSSGAMEFAQSGGRRLCAMAAGNWRLRSAMDEPAG

SEQ ID NO: 197488 - protein, 104 aa, Zea Mays
MAGRLTAAGSRILGGGGARAAASALRHRAGMGLPVGRHIVPDKPLPVNDELVWDNGTPFPEPCIDRLAPHIGKYEALAWLCGGLGFFAALGMAAVVNDKASNIP

SEQ ID NO: 197489 - protein, 172 aa, Zea Mays
MARGVERARVRLGVKLVRGAYLAREARVAAALGVPSPVHGSIRETHDCYNGCAAFLLDRVRRGSASVVLATHNVESGQLAAARAEELGIPRGDRNLQFAQLMGMADGLSLGLRNAGFQVSKYLPYGPVEQIVPYLIRRAEENRGLLSASSFDRQLLREELVRRFKAAVLGRE

SEQ ID NO: 197490 - protein, 893 aa, Zea Mays
MGRRGHGGSASQDDDGVGCAWGLMRMLYFRRDPKLLLDAKQLSGRHAFREVSERGHSAKRSKDFDEIEEDGNIEECTSQKPTVKNLMEDELGKVKLLKKNPNDEIQRRLVDLGNDVSLGRSSEHTNKSIDRSYHQAGISTPSIPPMDSGVLNYAEEYDLESVLMNFLGEIYSCHDECPHSDCKNKNELCPSLKSLIHKKVNELNNLPRNIGCAQSQEGNDAKLSDQNNLSNTMAARSKQFKDALEILGSNNELFMKLLQKPNQHIVDSIQKHENSKVAAGLEPNKIHGQTNFLVGRGGSRQHPLATKEQAKERKYMFFWRKGKSNRRQMLEATDTDQTVTKIVILKPNPERGFNQKAATARTLHQQPCTSHAPECGGIDNSKFSIKEVKTRFRFVNSESRRESNLAPAEDLQGYPRKFKDSFVAINKDFRHFPEGSLANKSGSDIKNAIKPFISSKQNGSISGNSGHIVAPKGASIFYEEARRHLSEMLKDNDCSVNYPAVQISKSLEGILSLPHGNVSTPRSSLWGKDYLGPSPGETDVFVACEVQREECTQERSQSQEDFGSIARCTSAAVDDQVTVRDGYYTNEAQEGSRHAQNEPGLLYTEGIHKFICGKNICDEQSVPAEQSRHDEILEEIKQGKEHIKMSPTSAEGIVETLGQQEPETPEPRASTELISDGSPEQSDEKQERPSPVSVLESFFEDIDNPDCINKKECELHGLQRTLYFPDNEPDVSLLGEDRSVRVDYIKLVLELSELCAEQNLEVWYLEDELISPCLFEELQSQGDQTDDLKLLFDCICEALTEIQERYFRLSWLTFLKQDIRTPPIGENLITEVDRYVYGYIQHSLPITLEQIIKRDLEVQTWMNIRSKTEGIIMEMWEFVLDELIDETVFDLWI

SEQ ID NO: 197491 - protein, 551 aa, Zea Mays
MEDELGKVKLLKKNPNDEIQRRLVDLGNDVSLGRSSEHTNKSIDRSYHQAGISTPSIPPMDSGVLNYAEEYDLESVLMNFLGEIYSCHDECPHSDCKNKNELCPSLKSLIHKKVNELNNLPRNIGCAQSQEGNDAKLSDQNNLSNTMAARSKQFKDALEILGSNNELFMKLLQKPNQHIVDSIQKHENSKVAAGLEPNKIHGQTNFLVGRGGSRQHPLATKEQAKERKYMFFWRKGKSNRRQMLEATDTDQTVTKIVILKPNPERGFNQKAATARTLHQQPCTSHAPECGGIDNSKFSIKEVKTRFRFVNSESRRESNLAPAEDLQGYPRKFKDSFVAINKDFRHFPEGSLANKSGSDIKNAIKPFISSKQNGSISGNSGHIVAPKGASIFYEEARRHLSEMLKDNDCSVNYPAVQISKSLEGILSLPHGNVSTPRSSLWGKDYLGPSPGETDVFVACEVQREECTQERSQSQEDFGSIARCTSAAVDDQVTVRDGYYTNEAQEGSRHAQNEPGLLYTEGIHKFICGKNICDEQSVPAEQSRHDVCQVSLE

SEQ ID NO: 197492 - protein, 810 aa, Zea Mays
MEDELGKVKLLKKNPNDEIQRRLVDLGNDVSLGRSSEHTNKSIDRSYHQAGISTPSIPPMDSGVLNYAEEYDLESVLMNFLGEIYSCHDECPHSDCKNKNELCPSLKSLIHKKVNELNNLPRNIGCAQSQEGNDAKLSDQNNLSNTMAARSKQFKDALEILGSNNELFMKLLQKPNQHIVDSIQKHENSKVAAGLEPNKIHGQTNFLVGRGGSRQHPLATKEQAKERKYMFFWRKGKSNRRQMLEATDTDQTVTKIVILKPNPERGFNQKAATARTLHQQPCTSHAPECGGIDNSKFSIKEVKTRFRFVNSESRRESNLAPAEDLQGYPRKFKDSFVAINKDFRHFPEGSLANKSGSDIKNAIKPFISSKQNGSISGNSGHIVAPKGASIFYEEARRHLSEMLKDNDCSVNYPAVQISKSLEGILSLPHGNVSTPRSSLWGKDYLGPSPGETDVFVACEVQREECTQERSQSQEDFGSIARCTSAAVDDQVTVRDGYYTNEAQEGSRHAQNEPGLLYTEGIHKFICGKNICDEQSVPAEQSRHDVCQEILEEIKQGKEHIKMSPTSAEGIVETLGQQEPETPEPRASTELISDGSPEQSDEKQERPSPVSVLESFFEDIDNPDCINKKECELHGLQRTLYFPDNEPDVSLLGEDRSVRVDYIKLVLELSELCAEQNLEVWYLEDELISPCLFEELQSQGDQTDDLKLLFDCICEALTEIQERYFRLSWLTFLKQDIRTPPIGENLITEVDRYVYGYIQHSLPITLEQIIKRDLEVQTWMNIRSKTEGIIMEMWEFVLDELIDETVFDLWI

SEQ ID NO: 197493 - protein, 229 aa, Zea Mays
MDMDQTSDFWLTCDSLNAGNCRSLFEDAFRAMYGLPENVLALPPMPNDGDHWSTLHSWVMPTPSFLKFIMFSRIFVDSLHSLNVNSTETTSCFLGASEPERRHCYCRILEVLVNVWAYHSGRKMVYLNPFTGDTSEQHLLDKRNGMWVKFFNFTLLKSMDEDLAEEADDGMHPGNEQWLWPLTGQVFWPGIADREREEKYIKKLDKKLKNKVKLLERQKSGYKQKPLGQ

SEQ ID NO: 197494 - protein, 564 aa, Zea Mays
MSVLQELTSHMGLPDVSIKRFSVTHDIRNLLMFVDVVLYGSLRQEPVFPPLLLLSMSSEIPVVAPNLTVITKYVSDGVHGFLFDSADPSTISSAFIQILGEKKLLDTAYSVALEGKLLSKNMLAHDCIKAHVKLLESVIHFPSYAKLPSSVSKVQERTWLWDPFELKAALENSLLEDESHASTKAVDILREFSQSNQTTYADTNDTSSYDYPRLSDWYDLGEIEIFEDIERREMEEIDERVERPLLSWDEVYKNARKSERLKSEGNERDEGELERTGQPVCIYEIYSGEGAWPFLHHGSLYRGVTLVSLSERAEETLEEITSGESNEDVIYYWSPMDMDQTSDFWLTCDSLNAGNCRSLFEDAFRAMYGLPENVLALPPMPNDGDHWSTLHSWVMPTPSFLKFIMFSRIFVDSLHSLNVNSTETTSCFLGASEPERRHCYCRILEVLVNVWAYHSGRKMVYLNPFTGDTSEQHLLDKRNGMWVKFFNFTLLKSMDEDLAEEADDGMHPGNEQWLWPLTGQVFWPGIADREREEKYIKKLDKKLKNKVKLLERQKSGYKQKPLGQ

SEQ ID NO: 197495 - protein, 648 aa, Zea Mays
MALMPTTLLSRKLDMTHTPAFSQDYMELTSHMGLPDVSIKRFSVTHDIRNLLMFVDVVLYGSLRQEPVFPPLLLLSMSSEIPVVAPNLTVITKYVSDGVHGFLFDSADPSTISSAFIQILGEKKLLDTAYSVALEGKLLSKNMLAHDCIKAHVKLLESVIHFPSYAKLPSSVSKVQERTWLWDPFELKAALENSLLEDESHASTKAVDILREFSQSNQTTYADTNDTSSYDYPRLSDWYDLGEIEIFEDIERREMEEIDERVERPLLSWDEVYKNARKSERLKSEGNERDEGELERTGQPVCIYEIYSGEGAWPFLHHGSLYRGVTLSKGGRRPRSDDVDAVTRLSVLDNPYYRDLLCEFGAIFAIANRVDTVHKLPWIGFQSWRAAGRKVSLSERAEETLEEITSGESNEDVIYYWSPMDMDQTSDFWLTCDSLNAGNCRSLFEDAFRAMYGLPENVLALPPMPNDGDHWSTLHSWVMPTPSFLKFIMFSRIFVDSLHSLNVNSTETTSCFLGASEPERRHCYCRILEVLVNVWAYHSGRKMVYLNPFTGDTSEQHLLDKRNGMWVKFFNFTLLKSMDEDLAEEADDGMHPGNEQWLWPLTGQVFWPGIADREREEKYIKKLDKKLKNKVKLLERQKSGYKQKPLGQ

SEQ ID NO: 197496 - protein, 324 aa, Zea Mays
MSVLQELTSHMGLPDVSIKRFSVTHDIRNLLMFVDVVLYGSLRQEPVFPPLLLLSMSSEIPVVAPNLTVITKYVSDGVHGFLFDSADPSTISSAFIQILGEKKLLDTAYSVALEGKLLSKNMLAHDCIKAHVKLLESVIHFPSYAKLPSSVSKVQERTWLWDPFELKAALENSLLEDESHASTKAVDILREFSQSNQTTYADTNDTSSYDYPRLSDWYDLGEIEIFEDIERREMEEIDERVERPLLSWDEVYKNARKSERLKSEGNERDEGELERTGQPVCIYEIYSGEGAWPFLHHGSLYRGVTLEEGDQDQMMLMLLPGFQF

SEQ ID NO: 197497 - protein, 269 aa, Zea Mays
MRASATQILDIAKTKNLRVQFVFFCGNGSDAYNSAFQELTSHMGLPDVSIKRFSVTHDIRNLLMFVDVVLYGSLRQEPVFPPLLLLSMSSEIPVVAPNLTVITKYVSDGVHGFLFDSADPSTISSAFIQILGEKKLLDTAYSVALEGKLLSKNMLAHDCIKAHVKLLESVIHFPSYAKLPSSVSKVQERTWLWDPFELKAALENSLLEDESHASTKAVDILREFSQSNQTTYADTNDTSSYDYPRLSDWYDLGEIEIFEDIERREMEED

SEQ ID NO: 197498 - protein, 664 aa, Zea Mays
MNIYPLVNYLGTLLCGNLICFFVKQCRKLDMTHTPAFSQDYMELTSHMGLPDVSIKRFSVTHDIRNLLMFVDVVLYGSLRQEPVFPPLLLLSMSSEIPVVAPNLTVITKYVSDGVHGFLFDSADPSTISSAFIQILGEKKLLDTAYSVALEGKLLSKNMLAHDCIKAHVKLLESVIHFPSYAKLPSSVSKVQERTWLWDPFELKAALENSLLEDESHASTKAVDILREFSQSNQTTYADTNDTSSYDYPRLSDWYDLGEIEIFEDIERREMEEIDERVERPLLSWDEVYKNARKSERLKSEGNERDEGELERTGQPVCIYEIYSGEGAWPFLHHGSLYRGVTLSKGGRRPRSDDVDAVTRLSVLDNPYYRDLLCEFGAIFAIANRVDTVHKLPWIGFQSWRAAGRKVSLSERAEETLEEITSGESNEDVIYYWSPMDMDQTSDFWLTCDSLNAGNCRSLFEDAFRAMYGLPENVLALPPMPNDGDHWSTLHSWVMPTPSFLKFIMFSRIFVDSLHSLNVNSTETTSCFLGASEPERRHCYCRILEVLVNVWAYHSGRKMVYLNPFTGDTSEQHLLDKRNGMWVKFFNFTLLKSMDEDLAEEADDGMHPGNEQWLWPLTGQVFWPGIADREREEKYIKKLDKKLKNKVKLLERQKSGYKQKPLGQ

SEQ ID NO: 197499 - protein, 785 aa, Zea Mays
MQEPFRLLPVIWLIHEDTLGQYLRSYAKLHDSIQNVIEDWRTHFNACAYVVFPDSYHPLLYSPLDSGNFLVISGSPVDIWSAKRFGSSHSDETTRKQHGIEKDDVVILVVGSYLFFDDLPWDYVTVMRASATQILDIAKTKNLRVQFVFFCGNGSDAYNSAFQELTSHMGLPDVSIKRFSVTHDIRNLLMFVDVVLYGSLRQEPVFPPLLLLSMSSEIPVVAPNLTVITKYVSDGVHGFLFDSADPSTISSAFIQILGEKKLLDTAYSVALEGKLLSKNMLAHDCIKAHVKLLESVIHFPSYAKLPSSVSKVQERTWLWDPFELKAALENSLLEDESHASTKAVDILREFSQSNQTTYADTNDTSSYDYPRLSDWYDLGEIEIFEDIERREMEEIDERVERPLLSWDEVYKNARKSERLKSEGNERDEGELERTGQPVCIYEIYSGEGAWPFLHHGSLYRGVTLSKGGRRPRSDDVDAVTRLSVLDNPYYRDLLCEFGAIFAIANRVDTVHKLPWIGFQSWRAAGRKVSLSERAEETLEEITSGESNEDVIYYWSPMDMDQTSDFWLTCDSLNAGNCRSLFEDAFRAMYGLPENVLALPPMPNDGDHWSTLHSWVMPTPSFLKFIMFSRIFVDSLHSLNVNSTETTSCFLGASEPERRHCYCRILEVLVNVWAYHSGRKMVYLNPFTGDTSEQHLLDKRNGMWVKFFNFTLLKSMDEDLAEEADDGMHPGNEQWLWPLTGQVFWPGIADREREEKYIKKLDKKLKNKVKLLERQKSGYKQKPLGQ

SEQ ID NO: 197500 - protein, 752 aa, Zea Mays
MWRRGAHADAAHHLPTAGPGASSSSTAAASAGAAAARRRRRPGLPCRPSHLFFALLVALFTASLLVVWQLLPIGDGDAAEGDGEAPPRLQGGEAGPMRFSSSSLALRAFDGESRLEAARSGRRLWASLAPVRVALAVGNMNIDAQSLMLATVAKSLVSLGYEVEVLAFTDGKARDIWENICLVNVVNTGALKSVDWSQYNAVLVSSLEGKGVVSILMQEPFRLLPVIWLIHEDTLGQYLRSYAKLHDSIQNVIEDWRTHFNACAYVVFPDSYHPLLYSPLDSGNFLVISGSPVDIWSAKRFGSSHSDETTRKQHGIEKDDVVILVVGSYLFFDDLPWDYVTVMRASATQILDIAKTKNLRVQFVFFCGNGSDAYNSAFQELTSHMGLPDVSIKRFSVTHDIRNLLMFVDVVLYGSLRQEPVFPPLLLLSMSSEIPVVAPNLTVITKYVSDGVHGFLFDSADPSTISSAFIQILGEKKLLDTAYSVALEGKLLSKNMLAHDCIKAHVKLLESVIHFPSYAKLPSSVSKVQERTWLWDPFELKAALENSLLEDESHASTKAVDILREFSQSNQTTYADTNDTSSYDYPRLSDWYDLGEIEIFEDIERREMEEIDERVERPLLSWDEVYKNARKSERLKSEGNERDEGELERTGQPVCIYEIYSGEGAWPFLHHGSLYRGVTLSKGGRRPRSDDVDAVTRLSVLDNPYYRDLLCEFGAIFAIANRVDTVHKLPWIGFQSWRAAGRKMCCLPIWST

SEQ ID NO: 197501 - protein, 350 aa, Zea Mays
MVVVKKALCQVSSRLHNNPSKSQHLLASSLTQPYPGGTHLGGSSAAPVVGITPVIPPYGGYKGDVAGDWPSLYQPRRDESSAKEFSLRLLCAAANVGGVIGKGGGIIKQIRQESGALIKVASSNSDPDDDCIITVSAKEFFEDPVSPTIDAAVRLQLRCSEKSDSELAEQSYTTRLLVSTSRIGCLIGKGGSIITEIRRTSRANIRILSKENVPKVAAEDEEMVQISGGLDVARHALVQIATRLKANFFEREGSLSAFPSVIPYHPLPAGVSVSDEPKYLSRDTKPVGHYLYSSAFRTSDDMIPSDSYASYGGSQAPGGGYAAYSGYSARSSSSGLSGHSSLHYGKHHGY

SEQ ID NO: 197502 - protein, 217 aa, Zea Mays
MQLIISFFYGLQNLIKFFLKLVDVSTAAVAKESLEGHCIYDGGYCKLHLSYSRHTDLNVKAHGDKSRDYTIPAGVIQGVPPGVQATSSGWQGNVQAAGAYAAPPGAPSQSHGANGHVQNWNPGNSVYPPAPGPGIYPGQMYSSPSQYAASGGFPNTPSTAPPHYAASGGFPNTPLPALPGAPTQQLHASQQMLPQHGNQSGGASGTSQPAPPASYYR

SEQ ID NO: 197503 - protein, 145 aa, Zea Mays
MTIGGRTALDYPSIFDSGNTDFGDSKIPNTTEIKTKPDGWETTSRGQDGNIWDISQREDDILIQEFERRIAFSKQQIASFIKTHIFSRRRPIDGWKYMIEEIGPNARKGKGSVQRLPSVSDPATQPYREETPAIASSSSFRGNRP

SEQ ID NO: 197504 - protein, 139 aa, Zea Mays
MGAVLTLPPSSSYHSVALGVHRVALRGGSLPRQLRRQPALDVGHLCTLHHRARQRRHGSLTSVNSRIQIVQRCRASRPQNILIDHCPGLIKWCDEQELFCQVWSLHSRWNWLFSFFTTSTNIATTFCRVGTWIHHGRGG

SEQ ID NO: 197505 - protein, 131 aa, Zea Mays
MMPVGILFSIYSMKYPHCGTDNLSGEISSVSFQNVIFHQKRVYGKIIIIMKNVVLDVINNEYCKREINLSGMVITLQMELVIFFLHNINEHSNYILSCRHLDPSRARRLNRRVEEASRVLSDSFVIFCVFS

SEQ ID NO: 197506 - protein, 89 aa, Zea Mays
MGAVLTLPPSSSYHSVALGVHRVALRGGSLPRQLRRQPALDVGHLCTLHHRARQRRHGSLTSVNSRIQIVQRCRASRLLISVTASKYIN

SEQ ID NO: 197507 - protein, 79 aa, Zea Mays
MGAVLTLPPSSSYHSVALGVHRVALRGGSLPRQLRRQPALDVGHLCTLHHRARQRRHGSLTSVNSRIQIVQRCRASRQL

SEQ ID NO: 197508 - protein, 81 aa, Zea Mays
MPSPTSGCAHRRDHRGHHSVALGVHRVALRGGSLPRQLRRQPALDVGHLCTLHHRARQRRHGSLTSVNSRIQIVQRCRASR

SEQ ID NO: 197509 - protein, 86 aa, Zea Mays
MGAVLTLPPSSSYHSVALGVHRVALRGGSLPRQLRRQPALDVGHLCTLHHRARQRRHGSLTSVNSRIQIVQRCRASRSNWSLAFGI

SEQ ID NO: 197510 - protein, 90 aa, Zea Mays
MPSPTSGCAHRRDHRGHHSVALGVHRVALRGGSLPRQLRRQPALDVGHLCTLHHRARQRRHGSLTSVNSRIQIVQRCRASRSNWSLAFGI

SEQ ID NO: 197511 - protein, 100 aa, Zea Mays
MGAVLTLPPSSSYHSVALGVHRVALRGGSLPRQLRRQPALDVGHLCTLHHRARQRRHGSLTSVNSRIQIVQRCRASRFRHLTNLLNCRLLISVTASKYIN

SEQ ID NO: 197512 - protein, 686 aa, Zea Mays
MSSYPVLNNRPIDQWRVTDLKDELRKRKLPVKGLKEELVRRLFDSIQSEIEADEADEADEDVGVNVDDQLPDANASEENTVTVTEVHQETVVHVTQQVEVPTTKAGQESTISPTRRAPSVDVEEASADEEVPESVAEGNMSFEEVQVHTEITNEPVHEKTTDVDTNDTVVVNDAIDVNSDLAPAEVKFGATEASKIEEHDFPPAPVDALNSDAAGPMDTDVVTAATSDVGSMDTDVVTRAPVSDDEEKLELKVDLGNKVSMYDEDNNSSDTMNEDCKPIVSKPNNQPKMVQPSSGITSLGGDLQPLDDDKELVKNQTSLEDIDSTANVDSYKKDSPEGGSPEKLNLDRSSGDESMEEDVVEIKQDEANMKSDDLGQKNELNSEDVKEVILPDSVVEASKEVTAEEKSAASTEKRKLEDEDIANTEPIKRQRRWTADVAKVPERQALSQTGPETPKDIFQPAFKRSFGRSDSTASVDSPKERIVPPAEKPATTSLRIDRFVRPFTLKAVQELLGKTGSVQDFWMDHIKTHCYVTFSSVDEAMATRDAVYNLQWPPNNGNKLVAEFVDPQEVKLKVDPPPPPAAPVSPAAITRAPPLQQTQSVPRQAATPKEQLPPPPPPPLAKPPMADPAAIARERLPPTPKKPEPPVVTLDDLFRKTQSSPRIYYLPLSEEEVAAKLAAQGKGKKE

SEQ ID NO: 197513 - protein, 532 aa, Zea Mays
MSSYPVLNNRPIDQWRVTDLKDELRKRKLPVKGLKEELVRRLFDSIQSEIEADEADEADEDVGVNVDDQLPDANASEENTVTVTEVHQETVVHVTQQVEVPTTKAGQESTISPTRRAPSVDVEEASADEEVPESVAEGNMSFEEVQVHTEITNEPVHEKTTDVDTNDTVVVNDAIDVNSDLAPAEVKFGATEASKIEEHDFPPAPVDALNSDAAGPMDTDVVTAATSDVGSMDTDVVTRAPVSDDEEKLELKVDLGNKVSMYDEDNNSSDTMNEDCKPIVSKPNNQVPEVSPDLGSQIKCESISTDNLSSNKKNTIKDNLNANNFDLELEVQPKMVQPSSGITSLGGDLQPLDDDKELVKNQTSLEDIDSTANVDSYKKDSPEGGSPEKLNLDRSSGDESMEEDVVEIKQDEANMKSDDLGQKNELNSEDVKEVILPDSVVEASKEVTAEEKSAASTEKRKLEDEDIANTEPIKRQRRWTADVAKVPERQALSQTGPETPKDIFQPAFKRSFGRSDSTASVDSPKERIGASW

SEQ ID NO: 197514 - protein, 728 aa, Zea Mays
MSSYPVLNNRPIDQWRVTDLKDELRKRKLPVKGLKEELVRRLFDSIQSEIEADEADEADEDVGVNVDDQLPDANASEENTVTVTEVHQETVVHVTQQVEVPTTKAGQESTISPTRRAPSVDVEEASADEEVPESVAEGNMSFEEVQVHTEITNEPVHEKTTDVDTNDTVVVNDAIDVNSDLAPAEVKFGATEASKIEEHDFPPAPVDALNSDAAGPMDTDVVTAATSDVGSMDTDVVTRAPVSDDEEKLELKVDLGNKVSMYDEDNNSSDTMNEDCKPIVSKPNNQVPEVSPDLGSQIKCESISTDNLSSNKKNTIKDNLNANNFDLELEVQPKMVQPSSGITSLGGDLQPLDDDKELVKNQTSLEDIDSTANVDSYKKDSPEGGSPEKLNLDRSSGDESMEEDVVEIKQDEANMKSDDLGQKNELNSEDVKEVILPDSVVEASKEVTAEEKSAASTEKRKLEDEDIANTEPIKRQRRWTADVAKVPERQALSQTGPETPKDIFQPAFKRSFGRSDSTASVDSPKERIEKPATTSLRIDRFVRPFTLKAVQELLGKTGSVQDFWMDHIKTHCYVTFSSVDEAMATRDAVYNLQWPPNNGNKLVAEFVDPQEVKLKVDPPPPPAAPVSPAAITRAPPLQQTQSVPRQAATPKEQLPPPPPPPLAKPPMADPAAIARERLPPTPKKPEPPVVTLDDLFRKTQSSPRIYYLPLSEEEVAAKLAAQGKGKKE

SEQ ID NO: 197515 - protein, 668 aa, Zea Mays
MSSYPVLNNRPIDQWRVTDLKDELRKRKLPVKGLKEELVRRLFDSIQSEIEADEADEADEDVGVNVDDQLPDANASEENTVTVTEVHQETVVHVTQQVEVPTTKAGQESTISPTRRAPSVDVEEASADEEVPESVAEGNMSFEEVQVHTEITNEPVHEKTTDVDTNDTVVVNDAIDVNSDLAPAEVKFGATEASKIEEHDFPPAPVDALNSDAAGPMDTDVVTAATSDVGSMDTDVVTRAPVSDDEEKLELKVDLGNKVSMYDEDNNSSDTMNEDCKPIVSKPNNQPLDDDKELVKNQTSLEDIDSTANVDSYKKDSPEGGSPEKLNLDRSSGDESMEEDVVEIKQDEANMKSDDLGQKNELNSEDVKEVILPDSVVEASKEVTAEEKSAASTEKRKLEDEDIANTEPIKRQRRWTADVAKVPERQALSQTGPETPKDIFQPAFKRSFGRSDSTASVDSPKERIVPPAEKPATTSLRIDRFVRPFTLKAVQELLGKTGSVQDFWMDHIKTHCYVTFSSVDEAMATRDAVYNLQWPPNNGNKLVAEFVDPQEVKLKVDPPPPPAAPVSPAAITRAPPLQQTQSVPRQAATPKEQLPPPPPPPLAKPPMADPAAIARERLPPTPKKPEPPVVTLDDLFRKTQSSPRIYYLPLSEEEVAAKLAAQGKGKKE

SEQ ID NO: 197516 - protein, 689 aa, Zea Mays
MSSYPVLNNRPIDQWRVTDLKDELRKRKLPVKGLKEELVRRLFDSIQSEIEADEADEADEDVGVNVDDQLPDANASEENTVTVTEVHQETVVHVTQQVEVPTTKAGQESTISPTRRAPSVDVEEASADEEVPESVAEGNMSFEEVQVHTEITNEPVHEKTTDVDTNDTVVVNDAIDVNSDLAPAEVKFGATEASKIEEHDFPPAPVDALNSDAAGPMDTDVVTAATSDVGSMDTDVVTRAPVSDDEEKLELKVDLGNKVSMYDEDNNSSDTMNEDCKPIVSKPNNQVPEPKMVQPSSGITSLGGDLQPLDDDKELVKNQTSLEDIDSTANVDSYKKDSPEGGSPEKLNLDRSSGDESMEEDVVEIKQDEANMKSDDLGQKNELNSEDVKEVILPDSVVEASKEVTAEEKSAASTEKRKLEDEDIANTEPIKRQRRWTADVAKVPERQALSQTGPETPKDIFQPAFKRSFGRSDSTASVDSPKERIVPPAEKPATTSLRIDRFVRPFTLKAVQELLGKTGSVQDFWMDHIKTHCYVTFSSVDEAMATRDAVYNLQWPPNNGNKLVAEFVDPQEVKLKVDPPPPPAAPVSPAAITRAPPLQQTQSVPRQAATPKEQLPPPPPPPLAKPPMADPAAIARERLPPTPKKPEPPVVTLDDLFRKTQSSPRIYYLPLSEEEVAAKLAAQGKGKKE

SEQ ID NO: 197517 - protein, 61 aa, Zea Mays
MGRDEGGTTMGEEQKMTGKLEHLVRRNREKGQRARLRNRGRRHAAVGGGRDVRSSPWVGSG

SEQ ID NO: 197518 - protein, 67 aa, Zea Mays
MEWKQTTDLHAMFLKFPKGRFTFVQQHLATKCGCGRSSAYMPPPLKNCLRIDSTKTPAYKNILTSSG

SEQ ID NO: 197519 - protein, 400 aa, Zea Mays
MLMGNTWPVGMAGGNTAATLWCSHCGMGIAAPAPGSGSIVRCAFCRGVTRVEHQRGGVGERAMTTRTLAAAASLPRQLPVSAGPVEIPASYPRVSGGNKKRALLVGVSYTGTAHELKGTVNDVKEMRRLLCDRFGFPGACILELTEKESDPTRVPTRENLLRAMRWLVEGSSSGDSLVFHFSGHGVQKLDMNDDEVDGYNEALCPMDFERSGKILDDEINDTIVRPLGKGVKLHAIVDTCHSGTILDLPYLCRMSSKRIDTRVHTRIARPFVSRTGYWQWENHARPSGMLTKRPNGGLAISISGCSDDQKSADASGFSDESSSIGAMTDSFIKAVEAEPGTTYGRLLSAMRTRIRDGQGSRRLPGRLGSFVRWMIPSSSVQEPQLCSSEMFDIYRKPFLL

SEQ ID NO: 197520 - protein, 53 aa, Zea Mays
MLCVELGENLITWVCLELNARALVSSWKLENLDDLNVGWLGVFITPTTKLAVW

SEQ ID NO: 197521 - protein, 252 aa, Zea Mays
MAAEAKTPSLAEEYSLPPQEVPVEKAAEEKPSSGTETESAPSTNDETPSSVEDKNETSEVQDAAEKSDAEETNTAAEEASETAEEEEAEKPEIKIETAPADFRFPTTNQTRHCFTRYVEYHRCVAAKGEDAPECDKFAKYYRSLCPGEWECSERIVANKDMMLDVFDYVVVDFVPNSYQEPTLRLPSISPGSNESVDHHLSRLLDQRVVVQEILTGPISINHCTEKLKKCGFSKQQLWDANDILKADLELRQ

SEQ ID NO: 197522 - protein, 186 aa, Zea Mays
MPLYTAHGDRNKGSQEVISSPPLSLPSLWLWGITTPEKTTNRGYDLRSRGPPALDVHRCRGPPALDAQALDNLVSRVRRSSSSQSHTSDQFLDVIQPPPSPPPSPPSTSSIMSTKTIDDLAAVIEKLTGTISVLQNDVESLKKDKAPFSSPSGSGGHDGQHHIDRPPRFQKIDFPRFDDKSDPMLF

SEQ ID NO: 197523 - protein, 160 aa, Zea Mays
MEGFTGAHASSRVILACAAPSPTVVLPMKLPNFSFSRLDLPEWSVHRFASIQWGLAHIAGTGCRRGYTSSMSQGPMDPVLFWVSLHIVPGLTDDKYDVFYESLMGKEKLHINIVVNGHVDSGKSTTTGHLIYKLGGIDKRVIERFRIFSLSLRRRSKKKQ

SEQ ID NO: 197524 - protein, 163 aa, Zea Mays
MEGFTGAHASSRVILACAAPSPTVVLPMKLPNFSFSRLDLPEWSVHRFASIQWGLAHIAGTGCRRGYTSSMSQGPMDPVLFWVSLHIVPGLTDDKYDVFYESLMGKEKLHINIVVNGHVDSGKSTTTGHLIYKLGGIDKRVIERFEKFRIFSLSLRRRSKKKQ

SEQ ID NO: 197525 - protein, 52 aa, Zea Mays
MWLVTKSQPQQAYIERSLIDTSGALHRLISRCKPPARSHINYLTQVHSHVTQ

SEQ ID NO: 197526 - protein, 274 aa, Zea Mays
MGGAKAEDKPAAATAEDDWCYQFGNKNAFDSKAPKKSPLALRVVVFAMTVLCGISIWSMCMKQLGSDGWSRIVKIEVVEQPCNKSTVPPSEVQFAHYPQPTTYSREECKCNAVRFFAIISSQRSGSGWFETLLNSHMNVSSNGEIFSRKERRSNISSIVNAMDRVYSLDWNSSASKNECTAAIGFKWMLNQVMTKTCSIDNLIGYHFVHLFFHSVPVHSQLGARCARSSFKPSFFSLDLSPLAALLRIYMASIFLFGTSSNSSFLMNVHGGQID

SEQ ID NO: 197527 - protein, 113 aa, Zea Mays
MGGAKAEDKPAAATAEDDWCYQFGNKNAFDSKAPKKSPLALRVVVFAMTVLCGISIWSMCMKQLGSDGWSRIVKIEVVEQPCNKSTVPPSEVQFAHYPQPTTYSRLTNKTMKY

SEQ ID NO: 197528 - protein, 211 aa, Zea Mays
MPLIDAAASAVAPPPPRRVAQLRFFSTRRPGILSLTATSCSPSPPPPVAAEVPAPPQEAKSKPRPRRYPKQYPGESVGVAEEMRFVAMRLRNPKRTTIKDKSGTEDADAGAGVSEGEAEEDDGGGVKEEHEEEDEGELEEGEWMPSMEGFVRYLVDSRLVFGTIERVVAESTDVALVWSVQLAFQKIWSGSENKGLQSQSRVLRDQLMQLI

SEQ ID NO: 197529 - protein, 249 aa, Zea Mays
MSSPSSLYSLASSRRTSLSSLWCSAPSLLRAVTRIAGRLSGLVNCLVVDGRLDGGRQIRIRCATRKACGGLAGHPASLCALRLPSSSTRRQFAWCQLAAVVVCCSWSSSPQHPRGRSLADRALRSSLNAAPSGKALQVRASSLSIAGCHPRLATSLLRRRFSRPVLARSRPNRAVVSQPLVLTPARACRASQPCLGHRHRYCACRWPKLMSPSPSLDSCPRQLASDLISSSFHASSRNPKNRVKAKLVG

SEQ ID NO: 197530 - protein, 785 aa, Zea Mays
MELLDSNGHGETRAQGAENIAPVSANSPDTSSEMQGKLPHSLTEHQEEMGSPAGHAGSLSPKIVSHIEPARASDDPSKDEGRHAALLTDKSGVEIIYENGFTGASSIIPAAEMKSEEDNMYCRNNVAVTPTKKVESVKGCEGSHTGLVDTSAPFESVKQAVTKFGGIVDWKAYRARSLERRRVMQLELEKVQQEIPQFKEDWETAEVAKAHVIEELERTTRLVDELKHELERAQLEVDQAKQDSELALLRAQEMEQGIDDEASVIAQTQLAVAKERHEKAVEELELLKEELRSTHEQYAVLATERDVAVKRAKEVVRAAKDTEKQVEELTLELIASKESLESAHASHHEVEEHRLGAALAKEQDFLAWDKELQEAQEELNQLHEQIASKTNVEAEAVENERKLLSLKSELAAYVEDKLNEEAGMLQQQGSDEEKEISRSIKQALASKRKELAELKGKLENARNEANLVRVTAESLSSELDREKASLAALQQSEGMASITVSSLEAELDRTEQEIEMVHKKEAEAREKMAELPRMLQRAAQEAEDAKMAAHSAQEELRKAKEEVERAKASATTAGTRLRAVSKEIEASKASERLAIAAAQAMQESEDTGSTGASPRVVTLPVSEYHALSEKVHEAEELANERVAVALAQVELAKVSESRSLERLQEASKETEKKKSDLRIALERAERANEGKLGAERELRRWRAEHVQRRKAHEAAQHAVSPVRTPPRMFVQQKGSYLEGNELRDPKVHKSTGSMDQFVSDKKSRKKKSFLTQLSTLLSRKTHAQT

SEQ ID NO: 197531 - protein, 148 aa, Zea Mays
MDPLNPNSNRKRNHNNACYAPSTLSHTEARRIRKRVLDQRKLASTGSTAPSQHTPTLRCGHFDPDFVKTIKATYHDRSYYGRPSYQCVHCSALFWHNERIRSSVGTRSVIYNSCCKASHGRQASIPCATQNLSQQQMFTQESTVDVIT

SEQ ID NO: 197532 - protein, 522 aa, Zea Mays
MDPLNPNSNRKRNHNNACYAPSTLSHTEARRIRKRVLDQRKLASTGSTAPSQHTPTLRCGHFDPDFVKTIKATYHDRSYYGRPSYQCVHCSALFWHNERIRSSVGTRSVIYNSCCKGGKVRIPAYRPRPEPLLSLARFDGDVVSKNFMQNIRQYNCLFAFTSMGAHIDRSLNDGRGPPVFKICGQIHHRIGSLLPMTDQPPKFLQLYVYDTSHEMLDTHNPFAKKFRIAKERLIEHADEEFIIRIIGAKEGDPVQYDMPTTDDLAMLVIGDFSLETFKRDIIIETRNYELKRISSLHPAYMALQYPLLFPYGERGFQIGVMYSGLQNRQANSRVRMTMQDYYCYQFHYKPGQPNPFLSYGILSNQAKVDARACIDENRLTYILNNQDKLRMENLQGISDAVSRGCINGEEMGKTIVLPASHIGGRRYMIQNYHDSIAICRVHGPPDFFVTFTCNAKWPEIIESLYHCGQKNSDAPDIAVRIFHMKLQELLQDIKSGKIVGPCKAGANILFPILYIHILLFNY

SEQ ID NO: 197533 - protein, 109 aa, Zea Mays
MGRRILNDALRTMVNADRRGNASALLRPISGVMVSFLNIMKYRGYIKKFEVIDENRVGKIRVELDGRLKDCKALTYRQDLKAKEIERYRVRMLPTRQCAIQYARFAYNP

SEQ ID NO: 197534 - protein, 261 aa, Zea Mays
MGRSFSSTAAPVRPAALAAPPLLLFLLLGLLGAAAANVGDSCSTSADCGAGQWCFDCEPQLSGSHCVRSAATNPFQLINNSLPFNKYAYLTTHNAYAIVGEPSHTGIPRVTFDNQEDTVTDQLNNGVRALMLDTYDFKGDVWLCHSSGGKCNDFTAFVRTCTGHFQGDRGVPCSKPVRNRHADPRGLRPRAERADERVQRVWPAQVLVPGVEDAAERPGLASRQRHGRDQPAPPGVHLRQLQTERGRHRLPVELHGREQLR

SEQ ID NO: 197535 - protein, 159 aa, Zea Mays
MLDTYDFKGDVWLCHSSGGKCNDFTAFEPALDTFKEIEAFLAANPSEIVTLILEDYVHAPNGLTNVFNASGLLKYWFPVSRMPPSGQDWPLVSDMVATNQRLLVFTSVSSKQSAEGIAYQWNFMVENNCETVMTGWMPGNARTVPSLLLSTTTPSRWSS

SEQ ID NO: 197536 - protein, 74 aa, Zea Mays
MCDCRGNKGILSWFVSSSVLPDLTPAPFQHRTMISRLSPQLSYSIFCPIIYFKLHFVNSIDYSANLQFYTIRCG

SEQ ID NO: 197537 - protein, 247 aa, Zea Mays
MSLWPRFKMVFDLHLNSLRNANIKTLWEDDVHPHYVTRRYAEFTASLVHLNVEHGDGQLDLNLERLRMAIEDLLVKLAKMFSKPKLQTVFLINNYDLTISILKEAGTEGGKAQQHFEEVLKSNIAIYVEELLLEQFSSLIRFVKSRPADETAANSEKASIAEVEPLVKDFASRYKAAIELMHYDVITSFSNFLCGMEILRATLAQLLLYYTRLSECVKRINGGSALNKDLVSISSILFEIKKYSRTF

SEQ ID NO: 197538 - protein, 423 aa, Zea Mays
MNKVLSAHFRAYIQALEKLQMDIATSTDLLGVETRSTGFIFSIGKEPLKTRPSVFALGERINILKEIDQPALIPHIAEAKSQKYSYEVLFRSLQKLLIDTATSEYLFTDDFFGEESIFHDIFAGPIQVVDEHFNTVLLNCYDAIGIMLMIRIIHQHQLIMFKRRIPCLDSYLDKVNMSLWPRFKMVFDLHLNSLRNANIKTLWEDDVHPHYVTRRYAEFTASLVHLNVEHGDGQLDLNLERLRMAIEDLLVKLAKMFSKPKLQTVFLINNYDLTISILKEAGTEGGKAQQHFEEVLKSNIAIYVEELLLEQFSSLIRFVKSRPADETAANSEKASIAEVEPLVKDFASRYKAAIELMHYDVITSFSNFLCGMEILRATLAQLLLYYTRLSECVKRINGGSALNKDLVSISSILFEIKKYSRTF

SEQ ID NO: 197539 - protein, 304 aa, Zea Mays
MKFFSEACRNFLLILPLQNTCLLMISLAKNPYSMIYLQLIMFKRRIPCLDSYLDKVNMSLWPRFKMVFDLHLNSLRNANIKTLWEDDVHPHYVTRRYAEFTASLVHLNVEHGDGQLDLNLERLRMAIEDLLVKLAKMFSKPKLQTVFLINNYDLTISILKEAGTEGGKAQQHFEEVLKSNIAIYVEELLLEQFSSLIRFVKSRPADETAANSEKASIAEVEPLVKDFASRYKAAIELMHYDVITSFSNFLCGMEILRATLAQLLLYYTRLSECVKRINGGSALNKDLVSISSILFEIKKYSRTF

SEQ ID NO: 197540 - protein, 454 aa, Zea Mays
MDMGLKLKNRKAAESKLSKFVEDIIVPPRMIDIIVDGEVNDEYMKTLETLSKKIKFIDADPMVKSSKALKDVQPEVERLRQKAVSKIFEFVIQKFYALRKPKTNIQILQQSVLLKYKYTINFLKEHAKEIYAEVRTAYIDTMNKVLSAHFRAYIQALEKLQMDIATSTDLLGVETRSTGFIFSIGKEPLKTRPSVFALGERINILKEIDQPALIPHIAEAKSQKYSYEVLFRSLQKLLIDTATSEYLFTDDFFGEESIFHDIFAGPIQVVDEHFNTVLLNCYDAIGIMLMIRIIHQHQLIMFKRRIPCLDSYLDKVNMSLWPRFKMVFDLHLNSLRNANIKTLWEDDVHPHYVTRRYAEFTASLVHLNVEHGDGQLDLNLERLRMAIEDLLVKLAKMFSKPKLQTVFLINNYDLTISILKLELRVGKHNNTSRRFLRATSQYMWKSCSWSSSVV

SEQ ID NO: 197541 - protein, 57 aa, Zea Mays
MLACFCGCVYWQSLEPGAVCIGIAGAKCPCGLALMLAGLRTYVGYSFTASEQLKLGR

SEQ ID NO: 197542 - protein, 244 aa, Zea Mays
MISFDKIEVVNRLRKEFVHETLLNYGVHYDKTWIYDKIHHEINQFCSAHSLQQVYIDMFDQIDETMKEAIQRDCTRYAPGIEIISVRVTKPNIPGSIRRNFELMEEERTKALIAIEKQKVAEKEAETQKKIALSEAEKNAQVSKILMEQKLMEKDSSKRQEKIDNEMYLAREKALADANYYRILKEAEANRLKLTPEYLELRFIESIANNSKIFFGEKIPNMIMDQRLLKNYLDAVPRKDHYEM

SEQ ID NO: 197543 - protein, 122 aa, Zea Mays
MEASSLALVAAVLLLSSTLAASDFCVCSSDQPTAVLQKAIDFACGPQGGADCTAILQGGGCYSPNTVAAHCSWAANSYYQNNKARGATCDFGGAAAVSTTDPSFSGCTFASSATRLIMKSGI

SEQ ID NO: 197544 - protein, 365 aa, Zea Mays
MLREEVTQDDIAEIVSRWTGIPVSKLKQSDREKLLYLEEELHKRVVGQDPAVKAVAEAIQRSRAGLSDPNRPIASFMFMGPTGVGKTELAKALASFMFNTEEAVVRIDMSEYMEKHSVSRLIGAPPGYVGYEEGGQLTEAVRRRPYSVVLFDEIEKAHLDVFNVFLQILDDGRVTDSQGRKVSFTNSIIIMTSNVGSQYILNMDEEDGSSDSAYENIKRRVMDAARSVFRPEFMNRVDEYIVFKPLEREQINSIVKLQLARVQKRIADRKIKLDVSPGAIEFLGSLGYDPNYGARPVKRVIQQYVENELAKGILRGDFKDEDSIFVDTQVTVPSNGQLPLRKLVFQKVGEQSKPAAEGEKFLPAV

SEQ ID NO: 197545 - protein, 952 aa, Zea Mays
MAAAPPLSADVLSFLTSAPAAPTPVVAAAWGAARAGPVRGKAALRTTRGGRGGVLAPLVGRRPRRTPLSVRCNATSRDGRITQQEFTEMAWQAIVSSPEVAKESKHQIVETEHLMKSLLEQRNGLARRIFSKAGVDNTRLLDATKKFIQRQPKVLGEEPGSMLGRDLEALIQRARDFKKEYGDSYVSVEHLVLGFAEDKRFGTQLFKDFQITVKTLKSAIESIRGKQNVIDQGKLDPVIGRDDEIRRCIQILSRRTKNNPVLIGEPGVGKTAIAEGLAQRIVQGDVPQALTNRRLIALDMGALIAGAKYRGEFEDRLKAVLKEVTDSDGQTILFIDEIHTVVGAGATNGAMDAGNLLKPMLGRGELRCIGATTLDEYRKYIEKDPALERRFQQVYVDQPSVEDTISILRGLRERYELHHGVRISDSALVAAAVLSDRYISGRFLPDKAIDLVDESAAKLKMEITSKPTALDEIDRAVLKIEMERLSLTNDTDKASKDRLSRLEAELSLLKDKQRQLTEKWEHEKSVMTKIQSIKEEIDRVNVEIQQAEREYDLNRAAELKYGSLNALQRQLQTTEKELDEYQSSGKSMLREEVTQDDIAEIVSRWTGIPVSKLKQSDREKLLYLEEELHKRVVGQDPAVKAVAEAIQRSRAGLSDPNRPIASFMFMGPTGVGKTELAKALASFMFNTEEAVVRIDMSEYMEKHSVSRLIGAPPGYVGYEEGGQLTEAVRRRPYSVVLFDEIEKAHLDVFNVFLQILDDGRVTDSQGRKVSFTNSIIIMTSNVGSQYILNMDEEDGSSDSAYENIKRRVMDAARSVFRPEFMNRVDEYIVFKPLEREQINSIVKLQLARVQKRIADRKIKLDVSPGAIEFLGSLGYDPNYGARPVKRVIQQYVENELAKGILRGDFKDEDSIFVDTQVTVPSNGQLPLRKLVFQKVGEQSKPAAEGEKFLPAV

SEQ ID NO: 197546 - protein, 653 aa, Zea Mays
MGALIAGAKYRGEFEDRLKAVLKEVTDSDGQTILFIDEIHTVVGAGATNGAMDAGNLLKPMLGRGELRCIGATTLDEYRKYIEKDPALERRFQQVYVDQPSVEDTISILRGLRERYELHHGVRISDSALVAAAVLSDRYISGRFLPDKAIDLVDESAAKLKMEITSKPTALDEIDRAVLKIEMERLSLTNDTDKASKDRLSRLEAELSLLKDKQRQLTEKWEHEKSVMTKIQSIKEEIDRVNVEIQQAEREYDLNRAAELKYGSLNALQRQLQTTEKELDEYQSSGKSMLREEVTQDDIAEIVSRWTGIPVSKLKQSDREKLLYLEEELHKRVVGQDPAVKAVAEAIQRSRAGLSDPNRPIASFMFMGPTGVGKTELAKALASFMFNTEEAVVRIDMSEYMEKHSVSRLIGAPPGYVGYEEGGQLTEAVRRRPYSVVLFDEIEKAHLDVFNVFLQILDDGRVTDSQGRKVSFTNSIIIMTSNVGSQYILNMDEEDGSSDSAYENIKRRVMDAARSVFRPEFMNRVDEYIVFKPLEREQINSIVKLQLARVQKRIADRKIKLDVSPGAIEFLGSLGYDPNYGARPVKRVIQQYVENELAKGILRGDFKDEDSIFVDTQVTVPSNGQLPLRKLVFQKVGEQSKPAAEGEKFLPAV

SEQ ID NO: 197547 - protein, 886 aa, Zea Mays
MAWQAIVSSPEVAKESKHQIVETEHLMKSLLEQRNGLARRIFSKAGVDNTRLLDATKKFIQRQPKVLGEEPGSMLGRDLEALIQRARDFKKEYGDSYVSVEHLVLGFAEDKRFGTQLFKDFQITVKTLKSAIESIRGKQNVIDQDPEGKYEALDKYGKDLTAMARQGKLDPVIGRDDEIRRCIQILSRRTKNNPVLIGEPGVGKTAIAEGLAQRIVQGDVPQALTNRRLIALDMGALIAGAKYRGEFEDRLKAVLKEVTDSDGQTILFIDEIHTVVGAGATNGAMDAGNLLKPMLGRGELRCIGATTLDEYRKYIEKDPALERRFQQVYVDQPSVEDTISILRGLRERYELHHGVRISDSALVAAAVLSDRYISGRFLPDKAIDLVDESAAKLKMEITSKPTALDEIDRAVLKIEMERLSLTNDTDKASKDRLSRLEAELSLLKDKQRQLTEKWEHEKSVMTKIQSIKEEIDRVNVEIQQAEREYDLNRAAELKYGSLNALQRQLQTTEKELDEYQSSGKSMLREEVTQDDIAEIVSRWTGIPVSKLKQSDREKLLYLEEELHKRVVGQDPAVKAVAEAIQRSRAGLSDPNRPIASFMFMGPTGVGKTELAKALASFMFNTEEAVVRIDMSEYMEKHSVSRLIGAPPGYVGYEEGGQLTEAVRRRPYSVVLFDEIEKAHLDVFNVFLQILDDGRVTDSQGRKVSFTNSIIIMTSNVGSQYILNMDEEDGSSDSAYENIKRRVMDAARSVFRPEFMNRVDEYIVFKPLEREQINSIVKLQLARVQKRIADRKIKLDVSPGAIEFLGSLGYDPNYGARPVKRVIQQYVENELAKGILRGDFKDEDSIFVDTQVTVPSNGQLPLRKLVFQKVGEQSKPAAEGEKFLPAV

SEQ ID NO: 197548 - protein, 790 aa, Zea Mays
MKASDQKPDRVTYITLLDKCGDSGDSQSVVEVWNAMVADGYNDNIVSYTAVVDALCQVGRVDEALAVFDEMKEKGMSPEQYSYNSLISGFLKADMFDRALELFNHMNACGPSPNGYTHVLFINYYGKSGQSLKAIQRYEHMKSKGIVPDVAAANAVLYSLAGSGRLGMAKRVFYELKAMGVSPDTITYTMMIKCCSKASKADEAMNFFSDMVESGCVPDVLALNSLIDTLYKGGKGNEAWQLFHKLKEMKIEPTNGTYNTLLSGLGREGKVKEVMQLLEEMTRTIYPPNLITYNTVLDCLSKNGEVNCAIDMLYSMTEKGCAPDLSSYNTVMYGLIKEERLEEAFRMFCQMKKILAPDYATLCTILPSFVKNGLMKEALHTVKEYILKAGCNVDKSSFHSLMEGILKKAGVEKSIEFAENIASRGILLNDFFLCPLIRHLCKHKKALEAHQLFNKFKGLGVSLKTGSYNSLIRGLVDENLIDIAEDLFTEMKRLGCGPDEFTYNLILDAMGKSMRVEEMLKVQKEMHRKGYESTYVTYNTIISGLVKSKRLEQAIDLYYNLMSEGFSPTPCTYGPLLDGLLKSGKMVDAENLFNEMLEYGCEPNCTIYNILLNGHRIAGNTENVCQLFEKMVEQGINPDIKSYTILIDTLCTAGRLNDGLCYFRQLHELGLEPDLIVYNLLIDGLGKSERIEEAVSLFNEMKKKGIIPNLYTYNSLILHLGKAGKAAEAAQMYEELLRKGWKPSVFTYNALIRGYSVSGSTDNAYAAYGQMIVGGCQPNSSTYMQLPNQL

SEQ ID NO: 197549 - protein, 57 aa, Zea Mays
MFPYLQRIPTCQRKDHEVLLQMRGRIDDGQRRRRRQAPVSMGLLSNSSTLRSVPSLD

SEQ ID NO: 197550 - protein, 118 aa, Zea Mays
MCPPTAYLPSAYRGQEGGHLLPQCPRPACAPHHHHHPSPMASIGSLESSTVGYQGWTTHLAAVAKDIQDHLSSKGHKISSFLFGRGLSADRLIYVIKRQCARATLSQKIIYHLIDVGY

SEQ ID NO: 197551 - protein, 94 aa, Zea Mays
MCPPTAYLPSAYRGQEGGHLLPQCPRPACAPHHHHHPSPMASIGSLESSTVGYQGWTTHLAAVAKDIQDHLSSKGHKISSFLFGRGTRTFCFLI

SEQ ID NO: 197552 - protein, 121 aa, Zea Mays
MCPPTAYLPSAYRGQEGGHLLPQCPRPACAPHHHHHPSPMASIGSLESSTVGYQGWTTHLAAVAKDIQDHLSSKGHKISSFLFGRGRYSLLSYGETSYLSSLFLCILLLLSPRVFNSQLFI

SEQ ID NO: 197553 - protein, 466 aa, Zea Mays
MEKESKQGFFSALKGEVVRGLSPGRSRGKSLLLPRSRKTAAAEEVAPPEKLAQYAPDPLVTHSGSLRLAGEVLAPLMEGPDVAEDDTFAEDSGRRDGFGQWVRGHLTRAPLIAGGGDGSFRRSDLRLLLGVMGAPLAPVSVSTAEPLPLAPVKGAPIESSSAQYILQQYLAASGGAKVLRSARNAYAMGKVRMVASEFETATRVVKNRGAAAAAAVEQGGFVLWRMSPDMWYVELAVGGSKVRAGCNGRLVWRHTPWLGAHAAKGPVRPLRRALQGLDPLSTAGLFAETLRQRSEGPAEIIRHVVFGYFSQRTGLLVQVEDSHLTRIQPHAGGDAVYWETTISSFLEDYRAVDGVAIAHAGRSAVTLFRFGETAMSHTKTRMEEAWTIQEAAFDVPGLSTDCFIPPADVRRDSDSVGEPCELPPRGAKAGAVHPACDAVHSRRRRDVAPADGELATRSTGRWRCDF

SEQ ID NO: 197554 - protein, 58 aa, Zea Mays
MQWNKLSRQLTLNIVLGLLGSVEAWYLPTPLSGPPAGTHARPTSSKMWYGQIYMPLSR

SEQ ID NO: 197555 - protein, 61 aa, Zea Mays
MERSLQISIKRSLPFGPPLADDMIKDIKKSLEILSKTQPKRGEVHKRSHYYETLDVSSPQR

SEQ ID NO: 197556 - protein, 71 aa, Zea Mays
MGSTFPNMVKDTEHSFQSCFEPWWISRCDDMGLGLRALLKSGGYQSALLNLVLSFLLEQCQRNMTYYFACF

SEQ ID NO: 197557 - protein, 106 aa, Zea Mays
MDLTPTPTFVIHLELKATVLKEKLLALGSSRILAEHQLQAQLQEQHLKGQNQLTISDVATKAFLHSVCDSSLYTGCKQSHAPVVARKVHPSQVQDQRLESLGVVGN

SEQ ID NO: 197558 - protein, 83 aa, Zea Mays
MWVKPPEVLARDRLLGSYKVKPVVNLLKQTLVGTGALLVGAVSLFAFAAPVEDFLHALSQPPSSATASSKPSLRRSCCGYQSR

SEQ ID NO: 197559 - protein, 300 aa, Zea Mays
MLLRLKIVVGVHSVVLPVPVPGGYGHGACYAAVEPCWRRSRRPALAAAGGLVARRPRQSATVVMALKEEPEGSSRRGFAGGGPSWDPGLEIQVPFEQRPVNEYSALKDSALYSWAELSPGSFFLRLGGLCLVTFTVLAAPIAAASFNPGKDPLKFVLAAGIGTLLLVSLAVLRIYLGWSYVGDRLLSAVVPYEETGWYDGQMWVKPPEAPGILQGEAGGQPAEADAGGHRRAARGRRVALRVRRAGRGLPPRPEPASLLRHRLVQAELEVRGRHVLTCAHGPRRTYAASKALCMVRLFSC

SEQ ID NO: 197560 - protein, 420 aa, Zea Mays
MGNCCRSPTTIAWEDVSSSHFPASNAKKKPHQARNGGGGDGQKRLSVLAGRRGELLACKSISKRKLRTTIDVEDVRREVAIMRHLPKSPSVMSLREACGDEGTVHLVMELCEGGELLDRIVAQGHYTECAATNVTRTIVVVVQLYHRHDIIHRDLKPENILFTNKKENSPLMVSPSSSSLEMRKKKVERWDQFVDVIEQIKKVASEIRPADFVPFRIHVDQSDQSLRKLEELTKELQSLQKEKSDRLKQVMEHLNTLHSLCEVLGVDFKQTVNEVHPSLGEADESKNLSNCTIESPASATSRLRELKVQRMQKLQDLASSMLELWNLMDTPLEEQQMFQNVTCNIAASEHEITEPNTLSIDFLSYVESEVLRLEQLKASKMKDLVIKKKTELEEHRRRAHLFGEEGYAAEFRDEAIEAVG

SEQ ID NO: 197561 - protein, 373 aa, Zea Mays
MDRDTKELLACKSISKRKLRTTIDVEDVRREVAIMRHLPKSPSVMSLREACGDEGTVHLVMELCEGGELLDRIVAQGHYTECAATNVTRTIVVVVQLYHRHDIIHRDLKPENILFTNKKENSPLMVSPSSSSLEMRKKKVERWDQFVDVIEQIKKVASEIRPADFVPFRIHVDQSDQSLRKLEELTKELQSLQKEKSDRLKQVMEHLNTLHSLCEVLGVDFKQTVNEVHPSLGEADESKNLSNCTIESPASATSRLRELKVQRMQKLQDLASSMLELWNLMDTPLEEQQMFQNVTCNIAASEHEITEPNTLSIDFLSYVESEVLRLEQLKASKMKDLVIKKKTELEEHRRRAHLFGEEGYAAEFRDEAIEAVG

SEQ ID NO: 197562 - protein, 321 aa, Zea Mays
MEHLNTLHSLCEVLGVDFKQTVNEVHPSLGEADESKNLSNCTIESPASATSRLRELKVQRMQKLQDLASSMLELWNLMDTPLEEQQMFQNVTCNIAASEHEITEPNTLSIDFLSYVESEVLRLEQLKASKMKDLVIKKKTELEEHRRRAHLFGEEGYAAEFRDEAIEAAIIFQPILHPLKLQLDDTIIKTIETAPNNELKKAKEIIQRIRRRELYKAGKKLLLITNSDFHYTNKMMNHAFNRFLPNDVGWRDLFEMVIVSTRKPEFLQLSHPLYEVVTDDGLMHPCFKVNSVLQPVFCSKGQTRAFQKYYCTGHSLFAEIF

SEQ ID NO: 197563 - protein, 583 aa, Zea Mays
MGNCCRSPTTIAWEDVSSSHFPASNAKKKPHQARNGGGGDGQKRLSVLAGRRGELLACKSISKRKLRTTIDVEDVRREVAIMRHLPKSPSVMSLREACGDEGTVHLVMELCEGGELLDRIVAQGHYTECAATNVTRTIVVVVQLYHRHDIIHRDLKPENILFTNKKENSPLMVSPSSSSLKEIGTLKYHPKSARLYFITHGKVPYLEEMRKKKVERWDQFVDVIEQIKKVASEIRPADFVPFRIHVDQSDQSLRKLEELTKELQSLQKEKSDRLKQVMEHLNTLHSLCEVLGVDFKQTVNEVHPSLGEADESKNLSNCTIESPASATSRLRELKVQRMQKLQDLASSMLELWNLMDTPLEEQQMFQNVTCNIAASEHEITEPNTLSIDFLSYVESEVLRLEQLKASKMKDLVIKKKTELEEHRRRAHLFGEEGYAAEFRDEAIELDDTIIKTIETAPNNELKKAKEIIQRIRRRELYKAGKKLLLITNSDFHYTNKMMNHAFNRFLPNDVGWRDLFEMVIVSTRKPEFLQLSHPLYEVVTDDGLMHPCFKVNSVLQPVFCSKGQTRAFQKYYCTGHSLFAEIF

SEQ ID NO: 197564 - protein, 376 aa, Zea Mays
MGVSCLTAFAGLAARQSSNDTTSPAGGFLSSGVEAWGTPALYYFDSVWNEQKGLRYQTTDKQYGKWSNPDDKATVGNYFLNSCGEIHLNPEHLGNERLMWGSSEMKHDLGSFSSKVSSAESRFIQTCEGSSEFPDVNNTSVDSPCWKGTPASYQCSFGIMENNGVPPVAIRTAGYINSHKNQKPPELGSGYPWRFCEHQVALSSEIDPFKVFKLPERCKISKDHKEVPPIDVKVLNDMTTHACCLPDKQHSATQKCYDSREDSQNVITSSQRESLCPASKPKLLVVEKEESTHTRGEDPSQCYPGVEGNMMNMASESSSSTRAIFLKLMHNLSVVLLLTCKGGSLLHEDEEDLLQSVIQNLTAASSKRSKVEQKNW

SEQ ID NO: 197565 - protein, 214 aa, Zea Mays
MWGSSEMKHDLGSFSSKVSSAESRFIQTCEGSSEFPDVNNTSVDSPCWKGTPASYQCSFGIMENNGVPPVAIRTAGYINSHKNQKPPELGSGYPWRFCEHQVALSSEIDPFKVFKLPERCKISKDHKEVPPIDVKVLNDMTTHACCLPDKQHSATQKCYDSREDSQNVITSSQRESLCPASKPKLLVVEKEESTHTRGEDPSQCYPGWFFVARR

SEQ ID NO: 197566 - protein, 257 aa, Zea Mays
MWGSSEMKHDLGSFSSKVSSAESRFIQTCEGSSEFPDVNNTSVDSPCWKGTPASYQCSFGIMENNGVPPVAIRTAGYINSHKNQKPPELGSGYPWRFCEHQVALSSEIDPFKVFKLPERCKISKDHKEVPPIDVKVLNDMTTHACCLPDKQHSATQKCYDSREDSQNVITSSQRESLCPASKPKLLGEHGGNLIASINELMNKSVMNSIAITPRIHTDHLTTGSQHGIFFLQLWRRKKALTQEVKTLLNVIQVLRGI

SEQ ID NO: 197567 - protein, 116 aa, Zea Mays
MLCGRCRPAAAVFRHHVCCFIKPIVVEKEESTHTRGEDPSQCYPGVEGNMMNMASESSSSTRAIFLKLMHNLSVVLLLTCKGGSLLHEDEEDLLQSVIQNLTAASSKRSKVEQKNW

SEQ ID NO: 197568 - protein, 278 aa, Zea Mays
MWGSSEMKHDLGSFSSKVSSAESRFIQTCEGSSEFPDVNNTSVDSPCWKGTPASYQCSFGIMENNGVPPVAIRTAGYINSHKNQKPPELGSGYPWRFCEHQVALSSEIDPFKVFKLPERCKISKDHKEVPPIDVKVLNDMTTHACCLPDKQHSATQKCYDSREDSQNVITSSQRESLCPASKPKLLVVEKEESTHTRGEDPSQCYPGVEGNMMNMASESSSSTRAIFLKLMHNLSVVLLLTCKGGSLLHEDEEDLLQSVIQNLTAASSKRSKVEQKNW

SEQ ID NO: 197569 - protein, 273 aa, Zea Mays
MWGSSEMKHDLGSFSSKVSSAESRFIQTCEGSSEFPDVNNTSVDSPCWKGTPASYQCSFGIMENNGVPPVAIRTAGYINSHKNQKPPELGSGYPWRFCEHQVALSSEIDPFKVFKLPERCKISKDHKEVPPIDVKVLNDMTTHACCLPDKQHSATQKCYDSREDSQNVITSSQRESLCPASKPKLLVVEKEESTHTRGEDPSQCYPGVEGNMMNMASESSSSTRAIFLKLMHNLSVVLLLTCKGGSLLHEDEEDLLQSVIQNLTAASSKRSKV

SEQ ID NO: 197570 - protein, 355 aa, Zea Mays
MGVSCLTAFAGLAARQSSNDTTSPAGGFLSSGVEAWGTPALYYFDSVWNEQKGLRYQTTDKQYGKWSNPDDKATVGNYFLNSCGEIHLNPEHLGNERLMWGSSEMKHDLGSFSSKVSSAESRFIQTCEGSSEFPDVNNTSVDSPCWKGTPASYQCSFGIMENNGVPPVAIRTAGYINSHKNQKPPELGSGYPWRFCEHQVALSSEIDPFKVFKLPERCKISKDHKEVPPIDVKVLNDMTTHACCLPDKQHSATQKCYDSREDSQNVITSSQRESLCPASKPKLLGEHGGNLIASINELMNKSVMNSIAITPRIHTDHLTTGSQHGIFFLQLWRRKKALTQEVKTLLNVIQVLRGI

SEQ ID NO: 197571 - protein, 312 aa, Zea Mays
MGVSCLTAFAGLAARQSSNDTTSPAGGFLSSGVEAWGTPALYYFDSVWNEQKGLRYQTTDKQYGKWSNPDDKATVGNYFLNSCGEIHLNPEHLGNERLMWGSSEMKHDLGSFSSKVSSAESRFIQTCEGSSEFPDVNNTSVDSPCWKGTPASYQCSFGIMENNGVPPVAIRTAGYINSHKNQKPPELGSGYPWRFCEHQVALSSEIDPFKVFKLPERCKISKDHKEVPPIDVKVLNDMTTHACCLPDKQHSATQKCYDSREDSQNVITSSQRESLCPASKPKLLVVEKEESTHTRGEDPSQCYPGWFFVARR

SEQ ID NO: 197572 - protein, 75 aa, Zea Mays
MEPPASYMAPPPRHRVIKLWRRKKALTQEVKTLLNVIQGGSLLHEDEEDLLQSVIQNLTAASSKRSKPFLPENVP

SEQ ID NO: 197573 - protein, 164 aa, Zea Mays
MARKTRVPEEGASMEIPTRCRRSHRSSNTTTGTLPQEVLAALTSAFNLDGSAKENFEDALLAMLWPFADRVATFKSGLVAPEEGLRCYGAPSMWNFLIFFVGDFHISVKIGSSLRLLLGFARVVPPVAPPRSAGTDLPLAARGSLAQDRLRRPTVLSPPASAQH

SEQ ID NO: 197574 - protein, 104 aa, Zea Mays
MAQIHGQKLASLKLSDLKAPSHPLKDWVIMMKIHVTWTENTRTIFMDIIFFFFCIIIFISFFTFVLLFFDICCICLMLLRHNENAKIAREVEAHEKRIKKELES

SEQ ID NO: 197575 - protein, 62 aa, Zea Mays
MHKLWMISVRSSCTISCEHLLILLCIACSSRTLVLHTYKIQYNMNLFSVCIHTYIYKTCLFA

SEQ ID NO: 197576 - protein, 566 aa, Zea Mays
MPSRSGSRGRRPRPAPEVAAPTAVQVSSSGSSEEGSDEEEEGSEGSGDGARSPGGSASKYKAAESEAEAEDPCLPSCPICMVVWTADGAHRVSCIPCGHVYGRHCLEMWLLQYGKKKAPCPQCGKRYTQNNIINLYVPEIVVPNNDLENQVLSLRERNEYLEKQQAKLLEEIKEHKRQIMLQQNVIYESNKKRQRVAEQSSDGILGAELIASHTKDIDHSNLSSFALQNEFLVDGARVMGIDASSQIIFTSGRAHGVSAEHILTKVSMFHGHGMEKIHLPPGTKAIRDICVLPGGHVVFASLGRKLSIFSVATNNVVLQYDLPAPGWSCSGDYTTSSHIYAGLQNGMLLVFDIRQTSAPLHSSMGLSTHPVHTIHCAVDGSGSRKVFSASSIGPCVWDASENRPSLVSGMENQGVCISLACSSPSSDVLVASYRPRVELPDAIATSQASTPQSPAPTGSGKLGCHTLLRRTTATSFARDHICSGSVSELRMSKSAIIPCRDNQHLFAYGDESLYGVRTWRLPSFQRYTDLKPHRQPVLDLRYAESSTGERYLGCLSAEKLQVFTIR

SEQ ID NO: 197577 - protein, 507 aa, Zea Mays
MEGGGRARGGYGESYSLGKCTERRAGDGEHSTSSCIPCGHVYGRHCLEMWLLQYGKKKAPCPQCGKRYTQNNIINLYVPEIVVPNNDLEKQVLSLRERNEYLEKQQAKLLEEIKEHKRQIMLQQNIIYESNKKRQRVTEQSSDGILGAELIASHTKDIDHNNLSSFALQNEFLVDGARVMGIDASSQIILTSGRAHGVSAEHILTKVSMFHGHGMEKIHLPPDTKAIRDICVLPGGHVVFASLGRKLSIFSMATNNVVLQYDLPAPGWSCSGDYTTSSHIYAGLQNGMLLVFDIRQTSAPLHSSMGLSTHPVHTIHCAVDGSGSRKVFSASSIGPCVWDASENRPSLVSGMENQGVCISLACSSPSSDVLVASYRPRVELPDAIATSQASTPQSPAPTGSGKLGCHTLLRRTTATSFARDHICSGSVSELRMSKSAIIPCRDNQHLFAYGDESLYGVRTWRLPSFQRYTDLKPHRQPVLDLRYAESSTGERYLGCLSAEKLQVFTIR

SEQ ID NO: 197578 - protein, 548 aa, Zea Mays
MPSRSGSRGRRPRPAPEVAAPTAVQVSSSGSSEEGSDEEEEEGSEGSGDGARSPGGSASKYKAAESEAEAEDPCLPSCPICMVAWTADGSHRVSCIPCGHVYGRHCLEMWLLQYGKKKAPCPQCGKRYTQNNIINLYVPEIVVPNNDLEKQVLSLRERNEYLEKQQAKLLEEIKEHKRQIMLQQNIIYESNKKRQRVTEQSSDGILGAELIASHTKDIDHNNLSSFALQNEFLVDGARVMGIDASSQIILTSGRAHGVSAEHILTKVSMFHGHGMEKIHLPPDTKAIRDICVLPGGHVVFASLGRKLSIFSMATNNVVLQYDLPAPGWSCSGDYTTSSHIYAGLQNGMLLVFDIRQTSAPLHSSMGLSTHPVHTIHCAVDGSGSRKVFSASSIGPCVWDASENSSPSSDVLVASYRPRVELPDAIATSQASTPQSPAPTGSGKLGCHTLLRRTTATSFARDHICSGSVSELRMSKSAIIPCRDNQHLFAYGDESLYGVRTWRLPSFQRYTDLKPHRQPVLDLRYAESSTGERYLGCLSAEKLQVFTIR

SEQ ID NO: 197579 - protein, 96 aa, Zea Mays
MARSVSYVSAAKLVSMARGNPRLAIIDVRDEERSYQAHIAGSHHFASGSFEARMPELVRAASGKDTLVFHCALSQGNIYLLVSGSQPLIDCMMNQQ

SEQ ID NO: 197580 - protein, 429 aa, Zea Mays
MASESSSSEFAKIVQSKQTRQARLCGADSELLSSLAGSDAEVMVTIPNEQLEHVAEFQEEADLWVAANVARFLPSTRITHVVAGDDVPANSPGSAHFLVPAMLNLRSALVAAGLGGRVKVSSAMSGEALSAPAWSGVVGHVLRFLESAGSPLLLKSSSRPSEEASDARVGRAYAAMRALGVSGVPVIATDLAAGGDAVPYYYSYYGYGYPGGHGRRRSLATTGTFCVALQDADPAALQAGLNWACGPGHADCSAIQPGGACYQQNNLPAIASYAYNDYYQEMASTGATCSFNGTATTTTNDPSSGSCVFAGSSTAGGSSNSSVPVGASPPTSLSPPTGFAPPVGSSPPSSSSEFSPPAVGTAPLSGFTPPDGGGFGTPPGSFNGTGTFGPSGTLSPYNGGAPGLSRAGLSLTALSAAAVAVLLASIDAM

SEQ ID NO: 197581 - protein, 101 aa, Zea Mays
MKKMDPTTSTTQTVCSIILLVGPYLPSTVHHFIIELSDDFFKTFHIFNNELSEDYSRNVSADAGATACVTQTQLRLPRPVLRAAEATGAPPSAWTPRTPLL

SEQ ID NO: 197582 - protein, 278 aa, Zea Mays
MGARGGGGGGRKARNFATFRLFPRAGAADPNDRVFVRVDNNDYTVPGFADEDSFDPSRSDPSAGNGNFGSASGPLPEHVRREILELGLPDDGYNYLSHLRELRPAAAAASSFVPSSTGRPEPLPLDVKAYDASRVRIGLSEGELDEGKTMCKVAAKTAPVRRIEKAVDPDIARLLDESDVSHVGSEDEGLEEDFVIIANQAEEEEEDEDGDMEEKQEWNGVFSDVEEEEFDFEEDEPKPRVRRLLDEQFDLRNMETVMMMTWVLKVGNMNCQMRLLMN

SEQ ID NO: 197583 - protein, 927 aa, Zea Mays
MGNSTSRVVGCFAPPDKAGGVDLDFLEPLDEGLGHSFCYVRPGGGAAADSPAITPSNSERYTLDSSVMDSETRSGSFRQEPADDLAAAAAAAAGLQRPCRSFGETTFRTISGASVSANASSARTGNLAVSLAGDVQEPAAAFESTASFAAVPLQPVPRGSGALNTFLSGPLERGFASGPLDKGSGFMSGPLDKGAFMSGPIDGGSRSNFSAPLSYGGRKARLGRLVHRISRPMKTALSRTFSRSSQNPGWVQKFLSHPMTQLPWARDAKSRSEGSQNGLEPGIPEHEYNVTRNLQWAHGKAGEDRVHVVLSEEQGWLFIGIYDGFSGPDAPDFLMSTLYKAIDKELEGLLWVYEDSSERSDHVSTHEEGESVAASVDAPHGDSDQFQSDSGKQEQVGNFGKQNISPGKGCDESVLQVQPNCTSSEEKNLATQGSTSEKLARDEIVEEMAGADLGNDLQSRESQNSNRGLSDTDLNNNCSCATETTSYCDQHAKFLKENRKSKRLFELLEMELLEDYNKRLSKASPKERKIPNLHVTQAGTAEVFSRNTAEVSRCSLAATGECFDDSEDLGSSRHADSVLGIDIKECTGCSISTSSSGHKQVTRRFVFGSKLRKMYKKQKMLQKKFFPWNYDWHRDQPHVDESVIKSSEVTRRCKSGPVEHDAVLRAMSRALETTEEAYMDIVENELDRHPELALMGSCVLVMLMKDQDVYVMNLGDSRAILAQDNDQYNSSSFSKGDLRHRNRSRESLVRVELDRISEESPMHNPNSHLNSNTKAKELSICRLRMRAVQLSTDHSTSIEEEVLRIKVEHPDDPHSVFNDRVKGQLKVTRAFGAGFLKKPKFNEALLEMFSIDYVGTSPYISCNPSVLHHRLCANDRFLVLSSDGLYQYFSNDEVVSHVLWFMENVPEGDPAQYLVAELLCRAAKKNG

SEQ ID NO: 197584 - protein, 382 aa, Zea Mays
MEGSDWVRHRRVINPAFTIDKLKIVTETMLDFADSMAGELEAEASQNENGETQVDIYKHFSDLTVDNIAYAIFGSSYKLGKQVFEAQTELLGITMATFLDVPIPGSKYLPTQANRRKWMLETKLKSLLTRIIQPRLASGEHGNDLLGVMLDSCTETKQGGKQQQVDRLRLSLSMEEIIHECKLFFFAGHENTALLLTWSVYLLSIYPEWQERLRKEVLREFGRDAPNPNALNRLKEMTMVLFETLRLYSPALFMQRKTLADMTVGPIKLPKGTAIVIPIPIMHRDKQAWGDDADEFSPMRFANGITGAAKVPHGLLAFSMGPRSCIGQNLSMLEAKSTLALMLRKFSFALSPDYVHAPVDLFTLKPKFGLPVILRPLDNVLI

SEQ ID NO: 197585 - protein, 288 aa, Zea Mays
MATFLDVPIPGSKYLPTQANRRKWMLETKLKSLLTRIIQPRLASGEHGNDLLGVMLDSCTETKQGGKQQQVDRLRLSLSMEEIIHECKLFFFAGHENTALLLTWSVYLLSIYPEWQERLRKEVLREFGRDAPNPNALNRLKEMTMVLFETLRLYSPALFMQRKTLADMTVGPIKLPKGTAIVIPIPIMHRDKQAWGDDADEFSPMRFANGITGAAKVPHGLLAFSMGPRSCIGQNLSMLEAKSTLALMLRKFSFALSPDYVHAPVDLFTLKPKFGLPVILRPLDNVLI

SEQ ID NO: 197586 - protein, 90 aa, Zea Mays
MALEPVARAVAEEVARWGAMRQTGVSLRYMMEFGVRPTERTLLLAAQFLHKELPIRIARRALDLDSLPFGLSTKPAILKICYTTSTSHDF

SEQ ID NO: 197587 - protein, 171 aa, Zea Mays
MALEPVARAVAEEVARWGAMRQTGVSLRYMMEFGVRPTERTLLLAAQFLHKELPIRIARRALDLDSLPFGLSTKPAILKVRDWYVESFRDIRSFPEVKNQEDELAFTQMIKMIKVRHTNVVPAVALGVQQLKKDLGGPKAFPPGIHEIHQFLDRFYMSRIGIRMLIARRFA

SEQ ID NO: 197588 - protein, 171 aa, Zea Mays
MIKMIKVRHTNVVPAVALGVQQLKKDLGGPKAFPPGIHEIHQFLDRFYMSRIGIRMLIGQHVALHDPDPEPGVIGLINTKMSPMTVARIASEDARAICMREYGSSPNVDIYGDPGFTFPYVTPHLHLMIFELVKNSLRAVQERYMDSDKLAPPVRIIVADGAEDVTIKPKE

SEQ ID NO: 197589 - protein, 93 aa, Zea Mays
MALEPVARAVAEEVARWGAMRQTGVSLRYMMEFGVRPTERTLLLAAQFLHKELPIRIARRALDLDSLPFGLSTKPAILKGSTSLCMTLIQSLV

SEQ ID NO: 197590 - protein, 140 aa, Zea Mays
MGSEGPSPVTVHVTGFKRFHGVAENPTERIVRGLQPFMETRGLPKGLVLGSCTVLEAAGQGALGPLYELLESTVSGRERQERVILLHFGANSGSHRFALENQAVNEATFRCPDELGWKPQRTPIISSDGSILHARQIRPP

SEQ ID NO: 197591 - protein, 291 aa, Zea Mays
MCVRLMLPGEKSIVTCPPDFAYDKFPRPANVPEGAHVQWEIELLGFEMPKDWTGLTFEEIMDEADKIKNTGNRLFKEGKFELAKAKYDKVLREYNHVHPHDDEEGKIFANSRSSLHLNVAFCYQKMGEYRKSIETCNKVLDANPVHVKALYRRGTSFMLLGDFNDARNDFEKMITIDKSSEQDATAALLKLKQKEQEAEKKARKQFKGLFDKKPGEISEVGVESDGGKDAGDARVNGGEATSADRGVNTNDSPTSESEYAFEEERPGLLGSLWPSARMIFSSLGMNRCAIL

SEQ ID NO: 197592 - protein, 363 aa, Zea Mays
MLGDGRLIKRRVFDGKGEFPMDCPLHDSLLRVHYKGMLLDEPKSVFYDTRADNDGEPLEFCSGEGLVPEGFEMCVRLMLPGEKSIVTCPPDFAYDKFPRPANVPEGAHVQWEIELLGFEMPKDWTGLTFEEIMDEADKIKNTGNRLFKEGKFELAKAKYDKVLREYNHVHPHDDEEGKIFANSRSSLHLNVAFCYQKMGEYRKSIETCNKVLDANPVHVKALYRRGTSFMLLGDFNDARNDFEKMITIDKSSEQDATAALLKLKQKEQEAEKKARKQFKGLFDKKPGEISEVGVESDGGKDAGDARVNGGEATSADRGVNTNDSPTSESEYAFEEERPGLLGSLWPSARMIFSSLGMNRCAIL

SEQ ID NO: 197593 - protein, 413 aa, Zea Mays
MGIGTMSHKEKAIIFVSSTYLTKSSLMPQLEGLEEVHFYIELVQFIQVRDMLGDGRLIKRRVFDGKGEFPMDCPLHDSLLRVHYKGMLLDEPKSVFYDTRADNDGEPLEFCSGEGLVPEGFEMCVRLMLPGEKSIVTCPPDFAYDKFPRPANVPEGAHVQWEIELLGFEMPKDWTGLTFEEIMDEADKIKNTGNRLFKEGKFELAKAKYDKVLREYNHVHPHDDEEGKIFANSRSSLHLNVAFCYQKMGEYRKSIETCNKVLDANPVHVKALYRRGTSFMLLGDFNDARNDFEKMITIDKSSEQDATAALLKLKQKEQEAEKKARKQFKGLFDKKPGEISEVGVESDGGKDAGDARVNGGEATSADRGVNTNDSPTSESEYAFEEERPGLLGSLWPSARMIFSSLGMNRCAIL

SEQ ID NO: 197594 - protein, 596 aa, Zea Mays
MAQDAGDGGGELPPPVKKKSPAEEEAEKRRKKLTPGSLMKGIIRSGSGDATPAEGDQVILHCTTRTIDGIVVNSTRREHGGKGIPLRFVLGKSKMILGFAEGFPTMLKGEIAMFKMQPKIHYAEDDCPVATPDGFPKDDELQFEIEMLDFFKAKVVADDLGVVKKIVEEGKGWETPREPYEITARITARTADGKEIIPSKEEAYFFTIGKSELEGLEEVHFYIELVQFIQVRDMLGDGRLIKRRVFDGKGEFPMDCPLHDSLLRVHYKGMLLDEPKSVFYDTRADNDGEPLEFCSGEGLVPEGFEMCVRLMLPGEKSIVTCPPDFAYDKFPRPANVPEGAHVQWEIELLGFEMPKDWTGLTFEEIMDEADKIKNTGNRLFKEGKFELAKAKYDKVLREYNHVHPHDDEEGKIFANSRSSLHLNVAFCYQKMGEYRKSIETCNKVLDANPVHVKALYRRGTSFMLLGDFNDARNDFEKMITIDKSSEQDATAALLKLKQKEQEAEKKARKQFKGLFDKKPGEISEVGVESDGGKDAGDARVNGGEATSADRGVNTNDSPTSESEYAFEEERPGLLGSLWPSARMIFSSLGMNRCAIL

SEQ ID NO: 197595 - protein, 537 aa, Zea Mays
MILGFAEGFPTMLKGEIAMFKMQPKIHYAEDDCPVATPDGFPKDDELQFEIEMLDFFKAKVVADDLGVVKKIVEEGKGWETPREPYEITARITARTADGKEIIPSKEEAYFFTIGKSEVPKGLEMGIGTMSHKEKAIIFVSSTYLTKSSLMPQLEGLEEVHFYIELVQFIQVRDMLGDGRLIKRRVFDGKGEFPMDCPLHDSLLRVHYKGMLLDEPKSVFYDTRADNDGEPLEFCSGEGLVPEGFEMCVRLMLPGEKSIVTCPPDFAYDKFPRPANVPEGAHVQWEIELLGFEMPKDWTGLTFEEIMDEADKIKNTGNRLFKEGKFELAKAKYDKVLREYNHVHPHDDEEGKIFANSRSSLHLNVAFCYQKMGEYRKSIETCNKVLDANPVHVKALYRRGTSFMLLGDFNDARNDFEKMITIDKSSEQDATAALLKLKQKEQEAEKKARKQFKGLFDKKPGEISEVGVESDGGKDAGDARVNGGEATSADRGVNTNDSPTSESEYAFEEERPGLLGSLWPSARMIFSSLGMNRCAIL

SEQ ID NO: 197596 - protein, 412 aa, Zea Mays
MAQDAGDGGGELPPPVKKKSPAEEEAEKRRKKLTPGSLMKGIIRSGSGDATPAEGDQVILHCTTRTIDGIVVNSTRREHGGKGIPLRFVLGKSKMILGFAEGFPTMLKGEIAMFKMQPKIHYAEDDCPVATPDGFPKDDELQFEIEMLDFFKAKVVADDLGVVKKIVEEGKGWETPREPYEITARITARTADGKEIIPSKEEAYFFTIGKSEVPKGLEMGIGTMSHKEKAIIFVSSTYLTKSSLMPQLEGLEEVHFYIELVQFIQVRDMLGDGRLIKRRVFDGKGEFPMDCPLHDSLLRVHYKGMLLDEPKSVFYDTRADNDGEPLEFCSGEGLVPEGFEMCVRLMLPGEKSIVTCPPDFAYDKFPRPANVPEGAHVQWEIELLGFEMPKDWTGLTFEEIMDEADKIKNTTV

SEQ ID NO: 197597 - protein, 604 aa, Zea Mays
MAQDAGDGGGELPPPVKKKSPAEEEAEKRRKKLTPGSLMKGIIRSGSGDATPAEGDQVILHCTTRTIDGIVVNSTRREHGGKGIPLRFVLGKSKMILGFAEGFPTMLKGEIAMFKMQPKIHYAEDDCPVATPDGFPKDDELQFEIEMLDFFKAKVVADDLGVVKKIVEEGKGWETPREPYEITARITARTADGKEIIPSKEEAIIFVSSTYLTKSSLMPQLEGLEEVHFYIELVQFIQVRDMLGDGRLIKRRVFDGKGEFPMDCPLHDSLLRVHYKGMLLDEPKSVFYDTRADNDGEPLEFCSGEGLVPEGFEMCVRLMLPGEKSIVTCPPDFAYDKFPRPANVPEGAHVQWEIELLGFEMPKDWTGLTFEEIMDEADKIKNTGNRLFKEGKFELAKAKYDKVLREYNHVHPHDDEEGKIFANSRSSLHLNVAFCYQKMGEYRKSIETCNKVLDANPVHVKALYRRGTSFMLLGDFNDARNDFEKMITIDKSSEQDATAALLKLKQKEQEAEKKARKQFKGLFDKKPGEISEVGVESDGGKDAGDARVNGGEATSADRGVNTNDSPTSESEYAFEEERPGLLGSLWPSARMIFSSLGMNRCAIL

SEQ ID NO: 197598 - protein, 436 aa, Zea Mays
MEKKLFRVKKRHISSLLVPKGLEMGIGTMSHKEKAIIFVSSTYLTKSSLMPQLEGLEEVHFYIELVQFIQVRDMLGDGRLIKRRVFDGKGEFPMDCPLHDSLLRVHYKGMLLDEPKSVFYDTRADNDGEPLEFCSGEGLVPEGFEMCVRLMLPGEKSIVTCPPDFAYDKFPRPANVPEGAHVQWEIELLGFEMPKDWTGLTFEEIMDEADKIKNTGNRLFKEGKFELAKAKYDKVLREYNHVHPHDDEEGKIFANSRSSLHLNVAFCYQKMGEYRKSIETCNKVLDANPVHVKALYRRGTSFMLLGDFNDARNDFEKMITIDKSSEQDATAALLKLKQKEQEAEKKARKQFKGLFDKKPGEISEVGVESDGGKDAGDARVNGGEATSADRGVNTNDSPTSESEYAFEEERPGLLGSLWPSARMIFSSLGMNRCAIL

SEQ ID NO: 197599 - protein, 323 aa, Zea Mays
MSKDENSALKVIDFGLSDFVKPDGRLNDIVGSAYYVAPEVLHRSYGTEADMWSIGVIAYILLCGSRPFWARTESGIFRAVLKADPSFDEIPWPTLSAEAKDFVRRLLNKDYRKRMTAAQALCHPWIRGTQEVKIYLDMIIYRLMRAYISSSSLRKSALRALAKALTTDQLFYLREQFTLLDPNKSGHISLQNMKAALMKNSSGAMNDSRVLDFVNSICNIQYGNIDFEEFSAAAISVYQMEGLETWQQHAQQAYELFDREGNRPIVIEELASELGLGPSVPLHVVLQDWIRHSDGNLSFLGFIKLLHGVSSRTIPKVQDNRLH

SEQ ID NO: 197600 - protein, 226 aa, Zea Mays
MGLCYGKSAAVQEPAVAEENNKADGAAAGRGDGPPASPVKVPRTPKQPKLSFYLPSPLPPSSYKGSPANSSVASTPARGGFKRPFLPPSPAKHIRALLARRHGSVKPNEASISEGGEPDLGLDKSFGYSRHFAAKYDLGREVGRGHFGFTCAAKCKKGELKGEDVAVKVIPKAKMTTAIAIEDVRREVRILSSLADHNNLVQFHDAFEDEENVYVVMETAILVGHV

SEQ ID NO: 197601 - protein, 73 aa, Zea Mays
MADVSLPRSNQLPFLLLLQRTWPPRRFCSSTPASLVPAPSPISLASPLAHDVGRWALCPFFRVAGDMLVLTDG

SEQ ID NO: 197602 - protein, 83 aa, Zea Mays
MWMKKENEAKADAATLRSSIGSANSDAQKAPPSKWRTFFMRSRTPSMEPVVRNNIYDRGMITNLCEVVVPLSERKAFSRMKSD

SEQ ID NO: 197603 - protein, 171 aa, Zea Mays
MGEIVLTQQEDHHVWRHGTSVYYGIDNSFSGLFPHVAQWLLAVHNTQILLSVFLAILALLLGGFCAYHAHLCLTNTTTNETFKWQDYIMWMKKENEAKADAATLRSSIGSANSDAQKAPPSKWRTFFMRSRTPSMEPVVRNNIYDRGMITNLCEVVVPLSERKAFSRMKSD

SEQ ID NO: 197604 - protein, 186 aa, Zea Mays
MSIHRHFLICLYGALILGFILAGEIKERKIIYILTVYYGIDNSFSGLFPHVAQWLLAVHNTQILLSVFLAILALLLGGFCAYHAHLCLTNTTTNETFKWQDYIMWMKKENEAKADAATLRSSIGSANSDAQKAPPSKWRTFFMRSRTPSMEPVVRNNIYDRGMITNLCEVVVPLSERKAFSRMKSD

SEQ ID NO: 197605 - protein, 200 aa, Zea Mays
MNNCIGEKNIRYFVAFLVWHFLICLYGALILGFILAGEIKERKIIYILTVYYGIDNSFSGLFPHVAQWLLAVHNTQILLSVFLAILALLLGGFCAYHAHLCLTNTTTNETFKWQDYIMWMKKENEAKADAATLRSSIGSANSDAQKAPPSKWRTFFMRSRTPSMEPVVRNNIYDRGMITNLCEVVVPLSERKAFSRMKSD

SEQ ID NO: 197606 - protein, 124 aa, Zea Mays
MEVPWLLLVHGSVTALVVVSFLCGQWPIFEGTFIQSINHFLTFGAYHYLLRFVQSVCGTGARDLVLGVEGYCCDRPNPILQVFYVAIIGVTYFIIVQTSFQYIPGYYISECCGCFCWCYTLRAY

SEQ ID NO: 197607 - protein, 174 aa, Zea Mays
MEVPWLLLVHGSVTALVVVSFLCGQWPIFEGTFIQSINHFLTFGAYHYLLRFVQSVCGTGARDLVLGVEGYCCDRPNPILQVFYVAIIGVTYFIIVQTSFQYIPGYYVSGLHRYLSVVAVSVGAILFVLTSFSDPGTVTAENVSQYVSSYPYDNIIFVEKECSTCKITSQGKAL

SEQ ID NO: 197608 - protein, 234 aa, Zea Mays
MEVPWLLLVHGSVTALVVVSFLCGQWPIFEGTFIQSINHFLTFGAYHYLLRFVQSVCGTGARDLVLGVEGYCCDRPNPILQVFYVAIIGVTYFIIVQTSFQYIPGYYVSGLHRYLSVVAVSVGAILFVLTSFSDPGTVTAENVSQYVSSYPYDNIIFVEKECSTCKITRPARAKHCRICDKCVARFDHHCGWMNNCIGEKNIRYFVAFLVWTRTHGGPKNHMTKSSKTIKTIVA

SEQ ID NO: 197609 - protein, 211 aa, Zea Mays
MEVPWLLLVHGSVTALVVVSFLCGQWPIFEGTFIQSINHFLTFGAYHYLLRFVQSVCGTGARDLVLGVEGYCCDRPNPILQVFYVAIIGVTYFIIVQTSFQYIPGYYVSGLHRYLSVVAVSVGAILFVLTSFSDPGTVTAENVSQYVSSYPYDNIIFVEKECSTCKITRPARAKHCRICDKCVARFDHHCGWMNNCIGEKNIRYFVAFLVW

SEQ ID NO: 197610 - protein, 184 aa, Zea Mays
MEVPWLLLVHGSVTALVVVSFLCGQWPIFEGTFIQSINHFLTFGAYHYLLRFVQSVCGTGARDLVLGVEGYCCDRPNPILQVFYVAIIGVTYFIIVQTSFQYIPGYYVSGLHRYLSVVAVSVGAILFVLTSFSDPGTVTAENVSQYVSSYPYDNIIFVEKECSTCKITRIIALGRKIFGILWPF

SEQ ID NO: 197611 - protein, 279 aa, Zea Mays
MMILDTHSEVFVWMGQCVETKEKQKAFDIGQKYVQNAVAFEGISPDVPLYKVNEGNEPCFFRTFFSWDSTRSLVHGNSFEKKLSVLFGMRSEGGNKSSGDGGPTQRASALAALSSALNPSSQGKQSDERPTKPSSTQAQSHSGQGSQRAAAVAALSNVLTAEGSHSPRHSRSSPTADAEKTELAPASPHQLETGPAEDVRTEPDVSQEQTANENGGQTTFSYDRLVSKSTDPVSGIDHKRRETYLVDNEFETVFGMTKEEFYEQPRWKQELQKKKADLF

SEQ ID NO: 197612 - protein, 1844 aa, Zea Mays
MMLGLVQLLVGFVVAWEAVELVLRHGLLLSVFKLAILAALAAAAGCVAIIFFARAVAWVLQRAAKLSIGCRSYGFNYLRDITISSPKGAVESICIGEIRLGLRKPITQLGFTVLTHGPILQLQISDLDVVLRQPVKSTNKKKPAPRKPISTTTAKAKGKSKGQVKWRLITSMASLLSLSIVELRLKAPKAALGIKDLKTDISKTGGLDPVLNVQVNIIPLFVQALDSDSIGNNTLVFSKLDWWVSGQYCSAMDTSDHSSFLFEDISLSCDLHQRDKAIRVKNLDLMLGPIVVNLEEKLLAKKKPSASTVAEQKDEPSVDNKSAARSEGGKLASLNKKISMFPEKVSFNMSKLVLKFLPKDHGLSINNEIGSISLRCTRLQPQDFGEVTTHIRLETDVTEIHLLMDGATSVLEVVKVSTVVSANIPSQPALPVQAEVDIKISGFQCNLIVSRIKPLIRINSDKKKPLVLHENPQQKKAPKEKLALSLACTMSVPELTLVLHSLDDVPLYHCIFQSANVSASKMIDRGTQLHGKLGDLKFLVPSKHQQSMKEGASGTLLHISHSTLDLEQNDPGQDNDEDHAKSAISVNISGIRMHFCFSYLESLCATAMSYKVFMKSILPPKKRSVQENASQKSTKKAKRALLLKINVAQCSIVYDGEMRLEDMSIADPKRVNFGSQGGRVVIINEANGSPRMAYVNSTSLPDHKNVHFSTSLEIYQFGVSLNKAKHTMQVELENFRLTHKEDQLDNKPVEETKLFDVRKAKFVQRSGGLNDIAACSLINVTDIAVRWEPDPYLELLEVATRLKSVLHRMKLQNSVTEVKDETLNMDILSKKESPSDHGQQEKAQKKRESVIAIDLESLKISGELADGVEAMITVGYIFSENAKIGVLVEGISVSFCGAWILKSSRMQLSRIPISVSDSNSDKKLQSAAACDWVIQCRDVNICLPFRLQLRAIDDAVEDTLRAFKLISAAKTSVLFPEKKSSTTSSKKSKPKSTAFRYVRIIVRDLIAEIEEEPMQGWLDEHMILMKNVFCESTVRLNLLDELSSGKNKDSPKAKLDSSEKNSGCPDVDAYVPGTHSIEKLREEIYRQAFQSYYQACQKLPVSEGSGACSSGFQSGFKMSTRRASVMSVCAKDVDVSLSKIDGGDEGMISFIKSLDPVCDKDDIPFSRLYGSNFSLKTRSLSAYLRDYTFPLFSGTNGKCDGRLVLGQQATCFQPQARQDVYVGKWWRVNLLRSATGYTPPMKTYADIPLYFKKAEVSFGVGYEPVFADVSYAFTCALRRANLAKRWYFERPEPPRRERSLPWWDDMRNYIHGKFKLCFNETKWHLPASTSPYEKLDELLIITDFMEIHYVDGYVSLSSKYLRVYLTSLESLAKKSSLEIPHHPAIPFLETPSFFMDISIEWGCDSGNPMDHFIFALPAEGKPRDKVFDAFRSTSLSLKWSFSLKPYTTEPIEHQKKSNLNTTAPTVNVGVHDLAWLMKWWNLVFLPPHKLRLFSRFPRFGVPRFVRSGNLPLDRVMTEQCIRFDAMQLQINNMPLQADDPAKGLTLHFTKFRYEIAFSRGKQIFTFDCKREPLDLVYQGIDLHLLKVFINRIPESSTSMDSKIENKVLQTKDKDSLGCEKGKKKTSPTEKSRDDGFFLYSDYFTIRKQTPKADAARLSAWQEDGRKKTEMPLIKSEFDGGDESDHDQSGSDDEGFNVVVADSCQRVFVYGLKILWNLENRAAVLSWVGGLTQAFQPPKPSPSRQYTQTKILEKKQLIKEAEMSKDGALSSVSSTSQPSEPQQIKSSESPPSNGSGKPDLTSSSENALKRSNNSDSEEEGTRHFMVNVVQPQFNLHSEEANETEE

SEQ ID NO: 197613 - protein, 2549 aa, Zea Mays
MMLGLVQLLVGFVVAWEAVELVLRHGLLLSVFKLAILAALAAAAGCVAIIFFARAVAWVLQRAAKLSIGCRSYGFNYLRDITISSPKGAVESICIGEIRLGLRKPITQLGFTVLTHGPILQLQISDLDVVLRQPVKSTNKKKPAPRKPISTTTAKAKGKSKGQVKWRLITSMASLLSLSIVELRLKAPKAALGIKDLKTDISKTGGLDPVLNVQVNIIPLFVQALDSDSIGNNTLVFSKLDWWVSGQYCSAMDTSDHSSFLFEDISLSCDLHQRDKAIRVKNLDLMLGPIVVNLEEKLLAKKKPSASTVAEQKDEPSVDNKSAARSEGGKLASLNKKISMFPEKLLMDGATSVLEVVKVSTVVSANIPSQPALPVQAEVDIKISGFQCNLIVSRIKPLIRINSDKKKPLVLHENPQQKKAPKEKLALSLACTMSVPELTLVLHSLDDVPLYHCIFQSANVSASKMIDRGTQLHGKLGDLKFLVPSKHQQSMKEGASGTLLHISHSTLDLEQNDPGQDNDEDHAKSAISVNISGIRMHFCFSYLESLCATAMSYKVFMKSILPPKKRSVQENASQKSTKKAKRALLLKINVAQCSIVYDGEMRLEDMSIADPKRVNFGSQGGRVVIINEANGSPRMAYVNSTSLPDHKNVHFSTSLEIYQFGVSLNKAKHTMQVELENFRLTHKEDQLDNKPVEETKLFDVRKAKFVQRSGGLNDIAACSLINVTDIAVRWEPDPYLELLEVATRLKSVLHRMKLQNSVTEVKDETLNMDILSKKESPSDHGQQEKAQKKRESVIAIDLESLKISGELADGVEAMITVGYIFSENAKIGVLVEGISVSFCGAWILKSSRMQLSRIPISVSDSNSDKKLQSAAACDWVIQCRDVNICLPFRLQLRAIDDAVEDTLRAFKLISAAKTSVLFPEKKSSTTSSKKSKPKSTAFRYVRIIVRDLIAEIEEEPMQGWLDEHMILMKNVFCESTVRLNLLDELSSGKNKDSPKAKLDSSEKNSGCPDVDAYVPGTHSIEKLREEIYRQAFQSYYQACQKLPVSEGSGACSSGFQSGFKMSTRRASVMSVCAKDVDVSLSKIDGGDEGMISFIKSLDPVCDKDDIPFSRLYGSNFSLKTRSLSAYLRDYTFPLFSGTNGKCDGRLVLGQQATCFQPQARQDVYVGKWWRVNLLRSATGYTPPMKTYADIPLYFKKAEVSFGVGYEPVFADVSYAFTCALRRANLAKRWYFERPEPPRRERSLPWWDDMRNYIHGKFKLCFNETKWHLPASTSPYEKLDELLIITDFMEIHYVDGYVSLSSKYLRVYLTSLESLAKKSSLEIPHHPAIPFLETPSFFMDISIEWGCDSGNPMDHFIFALPAEGKPRDKVFDAFRSTSLSLKWSFSLKPYTTEPIEHQKKSNLNTTAPTVNVGVHDLAWLMKWWNLVFLPPHKLRLFSRFPRFGVPRFVRSGNLPLDRVMTEQCIRFDAMQLQINNMPLQADDPAKGLTLHFTKFRYEIAFSRGKQIFTFDCKREPLDLVYQGIDLHLLKVFINRIPESSTSMDSKIENKVLQTKDKDSLGCEKGKKKTSPTEKSRDDGFFLYSDYFTIRKQTPKADAARLSAWQEDGRKKTEMPLIKSEFDGGDESDHDQSGSDDEGFNVVVADSCQRVFVYGLKILWNLENRAAVLSWVGGLTQAFQPPKPSPSRQYTQTKILEKKQLIKEAEMSKDGALSSVSSTSQPSEPQQIKSSESPPSNGSGKPDLTSSSENALKRSNNSDSEEEGTRHFMVNVVQPQFNLHSEEANGRFLLAAGSGRVMVRSFHSIVQVGQEMFEKAIGSSNDATGGTGPEMTWSRVELSVMLEHVQAHVAPTDVDPGAGIQWLPKIHRRSSEVKRTGALLERVFMPCQMYFRYTRHKGGTPELKVKPLKELTFNSPDITAGMTSRQFQVMMDVLTNLLFARTPKKPKSNLSYPLDNDDDNIEEASDAVVPDGVEEVVLAKIGVEVKERARKLLLDDIRALSICGETSHGQSQSPKANDIAWIVTGSRLMLVKQLKKRLVNVRNGRKEAYSMLRTAMQKAAQLRLMEKEKNKSPSFAMRISVRIKKIVWSMLADGKSFSEAEINDMIFEFDRDYKDIGIAQLTTKLFVLKNGLANAKSDTVVSPWNPPAEWGKNAMLRVNAWQGAPTGGNPVIESFLVDIYPLKIYLTEAMYRMMWGYFFPGDEQQPQKRQELFKVSTTAGTRRKKNTSVAETNSPNNQSSKETTFAQKPELRRTSSFDRTWEETVAESVANELVSQMEGQTNTQYEPQDAAKDSKLLRPVRSTREDKKIVEPNELKQSRPQKMMDFRNIKISQVELQLTYEGLPFAVSDVRLLMDTFHREDFTGTWARLFSRVKKHIVWGVLKSVTGMQGKKFKAKSSSQKEPSTALISAADFNLSDSDGDEAGSSDQLPAFLKKPSDGAGDGFATSVKGLFSTQKKKAMAFVLKTMKGDADHDFHGERSENEIEFSPFARQLTITKTKKLIRRHTKKLNKSKVHKVTATELEVAELPPRAPGYNTDSSSDSSSAETSPKD

SEQ ID NO: 197614 - protein, 762 aa, Zea Mays
MDPRRAPPRGGGANGLSYSTLFNLEPLLNFRVPVPEDLARYENSSSNGSPSSEGQGSLLDQYNGVNDASHGLHRKRKRHLDGASDDDEADAYSNKITEEQYRAMLSEHVQKYRRSKFKEGAFSSDPPRVATPQLKHKNGGKKNMKRISDFSDDVALDGIEASHEYNGIECIKTHGGFNKLVATLDSTYLDMGDSTRYLVPEGYDKLASSLNLPVSSDIRVEEHFLKGMLDLRTLAAMLGTDQRFEASNRGGISEPLPQFESLKERVKVQEFSLQVTKDPFAIPEGSAGRIRRYIISEAGDLQVHYVRVMEKGDTYEIIERSLPKKQIVKKEPSVIMKEESEKTYKLWQSLATKSIPKHHKNFTALIKKRQVDAKRFSDSCQREVKLKVSRSLKLMRCAAVRTRKFVKDMQMFWKRVDKEQYELRKKEEKEAAEALKREEELREAKRQQHRLNFLLSQTELYSHFMQNKTGGSAPPDEEDVPDEEDPEEAQLKREALRAAQHAVSQQKMKTNAFDSEIVRLRQTSDSALPTDDSSSMDPSKIDLLHPSTMPETSSVQTPELFKGVLKEYQLKGLQWLVNCYEQGLNGILADEMGLGKTVQAMAFLSHLAEDKNIWGPFLVVAPASVVNNWAEELIRFCPDLKILPYWGPERMILRKNINPKRLYRRDASFHILITNYQILVNEEKLLRRVKWQYMVLDEAQAIKSSSSQRWKTLLSFNCRNRLLLTGTPIQNNMAELWALLHFIMPTLFDSHEQFNEWFSKGC

SEQ ID NO: 197615 - protein, 1198 aa, Zea Mays
MDPRRAPPRGGGANGLSYSTLFNLEPLLNFRVPVPEDLARYENSSSNGSPSSEGQGSLLDQYNGVNDASHGLHRKRKRHLDGASDDDEADAYSNKITEEQYRAMLSEHVQKYRRSKFKEGAFSSDPPRVATPQLKHKNGGKKNMKRISDFSDDVALDGIEASHEYNGIECIKTHGGFNKLVATLDSTYLDMGDSTRYLVPEGYDKLASSLNLPVSSDIRVEEHFLKGMLDLRTLAAMLGTDQRFEASNRGGISEPLPQFESLKERVKVQEFSLQVTKDPFAIPEGSAGRIRRYIISEAGDLQVHYVRVMEKGDTYEIIERSLPKKQIVKKEPSVIMKEESEKTYKLWQSLATKSIPKHHKNFTALIKKRQVDAKRFSDSCQREVKLKVSRSLKLMRCAAVRTRKFVKDMQMFWKRVDKEQYELRKKEEKEAAEALKREEELREAKRQQHRLNFLLSQTELYSHFMQNKTGGSAPPDEEDVPDEEDPEEAQLKREALRAAQHAVSQQKMKTNAFDSEIVRLRQTSDSALPTDDSSSMDPSKIDLLHPSTMPETSSVQTPELFKGVLKEYQLKGLQWLVNCYEQGLNGILADEMGLGKTVQAMAFLSHLAEDKNIWGPFLVVAPASVVNNWAEELIRFCPDLKILPYWGPERMILRKNINPKRLYRRDASFHILITNYQILVNEEKLLRRVKWQYMVLDEAQAIKSSSSQRWKTLLSFNCRNRLLLTGTPIQNNMAELWALLHFIMPTLFDSHEQFNEWFSKGIEGHAEHGGALNEHQLSRLHAILKPFMLRRVKIDVIAEMTKKKEEIVPCKLSSRQQVFYQAIKNKISLNELLAGSRGSLNDKKLLSLMNIVMQLRKVCNHPELFERNEGSSYFNFAEIPNSLLSPPFGELQDVHYAGKRNPIIFEIPKLVYEGIISNMENSGNICGFQNGYLNRLFNIFLPSNIYRSAIPEVSSSKESLLSSGAFGFTRLSNLCPVEASFLATASLFERLVFSVMQWNMNYTAEILDEFLDSEDTGIQSSHNDSTKVRAVARLLLSSTKVKPSLLRTKIGTGPIDGPYEALVLSHRDRLASNIRLLRSAYAFIPPARAPPINVWCADRNFAYKFTDEMYDPWAKKLFLGFARTSEFNGPRQPIAPHPLIQELNTDLPIIEPMLQLPYRIFGSSPPMSNFDPAKMLTCLMTGFWEAPHLGYATTTPSS

SEQ ID NO: 197616 - protein, 662 aa, Zea Mays
MGLGKTVQAMAFLSHLAEDKNIWGPFLVVAPASVVNNWAEELIRFCPDLKILPYWGPERMILRKNINPKRLYRRDASFHILITNYQILVNEEKLLRRVKWQYMVLDEAQAIKSSSSQRWKTLLSFNCRNRLLLTGTPIQNNMAELWALLHFIMPTLFDSHEQFNEWFSKGIEGHAEHGGALNEHQLSRLHAILKPFMLRRVKIDVIAEMTKKKEEIVPCKLSSRQQVFYQAIKNKISLNELLAGSRGSLNDKKLLSLMNIVMQLRKVCNHPELFERNEGSSYFNFAEIPNSLLSPPFGELQDVHYAGKRNPIIFEIPKLVYEGIISNMENSGNICGFQNGYLNRLFNIFLPSNIYRSAIPEVSSSKESLLSSGAFGFTRLSNLCPVEASFLATASLFERLVFSVMQWNMNYTAEILDEFLDSEDTGIQSSHNDSTKVRAVARLLLSSTKVKPSLLRTKIGTGPIDGPYEALVLSHRDRLASNIRLLRSAYAFIPPARAPPINVWCADRNFAYKFTDEMYDPWAKKLFLGFARTSEFNGPRQPIAPHPLIQELNTDLPIIEPMLQLPYRIFGSSPPMSNFDPAKMLTDSGKLHTLDMLLRRLRAEGHRVLLFAQMTKMLDILEDYMNFRKFKYFRLDGSSAISDRRDMVRDFQNRNDIFVFLL

SEQ ID NO: 197617 - protein, 899 aa, Zea Mays
MDPRRAPPRGGGANGLSYSTLFNLEPLLNFRVPVPEDLARYENSSSNGSPSSEGQGSLLDQYNGVNDASHGLHRKRKRHLDGASDDDEADAYSNKITEEQYRAMLSEHVQKYRRSKFKEGAFSSDPPRVATPQLKHKNGGKKNMKRISDFSDDVALDGIEASHEYNGIECIKTHGGFNKLVATLDSTYLDMGDSTRYLVPEGYDKLASSLNLPVSSDIRVEEHFLKGMLDLRTLAAMLGTDQRFEASNRGGISEPLPQFESLKERVKVQEFSLQVTKDPFAIPEGSAGRIRRYIISEAGDLQVHYVRVMEKGDTYEIIERSLPKKQIVKKEPSVIMKEESEKTYKLWQSLATKSIPKHHKNFTALIKKRQVDAKRFSDSCQREVKLKVSRSLKLMRCAAVRTRKFVKDMQMFWKRVDKEQYELRKKEEKEAAEALKREEELREAKRQQHRLNFLLSQTELYSHFMQNKTGGSAPPDEEDVPDEEDPEEAQLKREALRAAQHAVSQQKMKTNAFDSEIVRLRQTSDSALPTDDSSSMDPSKIDLLHPSTMPETSSVQTPELFKGVLKEYQLKGLQWLVNCYEQGLNGILADEMGLGKTVQAMAFLSHLAEDKNIWGPFLVVAPASVVNNWAEELIRFCPDLKILPYWGPERMILRKNINPKRLYRRDASFHILITNYQILVNEEKLLRRVKWQYMVLDEAQAIKSSSSQRWKTLLSFNCRNRLLLTGTPIQNNMAELWALLHFIMPTLFDSHEQFNEWFSKGIEGHAEHGGALNEHQLSRLHAILKPFMLRRVKIDVIAEMTKKKEEIVPCKLSSRQQVFYQAIKNKISLNELLAGSRGSLNDKKLLSLMNIVMQSAITPSCLSGMREALTSTLLKSQTHFFLPHLGNCKMYTMQAREIP

SEQ ID NO: 197618 - protein, 1220 aa, Zea Mays
MDPRRAPPRGGGANGLSYSTLFNLEPLLNFRVPVPEDLARYENSSSNGSPSSEGQGSLLDQYNGVNDASHGLHRKRKRHLDGASDDDEADAYSNKITEEQYRAMLSEHVQKYRRSKFKEGAFSSDPPRVATPQLKHKNGGKKNMKRISDFSDDVALDGIEASHEYNGIECIKTHGGFNKLVATLDSTYLDMGDSTRYLVPEGYDKLASSLNLPVSSDIRVEEHFLKGMLDLRTLAAMLGTDQRFEASNRGGISEPLPQFESLKERVKVQEFSLQVTKDPFAIPEGSAGRIRRYIISEAGDLQVHYVRVMEKGDTYEIIERSLPKKQIVKKEPSVIMKEESEKTYKLWQSLATKSIPKHHKNFTALIKKRQVDAKRFSDSCQREVKLKVSRSLKLMRCAAVRTRKFVKDMQMFWKRVDKEQYELRKKEEKEAAEALKREEELREAKRQQHRLNFLLSQTELYSHFMQNKTGGSAPPDEEDVPDEEDPEEAQLKREALRAAQHAVSQQKMKTNAFDSEIVRLRQTSDSALPTDDSSSMDPSKIDLLHPSTMPETSSVQTPELFKGVLKEYQLKGLQWLVNCYEQGLNGILADEMGLGKTVQAMAFLSHLAEDKNIWGPFLVVAPASVVNNWAEELIRFCPDLKILPYWGPERMILRKNINPKRLYRRDASFHILITNYQILVNEEKLLRRVKWQYMVLDEAQAIKSSSSQRWKTLLSFNCRNRLLLTGTPIQNNMAELWALLHFIMPTLFDSHEQFNEWFSKGIEGHAEHGGALNEHQLSRLHAILKPFMLRRVKIDVIAEMTKKKEEIVPCKLSSRQQVFYQAIKNKISLNELLAGSRGSLNDKKLLSLMNIVMQLRKVCNHPELFERNEGSSYFNFAEIPNSLLSPPFGELQDVHYAGKRNPIIFEIPKLVYEGIISNMENSGNICGFQNGYLNRLFNIFLPSNIYRSAIPEVSSSKESLLSSGAFGFTRLSNLCPVEASFLATASLFERLVFSVMQWNMNYTAEILDEFLDSEDTGIQSSHNDSTKVRAVARLLLSSTKVKPSLLRTKIGTGPIDGPYEALVLSHRDRLASNIRLLRSAYAFIPPARAPPINVWCADRNFAYKFTDEMYDPWAKKLFLGFARTSEFNGPRQPIAPHPLIQELNTDLPIIEPMLQLPYRIFGSSPPMSNFDPAKMLTDSGKLHTLDMLLRRLRAEGHRVLLFAQMTKMLDILEKIQVFQT

SEQ ID NO: 197619 - protein, 1108 aa, Zea Mays
MDPRRAPPRGGGANGLSYSTLFNLEPLLNFRVPVPEDLARYENSSSNGSPSSEGQGSLLDQYNGVNDASHGLHRKRKRHLDGASDDDEADAYSNKITEEQYRAMLSEHVQKYRRSKFKEGAFSSDPPRVATPQLKHKNGGKKNMKRISDFSDDVALDGIEASHEYNGIECIKTHGGFNKLVATLDSTYLDMGDSTRYLVPEGYDKLASSLNLPVSSDIRVEEHFLKGMLDLRTLAAMLGTDQRFEASNRGGISEPLPQFESLKERVKVQEFSLQVTKDPFAIPEGSAGRIRRYIISEAGDLQVHYVRVMEKGDTYEIIERSLPKKQIVKKEPSVIMKEESEKTYKLWQSLATKSIPKHHKNFTALIKKRQVDAKRFSDSCQREVKLKVSRSLKLMRCAAVRTRKFVKDMQMFWKRVDKEQYELRKKEEKEAAEALKREEELREAKRQQHRLNFLLSQTELYSHFMQNKTGGSAPPDEEDVPDEEDPEEAQLKREALRAAQHAVSQQKMKTNAFDSEIVRLRQTSDSALPTDDSSSMDPSKIDLLHPSTMPETSSVQTPELFKGVLKEYQLKGLQWLVNCYEQGLNGILADEMGLGKTVQAMAFLSHLAEDKNIWGPFLVVAPASVVNNWAEELIRFCPDLKILPYWGPERMILRKNINPKRLYRRDASFHILITNYQILVNEEKLLRRVKWQYMVLDEAQAIKSSSSQRWKTLLSFNCRNRLLLTGTPIQNNMAELWALLHFIMPTLFDSHEQFNEWFSKGIEGHAEHGGALNEHQLSRLHAILKPFMLRRVKIDVIAEMTKKKEEIVPCKLSSRQQVFYQAIKNKISLNELLAGSRGSLNDKKLLSLMNIVMQLRKVCNHPELFERNEGSSYFNFAEIPNSLLSPPFGELQDVHYAGKRNPIIFEIPKLVYEGIISNMENSGNICGFQNGYLNRLFNIFLPSNIYRSAIPEVSSSKESLLSSGAFGFTRLSNLCPVEASFLATASLFERLVFSVMQWNMNYTAEILDEFLDSEDTGIQSSHNDSTKVRAVARLLLSSTKVKPSLLRTKIGTGPIDGPYEALVLSHRDRLASNIRLLRSAYAFIPPARAPPVSPFVLSMWVSFVYCIA

SEQ ID NO: 197620 - protein, 712 aa, Zea Mays
MDPRRAPPRGGGANGLSYSTLFNLEPLLNFRVPVPEDLARYENSSSNGSPSSEGQGSLLDQYNGVNDASHGLHRKRKRHLDGASDDDEADAYSNKITEEQYRAMLSEHVQKYRRSKFKEGAFSSDPPRVATPQLKHKNGGKKNMKRISDFSDDVALDGIEASHEYNGIECIKTHGGFNKLVATLDSTYLDMGDSTRYLVPEGYDKLASSLNLPVSSDIRVEEHFLKGMLDLRTLAAMLGTDQRFEASNRGGISEPLPQFESLKERVKVQEFSLQVTKDPFAIPEGSAGRIRRYIISEAGDLQVHYVRVMEKGDTYEIIERSLPKKQIVKKEPSVIMKEESEKTYKLWQSLATKSIPKHHKNFTALIKKRQVDAKRFSDSCQREVKLKVSRSLKLMRCAAVRTRKFVKDMQMFWKRVDKEQYELRKKEEKEAAEALKREEELREAKRQQHRLNFLLSQTELYSHFMQNKTGGSAPPDEEDVPDEEDPEEAQLKREALRAAQHAVSQQKMKTNAFDSEIVRLRQTSDSALPTDDSSSMDPSKIDLLHPSTMPETSSVQTPELFKGVLKEYQLKGLQWLVNCYEQGLNGILADEMGLGKTVQAMAFLSHLAEDKNIWGPFLVVAPASVVNNWAEELIRFCPDLKILPYWGPERMILRKNINPKRLYRRDASFHILITNYQILVNEEKLLRRVKWQYMVLDEAQAIKSSSSDGRHY

SEQ ID NO: 197621 - protein, 122 aa, Zea Mays
MFVAARATLPRLPHHPSLLVLPAVAGDRDHGTHVVVLALLAMLLLQGVILMSTVEGLVWIMQEAPQVPHQEDQANWLEGSYQKCSGGLLISLESGNSLTFQLDKRGYKSPEDYPGTWNLMSQ

SEQ ID NO: 197622 - protein, 81 aa, Zea Mays
MLLLQGVILMSTVEGLVWIMQEAPQVPHQEDQANWLEGSYQKCSGGLLISLESGNSLTFQLDKRGYKSPEDYPGTWNLMSQ

SEQ ID NO: 197623 - protein, 150 aa, Zea Mays
MQDTQNDSLSLWYGQLATPVRRSKEMIFARSLLRCYRLGNFKRFFCMVAAEATDLQLRLVEPFLNEVRARALMYFNYSGYKLQHHPLEHLSGILMIEESELESLCGICGLEITRSEGTKAFVPKQTSFNLPTSMPQSNGIYVSREFERLI

SEQ ID NO: 197624 - protein, 282 aa, Zea Mays
MDRRGEASHRGRSSYRGRGWRGRGRGGGRPSPSPPSSTASPAALNPVPSLTPAVPVDDAAPIMGTCPDMCPARERAQRERLRDLAVLERVDGDPARTSLSLAVKKFCRTISSTNVLASDIRPLPVLQETMDYLLHLLDSSEHPFETIHDFIFDRTRSIRQDLSMQNIVNDQAVQIYEDAVTFHIRSHQRLSTSCQDSAASSLCYLNMEQLTKCLLSLYDMYHVLHKCDSHSKKEAEYYSFYVLLHLGCKIHKMIDSLSLWYGQLATPVRRSKEMIFARSLLS

SEQ ID NO: 197625 - protein, 318 aa, Zea Mays
MDRRGEASHRGRSSYRGRGWRGRGRGGGRPSPSPPSSTASPAALNPVPSLTPAVPVDDAAPIMGTCPDMCPARERAQRERLRDLAVLERVDGDPARTSLSLAVKKFCRTISSTNVLASDIRPLPVLQETMDYLLHLLDSSEHPFETIHDFIFDRTRSIRQDLSMQNIVNDQAVQIYEDAVTFHIRSHQRLSTSCQDSAASSLCYLNMEQLTKCLLSLYDMYHVLHKCDSHSKKEAEYYSFYVLLHLGCKIHKMIDSLSLWYGQLATPVRRSKEMIFARSLLRCYRLGNFKRFFCMVAAEATDLQLRLVEPFLNEVSPW

SEQ ID NO: 197626 - protein, 272 aa, Zea Mays
MDRRGEASHRGRSSYRGRGWRGRGRGGGRPSPSPPSSTASPAALNPVPSLTPAVPVDDAAPIMGTCPDMCPARERAQRERLRDLAVLERVDGDPARTSLSLAVKKFCRTISSTNVLASDIRPLPVLQETMDYLLHLLDSSEHPFETIHDFIFDRTRSIRQDLSMQNIVNDQAVQIYEDAVTFHIRSHQRLSTSCQDSAASSLCYLNMEQLTKCLLSLYDMYHVLHKCDSHSKKEAEYYSFYVLLHLGCKIHKMIHSLCGMVNWLLQSDGQRK

SEQ ID NO: 197627 - protein, 287 aa, Zea Mays
MDRRGEASHRGRSSYRGRGWRGRGRGGGRPSPSPPSSTASPAALNPVPSLTPAVPVDDAAPIMGTCPDMCPARERAQRERLRDLAVLERVDGDPARTSLSLAVKKFCRTISSTNVLASDIRPLPVLQETMDYLLHLLDSSEHPFETIHDFIFDRTRSIRQDLSMQNIVNDQAVQIYEDAVTFHIRSHQRLSTSCQDSAASSLCYLNMEQLTKCLLSLYDMYHVLHKCDSHSKKEAEYYSFYVLLHLGCKIHKMIDSLSLWYGQLATPVRRSKEMIFARSLLRSELEP

SEQ ID NO: 197628 - protein, 65 aa, Zea Mays
MAAAQQWLLFTCLPAVFEYGSLLVGLIICQVSSLPSHKFLLKCSSRTKKIKFILTWGNDQQPWLT

SEQ ID NO: 197629 - protein, 565 aa, Zea Mays
MAAVPEDLRCKRSDGKQWRCSAPSMPDKTVCEKHYVQAKKRSASSALRASLRRSSASSLAPVFPFSSSPSSAARLRAADEDPPMAVARPLYGRVAGEAVYVAEPVPAPARREVAYEGLPRGNAAGGRTAAGLVGRGPLWFPGGGSEGIRSCHQCRKAGGVIWCTSCDRRGYCARCISRWYSDIPMDEVRNVCPACRGICNCKVCLQGDNLIKARVQEISAVDKLRYLHCLLVYVLPVLKGIYSDQCFEIGVETRSSGPKTDVLRAKITSDEQMCCDFCKVPVFDYHRYCPRCSYDLCLDCCHDIRHSRANVARGEYTEGYVEDKGRDSFNRRARLEPSAESVNDKSLSWPIDINNIDIKSLFPTWRVNNDGSITCGPHEAGGCGSSKLVLRRIFKINWIAKLVKSSEEMVNGCKVHDLEDGCLSCSDGRRSEFTGQQNLGLSKCSNSDEIGRNCLYSPVLEDLKYEGIIHFRKHWKNAEPIIIREAFEPSLSSSWDPLSIWRGIQEIMDEEMDEDVIVKAVDCSNQSEISSSNSLSKATQMAAKEEMAHLLMLKLKEWPRPNGVS

SEQ ID NO: 197630 - protein, 529 aa, Zea Mays
MAAVPEDLRCKRSDGKQWRCSAPSMPDKTVCEKHYVQAKKRSASSALRASLRRSSASSLAPVFPFSSSPSSAARLRAADEDPPMAVARPLYGRVAGEAVYVAEPVPAPARREVAYEGLPRGNAAGGRTAAGLVGRGPLWFPGGGSEGIRSCHQCRKAGGVIWCTSCDRRGYCARCISRWYSDIPMDEVRNVCPACRGICNCKVCLQGDNLIKHSLTLLLIGPKTDVLRAKITSDEQMCCDFCKVPVFDYHRYCPRCSYDLCLDCCHDIRHSRANVARGEYTEGYVEDKGRDSFNRRARLEPSAESVNDKSLSWPIDINNIDIKSLFPTWRVNNDGSITCGPHEAGGCGSSKLVLRRIFKINWIAKLVKSSEEMVNGCKVHDLEDGCLSCSDGRRSEFTGQQNLGLSKCSNSDEIGRNCLYSPVLEDLKYEGIIHFRKHWKNAEPIIIREAFEPSLSSSWDPLSIWRGIQEIMDEEMDEDVIVKAVDCSNQSEISSSNSLSKATQMAAKEEMAHLLMLKLKEWPRPNGVS

SEQ ID NO: 197631 - protein, 532 aa, Zea Mays
MCCDFCKVPVFDYHRYCPRCSYDLCLDCCHDIRHSRANVARGEYTEGYVEDKGRDSFNRRARLEPSAESVNDKSLSWPIDINNIDIKSLFPTWRVNNDGSITCGPHEAGGCGSSKLVLRRIFKINWIAKLVKSSEEMVNGCKVHDLEDGCLSCSDGRRSEFTGQQNLGLSKCSNSDEIGRNCLYSPVLEDLKYEGIIHFRKHWKNAEPIIIREAFEPSLSSSWDPLSIWRGIQEIMDEEMDEDVIVKAVDCSNQSEVDIELKQFIKGYSDGSKGGDGPLVDAEIERVAPTQWGLLNLAAKLPPDALQPELGMKLLIAHGSHRELGKGDSMTNLMINMSDVVHMLMHATEVHYQCPKRVRVQSDVSEMIANGTSVHVNAHTPVQNLNLDIEEQSHKHSKSHIEEPNTNNSEGSLAGAVWDVFRRQDLPKLNEYLAAHREECAARCQAVSSVKYPIYDQTVYLNDYHKKMLKDQYGIEPFTFHQHIGEAVFIPAGCPFQLKNLQVMHLVVIFKLCHAQSFCSYFCKKWCLNFQP

SEQ ID NO: 197632 - protein, 676 aa, Zea Mays
MAAVPEDLRCKRSDGKQWRCSAPSMPDKTVCEKHYVQAKKRSASSALRASLRRSSASSLAPVFPFSSSPSSAARLRAADEDPPMAVARPLYGRVAGEAVYVAEPVPAPARREVAYEGLPRGNAAGGRTAAGLVGRGPLWFPGGGSEGIRSCHQCRKAGGVIWCTSCDRRGYCARCISRWYSDIPMDEVRNVCPACRGICNCKVCLQGDNLIKHSLTLLLIGPKTDVLRAKITSDEQMCCDFCKVPVFDYHRYCPRCSYDLCLDCCHDIRHSRANVARGEYTEGYVEDKGRDSFNRRARLEPSAESVNDKSLSWPIDINNIDIKSLFPTWRVNNDGSITCGPHEAGGCGSSKLVLRRIFKINWIAKLVKSSEEMVNGCKVHDLEDGCLSCSDGRRSEFTGQQNLGLSKCSNSDEIGRNCLYSPVLEDLKYEGIIHFRKHWKNAEPIIIREAFEPSLSSSWDPLSIWRGIQEIMDEEMDEDVIVKAVDCSNQSEVDIELKQFIKGYSDGSKGGDGPLVDAEIERVAPTQWGLLNLAAKLPPDALQPELGMKLLIAHGSHRELGKGDSMTNLMINMSDVVHMLMHATEVHYQCPKRVKYPIYDQTVYLNDYHKKMLKDQYGIEPFTFHQHIGEAVFIPAGCPFQLKNLQVMHLVVIFKLCHAQSFCSYFCKKWCLNFQP

SEQ ID NO: 197633 - protein, 605 aa, Zea Mays
MDEVRNVCPACRGICNCKVCLQGDNLIKARVQEISAVDKLRYLHCLLVYVLPVLKGIYSDQCFEIGVETRSSDVLRAKITSDEQMCCDFCKVPVFDYHRYCPRCSYDLCLDCCHDIRHSRANVARGEYTEGYVEDKGRDSFNRRARLEPSAESVNDKSLSWPIDINNIDIKSLFPTWRVNNDGSITCGPHEAGGCGSSKLVLRRIFKINWIAKLVKSSEEMVNGCKVHDLEDGCLSCSDGRRSEFTGQQNLGLSKCSNSDEIGRNCLYSPVLEDLKYEGIIHFRKHWKNAEPIIIREAFEPSLSSSWDPLSIWRGIQEIMDEEMDEDVIVKAVDCSNQSEVDIELKQFIKGYSDGSKGGDGPLVDAEIERVAPTQWGLLNLAAKLPPDALQPELGMKLLIAHGSHRELGKGDSMTNLMINMSDVVHMLMHATEVHYQCPKRVRVQSDVSEMIANGTSVHVNAHTPVQNLNLDIEEQSHKHSKSHIEEPNTNNSEGSLAGAVWDVFRRQDLPKLNEYLAAHREECAARCQAVSSVKYPIYDQTVYLNDYHKKMLKDQYGIEPFTFHQHIGEAVFIPAGCPFQLKNLQTKVRLVGELTRTERLYFSF

SEQ ID NO: 197634 - protein, 213 aa, Zea Mays
MSLCSLSGSKHHARTLKDEKSLTLSVSGCKSEIQQDSCKMCSAVERNQACSGIPLISTSQCPDVDGMLGRRENPGEHEAMRKMKNEFMVNWDGLRTREKERVLVLAATNRPFDLDEAVVRRLPRRLMVNLPDASNRRKILSVILAKEDLADDVDLETIANLTEGYSGSDLKNLCVTAAHRPIREILEKEKKELQLSFKWICSHAGESFSRSRK

SEQ ID NO: 197635 - protein, 851 aa, Zea Mays
MVETRRSAAAKRSAAVVEEEKGSLASPALEPAEDAPAGLGAGDDVASSQPPKRAKVGCTESDTAKPSVAPAAGAVAGPLPNTAGLQARTGAMDKLEAFLKSKEAQSNPAGHKQGTNDKDLSAKMKRVMDLSEDISEKIKRSKDRLAVLLNKPAAGTSRRQEPWCRLISQHSMHPTLSIYGAIFTIGHGAHHDFRLDESSTASSVCRLKQAKRGALLEIFESKVVRVNGKSLDKAAKVTLNGGDEIIFCSPVRHAYIFEQLHEEKSSTSVLSSTCTCSSIQLGQHSHFNDIQDHVSSKGRKASSFLFGRGRCSLLSCGLSADPLNICKTTEGRSQFISEDNISSGRCQLLKEDLINATVDVSDISESFDSCPYYLSEHTKHALMSAAFVHLHCKNYFKFTKDISSLSQRVLLSGPTGTDMYQEYLVKALAKYFGARLLTIDSSMLFGGQTSKESESYKKGDRVRYIGSGIILDGQSPPDFGSQGEIFLPFEENRSSKVGVRFDKKILGGNNLGGNCEVDHVDSLCPDIPGWEVTFKHPFDVIVEFISEEIRHGPLILFLKDTEKICGNNDSYHGLKSKLKHFPAGAFIIGSQIQPDNRKEKANVSSPFLSKFRYSQAILGLTLQDIDGGNDNNKETSKAIMKHLIKLFPNKVTLEAPQAEMELSRWNQMLNRDIEVLKGNANISKIRSFLTRLGLECTDPEAILVTDRILTNECIDKIIGFALSHQLKNCTNPDPPLGSVQFALSSGSLKHGVDMLKSIQSGSKSSTKRKSLKDIATENEFEKSLLADVTPPHEIGVTFEDIGALESVKDTLKELVMLPLQRPELFNRGQLMKPCKGILLFGPPGTGKTNAG

SEQ ID NO: 197636 - protein, 442 aa, Zea Mays
MLEKKKPCFDCALYEFSVYLLVLGTHLYFVVQGQTSKESESYKKGDRVRYIGSGIILDGQSPPDFGSQGEIFLPFEENRSSKVGVRFDKKILGGNNLGGNCEVDHGLFCSVDSLCPDIPGWEVTFKHPFDVIVEFISEEIRHGPLILFLKDTEKICGNNDSYHGLKSKLKHFPAGAFIIGSQIQPDNRKEKANVSSPFLSKFRYSQAILGLTLQDIDGGNDNNKETSKAIMKHLIKLFPNKVTLEAPQAEMELSRWNQMLNRDIEVLKGNANISKIRSFLTRLGLECTDPEAILVTDRILTNECIDKIIGFALSHQLKNCTNPDPPLGSVQFALSSGSLKHGVDMLKSIQSGSKSSTKRKSLKDIATENEFEKSLLADVTPPHEIGVTFEDIGALESVKDTLKELVMLPLQRPELFNRGQLMKPCKGILLFGPPGTGKTNAG

SEQ ID NO: 197637 - protein, 486 aa, Zea Mays
MQRLIEHTKHALMSAAFVHLHCKNYFKFTKDISSLSQRVLLSGPTGTDMYQEYLVKALAKYFGARLLTIDSSMLFGGQTSKESESYKKGDRVRYIGSGIILDGQSPPDFGSQGEIFLPFEENRSSKVGVRFDKKILGGNNLGGNCEVDHGLFCSVDSLCPDIPGWEVTFKHPFDVIVEFISEEIRHGPLILFLKDTEKICGNNDSYHGLKSKLKHFPAGAFIIGSQIQPDNRKEKANVSSPFLSKFRYSQAILGLTLQDIDGGNDNNKETSKAIMKHLIKLFPNKVTLEAPQAEMELSRWNQMLNRDIEVLKGNANISKIRSFLTRLGLECTDPEAILVTDRILTNECIDKIIGFALSHQLKNCTNPDPPLGSVQFALSSGSLKHGVDMLKSIQSGSKSSTKRKSLKDIATENEFEKSLLADVTPPHEIGVTFEDIGALESVKDTLKELVMLPLQRPELFNRGQLMKPCKGILLFGPPGTGKTNAG

SEQ ID NO: 197638 - protein, 831 aa, Zea Mays
MVETRRSAAAKRSAAVVEEEKGSLASPALEPAEDAPAGLGAGDDVASSQPPKRAKVGCTESDTAKPSVAPAAGAVAGPLPNTAGLQARTGAMDKLEAFLKSKEAQSNPAGHKQGTNDKDLSAKMKRVMDLSEDISEKIKRSKDRLAVLLNKPAAGTSRRQEPWCRLISQHSMHPTLSIYGAIFTIGHGAHHDFRLDESSTASSVCRLKQAKRGALLEIFESKVVRVNGKSLDKAAKVTLNGGDEIIFCSPVSSIQLGQHSHFNDIQDHVSSKGRKASSFLFGRGRCSLLSCGLSADPLNICKTTEGRSQFISEDNISSGRCQLLKEDLINATVDVSDISESFDSCPYYLSEHTKHALMSAAFVHLHCKNYFKFTKDISSLSQRVLLSGPTGTDMYQEYLVKALAKYFGARLLTIDSSMLFGGQTSKESESYKKGDRVRYIGSGIILDGQSPPDFGSQGEIFLPFEENRSSKVGVRFDKKILGGNNLGGNCEVDHGLFCSVDSLCPDIPGWEVTFKHPFDVIVEFISEEIRHGPLILFLKDTEKICGNNDSYHGLKSKLKHFPAGAFIIGSQIQPDNRKEKANVSSPFLSKFRYSQAILGLTLQDIDGGNDNNKETSKAIMKHLIKLFPNKVTLEAPQAEMELSRWNQMLNRDIEVLKGNANISKIRSFLTRLGLECTDPEAILVTDRILTNECIDKIIGFALSHQLKNCTNPDPPLGSVQFALSSGSLKHGVDMLKSIQSGSKSSTKRKSLKDIATENEFEKSLLADVTPPHEIGVTFEDIGALESVKDTLKELVMLPLQRPELFNRGQLMKPCKGILLFGPPGTGKTNAG

SEQ ID NO: 197639 - protein, 812 aa, Zea Mays
MVETRRSAAAKRSAAVVEEEKGSLASPALEPAEDAPAGLGAGDDVASSQPPKRAKVGCTESDTAKPSVAPAAGAVAGPLPNTAGLQARTGAMDKLEAFLKSKEAQSNPAGHKQGTNDKDLSAKMKRVMDLSEDISEKIKRSKDRLAVLLNKPAAGTSRRQEPWCRLISQHSMHPTLSIYGAIFTIGHGAHHDFRLDESSTASSVCRLKQAKIFEQLHEEKSSTSVLSSTCTCSSIQLGQHSHFNDIQDHVSSKGRKASSFLFGRGRCSLLSCGLSADPLNICKTTEGRSQFISEDNISSGRCQLLKEDLINATVDVSDISESFDSCPYYLSEHTKHALMSAAFVHLHCKNYFKFTKDISSLSQRVLLSGPTGTDMYQEYLVKALAKYFGARLLTIDSSMLFGGQTSKESESYKKGDRVRYIGSGIILDGQSPPDFGSQGEIFLPFEENRSSKVGVRFDKKILGGNNLGGNCEVDHGLFCSVDSLCPDIPGWEVTFKHPFDVIVEFISEEIRHGPLILFLKDTEKICGNNDSYHGLKSKLKHFPAGAFIIGSQIQPDNRKEKANVSSPFLSKFRYSQAILGLTLQDIDGGNDNNKETSKAIMKHLIKLFPNKVTLEAPQAEMELSRWNQMLNRDIEVLKGNANISKIRSFLTRLGLECTDPEAILVTDRILTNECIDKIIGFALSHQLKNCTNPDPPLGSVQFALSSGSLKHGVDMLKSIQSGSKSSTKRKSLKDIATENEFEKSLLADVTPPHEIGVTFEDIGALESVKDTLKELVMLPLQRPELFNRGQLMKPCKGILLFGPPGTGKTNAG

SEQ ID NO: 197640 - protein, 843 aa, Zea Mays
MVETRRSAAAKRSAAVVEEEKGSLASPALEPAEDAPAGLGAGDDVASSQPPKRAKVGCTESDTAKPSVAPAAGAVAGPLPNTAGLQARTGAMDKLEAFLKSKEAQSNPAGHKQGTNDKDLSAKMKRVMDLSEDISEKIKRSKDRLAVLLNKPAAGTSRRQEPWCRLISQHSMHPTLSIYGAIFTIGHGAHHDFRLDESSTASSVCRLKQAKRGALLEIFESKVVRVNGKSLDKAAKVTLNGGDEIIFCSPVRHAYIFEQLHEEKSSTSVLSSTCTCSSIQLGQHSHFNDIQDHVSSKGRKASSFLFGRGLSADPLNICKTTEGRSQFISEDNISSGRCQLLKEDLINATVDVSDISESFDSCPYYLSEHTKHALMSAAFVHLHCKNYFKFTKDISSLSQRVLLSGPTGTDMYQEYLVKALAKYFGARLLTIDSSMLFGGQTSKESESYKKGDRVRYIGSGIILDGQSPPDFGSQGEIFLPFEENRSSKVGVRFDKKILGGNNLGGNCEVDHVDSLCPDIPGWEVTFKHPFDVIVEFISEEIRHGPLILFLKDTEKICGNNDSYHGLKSKLKHFPAGAFIIGSQIQPDNRKEKANVSSPFLSKFRYSQAILGLTLQDIDGGNDNNKETSKAIMKHLIKLFPNKVTLEAPQAEMELSRWNQMLNRDIEVLKGNANISKIRSFLTRLGLECTDPEAILVTDRILTNECIDKIIGFALSHQLKNCTNPDPPLGSVQFALSSGSLKHGVDMLKSIQSGSKSSTKRKSLKDIATENEFEKSLLADVTPPHEIGVTFEDIGALESVKDTLKELVMLPLQRPELFNRGQLMKPCKGILLFGPPGTGKTNAG

SEQ ID NO: 197641 - protein, 89 aa, Zea Mays
MILDSKPAVGSTLIGGETGALERLKKFAAECSMQPNKADKSNTQDSIYGANFSCKISPWLATGCLSPRFMYEELKKHATRAISSESHPE

SEQ ID NO: 197642 - protein, 206 aa, Zea Mays
MATASDSDAGAQPRDDPSLLPFASFSFALSIRAPATPTLASVPSTIHLPTQISTLAVCLHPSAAQPLPRRPTRLNSATYSVISPLPSSTPGLSRSFPSGAPAASGRRRTLVWFRADLRLHDHEPFHAAAGASSSLLPVFVFDPRDFGKSPSGFDRTGPYRANFLLDSVADLRRVRSRGGITGRSPHRGEGAKGCGEGGYQREVLLG

SEQ ID NO: 197643 - protein, 201 aa, Zea Mays
MKFLREQAALSAAEITADAVNNFVADLEDESDSELSLPSTKNEDSKFNWEKILSSDKLFFVNKSSDGFLPVNNVHTKVNGKQNKTVKDLGIKINGHSTIRGDSFSELMHPGNSTCKEVFPGLDHWKSGKISGWHNTEGNSVQWLCIACVDRKGMMAEVTSALTACGITIWSCVAEVNKRRGMGVMLFHFEGSYENVCVFKC

SEQ ID NO: 197644 - protein, 259 aa, Zea Mays
MFLAMTEEVRVIIVKLADRLHNMRTLTHMPQHKQYAIAMETLQVFAPLAKLLGMYRIKSELEYLSFMYVNPTGFAELRKRVEDLYKAHEQELEEANRILRQKIADDQFLDLVSVETKVRSVYKELYSIYKTTLKSKSSINEVNQVAQLRIIIKPKSCNGVGPLCTAQQICYHVLGLVHGIWTPVPQAVEDYIATPKPNGYQSLHTTVIPFLNESMFHLEVQIRTEDMDLIAERGIAAHYSGRGVVSGPVRPGISSGRNA

SEQ ID NO: 197645 - protein, 107 aa, Zea Mays
MQTPPPTVPVECVSSCRSASWKGGGRPYECSVLLCAWNAPRALTGALASTAQCSSCGHAEAGSSWRRRGRSSRSNNSVRCHCSLAVSVIQAIISICFWCFAYLIQLS

SEQ ID NO: 197646 - protein, 828 aa, Zea Mays
MDREILAVDSEFNQVLQSDTCRLYQLQSHTCSQGHPLNRFTWGNKKSLVDAMGSGINLREEILEMYMRNYHGGAMRLVIIGGEPLDILEGWTMELFSKVKTGPLLDIGPKTDIPFWKPGKLYKLEAVRDLHSLFLSWTLPCLHKEYMKKPEDYLAHLLGHEGKGSLLYFLKAKGWASSLSAGVGSGGSQRSSYAYIFEMSICLTDSGLKNVFEVIGAVYQYIKLLKQSEPQEWIFKELQDIGYMEFRFAEEQPPDDYVVDLAENMLFYSEKHIVCGEYIFEDWDSELVKHALSFFNPDNMRVDVLSKSFDKQSQAIQCEPWFGSHYIEEDIPSSLIESWKNPVQVDDNLHLPRKNEFIPGDFTLRNANSPGSSSDDNPRCIVDEPFIKLWYKMDMTFNVPRANTYFLIYVKDGYSSLENSVLIDLFANLLKDELNEVLYQAYVAKLETSTSVVASKLEIKLYGYNDKLPILLSNILSTVRSFSPKTDRFEVIKEDLERAYKNTNMKPMSHSTYLRLQVLREIFWDVDKKLELLMKLTFTDLVAFVPKILSQLHIEGLCHGNLSEDETINISKIFLNTLSAQTLPEEARHEERVICIPNGANLVRSVRVKNDLEENSVVEVYFPIEQDVGKEATRLRAITDLFSNIIEEPCFDQLRTKEQLGYTVDSSPRMTYRMLAYCFRVMSSKYSPIYLQSRIDNFIDGLSALLDELNEETFEHHRSGLIADKLEKEPSLSYQTSDYWSQIADKRYMFDMSKLEAEELKTVQKADVIAWYNTYIRSSSPKRRRLAIHVYGCNSDIAEAAKLQEQSWTIIDDVESLKASSQFYSSLC

SEQ ID NO: 197647 - protein, 129 aa, Zea Mays
MEQQAQLRDALNDALKQELERLKLVTGEMTNSSETYNMRFQHIPYNSSFFPLSQQNASPHPGTTQLPPPFHPPHPNVPNHQMLSHPNTLPDIMQQESLGRLQGLDIGKGPLVVKSESSSISASESSSTF

SEQ ID NO: 197648 - protein, 624 aa, Zea Mays
MMRGQAWLALLVVVALALADAAAGRFVVEKNSLEVTSPDELKGKYECAIGNFGVPQYGGTLHGWVEYPKSNRKACQSFDQFDISFKPKQAGGRPIFVLVDRGECFFTTKAWNAQNAGAAAVLVVDDKSEPLITMDNPEEGKEHLENITIPSVLITKKLGENLKKSAENGDMLSVLLDWRESLPHPDERVEYEFWTNSNDECGPKCDMQMDFVRSFRGTAQILEKKGYTQFTPHYITWYCPEAFVDSKQCKSQCINHGRYCAPDPDQDFSQGYDGRNVVVQNLHQICVFKIANETGKPWLWWDYVHDFALRCPMKDKKYNNDCAHDVIKSLGLDIENINKCVGDPEADVENEILKAEQDAQIGHGKRGDVTILPTLVINNKQYRVAVLKAICSGFEETTEPAICLSEEIQTNECLENNGGCWLDKANNVTACKDTFRGRVCECPIVRGVKFVGDGYTHCEASGVGRCEISNGGCWQETKDGKTISACSNEISEGCKCPMGFKGDGEKSCEDIDECQEKLYCQCKGCSCKNTWGSYECSCGDDNMLYMREHDTCISKEGTATTVGWSFLWVIFFGLVFAGVGAYAVYKYRLRSYMDSEIRAIMAQYMPLDNQEGANQHQVVHANDI

SEQ ID NO: 197649 - protein, 389 aa, Zea Mays
MMRGQAWLALLVVVALALADAAAGRFVVEKNSLEVTSPDELKGKYECAIGNFGVPQYGGTLHGWVEYPKSNRKACQSFDQFDISFKPKQAGGRPIFVLVDRGECFFTTKAWNAQNAGAAAVLVVDDKSEPLITMDNPEEGKEHLENITIPSVLITKKLGENLKKSAENGDMLSVLLDWRESLPHPDERVEYEFWTNSNDECGPKCDMQMDFVRSFRGTAQILEKKGYTQFTPHYITWYCPEAFVDSKQCKSQCINHGRYCAPDPDQDFSQGYDGRNVVVQNLHQICVFKIANETGKPWLWWDYVHDFALRCPMKDKKYNNDCAHDVIKSLGLDIENINKCVGDPEADVENEILKAEQDAQIGHGKRGDVTILPTLVINNKQYRGQPTIL

SEQ ID NO: 197650 - protein, 614 aa, Zea Mays
MMRGQAWLALLVVVALALADAAAGRFVVEKNSLEVTSPDELKGKYECAIGNFGVPQYGGTLHGWVEYPKSNRKACQSFDQFDISFKPKQAGGRPIFVLVDRGECFFTTKAWNAQNAGAAAVLVVDDKSEPLITMDNPEEGKEHLENLKKSAENGDMLSVLLDWRESLPHPDERVEYEFWTNSNDECGPKCDMQMDFVRSFRGTAQILEKKGYTQFTPHYITWYCPEAFVDSKQCKSQCINHGRYCAPDPDQDFSQGYDGRNVVVQNLHQICVFKIANETGKPWLWWDYVHDFALRCPMKDKKYNNDCAHDVIKSLGLDIENINKCVGDPEADVENEILKAEQDAQIGHGKRGDVTILPTLVINNKQYRGKLDKVAVLKAICSGFEETTEPAICLSEEIQTNECLENNGGCWLDKANNVTACKDTFRGRVCECPIVRGVKFVGDGYTHCEASGVGRCEISNGGCWQETKDGKTISACSNEISEGCKCPMGFKGDGEKSCEDIDECQEKLYCQCKGCSCKNTWGSYECSCGDDNMLYMREHDTCISKEGTATTVGWSFLWVIFFGLVFAGVGAYAVYKYRLRSYMDSEIRAIMAQYMPLDNQEGANQHQVVHANDI

SEQ ID NO: 197651 - protein, 746 aa, Zea Mays
MTTGDPLLLSSSGSADSPSKPARPSVGSLGCLCATDSFSSSLYEDCETASVTLTDEREAQPRHLRELSDVSRVAERFQSADSQFFHRLSVECSQKERQRKVSWGGAMERQHSPSSLEIGMVSSSHEKPNRSQRIRNKSSQFEDPSEQEPRKIYINDPNKTNDRYEFTGNEIRTSKYTLITFLPKNLFIQFHRLAYVYFLVIAALNQLPPLAVFGRTASLFPLLFVLFVTAIKDGYEDWRRHRSDRNENNREALVLQHGDFRSKKWKNICAGEVVKIHANETMPCDMVLLGTSDPNGIAYIQTMNLDGESNLKTRYARQETTSMIYDDTYSGLIECELPNRNIYEFTATMKLDSQRVPLGQSNIVLRGCQLKNTEWVIGVVVYAGQETKAMLNSTISPSKSSNLESYMNRETLWLSAFLLITCSVVATGMGVWLFKNSKNLDALPYYRRKYFTFGRENRKDFKFYGIALEIFFSFLSSVIIFQIMIPISLYITMELVRVGQSYFMIGDTRMYDSNSGSRFQCRSLNINEDLGQIRYIFSDKTGTLTQNKMEFQQASIYGKNYGSSLQVTSDFSHEISTAESLRQSVRKPKVNVDLALTELLNQPLIGEERLSAHDFFLTLAACNTVIPVNTEGSHDLTNEVDEIGAIDYQGESPDEQALVIAASAYGYTLVERTTGHIVIDVLGERLRLDVLGLHEFDSVRKRMSVIVRFPDNNVKVLVKVNGRKCTKKLVPPCMRDQQSSVKQQVW

SEQ ID NO: 197652 - protein, 1015 aa, Zea Mays
MTTGDPLLLSSSGSADSPSKPARPSVGSLGCLCATDSFSSSLYEDCETASVTLTDEREAQPRHLRELSDVSRVAERFQSADSQFFHRLSVECSQKERQRKVSWGGAMERQHSPSSLEIGMVSSSHEKPNRSQRIRNKSSQFEDPSEQEPRKIYINDPNKTNDRYEFTGNEIRTSKYTLITFLPKNLFIQFHRLAYVYFLVIAALNQLPPLAVFGRTASLFPLLFVLFVTAIKDGYEDWRRHRSDRNENNREALVLQHGDFRSKKWKNICAGEVVKIHANETMPCDMVLLGTSDPNGIAYIQTMNLDGESNLKTRYARQETTSMIYDDTYSGLIECELPNRNIYEFTATMKLDSQRVPLGQSNIVLRGCQLKNTEWVIGVVVYAGQETKAMLNSTISPSKSSNLESYMNRETLWLSAFLLITCSVVATGMGVWLFKNSKNLDALPYYRRKYFTFGRENRKDFKFYGIALEIFFSFLSSVIIFQIMIPISLYITMELVRVGQSYFMIGDTRMYDSNSGSRFQCRSLNINEDLGQIRYIFSDKTGTLTQNKMEFQQASIYGKNYGSSLQVTSDFSHEISTAESLRQSVRKPKVNVDLALTELLNQPLIGEERLSAHDFFLTLAACNTVIPVNTEGSHDLTNEVDEIGAIDYQGESPDEQALVIAASAYGYTLVERTTGHIVIDVLGERLRLDVLGLHEFDSVRKRMSVIVRFPDNNVKVLVKGADTSMLNILKVEIDDELYDSLHVKIREATENHLSAYSSEGLRTLVIGSKNLTDAEFSEWQEMYEEASTSMHERSAKLRQAAGLVECNLTLLGATGIEDKLQDGVPEAIDSLRQAGIKVWVLTGDKQETAISIGLSCRLLTQTMHLIIINGSSEVECRRLLAEAKAKFGIKSADFGRDLQGTEDMYHGDISKLRPSNGHLSETGAQSLELTGVIGGDKSEYSENVTNFDGTELALIIDGSSLVYILEKPLESELFDLATSCKVVICCRVAPLQKAGIVDLIKSRTSDMTLAIGDDG

SEQ ID NO: 197653 - protein, 210 aa, Zea Mays
MTSELRSLEGARVSKIHVVLQWAVALVEVKPSLLSGEAEKFLFEDIYQVGDVVLVANESVIDNEHKLVGLHSLVGYNVVTSRRRNVGKVRGFTFDISSGAMESLELDSFGLSIVPSSLVSTYCLFVEDVLDIVSDTVVVHEDAVSRVQRLTQGILGTQNIHGPGGEIDEYGRFGGRGRRRRANGQGKSGGRELRSEPKHPDDEWELPMDY

SEQ ID NO: 197654 - protein, 308 aa, Zea Mays
MCSCACARLLPPLFSPAPSPNLRPAFPHSPTPARSRAVVALAGAASRDDAPAPLSSFDFLALKRELDEEEEAVVAVDAKEGAGAVNEDDGELGAEWSAGGTRRRRRRQMARRSALLAKQWAVALVEVKPSLLSGEAEKFLFEDIYQVGDVVLVANESVIDNEHKLVGLHSLVGYNVVTSRRRNVGKVRGFTFDISSGAMESLELDSFGLSIVPSSLVSTYCLFVEDVLDIVSDTVVVHEDAVSRVQRLTQGILGTQNIHGPGGEIDEYGRFGGRGRRRRANGQGKSGGRELRSEPKHPDDEWELPMDY

SEQ ID NO: 197655 - protein, 278 aa, Zea Mays
MCSCACARLLPPLFSPAPSPNLRPAFPHSPTPARSRAVVALAGAASRDDAPAPLSSFDFLALKRELDEEEEAVVAVDAKEGAGAVNEDDGELGAEWSAGGTRRRRRRQMARRSALLAKQVISVTSARSLGFVSQLWIDTASVGYNVVTSRRRNVGKVRGFTFDISSGAMESLELDSFGLSIVPSSLVSTYCLFVEDVLDIVSDTVVVHEDAVSRVQRLTQGILGTQNIHGPGGEIDEYGRFGGRGRRRRANGQGKSGGRELRSEPKHPDDEWELPMDY

SEQ ID NO: 197656 - protein, 283 aa, Zea Mays
MCSCACARLLPPLFSPAPSPNLRPAFPHSPTPARSRAVVALAGAASRDDAPAPLSSFDFLALKRELDEEEEAVVAVDAKEGAGAVNEDDGELGAEWSAGGTRRRRRRQMARRSALLAKQWAVALVEVKPSLLSGEAEKFLFEDIYQVGYNVVTSRRRNVGKVRGFTFDISSGAMESLELDSFGLSIVPSSLVSTYCLFVEDVLDIVSDTVVVHEDAVSRVQRLTQGILGTQNIHGPGGEIDEYGRFGGRGRRRRANGQGKSGGRELRSEPKHPDDEWELPMDY

SEQ ID NO: 197657 - protein, 822 aa, Zea Mays
MTSCWTAARRGRATTRTAGSGPGTRAPSSPRPTTSPPWPPPLARIPRSRSNHDAADGLFSVSVAVPGGKLTLLSNFSAYQTAAAITYSYLIREFSVNVSSATLDLTFTPEKGHPNAYAFVNGIEVVSSPDLFDISTPNMVTGDGNLQPFPIDAGTAVQTMYRLNVGGQAISPSKDTGGYRSWDDDTAYIFGAGFGVSYPKDNNVTITYPSNVPEYVAPEDVYGTARSMGPDKNVNMNYNLTWMLQVDAGFMYLIRLHFCEIQYPITKINQRVFSIYINNQTAVKDADVNAWATMSGATTLIGTPVYQDYVVTTSGLGAMDLWIALHPNPDSKPQIYDAILNGMEVFKLPLTNGSLAGLNPIPSVAPMTGGTAKKKSTVGPIVGGVIGGLVVLALGYCCFFVICKRKRSAGKDAGMSDGHSGWLPLSLYGNSHTSSSAKSHTTGSYASSLPSNLCRHFSFAEIKAATNNFDESLILGVGGFGKVYRGEVDGGTTKVAIKRGNPLSEQGVHEFQTEIEMLSKLRHRHLVSLIGYCEEKNEMILVYDYMAHGTLREHLYKTQKPPLTWRQRLDICIGAARGLHYLHTGAKHTIIHRDVKTTNILLDEKWVAKVSDFGLSKTGPSMDHTHVSTVVKGSFGYLDPEYFRRQQLTEKSDVYSFGVVLFEVLCARPALNPTLPKEEVSLAEWALHCQKKGVLDQIVDPYLKGKIAPQCFKKFAETAEKCVSDQSIDRPSMGDVLWNLEFALQMQESAEESGSLGCGMSDEGTPLVMVGKKDPNDPSIESSTTTTTTTSLSMGDQSVASMDSDGLTPSAVFSQIMNPKGR

SEQ ID NO: 197658 - protein, 351 aa, Zea Mays
MAERLTRIAIVSEDKCKPKKCRQECKKSCPVVKTGKLCIEVTSASKLAFISEELCIGCGICVKKCPFDAIEIINLPKDLEKDTTHRYGPNTFKLHRLPVPRPGQVLGLVGTNGIGKSTALKVLAGKLKPNLGRFKNPPDWQEILTYFRGSELQNYFTRILEDNLKAIIKPQYVDHIPKAVQGNVGQVLEQKDERDMKAELCVDLELNQVIDRNVGDLSGGELQRFAIAVVAVQNAEIYMFDEPSSYLDVKQRLKAAQVIRSLLRPNSYVIVVEHDLSVLDYLSDFICCLYGKPGAYGVVTLPFSVREGINIFLAGFVPTENLRFRDESLTFKRLKKVLRRLRHISGISTLL

SEQ ID NO: 197659 - protein, 568 aa, Zea Mays
MAERLTRIAIVSEDKCKPKKCRQECKKSCPVVKTGKLCIEVTSASKLAFISEELCIGCGICVKKCPFDAIEIINLPKDLEKDTTHRYGPNTFKLHRLPVPRPGQVLGLVGTNGIGKSTALKVLAGKLKPNLGRFKNPPDWQEILTYFRGSELQNYFTRILEDNLKAIIKPQYVDHIPKAVQGNVGQVLEQKDERDMKAELCVDLELNQVIDRNVGDLSGGELQRFAIAVVAVQNAEIYMFDEPSSYLDVKQRLKAAQVIRSLLRPNSYVIVVEHDLSVLDYLSDFICCLYGKPGAYGVVTLPFSVREGINIFLAGFVPTENLRFRDESLTFKIAETQESAEEIETYQRYKYPTMSKTQGNFKLTVVEGEFTDSQIVVMLGENGTGKTTFIRMLAGLLKPDTVEGTDIEIPEFNVSYKPQKISPKFKNTVRHLLHQKIRDSYMHPQFVSDVMKPLQIEQLMDQEVVNLSGGELQRVAICLCLGKPADIYLIDEPSAYLDSEQRIVASKVIKRFILHAKKTAFIVEHDFIMATYLADKVIVYEGRPSIDCSANAPQSLVSGMNKFLSVSA

SEQ ID NO: 197660 - protein, 579 aa, Zea Mays
MDAYEATKVVFSRIQALDPDHAAKIMGLLLIQDHGEKEMIRLAFGPESLLHAVMAKARKDLGLLLPASPTSVAAAGHAPFLQLPRQNSGRAGAPSPLSVSSPSSWGHAPAFSRSNSTSNGTGTAEEAAGAGEELPSPVNGGAAPFFPHQSGDALLDDLQLQEQLAFLNEGSANPAHQLPGFVGGECRSPGPGDASGMFAFGLGWPNGGPAHRRSSSVNEFCLGGGGGGDGFGWKPCLYYARGFCKNGGSCRFVHGGLSDDAAAFAGAKMEAAADQQQQQQCQDFLIRSKSQRLGSAAFPYSSTGSLPGSPSAASKCLSFLLQQQQQQHDRAAAAASLMLGGGDEAHKFMGRPRLDRADFANMMNPGSRQIYLTFPADSTFREEDVSNYFSIYGPVHDVRIPYQQKRMFGFVTFVYPETVKLILAKGNPHFICDARVLVKPYKEKGKVPDKCRKPQQGDFSGCTTPTGGLDGGYPFDLHQLGGRMLQHSSSANELLLRRKLEEQQQAIELQSRRLMGLQLLDLKARAAAAAASPLPTPIGDAFASSQPVSTTAVESPSPPESAAAQAEERICSGGEGQRW

SEQ ID NO: 197661 - protein, 330 aa, Zea Mays
MDAYEATKVVFSRIQALDPDHAAKIMGLLLIQDHGEKEMIRLAFGPESLLHAVMAKARKDLGLLLPASPTSVAAAGHAPFLQLPRQNSGRAGAPSPLSVSSPSSWGHAPAFSRSNSTSNGTGTAEEAAGAGEELPSPVNGGAAPFFPHQSGDALLDDLQLQEQLAFLNEGSANPAHQLPGFVGGECRSPGPGDASGMFAFGLGWPNGGPAHRRSSSVNEFCLGGGGGGDGFGWKPCLYYARGFCKNGGSCRFVHGGLSDDAAAFAGAKMEAAADQQQQQQCQDFLIRSKSQRLGSAAFPYSSTGSLPGSPSAASKCLSFLLQQQQQQHDR

SEQ ID NO: 197662 - protein, 1160 aa, Zea Mays
MQDAQGSLDRRGVFSLDTPSPSVCLLIQLEKAATEEGGVTPSVYSRKEPVHLAEKEKQKLQVWSRIMPCKESFAWAMIPLFEGNHAGGLSDAASPSSPLATSLPGSTSQDSIVDPILKLTLDGKVNHYSSGSSVIVEISNLNKVKESYIVDSLQDPKRKVHKPVKGVLRLEVEKLHGGHNDVDNTSEGGSMANDLNDAGDINNGRSNRSSFDGIHSFVNSIAIAQKDAHHNGIISNAENGDNFEAFDFRMLTRSEPFSQLFHCLYVYPLTVSLSRKRNLFVRVELRKDDSDIRKPPLEAVHPRERNMMLQKWGHTQIAVGTRMASYHDEVKISLPALLTPQHHLVFTFFHVDLQMKLEAPKPVIVGHSVLPLSTHIQLLSDVSLPILRELVPHYLQGSGKERMDYLEDGKTVFKLRLRLCSSLFPVNERIRDFFVEYDRHTLHTSPPWGSELLEAINSLKNVESTALLQFLQPILNMLLHLIGDGGETLQVAAFRAMVNILTRVQQESSDGAERNRFLINYVDFAFDDFGGRQAPVYPGLSTVWGSLARSKAKGYRVGPVYDDVLAMAWFFLELIVKSMGLEQSRLFYHNLPLGEDVPPLQLKEGVFSTLAFFCYDLLSIIEPRQVFELVSLYMDKFAGVCQAVLHDCKLTFLQIICDHDLFVEMPGRDPSDRNYLSSVLIQEIFLTLDHDDLSQRAKAARILVVLICKHEFDARYQKSEDKLYIAQLYFSLIGQILDEMPVFYNLNAIEKREVLVVILQIVRNLDDATLIKAWQQSIARTRLFFKLLEECITHFEHNKTGGSMLLGASSRSPDVERPAPPKYSERLSPSVNAYLSEASRHEIRPQGTPENGYMWNRVSPQLSSPNQPYSLREALAQAQSSRIGSTARALRESLHPVLRQKLELWEENLSTAVSLEVLRITEKFSAAAGTRSITTDYAKLDCVTSIVMGLLSRSQPLAFWKAFLPVVYNIFNLHGATLMARENDRFLKQIAFHLLRLAVFRNDSIRKRAVVGLQILVRNAFNYFKNTTRLRVMLTITLSELLSDVQVTQMKSDGSLEESGEARRLRKSLEEMADVRSKDLLKDCGLPVTALEAAPDGSSDNMWSWAEVKHLSKCLVQALDAGLEHALLDSVVTVDSICVMHTRRCNHGLKQHNVQLLQLA

SEQ ID NO: 197663 - protein, 1562 aa, Zea Mays
MPCKESFAWAMIPLFEGNHAGGLSDAASPSSPLATSLPGSTSQDSIVDPILKLTLDGKVNHYSSGSSVIVEISNLNKVKESYIVDSLQDPKRKVHKPVKGVLRLEVEKLHGGHNDVDNTSEGGSMANDLNDAGDINNGRSNRSSFDGIHSFVNSIAIAQKDAHHNGIISNAENGDNFEAFDFRMLTRSEPFSQLFHCLYVYPLTVSLSRKRNLFVRVELRKDDSDIRKPPLEAVHPRERNMMLQKWGHTQIAVGTRMASYHDEVKISLPALLTPQHHLVFTFFHVDLQMKLEAPKPVIVGHSVLPLSTHIQLLSDVSLPILRELVPHYLQGSGKERMDYLEDGKTVFKLRLRLCSSLFPVNERIRDFFVEYDRHTLHTSPPWGSELLEAINSLKNVESTALLQFLQPILNMLLHLIGDGGETLQVAAFRAMVNILTRVQQESSDGAERNRFLINYVDFAFDDFGGRQAPVYPGLSTVWGSLARSKAKGYRVGPVYDDVLAMAWFFLELIVKSMGLEQSRLFYHNLPLGEDVPPLQLKEGVFRCIMQLFDCLLTEVHERCKKGLSLAKRLNSTLAFFCYDLLSIIEPRQVFELVSLYMDKFAGVCQAVLHDCKLTFLQIICDHDLFVEMPGRDPSDRNYLSSVLIQEIFLTLDHDDLSQRAKAARILVVLICKHEFDARYQKSEDKLYIAQLYFSLIGQILDEMPVFYNLNAIEKREVLVVILQIVRNLDDATLIKAWQQSIARTRLFFKLLEECITHFEHNKTGGSMLLGASSRSPDVERPAPPKYSERLSPSVNAYLSEASRHEIRPQGTPENGYMWNRVSPQLSSPNQPYSLREALAQAQSSRIGSTARALRESLHPVLRQKLELWEENLSTAVSLEVLRITEKFSAAAGTRSITTDYAKLDCVTSIVMGLLSRSQPLAFWKAFLPVVYNIFNLHGATLMARENDRFLKQIAFHLLRLAVFRNDSIRKRAVVGLQILVRNAFNYFKNTTRLRVMLTITLSELLSDVQVTQMKSDGSLEESGEARRLRKSLEEMADVRSKDLLKDCGLPVTALEAAPDGSSDNMWSWAEVKHLSKCLVQALDAGLEHALLDSVVTVDRYAAAEGFYKLAMAYAPVPDLHIMWLQHLCDAHQEMQSWAEAAQCAVAAAGVIMQALVGRNDAVWSKEHVTSLHKICPIVNTDVSAEASAAEVEGYGASKLTVDSAVKYLQLANKLFTQAELYHFCASIQELIIPVYKSRRAYGQLAKCHTSLTNIYESILEQEASPIPFIDATYYRVGFYGERFGKLNKKEYVFREPRDVRLGDIMEKLSHIYEVKMDGSHTLHIIPDSRQVNADELQPGVCYLQITAVDPVMEDEDLGSRRERIFSLSTGTVRARVFDRFLFDTPFTKNGKTQGGLEDQWKRRTVLQTEGSFPALVNRLPVTKSESLEFSPVENAIGMIETRTAALRNELEEPRSSEGDQLPRLQSLQRILQGSVAVQVNSGVLSVCTAFLSGEPATRLRSQELQQLIAALLEFMAVCKRAIRVHFRLIGEEDQEFHTQLVNGFQSLTAELSHYIPAILSEL

SEQ ID NO: 197664 - protein, 1839 aa, Zea Mays
MEPAVATAGEGQRFKRISRQAWSGNLELDPLLNESLDQWPHLNDLVQCYKADFVKDDCKYGRYESVAPPSFQNQIFEGPDTDIETELQLCNARHFKPEDPTEDDMPSTSGRQMYETESSASSSKVHCSLSPLPAYEPAFDWENERSLIFGQRVPESIPAISNSGLKITVKVLSLSFQAGLVEPFSGTICLYNRDRREKLSEDFYFHILPTDMQDAQGSLDRRGVFSLDTPSPSVCLLIQLEKAATEEGGVTPSVYSRKEPVHLAEKEKQKLQVWSRIMPCKESFAWAMIPLFEGNHAGGLSDAASPSSPLATSLPGSTSQDSIVDPILKLTLDGKVNHYSSGSSVIVEISNLNKVKESYIVDSLQDPKRKVHKPVKGVLRLEVEKLHGGHNDVDNTSEGGSMANDLNDAGDINNGRSNRSSFDGIHSFVNSIAIAQKDAHHNGIISNAENGDNFEAFDFRMLTRSEPFSQLFHCLYVYPLTVSLSRKRNLFVRVELRKDDSDIRKPPLEAVHPRERNMMLQKWGHTQIAVGTRMASYHDEVKISLPALLTPQHHLVFTFFHVDLQMKLEAPKPVIVGHSVLPLSTHIQLLSDVSLPILRELVPHYLQGSGKERMDYLEDGKTVFKLRLRLCSSLFPVNERIRDFFVEYDRHTLHTSPPWGSELLEAINSLKNVESTALLQFLQPILNMLLHLIGDGGETLQVAAFRAMVNILTRVQQESSDGAERNRFLINYVDFAFDDFGGRQAPVYPGLSTVWGSLARSKAKGYRVGPVYDDVLAMAWFFLELIVKSMGLEQSRLFYHNLPLGEDVPPLQLKEGVFRCIMQLFDCLLTEVHERCKKGLSLAKRLNSTLAFFCYDLLSIIEPRQVFELVSLYMDKFAGVCQAVLHDCKLTFLQIICDHDLFVEMPGRDPSDRNYLSSVLIQEIFLTLDHDDLSQRAKAARILVVLICKHEFDARYQKSEDKLYIAQLYFSLIGQILDEMPVFYNLNAIEKREVLVVILQIVRNLDDATLIKAWQQSIARTRLFFKLLEECITHFEHNKTGGSMLLGASSRSPDVERPAPPKYSERLSPSVNAYLSEASRHEIRPQGTPENGYMWNRVSPQLSSPNQPYSLREALAQAQSSRIGSTARALRESLHPVLRQKLELWEENLSTAVSLEVLRITEKFSAAAGTRSITTDYAKLDCVTSIVMGLLSRSQPLAFWKAFLPVVYNIFNLHGATLMARENDRFLKQIAFHLLRLAVFRNDSIRKRAVVGLQILVRNAFNYFKNTTRLRVMLTITLSELLSDVQVTQMKSDGSLEESGEARRLRKSLEEMADVRSKDLLKDCGLPVTALEAAPDGSSDNMWSWAEVKHLSKCLVQALDAGLEHALLDSVVTVDRYAAAEGFYKLAMAYAPVPDLHIMWLQHLCDAHQEMQSWAEAAQCAVAAAGVIMQALVGRNDAVWSKEHVTSLHKICPIVNTDVSAEASAAEVEGYGASKLTVDSAVKYLQLANKLFTQAELYHFCASIQELIIPVYKSRRAYGQLAKCHTSLTNIYESILEQEASPIPFIDATYYRVGFYGERFGKLNKKEYVFREPRDVRLGDIMEKLSHIYEVKMDGSHTLHIIPDSRQVNADELQPGVCYLQITAVDPVMEDEDLGSRRERIFSLSTGTVRARVFDRFLFDTPFTKNGKTQGGLEDQWKRRTVLQTEGSFPALVNRLPVTKSESLEFSPVENAIGMIETRTAALRNELEEPRSSEGDQLPRLQSLQRILQGSVAVQVNSGVLSVCTAFLSGEPATRLRSQELQQLIAALLEFMAVCKRAIRVHFRLIGEEDQEFHTQLVNGFQSLTAELSHYIPAILSEL

SEQ ID NO: 197665 - protein, 81 aa, Zea Mays
MHDLLAHIASFDYRPGMIDELDAQMGFVVGGTILMLLTVVFYEIQFGFSYQHEISWKLSFYLCHFTCSTAQTCLTFNSFHY

SEQ ID NO: 197666 - protein, 77 aa, Zea Mays
MVVSNGGLLRLHEEKLHSWRLSAHPGTHERVQGPMIGARIYRLQHEMNLLLNDCKHVFTTNHLLPNGDVLLVLRFEL

SEQ ID NO: 197667 - protein, 86 aa, Zea Mays
MNLIKGISREEWTRMWNRLKEVEKHFEYQYPSQTDDAVQMIWKAIARKVPSIRLKINRLQRFSLFETNRTDETLPPSSSWLQNQAP

SEQ ID NO: 197668 - protein, 128 aa, Zea Mays
MGTEMFWLGHQRKSGIGFACRYNTDKMVGTLQVASTGIVALSYVQKISEKVSLASDFMYNHMSRDVTSSFGYDYLLRQCRLRGKIDSNGVVAAYLEERLNMGVNFLLSAEIDHCKKNYKFGFGMTVGE

SEQ ID NO: 197669 - protein, 322 aa, Zea Mays
MHAGRAGATLHALLDALVHPLRRTLLHQPVLLLEVHRRRLLRRAFLRRALVLAAQPDVDVLTLAQRQLLLDRARHRRSVLWLGTCPWPPARPPCWRRCTRPPSAWSRLSPPSPCRRWRPSSPGPSAWSRPWPPSPCRRWCPRPPAPCRPPRPCTPRACSWSPPRSRSSSAPPRPWSPSPSPRRCPCTRPACSGWPPPSRPSYARRCRWPPGPCRRCSPCTRRACRPRCAPSARSCPRSRPWRHRRCGPRRWPRTWRPPARSPGCRRHRRHRGRRGSARSRPRPSGRSPPPSRGARPAPEPAPPRRAARRPRRAPHACSASMP

SEQ ID NO: 197670 - protein, 185 aa, Zea Mays
MASLAQHVAGLPCPPLSGASRRRPAAQRRPPSALVCGTYALTKDERERERMRQVFDDASERCRTAPMEGVAFSPDDLDTAVESTDIDTEIGSLIKGTVFMTTSNGAYIDIQSKSTAFLPLDEACLLDIDNVEEAGIRPGLVEEFMIIDENPGDETLILSLQAIQQELAWERCRQLQAEDVVVTGK

SEQ ID NO: 197671 - protein, 327 aa, Zea Mays
MPGLAASASAAPAPFSLATSRLTPVARPAPSFRTQACGLRCWIAAKLKLRKALKRHHGWQLQRNLDARGNDNVPDCLEAASLTEKRSHWNMHLAYDSGGEMANTSSDTLDSSTVQEKPVVPGHIISEISSHVQKEESAVSKRRSNNEPSLCIAVIGATGELARTKVFPALFALYYSGFLPRNVGIFGYSRKKLTDEGLRSIIEANLTCRVDHHENCDDKLIEFLKKTYYVDAGHDNQEGMVRLNSRMSQIEGIGAANRIFYLAVPQEALLDVALPLADGAQTKQGWNRIIIEKPFGFTGLSSLRVTQSMLSRFEEKQIYRYYSTFNV

SEQ ID NO: 197672 - protein, 387 aa, Zea Mays
MANTSSDTLDSSTVQEKPVVPGHIISEISSHVQKEESAVSKRRSNNEPSLCIAVIGATGELARTKVFPALFALYYSGFLPRNVGIFGYSRKKLTDEGLRSIIEANLTCRVDHHENCDDKLIEFLKKTYYVDAGHDNQEGMVRLNSRMSQIEGIGAANRIFYLAVPQEALLDVALPLADGAQTKQGWNRIIIEKPFGFTGLSSLRVTQSMLSRFEEKQIYRIDHLLGKDLIENLTVLRFSNLVFEPLWSRTYIRNVQVIFSEETSNEIQGRYFGNYGIIRDIVHSHILQTIALFAMEPPVSLDGEDIRDEKVKVLRSIRKVNLDDVVLGQLKDMSGKVDRYTKSMIPTYFAAAMYIDNARWDGVPFFIRTGMGLMTNRNSNSVSPCPW

SEQ ID NO: 197673 - protein, 248 aa, Zea Mays
MVRLNSRMSQIEGIGAANRIFYLAVPQEALLDVALPLADGAQTKQGWNRIIIEKPFGFTGLSSLRVTQSMLSRFEEKQIYRIDHLLGKDLIENLTVLRFSNLVFEPLWSRTYIRNVQVIFSEETSNEIQGRYFGNYGIIRDIVHSHILQTIALFAMEPPVSLDGEDIRDEKVKVLRSIRKVNLDDVVLGQLKDMSGKVDRYTKSMIPTYFAAAMYIDNARWDGVPFFIRTGMGLMTNRNSNSVSPCPW

SEQ ID NO: 197674 - protein, 250 aa, Zea Mays
MVRLNSRMSQIEGIGAANRIFYLAVPQEALLDVALPLADGAQTKQGWNRIIIEKPFGFTGLSSLRVTQSMLSRFEEKQIYRIDHLLGKDLIENLTVLRFSNLVFEPLWSRTYIRNVQVIFSEETSNEIQGRYFGNYGIIRDIVHSHILQTIALFAMEPPVSLDGEDIRDEKVKVLRSIRKVNLDDVVLGQLKDMSGKVDRYTKSMIPTYFAAAMYIDNARWDGVPFFIRTGMGLMTNRSRHKRAGSTRST

SEQ ID NO: 197675 - protein, 417 aa, Zea Mays
MVRLNSRMSQIEGIGAANRIFYLAVPQEALLDVALPLADGAQTKQGWNRIIIEKPFGFTGLSSLRVTQSMLSRFEEKQIYRIDHLLGKDLIENLTVLRFSNLVFEPLWSRTYIRNVQVIFSEETSNEIQGRYFGNYGIIRDIVHSHILQTIALFAMEPPVSLDGEDIRDEKVKVLRSIRKVNLDDVVLGQLKDMSGKVDRYTKSMIPTYFAAAMYIDNARWDGVPFFIRTGMGLMTNRAEIRIQFRHVPGNIYRERFGHDIDLDTNELVLRDQPEEAILLKVNNKVPGLGLQLDASELNLLYRDRYNTEVPDSYEHLLLDVLDGDSHLFMRSDELAAAWNVLTPIIHEIDQNRVVPELYEAGDRGPINAYHLAAKHGVRWDDDCQMYNMPSVIGLIKDFQGDMPFKEICKHGFFPVL

SEQ ID NO: 197676 - protein, 623 aa, Zea Mays
MPGLAASASAAPAPFSLATSRLTPVARPAPSFRTQACGLRCWIAAKLKLRKALKRHHGWQLQRNLDARGNDNVPDCLEAASLTEKRSHWNMHLAYDSGGEMANTSSDTLDSSTVQEKPVVPGHIISEISSHVQKEESAVSKRRSNNEPSLCIAVIGATGELARTKVFPALFALYYSGFLPRNVGIFGYSRKKLTDEGLRSIIEANLTCRVDHHENCDDKLIEFLKKTYYVDAGHDNQEGMVRLNSRMSQIEGIGAANRIFYLAVPQEALLDVALPLADGAQTKQGWNRIIIEKPFGFTGLSSLRVTQSMLSRFEEKQIYRIDHLLGKDLIENLTVLRFSNLVFEPLWSRTYIRNVQVIFSEETSNEIQGRYFGNYGIIRDIVHSHILQTIALFAMEPPVSLDGEDIRDEKVKVLRSIRKVNLDDVVLGQLKDMSGKVDRYTKSMIPTYFAAAMYIDNARWDGVPFFIRTGMGLMTNRAEIRIQFRHVPGNIYRERFGHDIDLDTNELVLRDQPEEAILLKVNNKVPGLGLQLDASELNLLYRDRYNTEVPDSYEHLLLDVLDGDSHLFMRSDELAAAWNVLTPIIHEIDQNRVVPELYEAGDRGPINAYHLAAKHGVRWDDDW

SEQ ID NO: 197677 - protein, 193 aa, Zea Mays
MIRIKGLFYEISTSLCGTSNGTGLGEMHLENGQSGAMVPASNSSDRSDRSDKPMDQKVLRRLAQNREAARKSRLRKKAYVQQLESSKLKLASLEQELQKARQQGIFISSSGDQTHTMSGNGAMTFDLEYSRWQEEQNKQINELRTAVNAHASDSDLRLIVDGIMAHYDEIFRLKGIAAKADVFHILSAPCESA

SEQ ID NO: 197678 - protein, 157 aa, Zea Mays
MVPASNSSDRSDRSDKPMDQKVLRRLAQNREAARKSRLRKKAYVQQLESSKLKLASLEQELQKARQQGIFISSSGDQTHTMSGNGAMTFDLEYSRWQEEQNKQINELRTAVNAHASDSDLRLIVDGIMAHYDEIFRLKGIAAKADVFHILSAPCESA

SEQ ID NO: 197679 - protein, 185 aa, Zea Mays
MFRGIQFQCVLQYLGPPVLGLRSAPRTSTAAPPISSTASGARRCPGDRPSRKSSAEKRKVSRLFQSTSMHPKPVPQKKLCRIERNFNLNQREYRYKDCLKSSRNDIEWNFKLNKRKHLYKDCLKSSRNDIERNFKLNKRKHLYKDCLKSSSLLITTAQKNLNPIGNGDALGEAGGHSGREAEADF

SEQ ID NO: 197680 - protein, 212 aa, Zea Mays
MYQVIKNHPSSLKLYEQKLLGTSEVMKEDVQRIHDKVNRILNEEFAKSKDYVPNKRDWLSAYWTGFKSPEQISRVRNTGVKPKILKRVGQAITTLPENFKPHRAVKKIFELRAAMIESAQGIDWAVAEALAFATLIVEGNHVRLSGQDVERGTFSHQHAVLHDQETGAKIKRLVGASLLIFANKQDMQGALKPTGITKILLSSMWEQKDMPN

SEQ ID NO: 197681 - protein, 193 aa, Zea Mays
MEGNLEAHRPVLEIPVPVIKNHPSSLKLYEQKLLGTSEVMKEDVQRIHDKVNRILNEEFAKSKDYVPNKRDWLSAYWTGFKSPEQISRVRNTGVKPKILKRVGQAITTLPENFKPHRAVKKIFELRAAMIESAQGIDWAVAEALAFATLIVEGNHVRLSGQDVERGTFSHQHAVLHDQETGAKYCPLDHVAMN

SEQ ID NO: 197682 - protein, 293 aa, Zea Mays
MYQVIKNHPSSLKLYEQKLLGTSEVMKEDVQRIHDKVNRILNEEFAKSKDYVPNKRDWLSAYWTGFKSPEQISRVRNTGVKPKILKRVGQAITTLPENFKPHRAVKKIFELRAAMIESAQGIDWAVAEALAFATLIVEGNHVRLSGQDVERGTFSHQHAVLHDQETGAKIKRLVGASLLIFANKQDMQGALKPTGITKSLSDSSSPPGSPAGTQGLRSAPRTSTAAPPISSTASGARRCPGDRPSRKSSAEKRKVSRLFQSTSMHPKPVPQKDRKELQPEPARVSIQRLFEIF

SEQ ID NO: 197683 - protein, 252 aa, Zea Mays
MVNCLSEHNSAAFTISTTRRIPALHGCGIDAPHELVLRYMPTCQLPTVQTKAINNEPNELQSCLNFAYTCTCPCIFLSNPKVLKNLYSKDPTKDRREEEMKRKSKEKLQDLNGARKYISVHHEPPCAGALETLAWRRSGRGAVVGVRCRVLSSAISFSSSTILCFLLVNSSAAASSSAHSHPFSASTRSAVSLHLWSSVFLAASSASRTAPKPNCYCYNSAVLSMEASAPRSTAFGRWCPALSSTPSSSVAQ

SEQ ID NO: 197684 - protein, 107 aa, Zea Mays
MQGALKPTGITKSLSDSSSPPGSPAGTQGLRSAPRTSTAAPPISSTASGARRCPGDRPSRKSSAEKRKVSRLFQSTSMHPKPVPQKDRKELQPEPARVSIQRLFEIF

SEQ ID NO: 197685 - protein, 86 aa, Zea Mays
MYQVIKNHPSSLKLYEQKLLGTSEVMKEDVQRIHDKVNRILNEEFAKSKDYVPNKRDWLSAYWTGFKSPEQISRVRNTGSGNYYTA

SEQ ID NO: 197686 - protein, 278 aa, Zea Mays
MGNASGRDEDAAAVDGDGADVEDGGGDSSERDFPSYGSGGANHVRRACSVGVVGGGAAAGSPPGSPGHSLSPRMFVPQILMDEQEEYDGPPQKEIPALIVWTLGGKNVYVEGSWDNWKSRKAMQKSGKDHSLLLVLPAGVYRYRFVVDGERRCLPDLPCEIDAMGNAVNLLDVNDYVPESVESVAEFEPPPSPDSSYSFQAPEDKDFAKEPPVLPSQLHLGVLNSQNSEESCARPQHIVLNHLFIEKGWGAHPLVSLGLTHRFESKYVTVVLYKPIER

SEQ ID NO: 197687 - protein, 331 aa, Zea Mays
MGMRKYPSRHRVHCRKLPALYDVKIFSLRLFRDKCYIEIFPVVEKSIIVRSDDEERKRDERNRKQREYYARRKVDETTEERDARNKMMRDYRARKKAETGPSDEHERHREERNRKQREYRARRKAEETNEEREARNKRMCDYRAMKKADTVLYSPRQTQAYATGSSIVIQTNTQMAEPVTPVVARGSLHQLPTSVEPFSTNSQVTEPVTPVVARGSLHQLPISVEPFSTISQPSTYNQSAITASTMGNLIMNRARYINMDDADREILLHKRREYKRLRQCVQDDTITDTLSGAPLSIHTQQHIVHDTPTHEPELRDYNTVLIEPTQPSLEG

SEQ ID NO: 197688 - protein, 378 aa, Zea Mays
MLLREAMADPLLEKYKVIVLDEAHERTLATDVLFGLLKEVLKNRPDLKLVVMSATLEAEKFQGYFSDAPLMKVPGRLHPVEIFYTQEPERDYLEAAIRTVVQIHMCEPAGDILVFLTGEEEIEDACRKINKEINNMGDQVGPVKVVPLYSTLPPAMQQKIFEPAPAPLKERGPPGRKIVVSTNIAETSLTIDGIVYVIDPGFSKQKVYNPRIRVESLLVSPISKASAHQRAGRAGRTQPGKCFRLYTEKSFNEDLQPQTYPEILRSNLANTVLTLKKLGIDDLVHFDFMDPPAPETLMRALEVLNYLAALDDEGNLTQLGEMMSEFPLDPQMSKMLVISPKYNCSNEILSISAMLSDNCCLLSYSDKANGTVSPLCIC

SEQ ID NO: 197689 - protein, 543 aa, Zea Mays
MGTERKRKVSLFDVVDETSVSGKLGRAASNGAAATAAGTNPSVNRWNGRPYTARYFEILEKRRTLPVWQQKEEFLRRLRDNQTLILVGETGSGKTTQIPQFVLETEGLGNRSMVACTQPRRVAAMSVSRRVAEEMDVTIGEEVGYSIRFEDCSSHKTVLKYLTDGMLLREAMADPLLEKYKVIVLDEAHERTLATDVLFGLLKEVLKNRPDLKLVVMSATLEAEKFQGYFSDAPLMKVPGRLHPVEIFYTQEPERDYLEAAIRTVVQIHMCEPAGDILVFLTGEEEIEDACRKINKEINNMGDQVGPVKVVPLYSTLPPAMQQKIFEPAPAPLKERGPPGRKIVVSTNIAETSLTIDGIVYVIDPGFSKQKVYNPRIRVESLLVSPISKASAHQRAGRAGRTQPGKCFRLYTEKSFNEDLQPQTYPEILRSNLANTVLTLKKLGIDDLVHFDFMDPPAPETLMRALEVLNYLAALDDEGNLTQLGEMMSEFPLDPQMSKMLVISPKYNCSNEILSISAMLSDNCCLLSYSDKANGTVSPLCIC

SEQ ID NO: 197690 - protein, 525 aa, Zea Mays
MGTERKRKVSLFDVVDETSVSGKLGRAASNGAAATAAGTNPSVNRWNGRPYTARYFEILEKRRTLPVWQQKEEFLRRLRDNQTLILVGETGSGKTTQIPQFVLETEGLGNRSMVACTQPRRVAAMSVSRRVAEEMDVTIGEEVGYSIRFEDCSSHKTVLKYLTDGMLLREAMADPLLEKYKVIVLDEAHERTLATDVLFGLLKEVLKNRPDLKLVVMSATLEAEKFQGYFSDAPLMKVPGRLHPVEIFYTQEPERDYLEAAIRTVVQIHMCEPAGDILVFLTGEEEIEDACRKINKEINNMGDQVGPVKVVPLYSTLPPAMQQKIFEPAPAPLKERGPPGRKIVVSTNIAETSLTIDGIVYVIDPGFSKQKVYNPRIRVESLLVSPISKASAHQRAGRAGRTQPGKCFRLYTEKSFNEDLQPQTYPEILRSNLANTVLTLKKLGIDDLVHFDFMDPPAPETLMRALEVLNYLAALDDEGNLTQLGEMMSEFPLDPQMSKMLVISPKYNCSNEILSISAMLSVKLK

SEQ ID NO: 197691 - protein, 363 aa, Zea Mays
MLLREAMADPLLEKYKVIVLDEAHERTLATDVLFGLLKEVLKNRPDLKLVVMSATLEAEKFQGYFSDAPLMKVPGRLHPVEIFYTQEPERDYLEAAIRTVVQIHMCEPAGDILVFLTGEEEIEDACRKINKEINNMGDQVGPVKVVPLYSTLPPAMQQKIFEPAPAPLKERGPPGRKIVVSTNIAETSLTIDGIVYVIDPGFSKQKVYNPRIRVESLLVSPISKASAHQRAGRAGRTQPGKCFRLYTEKSFNEDLQPQTYPEILRSNLANTVLTLKKLGIDDLVHFDFMDPPAPETLMRALEVLNYLAALDDEGNLTQLGEMMSEFPLDPQMSKMLVISPKYNCSNEILSISAMLSVSPLCIC

SEQ ID NO: 197692 - protein, 455 aa, Zea Mays
MSAPPSLKTPATAVAVSRRSVATPRATGLRGACAPPTRRLRCSASAAVAGASTEMADAPLDWAERSLEELHSLPDHDTFCLMALSPLDGRYDRFVKELMPFFSEFGLIRYRVLIEIKWLLKLSQIPEITEVPQFSKEAQSLLNAIIENFCIDDAKEVKKIEKVTNHDVKAVEYFLKQRCSSNPEIAKVSEFFHFGCTSEDINNLSHALALKEGVNKVMFPAMIDLCRAMCSLATQNSGYPMLARTHGQPASPTTVGKEMANFAARLSDIGKSFSEVKILGKFAGAVGNYNADVVAYPEVDWPKVAEEFVRSLGLQFNPYVTQIEPHDYISKLFNLFTQFNNVLTDFDRDMWSYISLGYFKQIPKAGEVGSSTMPHKINPIDFENSDGNLCQANSILSGISMKLPISRLQRDLTDSTVLRNLGMGLGHSLLAYKATMRGISKVQARTTMLNWCLYS

SEQ ID NO: 197693 - protein, 317 aa, Zea Mays
MQSNVFLGNTKFRLPYVGSNSWAASPTTVGKEMANFAARLSDIGKSFSEVKILGKFAGAVGNYNADVVAYPEVDWPKVAEEFVRSLGLQFNPYVTQIEPHDYISKLFNLFTQFNNVLTDFDRDMWSYISLGYFKQIPKAGEVGSSTMPHKINPIDFENSDGNLCQANSILSGISMKLPISRLQRDLTDSTVLRNLGMGLGHSLLAYKATMRGISKVQLNESRLAEDLEQTWEVLAEPIQTVMRRYGIPEPYEKLKELTRGQAVTKDSMQQFINGLDIPEEVRSKLSKLTPHSYTGLAEDLARDIEKWVDLESGFQIK

SEQ ID NO: 197694 - protein, 184 aa, Zea Mays
MDVDSDPAASSKPTQMDLEDQTDTKGKGKAEEGNGKGEELADSIGSLSIGPGRTNFKKKPVIIIVIGMAGTGKTTLMHRLVCDTQASNKRGYVVNLDPAVMTLPFGANIDIRDTVRYKDVMKEYSLGPNGGILTSLNLFATKFDEVDCYNFFITLLPIPAVLVAFHSTAGQLVFSSLYCQFLLF

SEQ ID NO: 197695 - protein, 113 aa, Zea Mays
MLHSGRLLSSKGFYEHMLNTRKNLRRKNILPDGKCSRCGGNVEDRLHVFVSCSRASISWRLAGFRINGVEGFPLFPPIIPHDAIFRISLALFSRGCGRIGTISSSKMRNPVYV

SEQ ID NO: 197696 - protein, 240 aa, Zea Mays
MGRAPRGVWNMELLGLAVLVVLAVVAETRSLEKQNLCGGCGVGGGGGYGGGGGGGGDLGLGGGLGHGVGVGIGIGGGNGGGAGGGGGLGGGAGGGLGGGGGLGGGGGGGYGGGAGGGGGLGGGSGGGLGGGEGGGGGLGGGAGGGGGLGGGGGAGGGAGAGGGSGGGAGAGGGAGGGYGGGAGAGGGAGGGYGGGAGGGAGGGYGGGAGGGYGGGAGAGSGGGGGYGAGGGGGGGIGGGV

SEQ ID NO: 197697 - protein, 587 aa, Zea Mays
MHPRSSFKAFLEVVKSRSLSWENAEMDAIHSLQLILRDSFRDAAEGTSNSKAIVNGQRQLGELELRGINELSSVAREMVRLIETATVPIFAVDTDGCINGWNAKIAELTGLSVEEAMGKSLVNDLIFKECDDIVEKLLSRALRGEEDKNVEIKLKTFGSEQSKGAIFVIVNACSSRDYTQNIVGVCFVGQDVTGQKVVMDKFINIQGDYKAIVHNPNPLLPPIFASDENTSCSEWNTAMEKLTGWSREEVVGKFLIGEVFGNCCRLKGPDALTKFMVVIHNAIEGHDSEKFPFSFFDKNGKYVQALLTANTRSKMDGKSIGAFCFLQIASAEIQQAFEIQRQQEKKCYARMKELAYICQEIKNPLSGIRFTNSLLQMTDLNDDQRQFLETSSACEKQMSKIVKDASLKSIEDGSLVLEKSEFSLGDVMNAVVSQTMSLLRERDLQLIRDIPDEIKDASAYGDQFRIQQVLADFLLSMAQSAPSENGWVEIQVRPNVKQNYDGTDTELFIFRFACPGEGLPADIVQDMFSNSQWSTQEGVGLSTCRKILKLMGGEVQYIRESERSFFLIVLELPQPRLAAGRENQLIC

SEQ ID NO: 197698 - protein, 1103 aa, Zea Mays
MASDSRPPKRSPSARRVAPRHAHHHHSQSSGGSTSRAGAGGGGGGAAATESVSKAVAQYNLDARLHAVFEQSGASGRSFDYSQSLRAPPTPSSEQQIAAYLSRIQRGGHIQPLGCTLAVADDSSFRLLAFSENAADLLDLSPHHSVPSLDSVALPPVSLGADARLYFSPSSAVLLERAFAAREISLLNPLWIHSRASSKPFYAILHRIDVGVVIDLEPARTEDPALSIAGAVQSQKLAVRAISRLQALPGGDVKLLCDTVVEHVRELTGYDRVMVYKFHEDEHGEVVAESRRDNLEPYLGLHYPATDIPQASRFLFQQNRVRMIADCHAIPVRVIQDPGLSQQLCLVGSTLRAPHGCHAQYMANMGSIASLVMAVIISSGGDDERTGRGAISSSMKLWGLVVCHHTSPRCIPFPLRYACEFLMQAFGLQLNMELQLAHQLSEKHILRTQTLLCDMLLRDSPAGIITQSPSVMDLVKCDGAALYYRGKYYPLGVTPTESQIKDIIEWLTVCHGDSTGLSTDSLADAGYLGAVALGDAVCGMAVAYITPSDYLFWFRSHTAKEIKWGGAKHHPEDKDDGQRMHPRSSFKAFLEVVKSRSLSWENAEMDAIHSLQLILRDSFRDAAEGTSNSKAIVNGQRQLGELELRGINELSSVAREMVRLIETATVPIFAVDTDGCINGWNAKIAELTGLSVEEAMGKSLVNDLIFKECDDIVEKLLSRALRGEEDKNVEIKLKTFGSEQSKGAIFVIVNACSSRDYTQNIVGVCFVGQDVTGQKVVMDKFINIQGDYKAIVHNPNPLLPPIFASDENTSCSEWNTAMEKLTGWSREEVVGKFLIGEVFGNCCRLKGPDALTKFMVVIHNAIEGHDSEKFPFSFFDKNGKYVQALLTANTRSKMDGKSIGAFCFLQIASAEIQQAFEIQRQQEKKCYARMKELAYICQEIKNPLSGIRFTNSLLQMTDLNDDQRQFLETSSACEKQMSKIVKDASLKSIEDGSLVLEKSEFSLGDVMNAVVSQTMSLLRERDLQLIRDIPDEIKDASAYGDQFRIQQVLADFLLSMAQSAPSENGWVEIQVRPNVKQNYDGTDTELFIFRICSAIPNGQPKKA

SEQ ID NO: 197699 - protein, 708 aa, Zea Mays
MSKRPKLEGFSIPRPTSYNFERSQPVQRLYRPTDDPDLDDIAFSDDAPSDAPAGTAVDGKAEHDEEIDPLDAFMAEIQEEIRAPPPPPKAEALRRADSGDDEDDPVESFLRAKKDAGLTLAADAMRAGYDSDEEVYAAAKAVDAGMMEYDSDDNPIVVDKKTIEPIPALDHSTIEYDTFTKDFYEEKPSISGMSDQEVADYMKSLAIRVSGFDVPRPIKNFEDCGFPVPLMNAIAKQAYQKPTTIQCQALPIVLSGRDIIGIAKTGSGKTAAFVLPMIVHIMDQPELEKEEGPIGVICAPTRELAHQIYLEAKKFAKPYNLRVAAVYGGVSKFDQFKELKAGCEVVIATPGRLIDLLKMKALKMFRATYLVLDEADRMFDLGFEPQIRSIVGQIRPGRQTLLFSATMPYKVERLAREILTDPIRVTVGQVGGANEDIKQVVNVIPSDAEKMPWLLEKLPGMIDDGDVLVFASKKARVDEIERELNQRGFRIAALHGDKDQASRMETLQKFKSGTYHVLVATDVAARGLDIKSIKTVVNFDIAKEMDMHIHRIGRTGRAGDKDGTAYTLITQKEARFAGELVQSLIAAGQDVPNELMDLAMKDVRFRAKRDSRKGGKKGGKGKGGVGGGAGRGRGVRGVDFGLGIGYNAESGSQQQCTFLGKTSTTWLCVWGHHWRRHTACTACPHFRNCILASTGCPLRPCIPPCCWK

SEQ ID NO: 197700 - protein, 576 aa, Zea Mays
MSDQEVADYMKSLAIRVSGFDVPRPIKNFEDCGFPVPLMNAIAKQAYQKPTTIQCQALPIVLSGRDIIGIAKTGSGKTAAFVLPMIVHIMDQPELEKEEGPIGVICAPTRELAHQIYLEAKKFAKPYNLRVAAVYGGVSKFDQFKELKAGCEVVIATPGRLIDLLKMKALKMFRATYLVLDEADRMFDLGFEPQIRSIVGQIRPGRQTLLFSATMPYKVERLAREILTDPIRVTVGQVGGANEDIKQVVNVIPSDAEKMPWLLEKLPGMIDDGDVLVFASKKARVDEIERELNQRGFRIAALHGDKDQASRMETLQKFKSGTYHVLVATDVAARGLDIKSIKTVVNFDIAKEMDMHIHRIGRTGRAGDKDGTAYTLITQKEARFAGELVQSLIAAGQDVPNELMDLAMKDVRFRAKRDSRKGGKKGGKGKGGVGGGAGRGRGVRGVDFGLGIGYNAESGSQVPAPRSAAINSLKTGVMQQFKSSFVSGSSNTPSSSAPSLVRPALRGFVSGGTIGGDTRPAQPAPTFVTASWPAQAAPSVPASRPAAGNNNENGNPNPKSSRDRPRERKRPSGWDR

SEQ ID NO: 197701 - protein, 96 aa, Zea Mays
MLPLNDTRARPVPERNLILEQVTKQMKTPVTVLNVTNLSGVRIDGHPSVYGRKTVGLTASSVQQDCSHWCLPGVPDTWNELLFYHLLSPQEKDVTS

SEQ ID NO: 197702 - protein, 337 aa, Zea Mays
MCCRRQRGPDGTPVDGGRRRRRGCGAVLAVLALAAAAVVAFLESTAGGVSYTGDGWLHECAKWDAEGGRFLASTFFGGGVAEVRAGEGEERVVVADPDAAGRVALGLAVDAPRRRLLLVYCDRPPRFGYAALAAYDLGSWRRLFLTRLDVPGESTFPDDVAADEEGNAYVTDASGNKIWKVSPSGVLLGVIKNSTFVQRPGLRHNLVGLNGIVYHPNGYLLVVHTFGGDLFKVDPKTEAVHAVKVQGSLGRGDGMELLSPTRLVVAGTPSSRLVESSDDWETARVTGQYVGPVHRVGSSATVKDGDVYINHIVGFGLGKKKTHVLARAVFSPLAAES

SEQ ID NO: 197703 - protein, 692 aa, Zea Mays
MPGGRETVWISEARCACLVFVSFSNSLVPAHSVRWLVLFWFPLFCLFPSPLPKKKRMISSQSGQSCPVKREDYCSCCGKNLMFPFLSRQVIDKYLREARRILAAAPEGGGGGDAAAALGLVDAALELSPRMEAALELRARALLALRRYREVAEMLRDYIPSCGKSCSGEDTSSSSSASLLSTGSGDLGTISRAKLLSPDRHRSDDAEPDARPVRFFRCFDVSELKRRVLAGLSKNPNTDTQWRYLVLGQACFHLGLIEDAMVLLQTGRRLASAAFRRESVCWSDDSFSSSSATAAAAPSVPSGKTSKSSSAFFIIPATESEAVSQLLAHVKLLLRRRAAAMAALDAGLPAEAVRHFTKILEARRGVLPHPFAAACLVGRAAAFQAGGRPADAIADCNRSLALDPAYIPALRARADLLQSVGAVADCLRDLDHLKLLYDAALRDGKLPGPRWRPQGGVRYCEIAGAHRKLTARIQGLRGRVAAGEACNIDYYLLLGVRHGCPRSELERAHLLLSLKLKPDRAVVFGERLELVDEHRDLEAVRDQARMSALLLYRMLQKGYSFVMSAVLDEEAAERQRAKDAAAAAAALAAKQEAATQEPPQPVPGKSKNTESGSGRPRSPPGRAQTAKPKPKSKAKAKSATAATMPKAPAAVNSTAPVYQGVFCRDMAVVGTLLSRGGAFDRALPVKCEAMSC

SEQ ID NO: 197704 - protein, 76 aa, Zea Mays
MEEEACGEKKYGGIAPKKKPLISKDHERAYFDSADWVLGKQAANSSTRATVESLKPKLKRTPHHQLPPRKPTCASG

SEQ ID NO: 197705 - protein, 449 aa, Zea Mays
MVDQEFCTLAEESLKIIGKKKTSAFRRPPILIVIGDPTCDPKSLQHALGKGAIEYEEFLKTGDPEFSWKPPKDEWQSIALGYTSGTTSSPKGVVLHHRGAYLMALSVAIVWGMPEGAVYLWTLPMFHCNGWCYTWALAAFCGTSICLRQVSTKAIYEGITKQGVTHFCAAPVVLNNLINAPASETFLPLPRVVSVNVAGAAPTPSLLGALSIRGFRVTHTYGLSETYGPSTVCAWKPEWDELPLEERSRLHCRQGVRYIAMEGLDVVDPKTMAPVPADGKSYGEIVLRGNAVMKGYLKNPRANAEAFAGGWYHSGDLGVKHPDGYVEVRDRMKDVIISGGENISSLEVEKVLCAHPAVLEVSVVARADERWGESPCAFVTLKDGAAADGSDEAALANDIMRFCRERMPGYWVPKSVIFGPLPKTATGKIKKHELRARAKELGPVKKSRM

SEQ ID NO: 197706 - protein, 555 aa, Zea Mays
MGTGEGSPPARRGISGRRRRWPDEDDDEYVLEEEEEEDYVEELSASSAGEEGVDSDAEYQEAEEEDEIEKPRPKRPAKGITSSAGERGLDSDAEYQEAEEDDEIEPPRLKRPAKGSTSSAGEEGLDSDAEYQEAEEDEMETPRPKRPAKDSTSSAGEDGLDSDAEYQEAEEEDDDEIETPRPKRRAKGSNRVRKGKVDLAAARSRRRKYEEDEDYEEEVDEDDEVEEEYHDDLEEVEEEEEVAPQRPKSIVKCGARGRNVKLSLAAKRSHQRKQEDDEDMDFDPELDDEEVEIDEDIDFDPDVDGDEEDEYQDEEEEELVPARARKVTVKNPVKRKSISKRRTPKKKKKNRGSKVSRRKGASAKVKKSAPVRRRRKRSVIDDYEDEDVDDDDDDDFIVDDEVIVNRHPKKKARIGSGRETVVDPQVSIEEETWPDLESDSSDFEFATSDEEPNNVETPVAEQTTVRKGRKKRISESESSSDSEFVVSGKELEELREPEPPKAAPNLHVSLRRICITRHGEGKGKEKQEQEEAGKPICGICLSEELRATVQGLSAH

SEQ ID NO: 197707 - protein, 627 aa, Zea Mays
MGTGEGSPPARRGISGRRRRWPDEDDDEYVLEEEEEEDYVEELSASSAGEEGVDSDAEYQEAEEEDEIEKPRPKRPAKGITSSAGERGLDSDAEYQEAEEDEMETPRPKRPAKDSTSSAGEDGLDSDAEYQEAEEEDDDEIETPRPKRRAKGSNRVRKGKVDLAAARSRRRKYEEDEDYEEEVDEDDEVEEEYHDDLEEVEEEEEVAPQRPKSIVKCGARGRNVKLSLAAKRSHQRKQEDDEDMDFDPELDDEEVEIDEDIDFDPDVDGDEEDEYQDEEEEELVPARARKVTVKNPVKRKSISKRRTPKKKKKNRGSKVSRRKGASAKVKKSAPVRRRRKRSVIDDYEDEDVDDDDDDDFIVDDEVIVNRHPKKKARIGSGRETVVDPQVSIEEETWPDLESDSSDFEFATSDEEPNNVETPVAEQTTVRKGRKKRISESESSSDSEFVVSGKELEELREPEPPKAAPNLHVSLRRICITRHGEGKGKEKQEQEEAGKPICGICLSEELRATVQGVLNCCSHYFCFACIMEWSRVESRCPLCKQRFTTITKSSKVDLGLGVRKAVVKVEERDQVYQPTEEEIRRWLDPYENVVCIECNQEKCPKETGTVEDVDSVTRDHHILEFSVQ

SEQ ID NO: 197708 - protein, 484 aa, Zea Mays
MEIHCHLTKVGLLSKQHITPPLFKLYISHGYMLEACELLWSMLEWNTDPFHGNLMLMGFLKSGRLDKAYQIFKRMPVKDLISWNSMIAGAVRSSHLKEAMNIFSRLVSSGLVPDCFSFSSVLSACARAGARRYGVWVHHLMTELGVEMNHILSSALVDMYAKCGRIDVATEIFNKVKGNHISVWNTMISGLASHGLGSDVVILFHKMKSEELVPDGVTFVALLTACSRCGMVEEARHYFRSMTTEYSITPEVEHYGALVDTLSRAGLLDEAYELVMSMNVKPDVVIWRALLSACRRYRHTKLGEATIEHMACHGSGDYTLLSNIYSSANRWNDSEEVWKQRKQKKVRKTKGLSWVELGGSTHEFKAGDRSHPDTEDIYVVLHGLCRRAKVEGYAPLTELVTKDVSEEEREENLTFHSEKLAVAYSVLKTGPGTEIMVSKNLQVCSDCHEWMKIISKVLCRVIILRDRVRFHRFESGWCSCKDYW

SEQ ID NO: 197709 - protein, 115 aa, Zea Mays
MPLMPHSSVFACPCICCENFHLLRHSIGDTCSIRWLKCHSRLIYETFLSSRRHQSKPLSTTVLARSTRKIWRTYSHSAIIGVELSDGRQTSSLVTPNGHSFDVSFFSSLSSDCVK

SEQ ID NO: 197710 - protein, 76 aa, Zea Mays
MPLMPHSSVFACPCICCENFHLLRHSIGDTCSIRWLKCHSRLIYETFLSSRRHQSKPLSTTVLARSTRKGQVTGSK

SEQ ID NO: 197711 - protein, 146 aa, Zea Mays
MPLMPHSSVFACPCICCENFHLLRHSIGDTCSIRWLKCHSRLIYETFLSSRRHQSKPLSTTVLARSTRKVSSHLAIVIILHGKSVESSIEVYMQSEFEQLNSLHCYNVVEEFSVVKTKWPAIVLVFYIETTSFSHCDDRIIEFSVP

SEQ ID NO: 197712 - protein, 385 aa, Zea Mays
MNIFSRLVSSGLVPDCFSFSSVLSACARAGARRYGVWVHHLMTELGVEMNHILSSALVDMYAKCGRIDVATEIFNKVKGNHISVWNTMISGLASHGLGSDVVILFHKMKSEELVPDGVTFVALLTACSRCGMVEEARHYFRSMTTEYSITPEVEHYGALVDTLSRAGLLDEAYELVMSMNVKPDVVIWRALLSACRRYRHTKLGEATIEHMACHGSGDYTLLSNIYSSANRWNDSEEVWKQRKQKKVRKTKGLSWVELGGSTHEFKAGDRSHPDTEDIYVVLHGLCRRAKVEGYAPLTELVTKDVSEEEREENLTFHSEKLAVAYSVLKTGPGTEIMVSKNLQVCSDCHEWMKIISKVLCRVIILRDRVRFHRFESGWCSCKDYW

SEQ ID NO: 197713 - protein, 58 aa, Zea Mays
MLKCYPIFSENEIWRTYSHSAIIGVELSDGRQTSSLVTPNGHSFDVSFFSSLSSDCVK

SEQ ID NO: 197714 - protein, 167 aa, Zea Mays
MIPLNRRASLPRAGMEYFDARRKPRNVGKIIAALVLTTLCIFALKQSPGFGGNSVFSRHEPGVTHVLVTGGAGYIGSHAALRLLQDSYRVTIVDNLSRGNMGAVKVLQGLFPQPGRLQFIFADLGDQKSVSSSMLLKLFCLCLFCLWRVTPEVFFSLNCLPGQQDIC

SEQ ID NO: 197715 - protein, 197 aa, Zea Mays
MGFSGVILKPWRACIATMDWPSSSNSTKAMPGLASIIRTSRKPGYCWNRIWSIMLVVWSGKFWMKRMLFGGAGRVSNRVWGDSENEHELLLSGGDEGGAVLVLNVTAARRGLVSQWDGAGASQAESRGATLAKTQLGRAAVGVGGGRREEDDDEGAGAVIRAHLLSDFKAAVRAGKVLVSDPSSGSAGGLFGKWGMD

SEQ ID NO: 197716 - protein, 89 aa, Zea Mays
MCFSSNTWYSSIRDHKACSFLSPFISRGGVTNERPTIGLERRRQFFLLRSYIGGEIPEAWSSALTFLIGLPTGLYSSPKTISCLECIGK

SEQ ID NO: 197717 - protein, 261 aa, Zea Mays
MPPLACASHAHTPSHRRPRSRISPTTTRDRAPAASPSILAYTSASPSIYANGGDRGGRSPACTTSHVPLSPQVLPQRVAQYPSHCPLAPPPATHTHPSSPASAPQTTSARHFPALQWCPPPHHSGAARRPMGTCPTSLPSSRPHRSHSWSSSSSPTGRPPFSFLFSLIRCSWAPSKSIGVLVGIGIVQPVALHPNDYLVSLVVWAVPEQYSSSDFLVVFQYARVVLLVYAEAYWMGWMPSSVRVACCSHASSVLLDVQEQI

SEQ ID NO: 197718 - protein, 366 aa, Zea Mays
MYIVVGDEPFLLRHGQNFHPFVVRAAENVQQALVHAKLSGKMKVVVPCSADTFQNASTLPTKASFRPDVNKTMADLLSFLANSSSPFMVELDPFLSFQHNRNLSLDYFLFQLMSHPVKDGENKYDNYVDASIDALVTSLTKAGFSDMDIIVGRAGWPTDGAMNATPAIAQSFMTGLVNHLAKKSGTPLRPKVPPVEMYLFSLLDEDQRSIASGGYERHHGIFTFDGQAKYYANIGQGPKSLKNAPDVNYLPSKWCVVDNNKDLSNVSSSFSSACANGDCTSLLPGGSCSGLAWPGNVSYAFNNYYQQHDQSEDSCYFNGLGLITTVDPSVDNCLFPLTIHVSAATSLHLTLPVSLLLVLWFCIVCI

SEQ ID NO: 197719 - protein, 326 aa, Zea Mays
MPNLECRMYEQRFPEVDAAVMIQVKHIADMGAYVSLLEYNNIEGMILFSELSRRRIRSISSLIKVGRQEPAIVLRVDRDKGYIDLSKRRVSEEEAHACEDRYNKSKLVHSIMRHVAETLEIDLEPLYQRIGWPLYRKYGHAFEAFKLIVADPDAILDALTYEEKEVGPDGQEDSLVKNIRRRMTPQPLKIRADIEMKCFQFDGVLHIKQAMKKAEAAGNDNCPVKIKLVAPPLYVLTTQTLDKDQGISVLTTAVKACTAEIEKYKGKLVVKEPPRAVSEREDKLFLDQIDSLMEQNAEVDGDADSEEEEDTGMGDVDITNSGVAAY

SEQ ID NO: 197720 - protein, 336 aa, Zea Mays
MPNLECRMYEQRFPEVDAAVMIQVKHIADMGAYVSLLEYNNIEGMILFSELSRRRIRSISSLIKVGRQEPAIVLRVDRDKGYIDLSKRRVSEEEAHACEDRYNKSKLVHSIMRHVAETLEIDLEPLYQRIGWPLYRKYGHAFEAFKLIVADPDAILDALTYEEKEVGPDGQEVVPAVTPEVKDSLVKNIRRRMTPQPLKIRADIEMKCFQFDGVLHIKQAMKKAEAAGNDNCPVKIKLVAPPLYVLTTQTLDKDQGISVLTTAVKACTAEIEKYKGKLVVKEPPRAVSEREDKLFLDQIDSLMEQNAEVDGDADSEEEEDTGMGDVDITNSGVAAY

SEQ ID NO: 197721 - protein, 262 aa, Zea Mays
MPNLECRMYEQRFPEVDAAVMIQVKHIADMGAYVSLLEYNNIEGMILFSELSRRRIRSISSLIKVGRQEPAIVLRVDRDKGYIDLSKRRVSEEEAHACEDRYNKSKLVHSIMRHVAETLEIDLEPLYQRIGWPLYRKYGHAFEAFKLIVADPDAILDALTYEEKEVTKVVPAVTPEVKDSLVKNIRRRMTPQPLKIRADIEMKCFQFDGVLHIKQAMKKAEAAGNDNCPVKIKLVAPPLYVLTTQTLDKPFAGCSIAQNAVT

SEQ ID NO: 197722 - protein, 103 aa, Zea Mays
MTPQPLKIRADIEMKCFQFDGVLHIKQAMKKAEAAGNDNCPVKIKLVAPPLYVLTTQTLDKVGIILVLNNMCEQFVIAELFDKVSYVLKPILLKFVITILHQT

SEQ ID NO: 197723 - protein, 497 aa, Zea Mays
MKDLFSDETGNYMEAENKYSRAMRGAPADSLFGQFCLHALWFGNCNICAIATLWIDFVREIRWCWEESERLPRMKSTSSIDLSSCLIHQKLQMLTICIERKRSLNREKGTGYKDETSNSTAVNKSRKGSAGVVPKMMLLNTFQEMHAPYTQDAPLMTEDMHEERLHAAEAFGNAIGLSGQLERDILCSDMSAFKAANPDAVFEDFIRWHSPGEWLSEDKTDGNAGWPPKGKLSHRMSQHGNVWRKIWNDALPLPVSEQKSLLDPVREGEKVLHYLETLRPQQLLEQMVCTAFKSSADILNKTMYGGFKEMKTKMDRLYVTMASTLKSFLGNSDVNDLVGGLKRLCQVFEHIEKLLILAASINRKLIDAPRLAQAIFYDYYNFYLPKMGTSLESICYEKEFTTKEKVGMYERDAVSNLFPPPTANQSWRKVLSMGNLLNGHEPMQREIIFSVQERISNGHYSSPTPLCTNNEKIQTHRMYISGTSNDLWVALSVTSWD

SEQ ID NO: 197724 - protein, 574 aa, Zea Mays
MPRPLMLIAGSFTQLYLDTYDSIGKFVGFASQLHLLVNAYESSVEAQFLEDFVADTSGQDNAKSTATVPPPSVIDRVMKDLFSDETGNYMEAENKYSRAMRGAPADSLFGQFCLHALWFGNCNICAIATLWIDFVREIRWCWEESERLPRMKSTSSIDLSSCLIHQKLQMLTICIERKRSLNREKGTGYKDETSNSTAVNKSRKGSAGVVPKMMLLNTFQEMHAPYTQDAPLMTEDMHEERLHAAEAFGNAIGLSGQLERDILCSDMSAFKAANPDAVFEDFIRWHSPGEWLSEDKTDGNAGWPPKGKLSHRMSQHGNVWRKIWNDALPLPVSEQKSLLDPVREGEKVLHYLETLRPQQLLEQMVCTAFKSSADILNKTMYGGFKEMKTKMDRLYVTMASTLKSFLGNSDVNDLVGGLKRLCQVFEHIEKLLILAASINRKLIDAPRLAQAIFYDYYNFYLPKMGTSLESICYEKEFTTKEKVGMYERDAVSNLFPPPTANQSWRKVLSMGNLLNGHEPMQREIIFSVQERISNGHYSSPTPLCTNNEKIQTHRMYISGTSNDLWVALSVTSWD

SEQ ID NO: 197725 - protein, 872 aa, Zea Mays
MASTSSSRYAKHRRIGEDDELEEVEEEAEEELERFDDFTIASSWEKFISEIEAICRQWLADGAKILMQKGAEGVPPFENLYMIKRELKHGKRVYSMEYHFMKSAKGQNSYWDDDTHSMQLSFGVDEFLIIAPLSASGVILDDPESTKLLSSVAIALSNCGSNWPAFVPVHDPSRKAYIGIQNLGTVFTRRFEADRIGSQVPIRLMHLEGLHELFLSKFVLSSSDFPARVKVHFSMKLSYKTPEYDHDNETLDSEATEPLTENEVVNHPRKLWDDDCPWAEWYSAEDPVKGFELTAIWGERTFEETLEMAEVENASSFDADSWFLHPVVSRYMVDDSIGKFVGFASQLHLLVADTSGQDNAKSTATVPPPSVIDRVMKDLFSDETGNYMEAENKYSRAMRGAPADSLFGQFCLHALWFGNCNICAIATLWIDFVREIRWCWEESERLPRMKSTSSIDLSSCLIHQKLQMLTICIERKRSLNREKGTGYKDETSNSTAVNKSRKGSAGVVPKMMLLNTFQEMHAPYTQDAPLMTEDMHEERLHAAEAFGNAIGLSGQLERDILCSDMSAFKAANPDAVFEDFIRWHSPGEWLSEDKTDGNAGWPPKGKLSHRMSQHGNVWRKIWNDALPLPVSEQKSLLDPVREGEKVLHYLETLRPQQLLEQMVCTAFKSSADILNKTMYGGFKEMKTKMDRLYVTMASTLKSFLGNSDVNDLVGGLKRLCQVFEHIEKLLILAASINRKLIDAPRLAQAIFYDYYNFYLPKMGTSLESICYEKEFTTKEKVGMYERDAVSNLFPPPTANQSWRKVLSMGNLLNGHEPMQREIIFSVQERISNGHYSSPTPLCTNNEKIQTHRMYISGTSNDLWVALSVTSWD

SEQ ID NO: 197726 - protein, 832 aa, Zea Mays
MASTSSSRYAKHRRIGEDDELEEVEEEAEEELERFDDFTIASSWEKFISEIEAICRQWLADGAKILMQKGAEGVPPFENLYMIKRELKHGKRVYSMEYHFMKSAKGQNSYWDDDTHSMQLSFGVDEFLIIAPLSASGVILDDPESTKLLSSVAIALSNCGRLVLSSSDFPARVKVHFSMKLSYKTPEYDHDNETLDSEATEPLTENEVVNHPRKLWDDDCPWAEWYSAEDPVKGFELTAIWGERTFEETLEMAEVENASSFDADSWFLHPVVSRYMVDDSIGKFVGFASQLHLLVNAYESSVEAQFLEDFVADTSGQDNAKSTATVPPPSVIDRVMKDLFSDETGNYMEAENKYSRAMRGAPADSLFGQFCLHALWFGNCNICAIATLWIDFVREIRWCWEESERLPRMKSTSSIDLSSCLIHQKLQMLTICIERKRSLNREKGTGYKDETSNSTAVNKSRKGSAGVVPKMMLLNTFQEMHAPYTQDAPLMTEDMHEERLHAAEAFGNAIGLSGQLERDILCSDMSAFKAANPDAVFEDFIRWHSPGEWLSEDKTDGNAGWPPKGKLSHRMSQHGNVWRKIWNDALPLPVSEQKSLLDPVREGEKVLHYLETLRPQQLLEQMVCTAFKSSADILNKTMYGGFKEMKTKMDRLYVTMASTLKSFLGNSDVNDLVGGLKRLCQVFEHIEKLLILAASINRKLIDAPRLAQAIFYDYYNFYLPKMGTSLESICYEKEFTTKEKVGMYERDAVSNLFPPPTANQSWRKVLSMGNLLNGHEPMQREIIFSVQERISNGHYSSPTPLCTNNEKIQTHRMYISGTSNDLWVALSVTSWD

SEQ ID NO: 197727 - protein, 405 aa, Zea Mays
MLTICIERKRSLNREKGTGYKDETSNSTAVNKSRKGSAGVVPKMMLLNTFQEMHAPYTQDAPLMTEDMHEERLHAAEAFGNAIGLSGQLERDILCSDMSAFKAANPDAVFEDFIRWHSPGEWLSEDKTDGNAGWPPKGKLSHRMSQHGNVWRKIWNDALPLPVSEQKSLLDPVREGEKVLHYLETLRPQQLLEQMVCTAFKSSADILNKTMYGGFKEMKTKMDRLYVTMASTLKSFLGNSDVNDLVGGLKRLCQVFEHIEKLLILAASINRKLIDAPRLAQAIFYDYYNFYLPKMGTSLESICYEKEFTTKEKVGMYERDAVSNLFPPPTANQSWRKVLSMGNLLNGHEPMQREIIFSVQERISNGHYSSPTPLCTNNEKIQTHRMYISGTSNDLWVALSVTSWD

SEQ ID NO: 197728 - protein, 566 aa, Zea Mays
MASTSSSRYAKHRRIGEDDELEEVEEEAEEELERFDDFTIASSWEKFISEIEAICRQWLADGAKILMQKGAEGVPPFENLYMIKRELKHGKRVYSMEYHFMKSAKGQNSYWDDDTHSMQLSFGVDEFLIIAPLSASGVILDDPESTKLLSSVAIALSNCGSNWPAFVPVHDPSRKAYIGIQNLGTVFTRRFEADRIGSQVPIRLMHLEGLHELFLSKFVLSSSDFPARVKVHFSMKLSYKTPEYDHDNETLDSEATEPLTENEVVNHPRKLWDDDCPWAEWYSAEDPVKGFELTAIWGERTFEETLEMAEVENASSFDADSWFLHPVVSRYMVDDSIGKFVGFASQLHLLVNAYESSVEAQFLEDFVADTSGQDNAKSTATVPPPSVIDRVMKDLFSDETGNYMEAENKYSRAMRGAPADSLFGQFCLHALWFGNCNICAIATLWIDFVREIRWCWEESERLPRMKSTSSIDLSSCLIHQKLQMLTICIERKRSLNREKGTGYKDETSNSTAVNKSRKGSAGVVPKMMLLNTFQEMHAPYTQVLFALFFRFNIVIHMHPLMFPLVP

SEQ ID NO: 197729 - protein, 684 aa, Zea Mays
MHLEGLHELFLSKFVLSSSDFPARVKVHFSMKLSYKTPEYDHDNETLDSEATEPLTENEVVNHPRKLWDDDCPWAEWYSAEDPVKGFELTAIWGERTFEETLEMAEVENASSFDADSWFLHPVVSRYMVDDSIGKFVGFASQLHLLVNAYESSVEAQFLEDFVADTSGQDNAKSTATVPPPSVIDRVMKDLFSDETGNYMEAENKYSRAMRGAPADSLFGQFCLHALWFGNCNICAIATLWIDFVREIRWCWEESERLPRMKSTSSIDLSSCLIHQKLQMLTICIERKRSLNREKGTGYKDETSNSTAVNKSRKGSAGVVPKMMLLNTFQEMHAPYTQDAPLMTEDMHEERLHAAEAFGNAIGLSGQLERDILCSDMSAFKAANPDAVFEDFIRWHSPGEWLSEDKTDGNAGWPPKGKLSHRMSQHGNVWRKIWNDALPLPVSEQKSLLDPVREGEKVLHYLETLRPQQLLEQMVCTAFKSSADILNKTMYGGFKEMKTKMDRLYVTMASTLKSFLGNSDVNDLVGGLKRLCQVFEHIEKLLILAASINRKLIDAPRLAQAIFYDYYNFYLPKMGTSLESICYEKEFTTKEKVGMYERDAVSNLFPPPTANQSWRKVLSMGNLLNGHEPMQREIIFSVQERISNGHYSSPTPLCTNNEKIQTHRMYISGTSNDLWVALSVTSWD

SEQ ID NO: 197730 - protein, 822 aa, Zea Mays
MQKGAEGVPPFENLYMIKRELKHGKRVYSMEYHFMKSAKGQNSYWDDDTHSMQLSFGVDEFLIIAPLSASGVILDDPESTKLLSSVAIALSNCGSNWPAFVPVHDPSRKAYIGIQNLGTVFTRRFEADRIGSQVPIRLMHLEGLHELFLSKFVLSSSDFPARVKVHFSMKLSYKTPEYDHDNETLDSEATEPLTENEVVNHPRKLWDDDCPWAEWYSAEDPVKGFELTAIWGERTFEETLEMAEVENASSFDADSWFLHPVVSRYMVDDSIGKFVGFASQLHLLVNAYESSVEAQFLEDFVADTSGQDNAKSTATVPPPSVIDRVMKDLFSDETGNYMEAENKYSRAMRGAPADSLFGQFCLHALWFGNCNICAIATLWIDFVREIRWCWEESERLPRMKSTSSIDLSSCLIHQKLQMLTICIERKRSLNREKGTGYKDETSNSTAVNKSRKGSAGVVPKMMLLNTFQEMHAPYTQDAPLMTEDMHEERLHAAEAFGNAIGLSGQLERDILCSDMSAFKAANPDAVFEDFIRWHSPGEWLSEDKTDGNAGWPPKGKLSHRMSQHGNVWRKIWNDALPLPVSEQKSLLDPVREGEKVLHYLETLRPQQLLEQMVCTAFKSSADILNKTMYGGFKEMKTKMDRLYVTMASTLKSFLGNSDVNDLVGGLKRLCQVFEHIEKLLILAASINRKLIDAPRLAQAIFYDYYNFYLPKMGTSLESICYEKEFTTKEKVGMYERDAVSNLFPPPTANQSWRKVLSMGNLLNGHEPMQREIIFSVQERISNGHYSSPTPLCTNNEKIQTHRMYISGTSNDLWVALSVTSWD

SEQ ID NO: 197731 - protein, 816 aa, Zea Mays
MASTSSSRYAKHRRIGEDDELEEVEEEAEEELERFDDFTIASSWEKFISEIEAICRQWLADGAKILMQKGAEGVPPFENLYMIKRELKHGKRVYSMEYHFMKSAKGQNSYWDDDTHSMQLSFGVDEFLIIAPLSASGVILDDPESTKLLSSVAIALSNCGRLVLSSSDFPARVKVHFSMKLSYKTPEYDHDNETLDSEATEPLTENEVVNHPRKLWDDDCPWAEWYSAEDPVKGFELTAIWGERTFEETLEMAEVENASSFDADSWFLHPVVSRYMVDDSIGKFVGFASQLHLLVADTSGQDNAKSTATVPPPSVIDRVMKDLFSDETGNYMEAENKYSRAMRGAPADSLFGQFCLHALWFGNCNICAIATLWIDFVREIRWCWEESERLPRMKSTSSIDLSSCLIHQKLQMLTICIERKRSLNREKGTGYKDETSNSTAVNKSRKGSAGVVPKMMLLNTFQEMHAPYTQDAPLMTEDMHEERLHAAEAFGNAIGLSGQLERDILCSDMSAFKAANPDAVFEDFIRWHSPGEWLSEDKTDGNAGWPPKGKLSHRMSQHGNVWRKIWNDALPLPVSEQKSLLDPVREGEKVLHYLETLRPQQLLEQMVCTAFKSSADILNKTMYGGFKEMKTKMDRLYVTMASTLKSFLGNSDVNDLVGGLKRLCQVFEHIEKLLILAASINRKLIDAPRLAQAIFYDYYNFYLPKMGTSLESICYEKEFTTKEKVGMYERDAVSNLFPPPTANQSWRKVLSMGNLLNGHEPMQREIIFSVQERISNGHYSSPTPLCTNNEKIQTHRMYISGTSNDLWVALSVTSWD

SEQ ID NO: 197732 - protein, 376 aa, Zea Mays
MASTSSSRYAKHRRIGEDDELEEVEEEAEEELERFDDFTIASSWEKFISEIEAICRQWLADGAKILMQKGAEGVPPFENLYMIKRELKHGKRVYSMEYHFMKSAKGQNSYWDDDTHSMQLSFGVDEFLIIAPLSASGVILDDPESTKLLSSVAIALSNCGSNWPAFVPVHDPSRKAYIGIQNLGTVFTRRFEADRIGSQVPIRLMHLEGLHELFLSKFVLSSSDFPARVKVHFSMKLSYKTPEYDHDNETLDSEATEPLTENEVVNHPRKLWDDDCPWAEWYSAEDPVKGFELTAIWGERTFEETLEMAEVENASSFDADSWFLHPVVSRYMVDDSIGKFVGFASQLHLLVNAYESSVEAQFLEDFVAGSRYFRPG

SEQ ID NO: 197733 - protein, 616 aa, Zea Mays
MASTSSSRYAKHRRIGEDDELEEVEEEAEEELERFDDFTIASSWEKFISEIEAICRQWLADGAKILMQKGAEGVPPFENLYMIKRELKHGKRVYSMEYHFMKSAKGQNSYWDDDTHSMQLSFGVDEFLIIAPLSASGVILDDPESTKLLSSVAIALSNCGSNWPAFVPVHDPSRKAYIGIQNLGTVFTRRFEADRIGSQVPIRLMHLEGLHELFLSKFVLSSSDFPARVKVHFSMKLSYKTPEYDHDNETLDSEATEPLTENEVVNHPRKLWDDDCPWAEWYSAEDPVKGFELTAIWGERTFEETLEMAEVENASSFDADSWFLHPVVSRYMVDDSIGKFVGFASQLHLLVNAYESSVEAQFLEDFVADTSGQDNAKSTATVPPPSVIDRVMKDLFSDETGNYMEAENKYSRAMRGAPADSLFGQFCLHALWFGNCNICAIATLWIDFVREIRWCWEESERLPRMKSTSSIDLSSCLIHQKLQMLTICIERKRSLNREKGTGYKDETSNSTAVNKSRKGSAGVVPKMMLLNTFQEMHAPYTQDAPLMTEDMHEERLHAAEAFGNAIGLSGQLERDILCSDMSAFKAANPDAVFEDFIRWHSPGEWLSEDKTDEVFA

SEQ ID NO: 197734 - protein, 869 aa, Zea Mays
MASTSSSRYAKHRRIGEDDELEEVEEEAEEELPCLVGYHLPHCFDWEHQKGAEGVPPFENLYMIKRELKHGKRVYSMEYHFMKSAKGQNSYWDDDTHSMQLSFGVDEFLIIAPLSASGVILDDPESTKLLSSVAIALSNCGSNWPAFVPVHDPSRKAYIGIQNLGTVFTRRFEADRIGSQVPIRLMHLEGLHELFLSKFVLSSSDFPARVKVHFSMKLSYKTPEYDHDNETLDSEATEPLTENEVVNHPRKLWDDDCPWAEWYSAEDPVKGFELTAIWGERTFEETLEMAEVENASSFDADSWFLHPVVSRYMVDDSIGKFVGFASQLHLLVNAYESSVEAQFLEDFVADTSGQDNAKSTATVPPPSVIDRVMKDLFSDETGNYMEAENKYSRAMRGAPADSLFGQFCLHALWFGNCNICAIATLWIDFVREIRWCWEESERLPRMKSTSSIDLSSCLIHQKLQMLTICIERKRSLNREKGTGYKDETSNSTAVNKSRKGSAGVVPKMMLLNTFQEMHAPYTQDAPLMTEDMHEERLHAAEAFGNAIGLSGQLERDILCSDMSAFKAANPDAVFEDFIRWHSPGEWLSEDKTDGNAGWPPKGKLSHRMSQHGNVWRKIWNDALPLPVSEQKSLLDPVREGEKVLHYLETLRPQQLLEQMVCTAFKSSADILNKTMYGGFKEMKTKMDRLYVTMASTLKSFLGNSDVNDLVGGLKRLCQVFEHIEKLLILAASINRKLIDAPRLAQAIFYDYYNFYLPKMGTSLESICYEKEFTTKEKVGMYERDAVSNLFPPPTANQSWRKVLSMGNLLNGHEPMQREIIFSVQERISNGHYSSPTPLCTNNEKIQTHRMYISGTSNDLWVALSVTSWD

SEQ ID NO: 197735 - protein, 108 aa, Zea Mays
MSPGKAHEGRNHLSPPSSLPSVVSPSRPPFPSGVAVSLRLLPLPSPDLQDQEPRRSHHARSDVGEQHARRRFGGADPDVVGADGSVEAHRSPVPPGERRLPQLQEEGP

SEQ ID NO: 197736 - protein, 321 aa, Zea Mays
MMREGDACVTLLRSKLHGLVERNRALEEENKQLRHQVSRLKGQISSLEGQDTDKRMLWKKLLESSATSISYSKEKQFVQSNDDAKETTDLSSSLCHRRQQQFSRVALVRSRAPRVPNPPPNPTCTQPKTTVRKEGCMAPPPPPPPPLPSKLQRSAKAIQRVPEVVELYRSLVRPEGKNDAKSGSVGIPAATSSREMIGEIENRSAYVLAIKSDVENQGNFVNFLASEVQNAAYREIADVEEFVKWLDGELSYLVDERAVLKHFPNWPEKKADAMREAAFNYRDLKNLESEASSFHDDRRVATPMALKRMQALQDKRKVQGS

SEQ ID NO: 197737 - protein, 374 aa, Zea Mays
MILLNCNALIAGTRMWRRGANLEGATANFVETEQLVEYEDLTSSFIQLRGSIPLLWEQIVDLSYKPRLSIIEHEETHKVVQRHFHDLSQRYGKIIVADLTDKRGDEGDLSNAFAAEMDRIPGVRYIHFDFHHVCRGGNFDNLQALYNQIEEAIHKQGYFLMNTKGEILLEQSGVVRSNCIDCLDRTNVTQSFLARKSLDSQLQLMGALLSSESISLSDNIHDTFKKLWVEHGDELSLEYAGSYALKGDLVRYGRQTLPGLIKDGMSALSRYYLNNFHDGVRQDALDLISGYYTVSQGSSSPFHNGVDSSSYLPVASAIIVGGITATTFTLSQVGRNAQHLISSIICAGLTVGVVALVKANGKQFCSRPRLCGLI

SEQ ID NO: 197738 - protein, 487 aa, Zea Mays
MKFLCCNEAIKHLTPQERRDEAYFMSLLRIAETTCGLYYSYDRDLTLNLQRASKLAAGRVHKPLWKQADPRFVWNKNLLEELIEAKLDEFIIPLIQGSFQSAQFTLKDRPVRITLFSRRCNRRLGTRMWRRGANLEGATANFVETEQLVEYEDLTSSFIQLRGSIPLLWEQIVDLSYKPRLSIIEHEETHKVVQRHFHDLSQRYGKIIVADLTDKRGDEGDLSNAFAAEMDRIPGVRYIHFDFHHVCRGGNFDNLQALYNQIEEAIHKQGYFLMNTKGEILLEQSGVVRSNCIDCLDRTNVTQSFLARKSLDSQLQLMGALLSSESISLSDNIHDTFKKLWVEHGDELSLEYAGSYALKGDLVRYGRQTLPGLIKDGMSALSRYYLNNFHDGVRQDALDLISGYYTVSQGSSSPFHNGVDSSSYLPVASAIIVGGITATTFTLSQVGRNAQHLISSIICAGLTVGVVALVKANGKQFCSRPRLCGLI

SEQ ID NO: 197739 - protein, 344 aa, Zea Mays
MANADADEAPLLSVEHLRPGSCSRELELREFRDRYVIRSLDGAAAFAVLRSGGSIRPLSPEEAVAESDCKVSRIYGVVGTIRLLAGSYVLVITSQKDAGSYLGSPVYQVNSMKFLCCNEAIKHLTPQERRDEAYFMSLLRIAETTCGLYYSYDRDLTLNLQRASKLAAGRVHKPLWKQADPRFVWNKNLLEELIEAKLDEFIIPLIQGSFQSAQFTLKDRPVRITLFSRRCNRRLGTRMWRRGANLEGATANFVETEQLVEYEDLTSSFIQLRGSIPLLWEQIVDLSYKPRLSIIEHEETHKVVQRHFHDLSQRYGKIIVADLTDKAGELHSHFIKRRKKQGRG

SEQ ID NO: 197740 - protein, 302 aa, Zea Mays
MNKTPKGSYVLVITSQKDAGSYLGSPVYQVNSMKFLCCNEAIKHLTPQERRDEAYFMSLLRIAETTCGLYYSYDRDLTLNLQRASKLAAGRVHKPLWKQADPRFVWNKNLLEELIEAKLDEFIIPLIQGSFQSAQFTLKDRPVRITLFSRRCNRRLGTRMWRRGANLEGATANFVETEQLVEYEDLTSSFIQLRGSIPLLWEQIVDLSYKPRLSIIEHEETHKVVQRHFHDLSQRYGKIIVADLTDKRGDEGDLSNAFAAEMDRIPGVRYIHFDFHHVCRGGNFDNLQALYNQIEEAIHKQG

SEQ ID NO: 197741 - protein, 117 aa, Zea Mays
MANADADEAPLLSVEHLRPGSCSRELELREFRDRYVIRSLDGAAAFAVLRSGGSIRPLSPEEAVAESDCKVSRIYGVVGTIRLLAGELHFIPLRRKTEIIQNSHLAGAKYKHIDTHP

SEQ ID NO: 197742 - protein, 615 aa, Zea Mays
MESHHGGDGKARDKFSVYQNPSLTRALDSRSARPSVTVLLVLAVISVASASSFLALTSREEQLTKLAGRAGISVLAAVFVIRLVEAALGLVALFTLLGFFRALMLYNGQKALAKADKVVLSERQLGLLGLKMAGSEGGGKGEQIKRPPKTKPSTPSEPIVPIRRSSFSYTPSRPSGQSRIGSSHLSPGGERLIMALPMSPSTPLQKHVSSPSTPWSRKSSGSAKGIQTEAMLDQFLAGLDVNIDKIMDPETKTTTPPATITSFGVATPVSITTSTTPSGAARSTPLRPVRMSPGSHQKYSTPPKKGEGELPTPMSLEQAVEAFENLGVYPEIEQWRDSLRQWFSSVVMNPLVQKIKTSHTQVKQTTATVGASVTVSQVGSDLPSTTPPVALSPLGGTKDWQPTVTVDEDGILNQLHSALLHSRDAPVAQTFGSLQQPQRNPHLPAIQACIDAITEHQRLNTLMKGELIKGLLPQSSVRADYTVQRVQELAEGTCLKNYDYMGHGNDYGKSEKKWTTELPTDSHLLLYLFAAFLEHPKWMLHVDPTSYSGSQSSKNPLFLGVLPPKERFPEKYVALISGVPAIIHPGALILAVSKQNPPIFALYWDKKQQFSLQLQ

SEQ ID NO: 197743 - protein, 536 aa, Zea Mays
MLYNGQKALAKADKVVLSERQLGLLGLKMAGSEGGGKGEQIKRPPKTKPSTPSEPIVPIRRSSFSYTPSRPSGQSRIGSSHLSPGGERLIMALPMSPSTPLQKHVSSPSTPWSRKSSGSAKGIQTEAMLDQFLAGLDVNIDKIMDPETKTTTPPATITSFGVATPVSITTSTTPSGAARSTPLRPVRMSPGSHQKYSTPPKKGEGELPTPMSLEQAVEAFENLGVYPEIEQWRDSLRQWFSSVVMNPLVQKIKTSHTQVKQTTATVGASVTVSQVGSDLPSTTPPVALSPLGGTKDWQPTVTVDEDGILNQLHSALLHSRDAPVAQTFGSLQQPQRNPHLPAIQACIDAITEHQRLNTLMKGELIKGLLPQSSVRADYTVQRVQELAEGTCLKNYDYMGHGNDYGKSEKKWTTELPTDSHLLLYLFAAFLEHPKWMLHVDPTSYSGSQSSKNPLFLGVLPPKERFPEKYVALISGVPAIIHPGALILAVSKQNPPIFALYWDKKQQFSLQVICYVHLFLYHGCYYSFSSLQSFILA

SEQ ID NO: 197744 - protein, 127 aa, Zea Mays
MQKKEARGFFELIKSLFNQAEREWVGFLGPIHIWQGMDDRVISPSVAEFVRRLVPGATVHKLLDEGHFSYFCFCDECHRQIFSTLFGIPQGPMNPAPQPSEVVSELNEEITVPDNVTDQEQGKSGLP

SEQ ID NO: 197745 - protein, 397 aa, Zea Mays
MRILVLGFGSGNETPVELPKKLIIGPPSADRIQLPDGRHLAYQEQGVSANRARFSLIYPHSFLSSRLAGIPGIRASLLEEFGVRLVTYDLPGFGESDPHIGRNLNSSAMDMLYLANALNIPEKFWVVGYSGGGMHAWSALRYIPDRIAGAAMFAPMANPYDSKMTKDERRKTWDSWSTKRKLMHILARRFPSLLPFFYRQTFLSGKQGHPESWLSLSLGKKDKTLLEGPAFNAFWERNVAESVRQGDARPFVEEAVLQVSDWGFSLSDIQMQKKEARGFFELIKSLFNQAEREWVGFLGPIHIWQGMDDRVISPSVAEFVRRLVPGATVHKLLDEGHFSYFCFCDECHRQIFSTLFGIPQGPMNPAPQPSEVVSELNEEITVPDNVTDQEQGKSGLP

SEQ ID NO: 197746 - protein, 280 aa, Zea Mays
MIFLVLFWVVGYSGGGMHAWSALRYIPDRIAGAAMFAPMANPYDSKMTKDERRKTWDSWSTKRKLMHILARRFPSLLPFFYRQTFLSGKQGHPESWLSLSLGKKDKTLLEGPAFNAFWERNVAESVRQGDARPFVEEAVLQVSDWGFSLSDIQMQKKEARGFFELIKSLFNQAEREWVGFLGPIHIWQGMDDRVISPSVAEFVRRLVPGATVHKLLDEGHFSYFCFCDECHRQIFSTLFGIPQGPMNPAPQPSEVVSELNEEITVPDNVTDQEQGKSGLP

SEQ ID NO: 197747 - protein, 71 aa, Zea Mays
MHGYTTEMLIVLLASCKEGKFLVFSPEDGSTSDPPPPPPSIIMCDFLLFFFFLKNVIYVYFPFSFYSSGFR

SEQ ID NO: 197748 - protein, 140 aa, Zea Mays
MSQCAFGAWPVATMWRDEREVVVRGPACSSSAVTGWFSQDLSDGTAAAASTTSTARARPSGEVDVHGFAFNSSVLWDPERWGRYPTSEPDKSQDSTKFVQQVVLEDLSKVKGIPSDCSEVMVWHVDTAAPSPSSPQNKRR

SEQ ID NO: 197749 - protein, 266 aa, Zea Mays
MAAKGGATPSPGGTGPAAGNGRLFTLVRSRVQLAKIAALSLVFCGSVVSGNVSLRYLPVSFNQAVGATTPFFTAVFAYIMTVKRESWITYLTLVPVVTGVIIASGGEPSFHLFGFIMCIGATAARALKTVLQGILLSSDGEKLNSMNLLLYMAPIAVIFLLPATIFMEDNVVGITIQLAKKDFTIVWLLLFNSCLSYFVNLTNFLVTKHTSALTLQVLGNAKGAVAVVISIMIFRNPVSITGMLGYTLTVFGVILYSESKKRSNKP

SEQ ID NO: 197750 - protein, 57 aa, Zea Mays
MALPVGPIVGARAPLRGEHVTVERPLGGALVSCAWRYVPVAALFLPSRLQTRMDEMV

SEQ ID NO: 197751 - protein, 274 aa, Zea Mays
MAPTTCLRIPFLPARGRSANVNAPPSWLPRRLSLKSSATNGDNSLPNPISTSPTSPPWLTVVDVNGLRRPPAPVSAPTIPGDRGPRWLPRPFTSADVMGADWKGLKVAYQGCAGAYSEAAAKKAYPNCEAVPCEHFDTAFQAVQNWVVDRAVLPLENSLGGSIHRNYDLLVQHSLHIVGEVRLEVHHCLLANPGVKIENLKSVMSHPQALAQCEHTLTGLGIEHREAVDDTAGAAKNIWSRILVLLLVHWLLNSMDWMFLLRIFRMAKIMSPVL

SEQ ID NO: 197752 - protein, 349 aa, Zea Mays
MLFRTTLALLDLYGPALVTTKDAGDAITLLQSLAGSTFDSSQLVLTACMGFQSVGEMGLQELRKKHRPEILTAMEERSKDRGSWKDKKGLATKLYSFKHDPSFVCSPVKSKEGLDGSKVNGETGPANLKTYLSTSSILDTDLDQGVDLQDQVSWLKIELCKLLEEKRSADLRGEELETALMEMVKHDNRRMLSAKVEKLEAEVYELRKVFSYKQEQEQITLQILLRMEQEQKVAEDARIVAERDAAEQTCAAHLLQEKYEATMAALSQMEKRAVMAETMLEATKQYQAGQVKANQSFTSSSPRAEHVLGKINQEPNQDMSNRRIGLLSRGLGWLDKSKGRQNSTETSGG

SEQ ID NO: 197753 - protein, 480 aa, Zea Mays
MSGTTSSPGKAWSYRGKGTHQILTASAMNFFAGLFLLFMPEENAFWALVGVIDDYFDGYYTEEMIESQVDQLVLEEVVRERFPKLAKHMDFLEVQVGWVTGPWFLSIFVNMLPWESVLRVWDVILFEGNRRMLFRTTLALLDLYGPALVTTKDAGDAITLLQSLAGSTFDSSQLVLTACMGFQSVGEMGLQELRKKHRPEILTAMEERSKDRGSWKDKKGLATKLYSFKHDPSFVCSPVKSKEGLDGSKVNGETGPANLKTYLSTSSILDTDLDQGVDLQDQVSWLKIELCKLLEEKRSADLRGEELETALMEMVKHDNRRMLSAKVEKLEAEVYELRKVFSYKQEQEQITLQILLRMEQEQKVAEDARIVAERDAAEQTCAAHLLQEKYEATMAALSQMEKRAVMAETMLEATKQYQAGQVKANQSFTSSSPRAEHVLGKINQEPNQDMSNRRIGLLSRGLGWLDKSKGRQNSTETSGG

SEQ ID NO: 197754 - protein, 879 aa, Zea Mays
MPLLGFPPGAVVDAPEVWRRDAYGFTVRPQHLQRFREYAKIYKEEEEERAHRWRDFLDRLAESANVPTTPSVSPYAATDDGASGAGQTQGNNGIGIHCDDEEVGSENAEDNNKFESPKEADASGESREPNGKPGDLKDVTKLDKVQEETGSSSTQAIKDLEGLMEASGDFEELRDLNGIPEELEEENNGNLEKLVELFLDKGLLDELKPIKVESQWRVRAALSIIDKMMSSRVVKGGNGANDIHRKDGPQLTSIEEEGMTAEVSHDGYPAEVEESCVAEKVELGQETTDDSTGTALDRDNDGSYFLWREELESLVRGGVPMALRGEIWQAFAGVSARRITGYYNNLLDDRTAILDEKDPVDPVVNEQRSAPRKATQPEKWKGQIEKDLPRTFPGHPALDEDGRNALRRLLTAYARHNPSVGYCQAMNFFAGLFLLFMPEENAFWALVGVIDDYFDGYYTEEMIESQVDQLVLEEVVRERFPKLAKHMDFLEVQVGWVTGPWFLSIFVNMLPWESVLRVWDVILFEGNRRMLFRTTLALLDLYGPALVTTKDAGDAITLLQSLAGSTFDSSQLVLTACMGFQSVGEMGLQELRKKHRPEILTAMEERSKDRGSWKDKKGLATKLYSFKHDPSFVCSPVKSKEGLDGSKVNGETGPANLKTYLSTSSILDTDLDQGVDLQDQVSWLKIELCKLLEEKRSADLRGEELETALMEMVKHDNRRMLSAKVEKLEAEVYELRKVFSYKQEQEQITLQILLRMEQEQKVAEDARIVAERDAAEQTCAAHLLQEKYEATMAALSQMEKRAVMAETMLEATKQYQAGQVKANQSFTSSSPRAEHVLGKINQEPNQDMSNRRIGLLSRGLGWLDKSKQGRQNSTETSGG

SEQ ID NO: 197755 - protein, 542 aa, Zea Mays
MGAAAAAFDSECKRDAYGFTVRPQHLQRFREYAKIYKEEEEERAHRWRDFLDRLAESANVPTTPSVSPYAATDDGASGAGQTQGNNGIGIHCDDEEVGSENAEDNNKFESPKEADASGESREPNGKPGDLKDVTKLDKVQEETGSSSTQAIKDLEGLMEASGDFEELRDLNGIPEELEEENNGNLEKLVELFLDKGLLDELKPIKVESQWRVRAALSIIDKMMSSRVVKGGNGANDIHRKDGPQLTSIEEEGMTAEVSHDGYPAEVEESCVAEKVELGQETTDDSTGTALDRDNDGSYFLWREELESLVRGGVPMALRGEIWQAFAGVSARRITGYYNNLLDDRTAILDEKDPVDPVVNEQRSAPRKATQPEKWKGQIEKDLPRTFPGHPALDEDGRNALRRLLTAYARHNPSVGYCQAMNFFAGLFLLFMPEENAFWALVGVIDDYFDGYYTEEMIESQVDQLVLEEVVRERFPKLAKHMDFLEVQVGWVTGPWFLSIFVNMLPWESGQYSVFGMSSFLKEIVECCSGRRLLCWIYMGLHL

SEQ ID NO: 197756 - protein, 709 aa, Zea Mays
MGAAAAAFDSECKRDAYGFTVRPQHLQRFREYAKIYKEEEEERAHRWRDFLDRLAESANVPTTPSVSPYAATDDGASGAGQTQGNNGIGIHCDDEEVGSENAEDNNKFESPKEADASGESREPNGKPGDLKDVTKLDKVQEETGSSSTQAIKDLEGLMEASGDFEELRDLNGIPEELEEENNGNLEKLVELFLDKGLLDELKPIKVESQWRVRAALSIIDKMMSSRVVKGGNGANDIHRKDGPQLTSIEEEGMTAEVSHDGYPAEVEESCVAEKVELGQETTDDSTGTALDRDNDGSYFLWREELESLVRGGVPMALRGEIWQAFAGVSARRITGYYNNLLDDRTAILDEKDPVDPVVNEQRSAPRKATQPEKWKGQIEKDLPRTFPGHPALDEDGRNALRRLLTAYARHNPSVGYCQAMNFFAGLFLLFMPEENAFWALVGVIDDYFDGYYTEEMIESQVDQLVLEEVVRERFPKLAKHMDFLEVQVGWVTGPWFLSIFVNMLPWESVLRVWDVILFEGNRRMLFRTTLALLDLYGPALVTTKDAGDAITLLQSLAGSTFDSSQLVLTACMGFQSVGEMGLQELRKKHRPEILTAMEERSKDRGSWKDKKGLATKLYSFKHDPSFVCSPVKSKEGLDGSKVNGETGPANLKTYLSTSSILDTDLDQGVDLQDQVSWLKIELCKLLEEKRSADLSISLYFQGARNWKLL

SEQ ID NO: 197757 - protein, 831 aa, Zea Mays
MDSRCGRSICSVSASTPRFTRKRRRRGRTDGGTSWTGAGQTQGNNGIGIHCDDEEVGSENAEDNNKFESPKEADASGESREPNGKPGDLKDVTKLDKVQEETGSSSTQAIKDLEGLMEASGDFEELRDLNGIPEELEEENNGNLEKLVELFLDKGLLDELKPIKVESQWRVRAALSIIDKMMSSRVVKGGNGANDIHRKDGPQLTSIEEEGMTAEVSHDGYPAEVEESCVAEKVELGQETTDDSTGTALDRDNDGSYFLWREELESLVRGGVPMALRGEIWQAFAGVSARRITGYYNNLLDDRTAILDEKDPVDPVVNEQRSAPRKATQPEKWKGQIEKDLPRTFPGHPALDEDGRNALRRLLTAYARHNPSVGYCQAMNFFAGLFLLFMPEENAFWALVGVIDDYFDGYYTEEMIESQVDQLVLEEVVRERFPKLAKHMDFLEVQVGWVTGPWFLSIFVNMLPWESVLRVWDVILFEGNRRMLFRTTLALLDLYGPALVTTKDAGDAITLLQSLAGSTFDSSQLVLTACMGFQSVGEMGLQELRKKHRPEILTAMEERSKDRGSWKDKKGLATKLYSFKHDPSFVCSPVKSKEGLDGSKVNGETGPANLKTYLSTSSILDTDLDQGVDLQDQVSWLKIELCKLLEEKRSADLRGEELETALMEMVKHDNRRMLSAKVEKLEAEVYELRKVFSYKQEQEQITLQILLRMEQEQKVAEDARIVAERDAAEQTCAAHLLQEKYEATMAALSQMEKRAVMAETMLEATKQYQAGQVKANQSFTSSSPRAEHVLGKINQEPNQDMSNRRIGLLSRGLGWLDKSKGRQNSTETSGG

SEQ ID NO: 197758 - protein, 73 aa, Zea Mays
MALYPRQMYAYIRTAFACTCHIYRSMPAKIYSEQDVTEKETKSRTEYTALRSAILHFPMILCQWLSLKTTGCL

SEQ ID NO: 197759 - protein, 566 aa, Zea Mays
MSMAGIARGRSRWRQGDGSSNRNAAHSTVPNPDHQGVVSSRKQATYPGMLSDSVFATVDRQSKTRKAIAVPMKILIEEEFSNDVNSRHISPGAVGRLMGLDSLPSSGIHNKHRHTKSHAPKTSPSSFHGRTGLHDIPHRRSVDTINVFEGMEATKTNMHRSPRSKIGSTTSRSDKVVSADIDFIRQKFMDAKRLSIDESLHISEEFNETLDALVSNSDLLLDFLQNFDPAVIRDLHNHGSPSSTANCITILKPSRRNQFIDMDNIYPQEKGTESIFNEQMEGKHSLWKPYSNVPLQSLKEDSCSSRQKLSRSSHQENTGKRGSPTRIVVLKPNLEKPHDIEEALPLHHKISHSDYRRHKECPEVDRWTPNTEDYMCQVPLGDSETLSRMGKGSREIAREITKQMRAARGGSRKHSVKPETRTLASDERSQFQSSVTRPKTPESIHRYSESCDAWASSSLNSLPTYSTETSESKEAKKHLSNRWKKTRQCQHQETDNDSFNTLGDMLALSDQNASNVATHKMTCRKCPKSEVQSDRIQSSYPLGISTNDGWKDTTTSKLTRTSKCLR

SEQ ID NO: 197760 - protein, 631 aa, Zea Mays
MSMAGIARGRSRWRQGDGSSNRNAAHSTVPNPDHQGVVSSRKQATYPGMLSDSVFATVDRQSKTRKAIAVPMKILIEEEFSNDVNSRHISPGAVGRLMGLDSLPSSGIHNKHRHTKSHAPKTSPSSFHGRTGLHDIPHRRSVDTINVFEGMEATKTNMHRSPRSKIGSTTSRSDKVVSADIDFIRQKFMDAKRLSIDESLHISEEFNETLDALVSNSDLLLDFLQNFDPAVIRDLHNHGSPSSTANCITILKPSRRNQFIDMDNIYPQEKGTESIFNEQMEGKHSLWKPYSNVPLQSLKEDSCSSRQKLSRSSHQENTGKRGSPTRIVVLKPNLEKPHDIEEALPLHHKISHSDYRRHKECPEVDRWTPNTEDYMCQVPLGDSETLSRMGKGSREIAREITKQMRAARGGSRKHSVKPETRTLASDERSQFQSSVTRPKTPESIHRYSESCDAWASSSLNSLPTYSTETSESKEAKKHLSNRWKKTRQCQHQETDNDSFNTLGDMLALSDQNASNVATHKMTCRKCPKSEVQSDRIQSSYPLGISTNDGWKDTTTSKLTRSKSLPPSFIRGVQKSNNRKRSGSVTYNEFSMLKDVLKDQQVLKMTTTALDNCFLVPNLDDLMPKVLIIRFS

SEQ ID NO: 197761 - protein, 828 aa, Zea Mays
MGLDSLPSSGIHNKHRHTKSHAPKTSPSSFHGRTGLHDIPHRRSVDTINVFEGMEATKTNMHRSPRSKIGSTTSRSDKVVSADIDFIRQKFMDAKRLSIDESLHISEEFNETLDALVSNSDLLLDFLQNFDPAVIRDLHNHGSPSSTANCITILKPSRRNQFIDMDNIYPQEKGTESIFNEQMEGKHSLWKPYSNVPLQSLKEDSCSSRQKLSRSSHQENTGKRGSPTRIVVLKPNLEKPHDIEEALPLHHKISHSDYRRHKECPEVDRWTPNTEDYMCQVPLGDSETLSRMGKGSREIAREITKQMRAARGGSRKHSVKPETRTLASDERSQFQSSVTRPKTPESIHRYSESCDAWASSSLNSLPTYSTETSESKEAKKHLSNRWKKTRQCQHQETDNDSFNTLGDMLALSDQNASNVATHKMTCRKCPKSEVQSDRIQSSYPLGISTNDGWKDTTTSKLTRSKSLPPSFIRGVQKSNNRKRSGSVTYNEFSMLKDVLKQDQQVLKMTTTALDNCFLVPNLDDLMPKHEQIEYHQADDYPATYDPHIASDSPEENNHHLGDVSETLCILPDVLESPANSNKDDQQSPMSVLESSMDGEDVYSGDFEKISADLQELRLQLGLLKRETTDTRDGSELSILSDDETARRSLPETGESHAFRNTEERDFSYVFDMLAALGIHAANEDDLLDNCYLLECSAGLDLYDDLEQKYDSLILWPVHERKLLFDITNAVLGDMITSVMNGCSKGLMARCSPGWNREEFAELVWQRVVQLRQEIEFNQEALLLSVEWAGSEDGASLVGRDIGNMLQDDLVQEIIADFLGATKSAKLRG

SEQ ID NO: 197762 - protein, 684 aa, Zea Mays
MLSDSVFATVDRQSKTRKAIAVPMKILIEEEFSNDVNSRHISPGAVGRLMGLDSLPSSGIHNKHRHTKSHAPKTSPSSFHGRTGLHDIPHRRSVDTINVFEGMEATKTNMHRSPRSKIGSTTSRSDKVVSADIDFIRQKFMDAKRLSIDESLHISEEFNETLDALVSNSDLLLDFLQNFDPAVIRDLHNHGSPSSTANCITILKPSRRNQFIDMDNIYPQEKGTESIFNEQMEGKHSLWKPYSNVPLQSLKEDSCSSRQKLSRSSHQENTGKRGSPTRIVVLKPNLEKPHDIEEALPLHHKISHSDYRRHKECPEVDRWTPNTEDYMCQVPLGDSETLSRMGKGSREIAREITKQMRAARGGSRKHSVKPETRTLASDERSQFQSSVTRPKTPESIHRYSESCDAWASSSLNSLPTYSTETSESKEAKKHLSNRWKKTRQCQHQETDNDSFNTLGDMLALSDQNASNVATHKMTCRKCPKSEVQSDRIQSSYPLGISTNDGWKDTTTSKLTRSKSLPPSFIRGVQKSNNRKRSGSVTYNEFSMLKDVLKVGPHYSEYAYRSRQRRSLSRDSTIHGDESDPMSTDNEENMVVEREIHVNYEEPINGTAVTYTSGQSQHPTNLDHELDAIGVLDTSSAVPFSNKKSLSPAEQDQQVLKMTTTALDNCFLVPNLDDLMPKVLIIRFS

SEQ ID NO: 197763 - protein, 627 aa, Zea Mays
MSMAGIARGRSRWRQGDGSSNRNAAHSTVPNPDHQGVVSSRKQATYPGMLSDSVFATVDRQSKTRKAIAVPMKILIEEEFSNDVNSRHISPGAVGRLMGLDSLPSSGIHNKHRHTKSHAPKTSPSSFHGRTGLHDIPHRRSVDTINVFEGMEATKTNMHRSPRSKIGSTTSRSDKVVSADIDFIRQKFMDAKRLSIDESLHISEEFNETLDALVSNSDLLLDFLQNFDPAVIRDLHNHGSPSSTANCITILKPSRRNQFIDMDNIYPQEKGTESIFNEQMEGKHSLWKPYSNVPLQSLKEDSCSSRQKLSRSSHQENTGKRGSPTRIVVLKPNLEKPHDIEEALPLHHKISHSDYRRHKECPEVDRWTPNTEDYMCQVPLGDSETLSRMGKGSREIAREITKQMRAARGGSRKHSVKPETRTLASDERSQFQSSVTRPKTPESIHRYSESCDAWASSSLNSLPTYSTETSESKEAKKHLSNRWKKTRQCQHQETDNDSFNTLGDMLALSDQNASNVATHKMTCRKCPKSEVQSDRIQSSYPLGISTNDGWKDTTTSKLTRSKSLPPSFIRGVQKSNNRKRSGSVTYNEFSMLKDVLKVGPHYSEYAYRSRQRRSLSRDSTIHGPASA

SEQ ID NO: 197764 - protein, 773 aa, Zea Mays
MSMAGIARGRSRWRQGDGSSNRNAAHSTVPNPDHQGVVSSRKQATYPGMLSDSVFATVDRQSKTRKAIAVPMKILIEEEFSNDVNSRHISPGAVGRLMGLDSLPSSGIHNKHRHTKSHAPKTSPSSFHGRTGLHDIPHRRSVDTINVFEGMEATKTNMHRSPRSKIGSTTSRSDKVVSADIDFIRQKFMDAKRLSIDESLHISEEFNETLDALVSNSDLLLDFLQNFDPAVIRDLHNHGSPSSTANCITILKPSRRNQFIDMDNIYPQEKGTESIFNEQMEGKHSLWKPYSNVPLQSLKEDSCSSRQKLSRSSHQENTGKRGSPTRIVVLKPNLEKPHDIEEALPLHHKISHSDYRRHKECPEVDRWTPNTEDYMCQVPLGDSETLSRMGKGSREIAREITKQMRAARGGSRKHSVKPETRTLASDERSQFQSSVTRPKTPESIHRYSESCDAWASSSLNSLPTYSTETSESKEAKKHLSNRWKKTRQCQHQETDNDSFNTLGDMLALSDQNASNVATHKMTCRKCPKSEVQSDRIQSSYPLGISTNDGWKDTTTSKLTRSKSLPPSFIRGVQKSNNRKRSGSVTYNEFSMLKDVLKVGPHYSEYAYRSRQRRSLSRDSTIHGDESDPMSTDNEENMVVEREIHVNYEEPINGTAVTYTSGQSQHPTNLDHELDAIGVLDTSSAVPFSNKKSLSPAEQDQQVLKMTTTALDNCFLVPNLDDLMPKNRQRTPTKMTSKVQCLFLNLPWTEKMFTLGILRRSVQISKSSDCNLGF

SEQ ID NO: 197765 - protein, 179 aa, Zea Mays
MAVNWELQGCCHRDQRIFIAAVGVSTVVILLLWRTFLLTPFKLITVFLHETSHALACKLTCGDVEGMQVHANEGGVTQTRGGIYWIILPAGYLGSSFWGMVFILASTNLLTTRIAAVTIIIWLSVIISCLNCAVVSSLALPWIHCIHCCCLGHTRIYIFPYSEICDLIHRCDEQLIFSL

SEQ ID NO: 197766 - protein, 221 aa, Zea Mays
MAVNWELQGCCHRDQRIFIAAVGVSTVVILLLWRTFLLTPFKLITVFLHETSHALACKLTCGDVEGMQVHANEGGVTQTRGGIYWIILPAGYLGSSFWGMVFILASTNLLTTRIAAGCFILALFIVLFVADNWFLRWLCLGFIVFIAVVWVIQEFTSFHILKYVILFIGVMNSLFSVYDIYDDLISRRVNTSDAEKFAEICPCPCNGFAWGVIWSAPSFNS

SEQ ID NO: 197767 - protein, 93 aa, Zea Mays
MCPSCKSTLTNTMSLVAVSTCGHVFCKKCSDKFLVKDKACLECSKPFRERNLVPLEKGGTGFAAHDERLEARDFKYLGSGSGLGLVKPAPKTY

SEQ ID NO: 197768 - protein, 202 aa, Zea Mays
MPQRHSKNNNDLAFFTYEEKRKLGYGTQRERLGKDSIKPFDACCLCLKPLIGPLCCPKGHTFCKECILECLLSQKKDIKRKLAAHEAQKKQEKEEEEEKLILQKAKELDAFDQQNHGAVPQYHDRSGSQYKNGFHGANSVKVTSFEEEALRNMKAFWLPSATPEATVKRKLLIRRAARQETPVATCALVASPLSQIPCPLWR

SEQ ID NO: 197769 - protein, 133 aa, Zea Mays
MAPKAEKTTAGKKPKSEKRLPASKSSGKEGGEKKGKKKAKKSVETYKIYIFKVLKQVHPDIGISSKAMSIMNSFINDIFEKLAGEAAKLARYNKKPTITSREIQTSVRLVLPGELAKHAVSEGTKAVTKFTSN

SEQ ID NO: 197770 - protein, 675 aa, Zea Mays
MNGRPASARTVSRTRRALRRLKGGGGLPVASLGPSPRRNRRVAETSSPVSPPHRSLSRAPLGSSLQVCLLLSFNMPASEMEAPASAHASAAAADDSQEDSAPTAAVAAAADEAQPAAAAVPALYVGDLHEDVAEEHLFEAFSKIGTVTSVRVCRDNATSRSLRYGYVNYFSRADAVVALDKLNHSLVLDKPIRVMWSNRDPDARRSGVGNIFVKNLSSSVDNASLQELFSKFGDVLSCKVAKNEDGTSRGYGFVQFTSQESADEAIGNLNGSLFNDRKLHVATFIKKSERSANNDDKFTNLYMKHLDDDITEELVKLKFSQFGSIVSVKIMKRPDGSSLGFGFVSFQNPESAIKAQSTMNGMLLGSKALYVARAQKKEERKQYLQRLHEEKRNEIMTRCNESNVYIKNIHDEVDDDALRARFVEFGNITSAKVMRDDKGISRGFGFVCYSTPEEAKSAVNNMRGVMFFGKPLYVAIFQRKEERKAKLQQHFAQLARMVGPANSMIPTGYPQVYFAHPSTHIPQGPPRHGFVYPPMGLSHEWRPSMFPPAPNLQQIHSPVMPNSPRHYRSNRGRMGGNMMPLPHAVHTMNYMTHPQPAKEFMSLPRQPELASKITGMLLELDNSEVVTLLCSSEMLSVKVDECVQLLQATKPKAEDHEALHPGFMLEPRPPSVNAS

SEQ ID NO: 197771 - protein, 732 aa, Zea Mays
MNGRPASARTVSRTRRALRRLKGGGGLPVASLGPSPRRNRRVAETSSPVSPPHRSLSRAPLGSSLQVCLLLSFNMPASEMEAPASAHASAAAADDSQEDSAPTAAVAAAADEAQPAAAAVPALYVGDLHEDVAEEHLFEAFSKIGTVTSVRVCRDNATSRSLRYGYVNYFSRADAVVALDKLNHSLVLDKPIRVMWSNRDPDARRSGVGNIFVKNLSSSVDNASLQELFSKFGDVLSCKVAKNEDGTSRGYGFVQFTSQESADEAIGNLNGSLFNDRKLHVATFIKKSERSANNDDKFTNLYMKHLDDDITEELVKLKFSQFGSIVSVKIMKRPDGSSLGFGFVSFQNPESAIKAQSTMNGMLLALYVARAQKKEERKQYLQRLHEEKRNEIMTRCNESNVYIKNIHDEVDDDALRARFVEFGNITSAKVMRDDKGISRGFGFVCYSTPEEAKSAVNNMRGVMFFGKPLYVAIFQRKEERKAKLQQHFAQLARMVGPANSMIPTGYPQVYFAHPSTHIPQGPPRHGFVYPPMGLSHEWRPSMFPPAPNLQQIHSPVMPNSPRHYRSNRGRMGGNMMPLPHAVHTMNYMTHPQPAKEFMSLPRQRFNHPKYFSNDVMANSLAIHQSDPVSTMNDSFSNYLASAPPAEQKNLLGNRLYPLVERHQPELASKITGMLLELDNSEVVTLLCSSEMLSVKVDECVQLLQATKPKAEDHEALHPGFMLEPRPPSVNAS

SEQ ID NO: 197772 - protein, 688 aa, Zea Mays
MATYEPKNILITGAAGFIASHVANRLVRNYPQYKIVVLDKIDYCSNLKNLNPSRSSPNFKFVKGDIASADLVNYLLITESIDTIMHFAAQTHVDNSFGNSFEFTKNNIYGTHVLLEACKVTGQIRRFIHVSTDEVYGETDEDAVVGNHEASQLLPTNPYSATKAGAEMLVMAYGRSYGLPVITTRGNNVYGPNQFPEKLIPKFILLAMQGLPLPIHGDGSNVRSYLYCEDVAEAFEVVLHKGEVGHVYNIGTVKERRVIDVAKDICKLFGLDTEKVIRFVENRPFNDQRYFLDDQKLKRLGWAERTPWEEGLKKTMEWYTTNPDYWGDVTGALLPHPRMLMTPGVERHNWAEEIKSLASSPAEASTIAPATSTKSISDAPQKPSYRFLIYGRTGWIGGLLGKICEKQGIPYEYGKGRLEERSQLLEDIRNVKPTHVFNAAGVTGRPNVDWCETHKQDTIRTNVVGTLNLADVCRKQGLLMINYATGCIFEYDAKHPEGSGIGFKEEDTPNFIGSFYSKTKAMVEELLKEYDNVCTLRVRMPISSDLSNPRNFITKIARYDKVVNIPNSMTILDELLPISIEMAKRDCRGIWNFTNPGAVSHNEILEMYKKYINPDFKWTNFTLEEQAKVIVAPRSNNEMDTSKLKAEFPQLLSIKDSLINCVRFFWDNSKHTSFWSSIIHAIYKQVDI

SEQ ID NO: 197773 - protein, 181 aa, Zea Mays
MAQKETNGSNGDHISTRPPPTPSPLRFSKFFQANLRILVTGGAGFIGSHLVDKLMENEKHEVIVADNFFTGSKDNLKKWIGHPRFELIRHDVTEPLLVEVDQIYHLACPASPIFYKHNPVKTIKTNVIGTLNMLGLAKRVGARILLTSTSEVYGDPLEHPQTEAYWGNVNPIGVVMMRVSV

SEQ ID NO: 197774 - protein, 377 aa, Zea Mays
MRKLPPAHRLRWMRALLLALPLVSLPILYAALGAARSSASAARPPPPPPQQQQQRRPPPRLAYLITGAGPGDGPRIRRLMRALYHPWNYYLVGVAGEDERTDLEAFVRAQEAPRRYGNVRVSAAGEWGSVSRRGPTELASTLHAAAVLLREFDGWSWFINLSASDYPLMPQDDILHIFSYMPRDLNFIEHTSNIGWKEYQRARPIIVDPALQVPNKTEVVTTKEKRSMPSAFKIFVGSSWVMLSRSFLEFCLLGWDNLPRTLLIDLRFMAWDNPPRTHPANLTTEHFDAMADSGAPFAHSFANDNSVLDMIDAKLLGRAPDRFTPGGWCLGSSVGGKDPCTFLGRSFILRPTKGSAKLEKLLLKLLEPDNFRPKQCK

SEQ ID NO: 197775 - protein, 239 aa, Zea Mays
MRKLPPAHRLRWMRALLLALPLVSLPILYAALGAARSSASAARPPPPPPQQQQQRRPPPRLAYLITGAGPGDGPRIRRLMRALYHPWNYYLVGVAGEDERTDLEAFVRAQEAPRRYGNVRVSAAGEWGSVSRRGPTELASTLHAAAVLLREFDGWSWFINLSASDYPLMPQDDILHIFSYMPRDLNFIEHTSNIGWKEYQRARPIIVDPALQVPNKTEVVTTKEKRSMPSAFKIFVRLG

SEQ ID NO: 197776 - protein, 166 aa, Zea Mays
MLSRSFLEFCLLGWDNLPRTLLMYFTNFLSSSEGYFHTVICNSEYYQNTTVNSDLRFMAWDNPPRTHPANLTTEHFDAMADSGAPFAHSFANDNSVLDMIDAKLLGRAPDRFTPGGWCLGSSVGGKDPCTFLGRSFILRPTKGSAKLEKLLLKLLEPDNFRPKQCK

SEQ ID NO: 197777 - protein, 397 aa, Zea Mays
MRKLPPAHRLRWMRALLLALPLVSLPILYAALGAARSSASAARPPPPPPQQQQQRRPPPRLAYLITGAGPGDGPRIRRLMRALYHPWNYYLVGVAGEDERTDLEAFVRAQEAPRRYGNVRVSAAGEWGSVSRRGPTELASTLHAAAVLLREFDGWSWFINLSASDYPLMPQDDILHIFSYMPRDLNFIEHTSNIGWKEYQRARPIIVDPALQVPNKTEVVTTKEKRSSSWVMLSRSFLEFCLLGWDNLPRTLLMYFTNFLSSSEGYFHTVICNSEYYQNTTVNSDLRFMAWDNPPRTHPANLTTEHFDAMADSGAPFAHSFANDNSVLDMIDAKLLGRAPDRFTPGGWCLGSSVGGKDPCTFLGRSFILRPTKGSAKLEKLLLKLLEPDNFRPKQCK

SEQ ID NO: 197778 - protein, 173 aa, Zea Mays
MSRLASGLQRPRRSLSPCEVLWCALASCGLVLFSQLAVAMVPRLFPSLYLLAMLPIAGLVLLAAIVLGRLWRRFIGVTASAPLFVLFNILLSWGVYIFVIRRKTSSLLDMLINAECALLLWGFYRILSCDPGIFACDSSYLAEAGCKDFVEAIYTKTPNALKSQAVYLVQSKH

SEQ ID NO: 197779 - protein, 250 aa, Zea Mays
MSRLASGLQRPRRSLSPCEVLWCALASCGLVLFSQLAVAMVPRLFPSLYLLAMLPIAGLVLLAAIVLGRLWRRFIGVTASAPLFVLFNILLSWGVYIFVIRRKTSSLLDMLINAECALLLWGFYRILSCDPGIFACDSSYLAEAGCKDFVEAIYTSERLPMLSRVRQCTWCKANIRGYDHHCPAFGTCIGFVVAESTYTMCSTKYITICISSGTIKSENPVSLNMVISTMLFSILQVLWQVVFSLGVSCS

SEQ ID NO: 197780 - protein, 282 aa, Zea Mays
MSRLASGLQRPRRSLSPCEVLWCALASCGLVLFSQLAVAMVPRLFPSLYLLAMLPIAGLVLLAAIVLGRLWRRFIGVTASAPLFVLFNILLSWGVYIFVIRRKTSSLLDMLINAECALLLWGFYRILSCDPGIFACDSSYLAEAGCKDFVEAIYTSERLPMLSRVRQCTWCKANIRGYDHHCPAFGTCIGQKNHRLFMALLTGFVVAESTYTMCSTKYITICISSGTIKSENPVSLNMVISTMLFSILQVLWQIVFLMWHIYCICFNIKTYELTGRNILSSR

SEQ ID NO: 197781 - protein, 185 aa, Zea Mays
MQNVHCFCGDSTGFYLVILVFLLVILLIWQRLVARILWKLYTRRLPMLSRVRQCTWCKANIRGYDHHCPAFGTCIGQKNHRLFMALLTGFVVAESTYTMCSTKYITICISSGTIKSENPVSLNMVISTMLFSILQVLWQIVFLMWHIYCICFNIKTYEWVISNFPCFRFFFHQLQVVFSLGVSCS

SEQ ID NO: 197782 - protein, 173 aa, Zea Mays
MLINAECALLLWGFYRILSCDPGIFACDSSYLAEAGCKDFVEAIYTSERLPMLSRVRQCTWCKANIRGYDHHCPAFGTCIGQKNHRLFMALLTGFVVAESTYTMCSTKYITICISSGTIKSENPVSLNMVISTMLFSILQVLWQIVFLMWHIYCICFNIKTYELTGRNILSSR

SEQ ID NO: 197783 - protein, 190 aa, Zea Mays
MLINAECALLLWGFYRILSCDPGIFACDSSYLAEAGCKDFVEAIYTSERLPMLSRVRQCTWCKANIRGYDHHCPAFGTCIGQKNHRLFMALLTGFVVAESTYTMCSTKYITICISSGTIKSENPVSLNMVISTMLFSILQVLWQIVFLMWHIYCICFNIKTYEWVISNFPCFRFFFHQLQVVFSLGVSCS

SEQ ID NO: 197784 - protein, 149 aa, Zea Mays
MQNVHCFCGDSTGFYLVILVFLLVILLIWQRLVARILWKLYTRRLPMLSRVRQCTWCKANIRGYDHHCPAFGTCIGQKNHRLFMALLTGFVVAESTYTMCSTKYITICISSGTIKSENPVSLNMVISTMLFSILQVLWQVVFSLGVSCS

SEQ ID NO: 197785 - protein, 320 aa, Zea Mays
MSRLASGLQRPRRSLSPCEVLWCALASCGLVLFSQLAVAMVPRLFPSLYLLAMLPIAGLVLLAAIVLGRLWRRFIGVTASAPLFVLFNILLSWGVYIFVIRRKTSSLLDMLINAECALLLWGFYRILSCDPGIFACDSSYLAEAGCKDFVEAIYTSERLPMLSRVRQCTWCKANIRGYDHHCPAFGTCIGQKNHRLFMALLTGFVVAESTYTMCSTKYITICISSGTIKSENPVSLNMVISTMLFSILQVLWQIVFLMWHIYCICFNIKTYEWINWKKYPEFQMKEQPRSDSEVKSMNPYDKGMLCNIRDFLKPVLSTKT

SEQ ID NO: 197786 - protein, 113 aa, Zea Mays
MQNVHCFCGDSTEAGCKDFVEAIYTSERLPMLSRVRQCTWCKANIRGYDHHCPAFGTCIGQKNHRLFMALLTGFVVAESTYTMCSTKCMLFVFLLSEMSVGFILIADAAASYL

SEQ ID NO: 197787 - protein, 425 aa, Zea Mays
MVFQKWSSSSEMESCGGGQVPEMPRVPKSARGKRSVRKKEAQSPAQMSAIDLLATVAGKLFDEGAGSLGNTSAGAPALAAFAKDALVKQEQCDEQMKLFKHEATDQDSCNESAILPHIVLQRVVNNARNEDPKAKSEVQDKESSMISYTKAELGCNFGVIADRWSPESVESGAFTGDAVARLMMTAPAGFHKNAPEMYSLLDSMDVDVKPPPLVSSDSTGEMPLHGDKIHRSTSLPRAPKGVGFFAVDRDDDDDKSSGCTHPSTATNKDFTSNCKAEYNRVRKLLTSKHRKVAPARIHKSDLSYSDVERKPSFRYKKMHTRQRTQRSTFKRRKLFDRHLALASEFGTANGKGNTKVAGRNSNAVSLEANKGTNSMPFQKSCGSNDCHVKLRIKSFNVPELLVEIPDSATVGSLKHFQCRKLFSRQ

SEQ ID NO: 197788 - protein, 624 aa, Zea Mays
MVFQKWSSSSEMESCGGGQVPEMPRVPKSARGKRSVRKKEAQSPAQMSAIDLLATVAGKLFDEGAGSLGNTSAGAPALAAFAKDALVKQEQCDEQMKLFKHEATDQDSCNESAILPHIVLQRVVNNARNEDPKAKSEVQDKESSMISYTKAELGCNFGVIADRWSPESVESGAFTGDAVARLMMTAPAGFHKNAPEMYSLLDSMDVDVKPPPLVSSDSTGEMPLHGDKIHRSTSLPRAPKGVGFFAVDRDDDDDKSSGCTHPSTATNKDFTSNCKAEYNRVRKLLTSKHRKVAPARIHKSDLSYSDVERKPSFRYKKMHTRQRTQRSTFKRRKLFDRHLALASEFGTANGKGNTKVAGRNSNAVSLEANKGTNSMPFQKSCGSNDCHVKLRIKSFNVPELLVEIPDSATVGSLKKTVLEAVTAILGGGLRVGVLHHGKKVRDDSKTLIQAGIGQDDMLDNLGFSLEPNCTQNPQVQAPEDVSFLENIDTTEPLARITPADSSSKLGEVDVSQELALTPLAMNYQGSDHDSVHSPGAVSSRDKDSRALFLVPAADPNAGAVVPANKTKRSPEQGHRRIRRPFSVAEVEALVLAVEKLGTGRWRDVKLRAFDNAKHRTYVDLKAMN

SEQ ID NO: 197789 - protein, 96 aa, Zea Mays
MSKSGSEKSRLEEQQRAEKRTREAKGEQFTPRWFNVTDAVASTPWGDLEICEYSGRYTEHRAAIDSSNSTDDDDEIDVTSVEFDPWQYGGSSSSPQ

SEQ ID NO: 197790 - protein, 264 aa, Zea Mays
MSILLMISRLRTRVTLKKSGVVLDLVPPLTKVNNLIFGRTWVDSPGEMVMTNLTTGDKAVLYFQPCGWFGAGRYEVDGYVYSAAEEPKIMITGKWNKSLSCQPCDQEGDPLPGTELKEIWRVAPAPQNDGYQYTHFAHKINSFSTAPKKLLASDSRLRPDRYALEKGDMSKSGSEKSRLEEQQRAEKRTREAKGEQFTPRWFNVTDAVASTPWGDLEICEYSGRYTEHRAAIDSSNSTDDDDEIDVTSVEFDPWQYGGSSSSPQ

SEQ ID NO: 197791 - protein, 81 aa, Zea Mays
MWTNERHITWTPISCHYLLGCSFISERGRGCGLGAKEEREYWAAAGCERGGGSFHQSVHPHPQRLVRSLPSIKNSSSIFRT

SEQ ID NO: 197792 - protein, 89 aa, Zea Mays
MWTNERHITWTPISCHYLLGCSFISERGRGCGLGAKEEREYWAAAGCERGGGSFHQSVHPHPQRLARARPAITVRSLPSIKNSSSIFRT

SEQ ID NO: 197793 - protein, 96 aa, Zea Mays
MWTNERHITWTPISCHYLLGCSFISERGRGCGLGAKEEREYWAAAGCERGGGSFHQSVHPHPQRLILPTGQSQTGHHSEKLTIDQEFEQYFSNLML

SEQ ID NO: 197794 - protein, 238 aa, Zea Mays
MSFVFRGSRADIEAGGFTGFAPERRTMRIHAGSRPVNSNSLVFLLTVFVLFMVLNSHQMSPNLLLWIVLGAFLMATSLRMYATCQQLAHAAAANSFLGHTELRVHVPPTIALATRGQLQSLRLQLALLDREFDDLDYDTLRALDADNSLHVPSMSEEEINSLPVFKYKVQAQQGNAPARKSDEASQLSVSSTGSGNEFHVNCIDPWLRQQGTCPICKHQVSDGWHATGNGEEDASYMV

SEQ ID NO: 197795 - protein, 708 aa, Zea Mays
MALTSQGITLRSPPAGPRGHGGRRSSSVPTAATPRVLGQPHAGQALSISPVRYEPAARPPRGGSAAAAIRAAASAGAQPGSDPVSAEPRIELPTIFSVFSETAKTGAAFFIASSGAAFLLGSFGGFGGGAGGLFGGGGGGGGGWGAGGGGAGGGGGGDFWYRLISSGAAHADDKSSGDWDAHGLPVNMTVPLTKLSGLKRYKLSELKFFDRAAASGGAYTGPEDSFFEMVTLQPGGVYTKSQLLKELETLVSCGMFERVDLEVKPKPDNTIGLTVSFVESVWSSAKQFKCINVGLMSQSGQVDFDQDMTEREKMDYLRKQERDYQQRVRGANPCILPENVRGEVLGMMKKQEKVSARMLQKIRDHVQKWYHNEGFVCAQVVNFGNLNTNEVVCEVVEGDITKVEYQFQDKLGNIVEGNTQLAIIDRELPQQLRPGHIFNIGAGKQALKNINSLALFSNIEVNPRPDETKEGGIVVEIKLKELEPKSAEVSTEWSIVPGREGRPTLASIQPGGTVSFEHRNIYGLNRSIVGSVTSSNLLNPQDDLSFKLEYVHPYLDGVDDRSKNRTFKTSCFNTRKLSPVFVAGPNMDEAPPVWIDRVGFKANITESFTRQSKFTYGLVVEEITTRDETNTVCTHGSRAMPSGGLNMDGPPTTLSGTGVDRMAFLQANITRDNTEFVNGAIVGDRYIFQTKVLALEAKTRSSTVINLL

SEQ ID NO: 197796 - protein, 63 aa, Zea Mays
MAKSWLDIGLAVFVAIPSLEGFVGGSAVACVSLLVLLAEAGLRRDRDFPRGRDRVGIQIHSHD

SEQ ID NO: 197797 - protein, 84 aa, Zea Mays
MVSNFTSVIARLINGGKRTVNSLDLIYVYPDMTMGLFLAYQFSNFSLQVFVYLHFVSENPMASNGPLHFVLFFFLLWKPNCLFC

SEQ ID NO: 197798 - protein, 279 aa, Zea Mays
MRKVCPNLERDDALDTVLEVPIPEEMFSGGGGGGGGSCGFRFGCTSVKAWMRSHAADRCGAGEPCSMSRGELQLMLGVIGAPLVPLPVAVCCRAEQSPCSVLCEQLKTGPIESSSAKYIVQQYVAASGGERALDRVKSMYAMGKVRMTAAEQLNGSDAAGGHCGGATGKGNRGGRRKGRGGEVGGFVLWQKRPELWCLELVVSGCKISAGSDGKVAWRQTPWHQSHASRGPPRPLRRSLQVRSRSVAYARGFVYGFQLAPHCFTRCALECLPYARGRSP

SEQ ID NO: 197799 - protein, 244 aa, Zea Mays
MIFYLFMQAIHTIPHLLLSTCHYKYKFHPSKSNVIPSLRFTSPVNGNEKSEQLDWDARINIILGAAKGLSYLHHDCSPRIIHRDIKSSNILLDGSFEARVSDFGLAKLLEDEESHITTIVAGTFGYLAPEYMQFGRATEKTDVYSFGVLVLEILSGKRPTDASFIEKGLNIVGWLNFLAGENREREIVDLNCEGVHTETLDALLSLAKQCVSSLPEERPTMHRVVQMLESDVVTPCPSDFYDSE

SEQ ID NO: 197800 - protein, 422 aa, Zea Mays
MGSFLRKQPSYLFILIILHLVAHEARTLSSDGEALLAFKKAVTNSDGVFLNWREQDADPCNWKGVRCDSHSKRVINLILAYHRLVGPIPPEIGRLNQLQTLSLQGNSLYGSLPPELGNCTKLQQLYLQGNYLSGYIPSEFGELVELVALDLSSNTLSGSVPHSLDKLSKLTSFNVSMNFLTGAIPSSGSLVNFNETTMRLVENQNDDMINKRNGKNSTRLVISAVATVGALLLVALMCFWGCFLYKNFGKKDMRGFRVELCGGSSVVMFHGDLPYSSKDILKKLETMDEENIIGAGGFGTVYKLAMDDGNVFALKRIVKTNEGLDRFFDRELEILGSVKHRYLVNLRGYCNSPSSKLLIYDYLQGGSLDEVLHGKVSFLFISIHLDCIYLFIFNCFFLNKHINKLVTSPFATMTSISCFCSM

SEQ ID NO: 197801 - protein, 394 aa, Zea Mays
MNFLTGAIPSSGSLVNFNETTMRLVENQNDDMINKRNGKNSTRLVISAVATVGALLLVALMCFWGCFLYKNFGKKDMRGFRVELCGGSSVVMFHGDLPYSSKDILKKLETMDEENIIGAGGFGTVYKLAMDDGNVFALKRIVKTNEGLDRFFDRELEILGSVKHRYLVNLRGYCNSPSSKLLIYDYLQGGSLDEVLHEKSEQLDWDARINIILGAAKGLSYLHHDCSPRIIHRDIKSSNILLDGSFEARVSDFGLAKLLEDEESHITTIVAGTFGYLAPEYMQFGRATEKTDVYSFGVLVLEILSGKRPTDASFIEKGLNIVGWLNFLAGENREREIVDLNCEGVHTETLDALLSLAKQCVSSLPEERPTMHRVVQMLESDVVTPCPSDFYDSE

SEQ ID NO: 197802 - protein, 163 aa, Zea Mays
MERLPGARIAFVGDGPYRAELEKMFMGMPAVFTGMLQGEELSQAYASADVFAMPSESETLGQVVLESMASGVPVVAARAGGIPDIIPKDKEGKTSFLFTPGDLDECVRKIEQVLSSKDLRETVGKAAREEMEKCDWRAASKKIRNEHYSTAISYWRKKMDKSN

SEQ ID NO: 197803 - protein, 202 aa, Zea Mays
MSQTGEVQVPLLQTEEADGEWSSKPRRIALFVEPSPFAYISGYKNRFQNFIKHLREMGDEVLVVTTHKGAPEEFHGAKVIGSWSFPCPLYQNVPLSLALSPRIFSEVNKFKPDIIHATSPGIMVLGALAIAKMISVPILMSYHTHLPAYIPRYNLNWLLEPTWSFIRCLHRSADLTLVPSLAIAEDFETAKVVPEYGFGIRV

SEQ ID NO: 197804 - protein, 196 aa, Zea Mays
MRVRLSGGEPEKPLVIHVGRFGREKNLDFLKRVMERLPGARIAFVGDGPYRAELEKMFMGMPAVFTGMLQGEELSQAYASADVFAMPSESETLGQVVLESMASGVPVVAARAGGIPDIIPKDKEGKTSFLFTPGDLDECVRKIEQVLSSKDLRETVGKAAREEMEKCDWRAASKKIRNEHYSTAISYWRKKMDKSN

SEQ ID NO: 197805 - protein, 267 aa, Zea Mays
MYIPRYNLNWLLEPTWSFIRCLHRSADLTLVPSLAIAEDFETAKVVPANRIRLWNKGVDSESFHTKYRRHEMRVRLSGGEPEKPLVIHVGRFGREKNLDFLKRVMERLPGARIAFVGDGPYRAELEKMFMGMPAVFTGMLQGEELSQAYASADVFAMPSESETLGQVVLESMASGVPVVAARAGGIPDIIPKDKEGKTSFLFTPGDLDECVRKIEQVLSSKDLRETVGKAAREEMEKCDWRAASKKIRNEHYSTAISYWRKKMDKSN

SEQ ID NO: 197806 - protein, 314 aa, Zea Mays
MLNCIGRGGFGAVYKGNLKDGTQIAIKKLAVESKQRISEFLTEINVISNVRHPNLVRLIGCCAEGKNRLLVYEYAENNSLANALLGPKNKCIPLDWQKRAAICIGTASGLAFLHEKAQPCIVHRDIKASNILLDKKLLPKIGDFGLAKIFPDTVTHISTRVAGTMGYLAPEYALLGQLTKKADIYSFGVLLLEVISGENSSKPTWGPNMHVLVEWTWKLREEGRLLEIVDPELKKYPEEQMLRFIKVALLCTQATSQQRPSMKQVVNMLSNKAEIDLQNVVAPGVLKEPRQRTGGFGSLTAGTSSKPKHQRQSS

SEQ ID NO: 197807 - protein, 226 aa, Zea Mays
MGSSVGCLVGGSKSRQDQNCQVVAGSSHSSGHVLSRAGNNVQVFSLNELKTATQNFHMLNCIGRGGFGAVYKGNLKDGTQIAIKKLAVESKQRISEFLTEINVISNVRHPNLVRLIGCCAEGKNRLLVYEYAENNSLANALLGPKNKCIPLDWQKRAAICIGTASGLAFLHEKAQPCIVHRDIKASNILLDKKLLPKIGDFGLAKIFPDTVTHISTRVAGTMLVHF

SEQ ID NO: 197808 - protein, 106 aa, Zea Mays
MINALKYNLEQVCAHQSKDFKEGCGDSEVDDTASCRDGGAINFQLTPKENRQPKDLTACRVCKSSEASMLLLPCRHLCLCKECESKLSFCPLCQSSKILGMEIYYA

SEQ ID NO: 197809 - protein, 201 aa, Zea Mays
MKKKRVWAIMWKPGKLGSLVACASSERLRQSILEKVQAKQFEALASVEDKILRKIRDKEAEVETINKRNSELEDQIKHLGVEVGAWQHRAKYNESMINALKYNLEQVCAHQSKDFKEGCGDSEVDDTASCRDGGAINFQLTPKENRQPKDLTACRVCKSSEASMLLLPCRHLCLCKECESKLSFCPLCQSSKILGMEIYYA

SEQ ID NO: 197810 - protein, 245 aa, Zea Mays
MSSIDFLQTGSAVSTGLALSLEDRRHVGGGAGNSSGDSPLLLLPMLDDDISREVQRLDADMDRFIKAQSERLRQSILEKVQAKQFEALASVEDKILRKIRDKEAEVETINKRNSELEDQIKHLGVEVGAWQHRAKYNESMINALKYNLEQVCAHQSKDFKEGCGDSEVDDTASCRDGGAINFQLTPKENRQPKDLTACRVCKSSEASMLLLPCRHLCLCKECESKLSFCPLCQSSKILGMEIYYA

SEQ ID NO: 197811 - protein, 336 aa, Zea Mays
MAFFSHHHLQQPHAQQPVLPSFRNALPVPVDGQIPAPLTFFNPPPAFPEQPAQAPLVDAVGLTAAAGLGWRQPREQELLGENSQMSSIDFLQTGSAVSTGLALSLEDRRHVGGGAGNSSGDSPLLLLPMLDDDISREVQRLDADMDRFIKAQVTHSSLLSERLRQSILEKVQAKQFEALASVEDKILRKIRDKEAEVETINKRNSELEDQIKHLGVEVGAWQHRAKYNESMINALKYNLEQVCAHQSKDFKEGCGDSEVDDTASCRDGGAINFQLTPKENRQPKDLTACRVCKSSEASMLLLPCRHLCLCKECESKLSFCPLCQSSKILGMEIYYA

SEQ ID NO: 197812 - protein, 227 aa, Zea Mays
MSVTDTMHSCVFLNFLSKCVLLIVLPFANPTPDSRRPISSSLAPSVLPSPISPATRPFPLSHLLPPHLAMAFFSHHHLQQPHAQQPVLPSFRNALPVPVDGQIPAPLTFFNPPPAFPEQPAQAPLVDAVGLTAAAGLGWRQPREQELLGENSQMSSIDFLQTGSAVSTGLALSLEDRRHVGGGAGNSSGDSPLLLLPMLDDDISREVQRLDADMDRFIKAQIWTSRG

SEQ ID NO: 197813 - protein, 51 aa, Zea Mays
MARSSLSLSTFHLQRRASVSPCLGSLEEMVAGITWSSTLPPGWTVEWDPAS

SEQ ID NO: 197814 - protein, 324 aa, Zea Mays
MYKAPRDKLACILNCCKVINNLLLNASIVSNETPPGADEFLPVLIYVTIKLHSNLLYIQRYRRQTRLVSEAQYFFTNILSAESFIWNIDGESLSMNELDFQRRMDSARERMLGLSADSEYQDNQANPDVQDRTSQSLGANRNSDASLSLKDHVQGSGQDMRRDSDVTVSGKQAEQVQSISELEKKGTAELLNEDDLNKKFQEYPFLFARAGDLTIADVESLLNSYKHLVLRYVALAQGMGVSPETTLTQNGQTSDLVVSEEPEILNSVVKDNENSAIINKNVDDVISLNHHSEAVDTEASEQMNQRTAVDSSDDLEALGRPENA

SEQ ID NO: 197815 - protein, 470 aa, Zea Mays
MEGSADSFGSLTAPLAWHDFLERMRQPSAAEFVKSIKRAPDPEKDSTAIQEFLENMEGAFRAHTPWAGSSEEELESAGEGLEKYVMTKLFNRVFASVPEDVKSDEELFEKMSLLQQFVRPENLDIKPEYQNETSWLLAQKELQKINMYKAPRDKLACILNCCKVINNLLLNASIVSNETPPGADEFLPVLIYVTIKLHSNLLYIQRYRRQTRLVSEAQYFFTNILSAESFIWNIDGESLSMNELDFQRRMDSARERMLGLSADSEYQDNQANPDVQDRTSQSLGANRNSDASLSLKDHVQGSGQDMRRDSDVTVSGKQAEQVQSISELEKKGTAELLNEDDLNKKFQEYPFLFARAGDLTIADVESLLNSYKHLVLRYVALAQGMGVSPETTLTQNGQTSDLVVSEEPEILNSVVKDNENSAIINKNVDDVISLNHHSEAVDTEASEQMNQRTAVDSSDDLEALGRPENA

SEQ ID NO: 197816 - protein, 480 aa, Zea Mays
MEGSADSFGSLTAPLAWHDFLERMRQPSAAEFVKSIKSFIVTFSNRAPDPEKDSTAIQEFLENMEGAFRAHTPWAGSSEEELESAGEGLEKYVMTKLFNRVFASVPEDVKSDEELFEKMSLLQQFVRPENLDIKPEYQNETSWLKELQKINMYKAPRDKLACILNCCKVINNLLLNASIVSNETPPGADEFLPVLIYVTIKANPPQLHSNLLYIQRYRRQTRLVSEAQYFFTNILSAESFIWNIDGESLSMNELDFQRRMDSARERMLGLSADSEYQDNQANPDVQDRTSQSLGANRNSDASLSLKDHVQGSGQDMRRDSDVTVSGKQAEQVQSISELEKKGTAELLNEDDLNKKFQEYPFLFARAGDLTIADVESLLNSYKHLVLRYVALAQGMGVSPETTLTQNGQTSDLVVSEEPEILNSVVKDNENSAIINKNVDDVISLNHHSEAVDTEASEQMNQRTAVDSSDDLEALGRPENA

SEQ ID NO: 197817 - protein, 475 aa, Zea Mays
MEGSADSFGSLTAPLAWHDFLERMRQPSAAEFVKSIKRAPDPEKDSTAIQEFLENMEGAFRAHTPWAGSSEEELESAGEGLEKYVMTKLFNRVFASVPEDVKSDEELFEKMSLLQQFVRPENLDIKPEYQNETSWLLAQKELQKINMYKAPRDKLACILNCCKVINNLLLNASIVSNETPPGADEFLPVLIYVTIKANPPQLHSNLLYIQRYRRQTRLVSEAQYFFTNILSAESFIWNIDGESLSMNELDFQRRMDSARERMLGLSADSEYQDNQANPDVQDRTSQSLGANRNSDASLSLKDHVQGSGQDMRRDSDVTVSGKQAEQVQSISELEKKGTAELLNEDDLNKKFQEYPFLFARAGDLTIADVESLLNSYKHLVLRYVALAQGMGVSPETTLTQNGQTSDLVVSEEPEILNSVVKDNENSAIINKNVDDVISLNHHSEAVDTEASEQMNQRTAVDSSDDLEALGRPENA

SEQ ID NO: 197818 - protein, 478 aa, Zea Mays
MEGSADSFGSLTAPLAWHDFLERMRQPSAAEFVKSIKSFIVTFSNRAPDPEKDSTAIQEFLENMEGAFRAHTPWAGSSEEELESAGEGLEKYVMTKLFNRVFASVPEDVKSDEELFEKMSLLQQFVRPENLDIKPEYQNETSWLLAQKELQKINMYKAPRDKLACILNCCKVINNLLLNASIVSNETPPGADEFLPVLIYVTIKLHSNLLYIQRYRRQTRLVSEAQYFFTNILSAESFIWNIDGESLSMNELDFQRRMDSARERMLGLSADSEYQDNQANPDVQDRTSQSLGANRNSDASLSLKDHVQGSGQDMRRDSDVTVSGKQAEQVQSISELEKKGTAELLNEDDLNKKFQEYPFLFARAGDLTIADVESLLNSYKHLVLRYVALAQGMGVSPETTLTQNGQTSDLVVSEEPEILNSVVKDNENSAIINKNVDDVISLNHHSEAVDTEASEQMNQRTAVDSSDDLEALGRPENA

SEQ ID NO: 197819 - protein, 75 aa, Zea Mays
MTIFHISTKLNFIEFLFLFCFALLGMRLRCKRDNSKHPPLTSLAAALAASRPPIASCSFSAYCRFFEPCGWNTQH

SEQ ID NO: 197820 - protein, 142 aa, Zea Mays
MNNFYDILMKFFCLKLASSTNNKGKSMDIEGTDAGETDKALSSKTVKQKDSVESVIKQISGIAISESHATPSTNTTNNSQPESSAPDIDKKIRALKKKIRLAEAQVQGDPEKLRLEALEKMKKIDGWLKELKLLEDKRAPAA

SEQ ID NO: 197821 - protein, 120 aa, Zea Mays
MNNFYDILMKFFCLKLASSTNNKGKSMDIEGTDAGETDKALSSKTVKQKDSVESVIKQISGIAISESHATPSTNTTNNSQPESSAPDIDKKIRALKKKVYPCPLLCLHIFYEQKDEYTLS

SEQ ID NO: 197822 - protein, 203 aa, Zea Mays
MATYSDGGGDQRRLLTIPKEGERIIAPTRRPDGTLRKAIRIRAGYVPQEEVAIYQSKGALMRKSGPDVPPGYDPAQVADAKPKTKAAKRNERRKEKRQQASSTNNKGKSMDIEGTDAGETDKALSSKTVKQKDSVESVIKQISGIAISESHATPSTNTTNNSQPESSAPDIDKKIRALKKKVYPCPLLCLHIFYEQKDEYTLS

SEQ ID NO: 197823 - protein, 868 aa, Zea Mays
MSASASAGKLAAALHRRTRRVTSALACAALEWVLIALLLVNGLLAYAVARFADYFGLSPPCLLCSRVDRLFQAEGGGGGDASGAGARWLRDALCDAHAAEISALGYCLRHRRLAEAGEMCVGCRPSSWKERTSDAGACACCEAAAVLRASPVRELEDTTRDARVSEKEVEDGDQGYVLLAQDDHEEEPDEVENRQQEPQSEVDGRQHLEDEVMAAVQDESLEFMDQVEDITIEDDRLVSVVALDEMTIADDSGLHRDVEEVDGTNHVVEDEQDPRDVDVGAVLEEKRMLDSSVATPVDLTEDSVVPTSPVPCPETSTDPSHPDHSSVSQDDGDVLEDTSTAEEEHIFVPQASVSEAVSEDDNRTAAEVDTNCEVSIGSDICEREQDEHVVPFQDLAAFEELVAPLATGDDLPLPSEVLEPPDQGEVEQEDVTTSTGLDLQPNEQNEIEEDRAPETPTNSVATQRSDRMFLLERKRSLSLSLDGSVASEMEGSEPSTVDQLKSALQAERKALGALYAELEEERNAAAIATNQTMAMINRLQEEKAAMQMEALQYQRMMEEQSEYDQEALQLLNELVSKRAREKQELERELELYRQKVQHYEDKERRRTASFKANGVSPSGSGTSVSSSGEDSDGHSDDYCELGDSPDGGNVQSSSDAALSSMRDQDDGTKHLAALDDSLTYFEVERLSILEELKTLEERLFTLEDDDINTSKEVTGHSSSDMDLPHDGLQSPEYILTGDRPRFGGRASISRGKSLLPLFDAVGDEACDRMPPSAGAGEADQADDAATKPASVLVKEQERLAIIEEVDHVYERLQALEADKEFLRHCIKSLKKGDKGMDLLQEILQHLRDLRSVELHVKNAGGAMAANSA

SEQ ID NO: 197824 - protein, 836 aa, Zea Mays
MSASASAGKLAAALHRRTRRVTSALACAALEWVLIALLLVNGLLAYAVARFADYFGLSPPCLLCSRVDRLFQAEGGGGGDASGAGARWLRDALCDAHAAEISALGYCLRHRRLAEAGEMCVGCRPSSWKERTSDAGACACCEAAAVLRASPVRELEDTTRDARVSEKEVEDGDQGYVLLAQDDHEEEPDEVENRQQEPQSEVDGRQHLEDEVMAAVQDESLEFMDQVEDGTNHVVEDEQDPRDVDVGAVLEEKRMLDSSVATPVDLTEDSVVPTSPVPCPETSTDPSHPDHSSVSQDDGDVLEDTSTAEEEHIFVPQVSEAVSEDDNRTAAEVDTNCEVSIGSDICEREQDEHVVPFQDLAAFEELVAPLATGDDLPLPSEVLEPPDQVEAGEVEQEDVTTSTGLDLQPNEQNEIEEDRAPETPTNSVATQRSDRMFLLERKRSLSLSLDGSVASEMEGSEPSTVDQLKSALQAERKALGALYAELEEERNAAAIATNQTMAMINRLQEEKAAMQMEALQYQRMMEEQSEYDQEALQLLNELVSKRAREKQELERELELYRQKVQHYEDKERRRTASFKANGVSPSGSGTSVSSSGEDSDGHSDDYCELGDSPDGGNVQSSSDAALSSMRDQDDGTKHLAALDDSLTYFEVERLSILEELKTLEERLFTLEDDDINTSKEVTGHSSSDMDLPHDGLQSPEYILTGDRPRFGGRASISRGKSLLPLFDAVGDEACDRMPPSAGAGEADQADDAATKPASVLVKEQERLAIIEEVDHVYERLQALEADKEFLRHCIKSLKKGDKGMDLLQEILQHLRDLRSVELHVKNAGGAMAANSA

SEQ ID NO: 197825 - protein, 866 aa, Zea Mays
MSASASAGKLAAALHRRTRRVTSALACAALEWVLIALLLVNGLLAYAVARFADYFGLSPPCLLCSRVDRLFQAEGGGGGDASGAGARWLRDALCDAHAAEISALGYCLRHRRLAEAGEMCVGCRPSSWKERTSDAGACACCEAAAVLRASPVRELEDTTRDARVSEKEVEDGDQGYVLLAQDDHEEEPDEVENRQQEPQSEVDGRQHLEDEVMAAVQDESLEFMDQVEDITIEDDRLVSVVALDEMTIADDSGLHRDVEEVDGTNHVVEDEQDPRDVDVGAVLEEKRMLDSSVATPVDLTEDSVVPTSPVPCPETSTDPSHPDHSSVSQDDGDVLEDTSTAEEEHIFVPQVSEAVSEDDNRTAAEVDTNCEVSIGSDICEREQDEHVVPFQDLAAFEELVAPLATGDDLPLPSEVLEPPDQGEVEQEDVTTSTGLDLQPNEQNEIEEDRAPETPTNSVATQRSDRMFLLERKRSLSLSLDGSVASEMEGSEPSTVDQLKSALQAERKALGALYAELEEERNAAAIATNQTMAMINRLQEEKAAMQMEALQYQRMMEEQSEYDQEALQLLNELVSKRAREKQELERELELYRQKVQHYEDKERRRTASFKANGVSPSGSGTSVSSSGEDSDGHSDDYCELGDSPDGGNVQSSSDAALSSMRDQDDGTKHLAALDDSLTYFEVERLSILEELKTLEERLFTLEDDDINTSKEVTGHSSSDMDLPHDGLQSPEYILTGDRPRFGGRASISRGKSLLPLFDAVGDEACDRMPPSAGAGEADQADDAATKPASVLVKEQERLAIIEEVDHVYERLQALEADKEFLRHCIKSLKKGDKGMDLLQEILQHLRDLRSVELHVKNAGGAMAANSA

SEQ ID NO: 197826 - protein, 870 aa, Zea Mays
MSASASAGKLAAALHRRTRRVTSALACAALEWVLIALLLVNGLLAYAVARFADYFGLSPPCLLCSRVDRLFQAEGGGGGDASGAGARWLRDALCDAHAAEISALGYCLRHRRLAEAGEMCVGCRPSSWKERTSDAGACACCEAAAVLRASPVRELEDTTRDARVSEKEVEDGDQGYVLLAQDDHEEEPDEVENRQQEPQSEVDGRQHLEDEVMAAVQDESLEFMDQVEDITIEDDRLVSVVALDEMTIADDSGLHRDVEEVDGTNHVVEDEQDPRDVDVGAVLEEKRMLDSSVATPVDLTEDSVVPTSPVPCPETSTDPSHPDHSSVSQDDGDVLEDTSTAEEEHIFVPQASVSEAVSEDDNRTAAEVDTNCEVSIGSDICEREQDEHVVPFQDLAAFEELVAPLATGDDLPLPSEVLEPPDQEAGEVEQEDVTTSTGLDLQPNEQNEIEEDRAPETPTNSVATQRSDRMFLLERKRSLSLSLDGSVASEMEGSEPSTVDQLKSALQAERKALGALYAELEEERNAAAIATNQTMAMINRLQEEKAAMQMEALQYQRMMEEQSEYDQEALQLLNELVSKRAREKQELERELELYRQKVQHYEDKERRRTASFKANGVSPSGSGTSVSSSGEDSDGHSDDYCELGDSPDGGNVQSSSDAALSSMRDQDDGTKHLAALDDSLTYFEVERLSILEELKTLEERLFTLEDDDINTSKEVTGHSSSDMDLPHDGLQSPEYILTGDRPRFGGRASISRGKSLLPLFDAVGDEACDRMPPSAGAGEADQADDAATKPASVLVKEQERLAIIEEVDHVYERLQALEADKEFLRHCIKSLKKGDKGMDLLQEILQHLRDLRSVELHVKNAGGAMAANSA

SEQ ID NO: 197827 - protein, 679 aa, Zea Mays
MPSPMARIFHRHLLLAVVTLAVAASLLRPAAAVRPFVLVLSGEDFLKDPAAHPSLPSADSDDDDGWDDFADDSPAADPLLSPSSWAPLLDPTISLPSGDETDSPADALFVAGTRAMLSAASDGDDAAFTTAAAQIEASAEAGHPGAQSALAFLTGAGMTRPASRSLAFLLHKFAADAGDLQSKMALAYSYFRQEMYEEAVILYAELAEAALTSSLISKEPPVIEPIRLHSGTEENKEALRKSRGEDDEDFQITEYQAQRGNAANMYKLGLLYYYGLRGLRRDYGKAFHWFSKAVEKGETRALELLGEIYARGAGVERNYTEAYKWLALAAKQQHYSAYNGLGYLYVKGYGVEKKNLTKARELFELAAENKEAGGHYNLGVLYLKGIGVKRDVIRACNFLLHAVNAGQPKAIYQVAKLFQKGIGLKRNLHMATMLYKSIAERGPWSSLSRWALESYLKGDVGKALLLYSRMADLGYEVAQSNAAWILDRYSDQSICMGESSFCTDMERHLRAHALWWHASEQGNEHAALLIGDAYYYGRGVARDYERAAEAYMHARSQSNAQAIFNLGYMHEHGHGLPLDLHLAKRYYDQAVEVDSAAKLPVMLALTSLWLRTNYADSFLVGFIDSLPEMYPVVKEWVEDVLMDEGNATILTLFACLVTVLYLRERQRRQVAAAANPLTT

SEQ ID NO: 197828 - protein, 631 aa, Zea Mays
MPSPMARIFHRHLLLAVVTLAVAASLLRPAAAVRPFVLVLSGEDFLKDPAAHPSLPSADSDDDDGWDDFADDSPAADPLLSPSSWAPLLDPTISLPSGDETDSPADALFVAGTRAMLSAASDGDDAAFTTAAAQIEASAEAGHPGAQSALAFLTGAGMTRPASRSLAFLLHKFAADAGDLQSKMALAYSYFRQEEPPVIEPIRLHSGTEENKEALRKSRGEDDEDFQITEYQAQRGNAANMYKLGLLYYYGLRGLRRDYGKAFHWFSKAVEKGETRALELLGEIYARGAGVERNYTEAYKWLALAAKQQHYSAYNGLGYLYVKGYGVEKKNLTKARELFELAAENKEAGGHYNLVNAGQPKAIYQVAKLFQKGIGLKRNLHMATMLYKSIAERGPWSSLSRWALESYLKGDVGKALLLYSRMADLGYEVAQSNAAWILDRYSDQSICMGESSFCTDMERHLRAHALWWHASEQGNEHAALLIGDAYYYGRGVARDYERAAEAYMHARSQSNAQAIFNLGYMHEHGHGLPLDLHLAKRYYDQAVEVDSAAKLPVMLALTSLWLRTNYADSFLVGFIDSLPEMYPVVKEWVEDVLMDEGNATILTLFACLVTVLYLRERQRRQVAAAANPLTT

SEQ ID NO: 197829 - protein, 411 aa, Zea Mays
MPSPMARIFHRHLLLAVVTLAVAASLLRPAAAVRPFVLVLSGEDFLKDPAAHPSLPSADSDDDDGWDDFADDSPAADPLLSPSSWAPLLDPTISLPSGDETDSPADALFVAGTRAMLSAASDGDDAAFTTAAAQIEASAEAGHPGAQSALAFLTGAGMTRPASRSLAFLLHKFAADAGDLQSKMALAYSYFRQEMYEEAVILYAELAEAALTSSLISKEPPVIEPIRLHSGTEENKEALRKSRGEDDEDFQITEYQAQRGNAANMYKLGLLYYYGLRGLRRDYGKAFHWFSKAVEKGETRALELLGEIYARGAGVERNYTEAYKWLALAAKQQHYSAYNGLGYLYVKGYGVEKKNLTKLMLGNQKLFIRWRSCSRKALVLRGISIWQQCCTSLLLRGDPGVHCPDGLWSLI

SEQ ID NO: 197830 - protein, 432 aa, Zea Mays
MPSPMARIFHRHLLLAVVTLAVAASLLRPAAAVRPFVLVLSGEDFLKDPAAHPSLPSADSDDDDGWDDFADDSPAADPLLSPSSWAPLLDPTISLPSGDETDSPADALFVAGTRAMLSAASDGDDAAFTTAAAQIEASAEAGHPGAQSALAFLTGAGMTRPASRSLAFLLHKFAADAGDLQSKMALAYSYFRQEMYEEAVILYAELAEAALTSSLISKEPPVIEPIRLHSGTEENKEALRKSRGEDDEDFQITEYQAQRGNAANMYKLGLLYYYGLRGLRRDYGKAFHWFSKAVEKGETRALELLGEIYARGAGVERNYTEAYKWLALAAKQQHYSAYNGLGYLYVKGYGVEKKNLTKARELFELAAENKEAGGHYNLGLMLGNQKLFIRWRSCSRKALVLRGISIWQQCCTSLLLRGDPGVHCPDGLWSLI

SEQ ID NO: 197831 - protein, 649 aa, Zea Mays
MPSPMARIFHRHLLLAVVTLAVAASLLRPAAAVRPFVLVLSGEDFLKDPAAHPSLPSADSDDDDGWDDFADDSPAADPLLSPSSWAPLLDPTISLPSGDETDSPADALFVAGTRAMLSAASDGDDAAFTTAAAQIEASAEAGHPGAQSALAFLTGAGMTRPASRSLAFLLHKFAADAGDLQSKMALAYSYFRQEMYEEAVILYAELAEAALTSSLISKEPPVIEPIRLHSGTEENKEALRKSRGEDDEDFQITEYQAQRGNAANMYKLGLLYYYGLRGLRRDYGKAFHWFSKAVEKGETRALELLGEIYARGAGVERNYTEAYKWLALAAKQQHYSAYNGLGYLYVKGYGVEKKNLTKARELFELAAENKEAVNAGQPKAIYQVAKLFQKGIGLKRNLHMATMLYKSIAERGPWSSLSRWALESYLKGDVGKALLLYSRMADLGYEVAQSNAAWILDRYSDQSICMGESSFCTDMERHLRAHALWWHASEQGNEHAALLIGDAYYYGRGVARDYERAAEAYMHARSQSNAQAIFNLGYMHEHGHGLPLDLHLAKRYYDQAVEVDSAAKLPVMLALTSLWLRTNYADSFLVGFIDSLPEMYPVVKEWVEDVLMDEGNATILTLFACLVTVLYLRERQRRQVAAAANPLTT

SEQ ID NO: 197832 - protein, 84 aa, Zea Mays
MGGARVLLNIGELMECTSIWIEQNWAKYKTQLMLEQSIMLFSYEEYNTTRLVECIPVRMILSEDALYLILFVNYETMACMYLDC

SEQ ID NO: 197833 - protein, 53 aa, Zea Mays
MRAPRASVVRTRPCRIRRLSWSDTDMASDRAVADVIHPSTTLPCCRLVRSSCR

SEQ ID NO: 197834 - protein, 798 aa, Zea Mays
MRTRWSWRTMRWPSPPTTTRTVAAGTPSSSPTRWRRPSCRGLAWCSTPWTRPSRYTRPTPTARGSMPCAALATTTKVESVDLEHNHPCTPDMVRFLKAYREMPEPTKKKAKITDEMDEMVEKSLSEIAETRKFPTRPKRGANVGSAVGSQRLSRLESFMQRFGEDDLNSLKKFIDKMQHRKPNFIHSWDLDPESHVKNFFWTDSRAQAQYRYFGDVITFDVMYLQHSRASRPLATLLGVNNHGHLVLLGCGLLSGDSKENYVWLLKRWLSCMNGKSPEAITTGYSDVITEAVAEVFPNARHRFCFWHILKKLLENVGRTHEKEAISSRFKEVVYDSVTLTDFEKEWGAMVDQYSLKDNKWFSALYSCRKQWAPGYVNHSFWAGTSAIRKAEKTDPYFDSVVSKTTLPVFLEQYETTLKEKLEREAYDDLRSYYSRLTLLSGLPFEEQLVELYTVTMFQTFQDEIKQLMHVICKEVDRSGNSITYMVSELIQGKKVDYTVVYDNSDKDVWCICRSFPSRGILCSHALAVLKQENVLMLPPKYILNRWRKDFRILNSSANVNCMESDRNLGFYDDLYFRAHEYFEDVIDIGAREPELKEFVLSAMKEAKDRLIRPDHSQQSDQRFDVNMTVIGQVSADTGVDMNMASHTSASIHGDRRVDADIAPNAPALVHGDTMTSNTTALIHRDRRVEIKMPMTHLIHGEGRLDMNITSPHLIQSDARVDMNMVSTSQNGMHTFDLVDINLESGSMPMAATDFMQMHPHPAVYHPKQLVMRDQVIDANKRPNMESDTYFMGGSMHVG

SEQ ID NO: 197835 - protein, 297 aa, Zea Mays
MSIVPKETIEVIAQSVGIPSLGADVAVALAPDVEYRLREIMQESIKCMRHAKRTVLTADDVDSALGLRNVEPVYGFASGDPLRFKRAVGHKDLFYLDDREVDFKEIIDCPLPKAPLDTSVVAHWLAIEGVQPAIPENPAIDAIVPPTENKRSEHGKDDGLPADVKLPVKHVLSRELQMYFDKIAELTMSRSDTSLFKEALVSLAKDSGLHPLVPYFSYFIADEVTRSLGDLPVLLALMRVVQSLLRNPHIHIEPYLHQLMPSMITCIVAKRLGHRLSDNHWELRDFSANLVALVCQR

SEQ ID NO: 197836 - protein, 390 aa, Zea Mays
MSIVPKETIEVIAQSVGIPSLGADVAVALAPDVEYRLREIMQESIKCMRHAKRTVLTADDVDSALGLRNVEPVYGFASGDPLRFKRAVGHKDLFYLDDREVDFKEIIDCPLPKAPLDTSVVAHWLAIEGVQPAIPENPAIDAIVPPTENKRSEHGKDDGLPADVKLPVKHVLSRELQMYFDKIAELTMSRSDTSLFKEALVSLAKDSGLHPLVPYFSYFIADEVTRSLGDLPVLLALMRVVQSLLRNPHIHIEPYLHQLMPSMITCIVAKRLGHRLSDNHWELRDFSANLVALVCQRFGHVYHNLQNRLTKTLIHAFLDPAKSLTQHYGAVQGISALGPSAIRLLLLPNLVTYMQLLEPELQLEKQKNEMKRKEAWRVYGALLANACMIG

SEQ ID NO: 197837 - protein, 542 aa, Zea Mays
MSIVPKETIEVIAQSVGIPSLGADVAVALAPDVEYRLREIMQESIKCMRHAKRTVLTADDVDSALGLRNVEPVYGFASGDPLRFKRAVGHKDLFYLDDREVDFKEIIDCPLPKAPLDTSVVAHWLAIEGVQPAIPENPAIDAIVPPTENKRSEHGKDDGLPADVKLPVKHVLSRELQMYFDKIAELTMSRSDTSLFKEALVSLAKDSGLHPLVPYFSYFIADEVTRSLGDLPVLLALMRVVQSLLRNPHIHIEPYLHQLMPSMITCIVAKRLGHRLSDNHWELRDFSANLVALVFGHVYHNLQNRLTKTLIHAFLDPAKSLTQHYGAVQGISALGPSAIRLLLLPNLVTYMQLLEPELQLEKQKNEMKRKEAWRVYGALLCAAGKCLYDRLKLFPGLLSPSMRPLLQSNKRVLTNNPNKRKSSTDLSATQPPLKKMATDATANSMASASMGGNMQGAMDGFPNQLGNPGMMQASSSGQTVESIPSAAVRRDQGSDLAQRVSAVLRQAWKEDQDTGHLLGSLYEVFGEAIFSFVQPPEISLFV

SEQ ID NO: 197838 - protein, 628 aa, Zea Mays
MAGRPSLPSSGELFPPLPLSYRAALAAPSPPERGATLVRHPAPPAPMAGHPAPPPPSAGSGGPASAAPPPAGLALMAGSPAPPPPSSGSGPAGAQPASATPLPPGLPAPDPAAPPPAPPAPPALPSPAPLPGPAGSGFAGACPASISLLRASQTTVLGHDDALLLPLVFPGGTIGTAVYSQPSAITSTMCAPSPSDDAATILAATRAAVAAARQRAQDAARALEQEQAVVDAIERQYAETYRRLASKGVSDGSPMSARHSADTFEPAPVPALTLRASLHAQAAALTSIRATVTDVLTSDSTQYPRWRDQVLQTLRRYALADHVLPTVAAPTEDWLLMDEVVLSWIHGTLTAKLQDIVRVPDDTAHHIWGAPEAQFLDNRQTRILYLETAFRQLVQGDLSVDEYYRQMKTMADTLRTLGAPMTDESLVLNLLCGLSPRFDRVAPILTRMKPFPTFAEAKNDLLLEELRLSAAATTAPATALYSAPRAAPSDSGGVLLPALRPRCPLELRDRLLASGALAAANAAVVARADAVAVACREAVVAPRVALSGHPSTTRGLAPFTCGPGCPRVPRPLAPPPLSRSSLPLHPRRHPWLLPSLGRYSIFHLPRPPLSSLFHHCRKRVRPSRHLSR

SEQ ID NO: 197839 - protein, 748 aa, Zea Mays
MARKLRFFKEQMSKADIGPTQLNETHLDFDDLEIKLGELEAELTEVNANNEKLLRTYNELLEYHTVLQKAGDFFYSAQRTAASQQRELEANQSGQTSLESPLLEQMSTDPSKQVKLGSLSGLVPKEKAMAFERILFRATRGNIFLRQEPVDEPVTDPVSGEKVTKNAFVIFYSGERAKTKILKICDAFNANRYPFPEDVSKQLHAVQEVSGKISELKATIDMGLAHRDSILKNIASDFEQWNHLVKKEKAIYHTLNMLSVDVTKKCLVAEGWSPVFASIQIQDALQRATVNSKSQVGSIFEVLNTKESPPTYFQTNKFTSAFQEIVDAYGVAKYQEANPGVFTIVTFPFLFAVMFGDWGHGICLLLATLYLIIREKKLASQKLGDIMEMMFGGRYVIMMMAVFSIYTGLIYNEFFSVPFGLFGKSAYACRDSSCSDATTEGLIKVRDAYPFGVDPVWHGSRSELPFLNSLKMKMSILLGVAQMNLGIVISYFNAKFFRNSLNVWYQFIPQLIFLNSLFGYLSLLIIIKWCTGSKADLYHVMIYMFLSPTDEIGENQLFSGQKTVQLVLLLLALVSVPWMLIPKPLLLKKQHQQRHQGHQYAMLQGVDESVGAELGEHHEEAHDHEEFEFSEVFVHQLIHTIEFVLGAVSNTASYLRLWALSLAHSELSTVFYDKVLLMAWGFNNVIILIIGIIVFIFATVGVLLVMETLSAFLHALRLHWVEFQNKFYEGDGYKFAPFSFALIREEED

SEQ ID NO: 197840 - protein, 437 aa, Zea Mays
MARKLRFFKEQMSKADIGPTQLNETHLDFDDLEIKLGELEAELTEVNANNEKLLRTYNELLEYHTVLQKAGDFFYSAQRTAASQQRELEANQSGQTSLESPLLEQEMSTDPSKQVKLGSLSGLVPKEKAMAFERILFRATRGNIFLRQEPVDEPVTDPVSGEKVTKNAFVIFYSGERAKTKILKICDAFNANRYPFPEDVSKQLHAVQEVSGKISELKATIDMGLAHRDSILKNIASDFEQWNHLVKKEKAIYHTLNMLSVDVTKKCLVAEGWSPVFASIQIQDALQRATVNSKSQVGSIFEVLNTKESPPTYFQTNKFTSAFQEIVDAYGYVAKYQEANPGVFTIVTFPFLFAVMFGDWGHGICLLLATLYLIIREKKLASQKLGDIMEMMFGGRYVIMMMAVFSIYTGLIYNEFFSVPFGLFGKSAYACRDSSCR

SEQ ID NO: 197841 - protein, 590 aa, Zea Mays
MARKLRFFKEQMSKADIGPTQLNETHLDFDDLEIKLGELEAELTEVNANNEKLLRTYNELLEYHTVLQKLKELLHHNKGNWRQINLVKKEKAIYHTLNMLSVDVTKKCLVAEGWSPVFASIQIQDALQRATVNSKSQVGSIFEVLNTKESPPTYFQTNKFTSAFQEIVDAYGVAKYQEANPGVFTIVTFPFLFAVMFGDWGHGICLLLATLYLIIREKKLASQKLGDIMEMMFGGRYVIMMMAVFSIYTGLIYNEFFSVPFGLFGKSAYACRDSSCSDATTEGLIKVRDAYPFGVDPVWHGSRSELPFLNSLKMKMSILLGVAQMNLGIVISYFNAKFFRNSLNVWYQFIPQLIFLNSLFGYLSLLIIIKWCTGSKADLYHVMIYMFLSPTDEIGENQLFSGQKTVQLVLLLLALVSVPWMLIPKPLLLKKQHQQRHQGHQYAMLQGVDESVGAELGEHHEEAHDHEEFEFSEVFVHQLIHTIEFVLGAVSNTASYLRLWALSLAHSELSTVFYDKVLLMAWGFNNVIILIIGIIVFIFATVGVLLVMETLSAFLHALRLHWVEFQNKFYEGDGYKFAPFSFALIREEED

SEQ ID NO: 197842 - protein, 436 aa, Zea Mays
MARKLRFFKEQMSKADIGPTQLNETHLDFDDLEIKLGELEAELTEVNANNEKLLRTYNELLEYHTVLQKAGDFFYSAQRTAASQQRELEANQSGQTSLESPLLEQEMSTDPSKQVKLGSLSGLVPKEKAMAFERILFRATRGNIFLRQEPVDEPVTDPVSGEKVTKNAFVIFYSGERAKTKILKICDAFNANRYPFPEDVSKQLHAVQEVSGKISELKATIDMGLAHRDSILKNIASDFEQWNHLVKKEKAIYHTLNMLSVDVTKKCLVAEGWSPVFASIQIQDALQRATVNSKSQVGSIFEVLNTKESPPTYFQTNKFTSAFQEIVDAYGVAKYQEANPGVFTIVTFPFLFAVMFGDWGHGICLLLATLYLIIREKKLASQKLGDIMEMMFGGRYVIMMMAVFSIYTGLIYNEFFSVPFGLFGKSAYACRDSSCR

SEQ ID NO: 197843 - protein, 117 aa, Zea Mays
MKDDIIEGIYETLKECAVISKSAGGIGVSVHNVCATESYIRGTNGTSNGIVLMLRVFNDTARYVDQGGGKRKVHFAVYLEPWHADIFEFLDLRKNPGKVLKESSDEEREQAEEKMKY

SEQ ID NO: 197844 - protein, 163 aa, Zea Mays
MKNAARLDSEIIYDRDFDYDYFGFKTLERSYLLKLDGKLSSCFLICMKDDIIEGIYETLKECAVISKSAGGIGVSVHNVCATESYIRGTNGTSNGIVLMLRVFNDTARYVDQGGGKRKVHFAVYLEPWHADIFEFLDLRKNPGKVLKESSDEEREQAEEKMKY

SEQ ID NO: 197845 - protein, 50 aa, Zea Mays
MQLLCSSHQIRRHRLRRSWRPSKFGGGGVGASSCNRFVFCVADHHWMANG

SEQ ID NO: 197846 - protein, 129 aa, Zea Mays
MFLSLQPSRRGLYKRVWRELRQRPYPVDETMTEGCSGVLDLPPPPSSLELPARAAASRIWFRRCRRPSSGGLLLRIVLSGRLSESTVGIYSLPSLWVRFEKATSSDTSLLFVRQFEALKTSYRFVMVIT

SEQ ID NO: 197847 - protein, 146 aa, Zea Mays
MYQAPFQLVKECFYHFSRAGGGYISVFDYSSNCRRELRQRPYPVDETMTEGCSGVLDLPPPPSSLELPARAAASRIWFRRCRRPSSGGLLLRIVLSGRLSESTVGIYSLPSLWVRFEKATSSDTSLLFVRQFEALKTSYRFVMVIT

SEQ ID NO: 197848 - protein, 80 aa, Zea Mays
MAMNVFHVTDVAGRPADPKTIDEVIQRIGTESLRVDEERWPRLCSTEGDAGRGGGGAGIFSLGSLVKKNLVSLGLIRSCS

SEQ ID NO: 197849 - protein, 335 aa, Zea Mays
MERYNPSEVYELFVRHMNNPRVVVDNGACATATLVQVHSARKHGVLLDAVAALSDHGVCVRKGYISSDDGRWFMDVFHVVDAAGGKVADAGALLARLESSLSADALPPRPPPAAAGAGTPTLLELVGADRPGLLSEVFAVLHDLRCGTVDARAWTHAGRVAALVFVRDEETGSPIDDAARVRRVESRLRHVLRGGALGARMVRADASAVNMDRRLHQLLNEDGEAGSRADRAESEAEAPTPTAVAVQDWVERGYSVVTVSCRDRPKLLFDVVCTLTDLDYVVYHGTFHTDDDHARQEFYIRRLDERPISSATERRRVIQCLEAAIERRASEVRDR

SEQ ID NO: 197850 - protein, 241 aa, Zea Mays
MNPLLPSSFPKSPHPPDPNPSSPNPSPCSYLLHADTDDEALIQIPGQNPTLVGASAPFALLPSIDPVPHVSSQFYTFSAASYGLMVRCIRAGRSASSDEVRGATSLSVLASWRAVWKDRNEDTAYLTAWKRIQDKLAASADGRHLHFKSNTAQRVSHVGMWRDIVSEAHADPDLLRHLAFKDTVDRIKQSWTVGAKIYGSSAMFAMCSLSARLLSSTDIGWYTTSSRILPMPVGRFCALTL

SEQ ID NO: 197851 - protein, 618 aa, Zea Mays
MPKITSSPSPTISAMNPLLPSSFPKSPHPPDPNPSSPNPSPCSYLLHADTDDEALIQIPGQNPTLVGASAPFALLPSIDPVPHVSSQFYTFSAASYGLMVRCIRAGRSASSDEVRGATSLSVLASWRAVWKDRNEDTAYLTAWKRIQDKLAASADGRHLHFKSNTAQRVSHVGMWRDIVSEAHADPDLLRHLAFKDTVDRIKQSWTVGAKIYGIPESFIRACVAACPVCKAAPASQPDPATSSPKRGKRRRRFVYTETLDVPARDVPWRLQQLAAKHKVVLCIRQKYIRYKPFMAEVKDYACDRAGVPTSSSGSAASSANNSEGKKARVLKREPYQSKRCGCGFRIRAIVPIANYNEKDKTFVYLEEGTAVFKLYAVHSGHEPGPLDGNARIVHRLVGHKGALEFDPDIYGVSEEGDPTFSAKGDEDVDIDDSHQAVLRQVRYLRSEVLSLEGKVAKMHPELLGSLSTELSEVLHRIRKFNLEGNVYQQQILMVGNEEVRGWGSGDVSHQLDQHDRPFCKDDEMLDDDDTDFGSSIGPIVSWDRMAAECEDRKMLMGDSPKCDKWMLKDDVGDFDAKSILNCGDDDGVEDSKVIKPLMHDDTMVTDPNLPFSKVIVKH

SEQ ID NO: 197852 - protein, 646 aa, Zea Mays
MPKITSSPSPTISAMNPLLPSSFPKSPHPPDPNPSSPNPSPCSYLLHADTDDEALIQIPGQNPTLVGASAPFALLPSIDPVPHVSSQFYTFSAASYGLMVRCIRAGRSASSDEVRGATSLSVLASWRAVWKDRNEDTAYLTAWKRIQDKLAASADGRHLHFKSNTAQRVSHVGMWRDIVSEAHADPDLLRHLAFKDTVDRIKQSWTVGAKIYGIPESFIRACVAACPVCKAAPASQPDPATSSPKRGKRRRRFVYTETLDVPARDVPWRLQQLAAKHKVVLCIRQKYIRYKPFMAEVKDYACDRAGVPTSSSGSAASSANNSEGKKARVLKREPYQSKRCGCGFRIRAIVPIANYNEKDKTFVYLEEGTAVFKLYAVHSGHEPGPLDGNARIVHRLVGHKGALEFDPDIYGVSEEGDPTFSAKGDEDVDIDDSHQAVLRQVRYLRSEVLSLEGKVAKMHPELLGSLSTELSEVLHRIRKFNLEGNVYQQQILMVGNEEVRGWGSGDVSHQLDQHDRPFCKDDEMLDDDDTDFGSSIGPIVSWDRMAAECEDRKMLMGDSPKCDKWMLKDDVGDFDAKSILNCGDDDGVEDSKVIKPLMHDDTMVTDPNLVGIHVEGFYTGTKWYDSPGLDSNVDGGDSSFRHGGIL

SEQ ID NO: 197853 - protein, 350 aa, Zea Mays
MAEVKDYACDRAGVPTSSSGSAASSANNSEGKKARVLKREPYQSKRCGCGFRIRAIVPIANYNEKDKTFVYLEEGTAVFKLYAVHSGHEPGPLDGNARIVHRLVGHKGALEFDPDIYGVSEEGDPTFSAKGDEDVDIDDSHQAVLRQVRYLRSEVLSLEGKVAKMHPELLGSLSTELSEVLHRIRKFNLEGNVYQQQILMVGNEEVRGWGSGDVSHQLDQHDRPFCKDDEMLDDDDTDFGSSIGPIVSWDRMAAECEDRKMLMGDSPKCDKWMLKDDVGDFDAKSILNCGDDDGVEDSKVIKPLMHDDTMVTDPNLVHQQCLRCAAFQQGYCQALTSDGIPPVQGFFPCQ

SEQ ID NO: 197854 - protein, 327 aa, Zea Mays
MAEVKDYACDRAGVPTSSSGSAASSANNSEGKKARVLKREPYQSKRCGCGFRIRAIVPIANYNEKDKTFVYLEEGTAVFKLYAVHSGHEPGPLDGNARIVHRLVGHKGALEFDPDIYGVSEEGDPTFSAKGDEDVDIDDSHQAVLRQVRYLRSEVLSLEGKVAKMHPELLGSLSTELSEVLHRIRKFNLEGNVYQQQILMVGNEEVRGWGSGDVSHQLDQHDRPFCKDDEMLDDDDTDFGSSIGPIVSWDRMAAECEDRKMLMGDSPKCDKWMLKDDVGDFDAKSILNCGDDDGVEDSKVIKPLMHDDTMVTDPNLACSGLYIQYND

SEQ ID NO: 197855 - protein, 101 aa, Zea Mays
MQRRDSFGLGVNGCTGNMGLSVAEAAALRGLHLVPVSFSSREKVEKTIQVGQTDIQIYGPSKREDVVSSIADEFPDVIVVDYTGPNSVNCKQFNLVIFSIH

SEQ ID NO: 197856 - protein, 202 aa, Zea Mays
MRLLHFVANAELYCKLGLPFVMGTTGGNKHLLYKSVQDSKNYALISPQMGKQVVAFVAAMKIMAEQFPGAFSGYHLEVLESHQAGKLDTSGTAKDVIACFEKLGVSYDMNRMVKIRDPEQQLEMVGVPEEHIQGHAFHLYHLTSPDDSVSFEFQHNVCGRSIYAEGTIDAAMFLHRKVQSKDSKRIYNMDDVLREETCHKAY

SEQ ID NO: 197857 - protein, 184 aa, Zea Mays
MLIVPQGAGGGGGGGGNGSAGAESSKCMATGCLVDLNGACPADLRVMAASSSGGGGGGAVACRSACEAFGTPQYCCSGAYGNPSTCRPSTYSQFFKNACPRAYSYAYDDSTSTFTCATGIGYAITFCPSTTSGKYSGENPQAASATSSMVYLGGEQLATGASATATRASQLLVAAAAAAAVALL

SEQ ID NO: 197858 - protein, 250 aa, Zea Mays
MFWKDSGSRSSSGSGRDQNGVGPFGQVRVLIVGDSGGSSNNISDAERNFFVELWDVSGHERYKACRSIFYTQINGVIFVYDLSQRKTKTNLNKWAVEVAETGTFSAPLGSGGPGGLPVPYLVIANKVDIVPRDGARASRGNLVDLARQWAEKQGLLRCSEELPLTESFPGNSGLVSVRSFIDILLLWSHGTSLSLMECDAVTCMPCYQAAKQARYDKEAVIKFFRLVCYQNSSVGLFYPLRMFSPLMRCY

SEQ ID NO: 197859 - protein, 296 aa, Zea Mays
MFWKDSGSRSSSGSGRDQNGVGPFGQVRVLIVGDSGVGKSSLVHLILKSSAIARPSQTVGCTVGIKHVTYGSAGGSSNNISDAERNFFVELWDVSGHERYKACRSIFYTQINGVIFVYDLSQRKTKTNLNKWAVEVAETGTFSAPLGSGGPGGLPVPYLVIANKVDIVPRDGARASRGNLVDLARQWAEKQGLLRCSEELPLTESFPGNSGLVSAAKQARYDKEAVIKFFRLLIRRRYFSNEPPAPSPWSLAPREDTILPMETLGDGADSFQRKSSPCRPWITTDIIDSPPRRFRT

SEQ ID NO: 197860 - protein, 290 aa, Zea Mays
MEEKLKAPKATVGGWTLVLTGQTGVGKSATVRAIADDLGADLCEWTTPVPTLWAEHVHANSGLRYTSKLEEFETFVEKIRKYSMLCPTNTRSQRNLIIILIDDIPVTSGNVAFARLGKCLTGLIRSTQVPTVISLTHYHKSESNDTAMWNSEDLESLLQDAGAHKIGFNPVTTNSIKKILVRVCKEESCHASEELLHQIATSSGGDIRHAIMSLQYYCLDPRRHSSALATSSSSTVPKNLDSLVPGHESYGPSSALPSPCGRDETLSLFHALGKFLHNKRETNSDADIGM

SEQ ID NO: 197861 - protein, 340 aa, Zea Mays
MTSAFQTGPIRKTKELWVDKYTPHSLAELAVHKKKIEDVKKWMEEKLKAPKATVGGWTLVLTGQTGVGKSATVRAIADDLGADLCEWTTPVPTLWAEHVHANSGLRYTSKLEEFETFVEKIRKYSMLCPTNTRSQRNLIIILIDDIPVTSGNVAFARLGKCLTGLIRSTQVPTVISLTHYHKSESNDTAMWNSEDLESLLQDAGAHKIGFNPVTTNSIKKILVRVCKEESCHASEELLHQIATSSGGDIRHAIMSLQYYCLDPRRHSSALATSSSSTVPKNLDSLVPGHESYGPSSALPSPCGRDETLSLFHALGKFLHNKRETNSDADIDLDSCPLKET

SEQ ID NO: 197862 - protein, 246 aa, Zea Mays
MPDSNKDGRLLVVVDLVGDLGEAAWNVLYSTCKQRSMASRSKIILTSRSDKIVKFGTRPALRLSYVSSEAFWYFFKTITFGSTDPKVHPRLLHLAMDIAKMLDRSLIGANITACLLRENFDVHYWSKVRTFLRGLVQKHISKFGVHPAHLLEQDRPLQVGRMATTLEDLVFFYECQRSSQEEVPEMRFQDVMYGNVKAVGKFKALGWRSQIPPYYSYVISCQIIGQETARATKRKRSVRNRTNSFA

SEQ ID NO: 197863 - protein, 251 aa, Zea Mays
MTPGRKTTAKSTKPTEVPLTEYEKLRAENLMRNNQKLQRLGVTTLASILNHTSAKSKVDTREKSGSFYEVQEGEGSEDEEVNQCATNRRNRLKRVLAPAQQDEPTRFTRQNTRDLALTFSPELQQVETLGLSTITSTPQQDQNNSSDQGALEATIDPNGKRNRSMGRELDRISRGLCTNIPIHIAEGKIRPEAPMQAAKLASEGGIILRQQMSILRHWKEYKKDKSIVTNYIGKVAAQFTMDTNNNAIKAA

SEQ ID NO: 197864 - protein, 78 aa, Zea Mays
MALTSRSRHGSFIPPRLNVGGSRSTHGLARPSSRHATTTNFRARCVLEGVAEPGNPTLREMDFLWKVRMRMTMRTPHI

SEQ ID NO: 197865 - protein, 76 aa, Zea Mays
MAFSLRDRLLETMIPLILSTTDYPSFDRPLLAHDRQRETLTSIFSNQHATFPYLGLYSGLLQPEADIADQGLPLWP

SEQ ID NO: 197866 - protein, 500 aa, Zea Mays
MNLSEDWRSVFPVCAVFAAPSVDPLPAAAASRGPLHFSPLPPRTPLLSLPYPIPLPRSSTRGLNRFLRSFVRGTSFLPRSDFDYLADTLIPQPSSSSPPSNLLAVLRLSCSLILFFPYGENAEHVAFVTLDATTVTGSTPLSPVVQSDGFMHPGHRIQQLVTTANESSWPSQLEDNPEGFLLAVTMYSLNWFRVESQDLGTSVLVPIAKQQVDSVIVHACWSRHLPSECVVLLESGELCWFNLDTRQGGKIKIDVGSKDDTGEWLSCDYGAQPWMIIVASSKSILLIDLRFGDRGQYKVLARVGMPGLLETDPFAEADQYLAFCRGGLDHFHFSVVTKRYLILLDLRQPLTPVLAWQHELKSPSNVAMFRLSELRPSKEHEWASNSGFAILVGSFKTGEFSVFCYGPKEQGCPDNSHLYAWDLPSRFSLTGHHCSCSSGRMKDVFSMPVSRDEYASKWSKNSIIGYYVLPNHLSVSETSFTGFALVCLTAMGKLEMQREY

SEQ ID NO: 197867 - protein, 51 aa, Zea Mays
MGLSSPRAGLLSSSAPARASSCSGSAAADACAWMPMGYRQEPYSGSDATSA

SEQ ID NO: 197868 - protein, 145 aa, Zea Mays
MGAKDSVVTLSADIISRNNQPMASSSSAVTPGSCQAGPGRGRAHVSARCAQLRLPMLRQRISSPNHWPANASGHRVVLPSKFGCLKHENYTQQDNSMMKLQTACTIKRPLAIGVVPPRLEPRCFALGFFRVEVFWLDACIEMGQN

SEQ ID NO: 197869 - protein, 65 aa, Zea Mays
MLCQIQKIKRVFSDALHKPDPIFNRIPYKAVQRKLNTSLRKGTDVKKKPAKTKRSDFELQDFSEG

SEQ ID NO: 197870 - protein, 537 aa, Zea Mays
MAALRAPAATLLVLLALAAAGGVAADGSDHRYKIREPVPLYANKVGPFHNPSETYRYFDLPFCSPDKVKEKSEALGEVLNGDRLVDKGGKDDPSEWKYYLYRHIIFDILYNNDRVIEINVHTDQSALVDLTEDKETNVEFLYSAKWKETPTPFEKRMEKYSSSSNMPHHLEVHWFSIINSCVTVLLLTGFLATILMRVLKNDFVKYAHDEEAADDQEESGWKYIHGDVFRFPKNKSLFSAALGTGTQLFALTTFIFLLALVGVFYPYNRGALFTALVVIYALTSGIAGYIATSFYCQLEGTNWVRNLLLTGCLFCGPLFLTFCFLNTVAIAYSATAALPFGTICVIVLIWTLVTFPLLVLGGIAGKNSKSEFQAPCRTTKYPREIPPLPWYRRTIPQMAMAGFLPFSAIYIELYYIFASVWGHRIYTIYSILFIVFIILLIVTAFITVALTYFQLAAEDHEWWWRSFLCGGSTGFFVYGYCLYYYYARSDMSGFMQTSFFFGYMACICYAFFLMLGMVGFRASLFFVRHIYKSIKCE

SEQ ID NO: 197871 - protein, 106 aa, Zea Mays
MWEPTLVNLGHALRKLKEYQKAVSYYAKALTFPTKSLSAFAGLAYTYHLMDDFEAAINYYHKALWLKPDDQFCTDMLTYALESICQITARRKPGRGLLTATGGVTC

SEQ ID NO: 197872 - protein, 317 aa, Zea Mays
MKNNIDVLVCKAEYYHQSGEYQKCFKLTSSLLERDPFHLKCTLVHLATAMELGHCNDLYLLACNLVKDYPQKALSWFAVGCYYYCIKKYDQARRYFGKATGLDGAFPPAWIGTGIAYAAQEEGDQAMAAFRTAARLFPGCHLPTLYMGMQYVRMHNFKLAEQFFTQAKSICPSDPLIHNELGVVAYNMKEYRKAVQLFELTLDHTSSSLNEMWEPTLVNLGHALRKLKEYQKAVSYYAKALTFPTKSLSAFAGLAYTYHLMDDFEAAINYYHKALWLKPDDQFCTDMLTYALESICQITARRKPGRGLLTATGGVTC

SEQ ID NO: 197873 - protein, 460 aa, Zea Mays
MLGDAKVDEHGNVLDHDVGSDIYFDKDAEDHEINIKSALCFLRGKAYEALDNRDLARQWYKAAVKADPLCYEAIECLVDNYMLTCEEEVELLSSLQFGEEDGWLSAFYSCLVTKHEKEYLVEAKFKELEQEACSISSSSSGETMKNNIDVLVCKAEYYHQSGEYQKCFKLTSSLLERDPFHLKCTLVHLATAMELGHCNDLYLLACNLVKDYPQKALSWFAVGCYYYCIKKYDQARRYFGKATGLDGAFPPAWIGTGIAYAAQEEGDQAMAAFRTAARLFPGCHLPTLYMGMQYVRMHNFKLAEQFFTQAKSICPSDPLIHNELGVVAYNMKEYRKAVQLFELTLDHTSSSLNEMWEPTLVNLGHALRKLKEYQKAVSYYAKALTFPTKSLSAFAGLAYTYHLMDDFEAAINYYHKALWLKPDDQFCTDMLTYALESICQITARRKPGRGLLTATGGVTC

SEQ ID NO: 197874 - protein, 422 aa, Zea Mays
MLGDAKVDEHGNVLDHDVGSDIYFDKDAEDHEINIKSALCFLRGKAYEALDNRDLARQWYKAAVKADPLCYEAIECLVDNYMLTCEEEVELLSSLQFGEEDGWLSAFYSCLVTKHEKEYLVEAKFKELEQEACSISSSSSGETMKNNIDVLVCKAEYYHQSGEYQKCFKLTSSLLERDPFHLKCTLVHLATAMELGHCNDLYLLACNLVKDYPQKALSWFAVGCYYYCIKKYDQARRYFGKATGLDGAFPPAWIGTGIAYAAQEEGDQAMAAFRTAARLFPGCHLPTLYMGMQYVRMHNFKLAEQFFTQAKSICPSDPLIHNELGVVAYNMKEEYQKAVSYYAKALTFPTKSLSAFAGLAYTYHLMDDFEAAINYYHKALWLKPDDQFCTDMLTYALESICQITARRKPGRGLLTATGGVTC

SEQ ID NO: 197875 - protein, 348 aa, Zea Mays
MLGDAKVDEHGNVLDHDVGSDIYFDKDAEDHEINIKSALCFLRGKAYEALDNRDLARQWYKAAVKADPLCYEAIECLVDNYMLTCEEEVELLSSLQFGEEDGWLSAFYSCLVTKHEKEYLVEAKFKELEQEACSISSSSSGETMKNNIDVLVCKAEYYHQSGEYQKCFKLTSSLLERDPFHLKCTLVHLATAMELGHCNDLYLLACNLVKDYPQKALSWFAVGCYYYCIKKYDQARRYFGKATGLDGAFPPAWIGTGIAYAAQEEGDQAMAAFRTAARLFPGCHLPTLYMGMQYVRMHNFKLAEQFFTQAKSICPSDPLIHNELGVVAYNMKEVRAPRTQPHPRREGT

SEQ ID NO: 197876 - protein, 117 aa, Zea Mays
MEVKRAVQSGNVQEAIEKINDLNPTQTFLEEIEKTVALLVFEDVKNCPYGELLDVSQRLKTASEVNAAILTSQSHEKDPKLPSLLKMLKWTQNQLDEKAAYPRINDFTTAALEDPSI

SEQ ID NO: 197877 - protein, 186 aa, Zea Mays
MLDPPLVLQEFINHGGILFKVYIIGETIQVVRRFSLPDVNTYDLLNNVGIYRLPRVSCAAASADDADLDPLIAELPPRPLLEKLGRELRGRLGLRLFNIDMIRELGTKDRYYIIDINYFPGYGKMPGYERMFTDFLLSLAQSKYKRYASPPRQCTFAGDISISGRLEEVGKSQCVCSKSVAHAGLE

SEQ ID NO: 197878 - protein, 257 aa, Zea Mays
MLEEVADLNLSNFYGEVCIPRQLVITKDPSSIPTSVAMAGLTLPLVAKPLVVDGTSKGHELYLAYDEASLSMLDPPLVLQEFINHGGILFKVYIIGETIQVVRRFSLPDVNTYDLLNNVGIYRLPRVSCAAASADDADLDPLIAELPPRPLLEKLGRELRGRLGLRLFNIDMIRELGTKDRYYIIDINYFPGYGKMPGYERMFTDFLLSLAQSKYKRYASPPRQCTFAGDISISGRLEEVGKSQCVCSKSVAHAGLE

SEQ ID NO: 197879 - protein, 320 aa, Zea Mays
MNRKNGISFVSIDESLPLSEQGPFDVILHKITRKEWQKVLEDYHEEHPEVTVLDPPNAIEHLNNRQSMLEEVADLNLSNFYGEVCIPRQLVITKDPSSIPTSVAMAGLTLPLVAKPLVVDGTSKGHELYLAYDEASLSMLDPPLVLQEFINHGGILFKVYIIGETIQVVRRFSLPDVNTYDLLNNVGIYRLPRVSCAAASADDADLDPLIAELPPRPLLEKLGRELRGRLGLRLFNIDMIRELGTKDRYYIIDINYFPGVSLFCHLYLGFVLFVSVLYLCPCKTCWAKLLPQPSVRSILTTNLWPSKPSLSVQESSRISS

SEQ ID NO: 197880 - protein, 230 aa, Zea Mays
MRLHAEVRDEMEEGSEEGAVTASAGLSPPPLIGAAAPVPRLVVGFALTKKKVKSFLQPKLLLLARKNGISFVSIDESLPLSEQGPFDVILHKITRKEWQKVLEDYHEEHPEVTVLDPPNAIEHLNNRQSMLEEVADLNLSNFYGEVCIPRQLVITKDPSSIPTSVAMAGLTLPLVAKPLVVDGTSKGHELYLAYDEASLSMLDPPLVLQEFINHVEMWDLIYCLYRRDPL

SEQ ID NO: 197881 - protein, 382 aa, Zea Mays
MRLHAEVRDEMEEGSEEGAVTASAGLSPPPLIGAAAPVPRLVVGFALTKKKVKSFLQPKLLLLARKNGISFVSIDESLPLSEQGPFDVILHKITRKEWQKVLEDYHEEHPEVTVLDPPNAIEHLNNRQSMLEEVADLNLSNFYGEVCIPRQLVITKDPSSIPTSVAMAGLTLPLVAKPLVVDGTSKGHELYLAYDEASLSMLDPPLVLQEFINHGGILFKVYIIGETIQVVRRFSLPDVNTYDLLNNVGIYRLPRVSCAAASADDADLDPLIAELPPRPLLEKLGRELRGRLGLRLFNIDMIRELGTKDRYYIIDINYFPGVSLFCHLYLGFVLFVSVLYLCPCKTCWAKLLPQPSVRSILTTNLWPSKPSLSVQESSRISS

SEQ ID NO: 197882 - protein, 226 aa, Zea Mays
MRLHAEVRDEMEEGSEEGAVTASAGLSPPPLIGAAAPVPRLVVGFALTKKKVKSFLQPKLLLLARKNGISFVSIDESLPLSEQGPFDVILHKITRKEWQKVLEDYHEEHPEVTVLDPPNAIEHLNNRQSMLEEVADLNLSNFYGEVCIPRQLVITKDPSSIPTSVAMAGLTLPLVAKPLVVDGTSKGHELYLAYDEASLSMLDPPLVLQEFINHGSLFLMLTHMTY

SEQ ID NO: 197883 - protein, 295 aa, Zea Mays
MRLHAEVRDEMEEGSEEGAVTASAGLSPPPLIGAAAPVPRLVVGFALTKKKVKSFLQPKLLLLARKNGISFVSIDESLPLSEQGPFDVILHKITRKEWQKVLEDYHEEHPEVTVLDPPNAIEHLNNRQSMLEEVADLNLSNFYGEVCIPRQLVITKDPSSIPTSVAMAGLTLPLVAKPLVVDGTSKGHELYLAYDEASLSMLDPPLVLQEFINHGGILFKVYIIGETIQVVRRFSLPDVNTYDLLNNVGIYRLPRVSCAAASADDADLDPLIAELPPRPLLEKLGRELRGRLLKP

SEQ ID NO: 197884 - protein, 359 aa, Zea Mays
MRQKAASLPNVQLEQGTVTSLLEENGTVKGVQYKTKSGEELKAYAPLTIVCDGCFSNLRRALCSPKVDVPSCFIGLVLENCQLPHPNHGHVILANPSPILFYPISSTEVRCLVDVPGQKVPSIASGEMANYLKTVVAPQIPPEIYDSFIAAIDKGSIRTMPNRSMPAAPLPTPGALLMGDAFNMRHPLTGGGMTVALSDIVVLRNLLKPLRNLHDASSLCKYLESFYTLRKPVASTINTLAGALYKVFSASPDQARNEMRQACFDYLSLGGVFSNGPIALLSGLNPRPLSLVAHFFAVAIYGVGRLMLPLPSPKRMWIGARLISGACGIILPIIKAEGVRQMFFPATVPAYYRAAPTGE

SEQ ID NO: 197885 - protein, 230 aa, Zea Mays
MMYSPPRTDPDREDEQCFAIGANLLSSLDHTMKFDEPIAFPMNNVGMQERVQLYNSTGDAQLSRNANTGKCSKGGKRKSSGGINSSLHSLDEARALLQREVSMECADENAAGAKREDYAHVRAKRGQATNSHSLAERFRREKINVRMKLLQDLVPGCNKITGKAMMLDEIINYVQSLQRQVEFLSMKLSAIRPGFNRDLELQDVRLRDPLHTRCQLRFSRIQPASERCAS

SEQ ID NO: 197886 - protein, 213 aa, Zea Mays
MMYSPPRTDPDREDEQCFAIGANLLSSLDHTMKFDEPIAFPMNNVGMQERVQLYNSTGDAQLSRNANTGKCSKGGKRKSSGGINSSLHSLDEARALLQREVSMECADENAAGAKREDYAHVRAKRGQATNSHSLAERFRREKINVRMKLLQDLVPGCNKITGKAMMLDEIINYVQSLQRQVEFLSMKLSAIRPGFNRDLELQDVRLRGSFDSG

SEQ ID NO: 197887 - protein, 59 aa, Zea Mays
MCFPVSSFFGSPLPLSPFSFLWGLSSEVFIWVSSLAYPNVLGTKRLCCCCCCCCVACLS

SEQ ID NO: 197888 - protein, 77 aa, Zea Mays
MVTTSETTSSDRSGMNNNLWLSEDLVSDFTSRFKEHGSSEALDGILLVLVWSSSSPASFRSTDIVQEPSSITKKKKI

SEQ ID NO: 197889 - protein, 152 aa, Zea Mays
MCLRRDRELSLKAFEVFALTSSSFRSSNRGLLEACWMNATDQDDWVKLSEASMSEGWSDEVIEESLQATVLFKASRLCYSPDAVVYDGTFEDVLPVKKEDVHLRGLESKCLSVEEVLMQHEDFPDAGKLMMTAVIRGKEPIFTATEPVEMDS

SEQ ID NO: 197890 - protein, 387 aa, Zea Mays
MKNLHLAGAQDFHTLSKRIKIVEPQKESRNGADKPDLKESILREVISPILATAKRHEGYQTLWQICYDLDDSGLLRSLMHDSVGPHGGFSFFVFKELVNRGDYSNLLRLGEEFQEELASFLKERSDLLWVHEICLNQFSSASDTLHTYALRRSPDGDASFTTSRKPLSFAERRRLLYLSKIAATAGKDIDYEVKVARIEADIRILKLQEEIVQHDPEYAQVKSTNTLLGPSELIEMCLRRDRELSLKAFEVFALTSSSFRSSNRGLLEACWMNATDQDDWVKLSEASMSEGWSDEVIEESLQATVLFKASRLCYSPDAVVYDGTFEDVLPVKKEDVHLRGLESKCLSVEEVLMQHEDFPDAGKLMMTAVIRGKEPIFTATEPVEMDS
